United States Patent Application Publication US 2007/0214517 A1 - sequence listing, part 7

SEQ ID NO: 8500 - protein, 420 aa, Zea mays subsp. mays
  peptide (1)..(420): Ceres Seq. ID no. 12408438
  misc_feature (194)..(266): Pfam Name: RNA recognition motif. (a.k.a. RRM, RBD, or RNP domain) Pfam Description: RNA recognition motif. (a.k.a. RRM, RBD, or RNP
  misc_feature (38)..(413): Homolog of NCBI NO: 15594035 NR Description: nucleic acid binding protein [Nicotiana tabacum]
  misc_feature (38)..(292): Homolog of NCBI NO: 9663769 NR Description: RNA Binding Protein 47 [Nicotiana plumbaginifolia]
  misc_feature (278)..(420): Homolog of NCBI NO: 9663769 NR Description: RNA Binding Protein 47 [Nicotiana plumbaginifolia]
  misc_feature (37)..(417): Homolog of NCBI NO: 34896988 NR Description: putative RNA binding protein [Oryza sativa]
  misc_feature (80)..(292): Homolog of NCBI NO: 7489196 NR Description: RNA binding protein homolog - common tobacco >gi|2708532|gb|AAB92518.1| putative RNA binding protein
  misc_feature (278)..(420): Homolog of NCBI NO: 7489196 NR Description: RNA binding protein homolog - common tobacco >gi|2708532|gb|AAB92518.1| putative RNA binding protein
  misc_feature (1)..(420): Homolog of NCBI NO: 15220241 NR Description: RNA binding protein 47 (RBP47), putative; protein At1g47500.1 [Arabidopsis thaliana] >gi|25386564|pir||C96515
  misc_feature (80)..(292): Homolog of NCBI NO: 7489112 NR Description: DNA binding protein ACBF - common tobacco
  misc_feature (278)..(420): Homolog of NCBI NO: 7489112 NR Description: DNA binding protein ACBF - common tobacco
  misc_feature (1)..(420): Homolog of NCBI NO: 15220233 NR Description: RNA binding protein 47 (RBP47), putative; protein At1g47490.1, supported by cDNA: gi_12744992, supported by cDNA: supported by cDNA: gi_17065623 [Arabidopsis thaliana] 3 PF|00076
MQMAATTTESQPAVPPQHPHAHPHAPPQHAHPHHHMPQPRWVVIPYPPPPPMVAAPPPPPQFAKHFAAGPPPPPQAGAGRRTPTPPSSGSGGNGCEENKTIWVGDLQYWMDENYLHNCFGPSGEVVTIKVIRNRQTGQSEGYGFVEFFSHASAEKALQNFTGHVMPNTDRPFKLNWASYSMGEKRSEVASDHSIFVGDLAADVTDEMLLELFSSKYRSVKGAKVIIDANTGRSRGYGFVRFGDDNDKSHAMSEMNGVYCSTRPIRIGPATPRRSSGDSGSSTPGHSDGDSSNRTVYVGGLDPNVSEDELRKAFAKYDLASVKIPLGKQCGFVQFVSRTDAEEALQGLNGSLIGKQAVRLSWVRSPSHKQSRGDSVNRRNNMYYGTPFYGGYGYASPVPHPNMYAAAYGTYPLYGNQQLVS

SEQ ID NO: 8501 - protein, 418 aa, Zea mays subsp. mays
  peptide (1)..(418): Ceres Seq. ID no. 12408439
  misc_feature (192)..(264): Pfam Name: RNA recognition motif. (a.k.a. RRM, RBD, or RNP domain) Pfam Description: RNA recognition motif. (a.k.a. RRM, RBD, or RNP
  misc_feature (36)..(411): Homolog of NCBI NO: 15594035 NR Description: nucleic acid binding protein [Nicotiana tabacum]
  misc_feature (36)..(290): Homolog of NCBI NO: 9663769 NR Description: RNA Binding Protein 47 [Nicotiana plumbaginifolia]
  misc_feature (276)..(418): Homolog of NCBI NO: 9663769 NR Description: RNA Binding Protein 47 [Nicotiana plumbaginifolia]
  misc_feature (35)..(415): Homolog of NCBI NO: 34896988 NR Description: putative RNA binding protein [Oryza sativa]
  misc_feature (78)..(290): Homolog of NCBI NO: 7489196 NR Description: RNA binding protein homolog - common tobacco >gi|2708532|gb|AAB92518.1| putative RNA binding protein
  misc_feature (276)..(418): Homolog of NCBI NO: 7489196 NR Description: RNA binding protein homolog - common tobacco >gi|2708532|gb|AAB92518.1| putative RNA binding protein
  misc_feature (1)..(418): Homolog of NCBI NO: 15220241 NR Description: RNA binding protein 47 (RBP47), putative; protein At1g47500.1 [Arabidopsis thaliana] >gi|25386564|pir||C96515
  misc_feature (78)..(290): Homolog of NCBI NO: 7489112 NR Description: DNA binding protein ACBF - common tobacco
  misc_feature (276)..(418): Homolog of NCBI NO: 7489112 NR Description: DNA binding protein ACBF - common tobacco
  misc_feature (1)..(418): Homolog of NCBI NO: 15220233 NR Description: RNA binding protein 47 (RBP47), putative; protein At1g47490.1, supported by cDNA: gi_12744992, supported by cDNA: supported by cDNA: gi_17065623 [Arabidopsis thaliana] 3 PF|00076
MAATTTESQPAVPPQHPHAHPHAPPQHAHPHHHMPQPRWVVIPYPPPPPMVAAPPPPPQFAKHFAAGPPPPPQAGAGRRTPTPPSSGSGGNGCEENKTIWVGDLQYWMDENYLHNCFGPSGEVVTIKVIRNRQTGQSEGYGFVEFFSHASAEKALQNFTGHVMPNTDRPFKLNWASYSMGEKRSEVASDHSIFVGDLAADVTDEMLLELFSSKYRSVKGAKVIIDANTGRSRGYGFVRFGDDNDKSHAMSEMNGVYCSTRPIRIGPATPRRSSGDSGSSTPGHSDGDSSNRTVYVGGLDPNVSEDELRKAFAKYDLASVKIPLGKQCGFVQFVSRTDAEEALQGLNGSLIGKQAVRLSWVRSPSHKQSRGDSVNRRNNMYYGTPFYGGYGYASPVPHPNMYAAAYGTYPLYGNQQLVS

SEQ ID NO: 8502 - DNA, 1930 bp, Zea mays subsp. mays
  misc_feature (1)..(1930): Ceres Seq. ID no. 12566856
  misc_feature: MA Experiment ID: 20000492 Result: Down-regulated in Transcription
  misc_feature: MA Experiment 20000492 PARAMETER Experiment Name: Zm_Hybrid_Seed_Dev_P Parameter: DAP Value: 12
  misc_feature: MA Experiment 20000492 PARAMETER Experiment Name: Zm_Hybrid_Seed_Dev_P Parameter: Organism Value: Zea mays
  misc_feature: MA Experiment 20000492 PARAMETER Experiment Name: Zm_Hybrid_Seed_Dev_P Parameter: Plant Line Value: 35A19
  misc_feature: MA Experiment 20000492 PARAMETER Experiment Name: Zm_Hybrid_Seed_Dev_P Parameter: Tissue Value: Fert Kernel vs. Unfert Floret
gcacgagaccattacctagaacatcctaatcaaaaaaatttctcgcggcgtcgttccgtcccaaatatcgccccgcgatcccccacctcgccgactggctcccccgctccacctcgtcgacgggcagaggagacccctcagggccgggatcggactcctctttcaccgccaacgcataccagtgatgaagatcttccgctgaagcttgctcaagctgcaataaagcatgacggttgtgcacataatgatgcttaatcattcatgttgcgaaaccctccagtggaacttccttcttctgatgcaaccatgtataggtggacctagttttgaggtggatgcgctgagttttgaaggtggcgagggatctttgctgcggggttctatttgttctcagtgatttttggcaaacactctttggttagattaagaatcatggaaaggtacaaattgatacggaagataggtgatggaacctgtgggaatgtttttatggcttctaatgtagaaactaatgaaattgttgctgttaaaaaaatgaagagaaaattttgtcattgggaagaatgtattagtctgcgagaagtgaaggcccttcagaaactatttcaccctaacattgtgaagctgaaggaagtgacgatggaaaaccatgagctgttcttcatctttgaacacatggagtgcaatttatatgatgtcataagggaaaggcaagttgctttccctgaaagggatataaggaactttatggtccagatactgcaaggtcttgcatatatgcataataatgggtattttcaccgtgatttaaaacctgagaatttgttggtgacaaatggtattattaaaattgctgactttgggttggcaagagaaatatcttccaatcctccttacactgattatgtttccaccagatggtatcgggctccagaggttctactgcaatcttcagtttatacacctgctattgacatgtgggcggttggtgctattttggctgagctttttacactgtccccactttttcctggtgaaagtgaaactgaccagctttacaaaatatgcactgtgcttgggacccctgattgcactatttggccagagggaatgaacctgcctcgttcatgcagctttaagttttttcagaatcctccaagaaacttatgggagcttattcctaatgcttcatctgaagcaatcgatttgatccagcaactttgttcctgggatcctcgaaggaggccaactgctgagcaagcattacaacatcctttcttcaatgtatgcaattgggtaccaagacctgtacatgatgcttaccatacaaaaacaaacggacctaaagctgaaccaagattggaactgaacctgtgggatttcagcacagaacctgatgattgtgtccttgatttaactctcagtctgaagccaagtttttctggaacagaccttggtaagcatgttccacgacgtacagaagaggaaattctcctgtacccgggatttgagaatacccctgtgaagtccggtttttggcctctggtgccatctgatcgtcccgttggtgatgttccggccataccatcctggcagcaggcgtacatggttgacagccaaggcgcattttctggctctccgttcttgcagtcgaacctgttggagaaccgttcgttagcacctatccggcaggtgaatttcttctgacggagacaggattaacagattcatacgattcttgatacgtccagcttctcgctgtatacacactatcttgaataaagtgttgccagtagaggaaatgtatatacagttcgttcgtagctcttgagcttctttctttctagagtacctctttttttttaatcgtctgttcatattccacaccactcctatgtaaataacggcatgcatgataatctctctccct

SEQ ID NO: 8503 - protein, 424 aa, Zea mays subsp. mays
  peptide (1)..(424): Ceres Seq. ID no. 12566857
  misc_feature (4)..(283): Pfam Name: Protein kinase domain Pfam Description: Protein kinase domain
  misc_feature (1)..(424): Homolog of NCBI NO: 34897492 NR Description: putative protein kinase [Oryza sativa (japonica group)] >gi|29244698|gb|AAO73290.1| putative protein kinase
  misc_feature (1)..(386): Homolog of NCBI NO: 7710959 NR Description: putative Cdc2-related protein kinase CRK2 [Beta
  misc_feature (1)..(423): Homolog of NCBI NO: 30682312 NR Description: serine/threonine protein kinase (MHK)
  misc_feature (1)..(423): Homolog of NCBI NO: 481207 NR Description: serine/threonine-specific protein kinase MHK (EC
  misc_feature (1)..(423): Homolog of NCBI NO: 15235551 NR Description: serine/threonine-specific protein kinase MHK; id: At4g13020.1, supported by cDNA: gi_166810 [Arabidopsis
  misc_feature (1)..(309): Homolog of NCBI NO: 18415242 NR Description: kinase-like protein; protein id: At4g19110.1, by cDNA: gi_13430555, supported by cDNA: gi_14532759 [Arabidopsis >gi|13430556|gb|AAK25900.1|AF360190_1 putative kinase
  misc_feature (1)..(309): Homolog of NCBI NO: 30684655 NR Description: protein kinase, putative [Arabidopsis thaliana]
  misc_feature (1)..(290): Homolog of NCBI NO: 15450860 NR Description: serine/threonine-protein kinase Mak (male germ
  misc_feature (1)..(290): Homolog of NCBI NO: 27948450 NR Description: GAMYB-binding protein [Hordeum vulgare subsp.
  misc_feature (1)..(290): Homolog of NCBI NO: 18422554 NR Description: serine/threonine-protein kinase Mak (male germ
MERYKLIRKIGDGTCGNVFMASNVETNEIVAVKKMKRKFCHWEECISLREVKALQKLFHPNIVKLKEVTMENHELFFIFEHMECNLYDVIRERQVAFPERDIRNFMVQILQGLAYMHNNGYFHRDLKPENLLVTNGIIKIADFGLAREISSNPPYTDYVSTRWYRAPEVLLQSSVYTPAIDMWAVGAILAELFTLSPLFPGESETDQLYKICTVLGTPDCTIWPEGMNLPRSCSFKFFQNPPRNLWELIPNASSEAIDLIQQLCSWDPRRRPTAEQALQHPFFNVCNWVPRPVHDAYHTKTNGPKAEPRLELNLWDFSTEPDDCVLDLTLSLKPSFSGTDLGKHVPRRTEEEILLYPGFENTPVKSGFWPLVPSDRPVGDVPAIPSWQQAYMVDSQGAFSGSPFLQSNLLENRSLAPIRQVNFF

SEQ ID NO: 8504 - protein, 405 aa, Zea mays subsp. mays
  peptide (1)..(405): Ceres Seq. ID no. 12566858
  misc_feature (1)..(264): Pfam Name: Protein kinase domain Pfam Description: Protein kinase domain
  misc_feature (1)..(405): Homolog of NCBI NO: 34897492 NR Description: putative protein kinase [Oryza sativa (japonica group)] >gi|29244698|gb|AAO73290.1| putative protein kinase
  misc_feature (1)..(367): Homolog of NCBI NO: 7710959 NR Description: putative Cdc2-related protein kinase CRK2 [Beta
  misc_feature (1)..(404): Homolog of NCBI NO: 30682312 NR Description: serine/threonine protein kinase (MHK)
  misc_feature (1)..(404): Homolog of NCBI NO: 481207 NR Description: serine/threonine-specific protein kinase MHK (EC
  misc_feature (1)..(404): Homolog of NCBI NO: 15235551 NR Description: serine/threonine-specific protein kinase MHK; id: At4g13020.1, supported by cDNA: gi_166810 [Arabidopsis
  misc_feature (1)..(290): Homolog of NCBI NO: 18415242 NR Description: kinase-like protein; protein id: At4g19110.1, by cDNA: gi_13430555, supported by cDNA: gi_14532759 [Arabidopsis >gi|13430556|gb|AAK25900.1|AF360190_1 putative kinase
  misc_feature (1)..(290): Homolog of NCBI NO: 30684655 NR Description: protein kinase, putative [Arabidopsis thaliana]
  misc_feature (1)..(271): Homolog of NCBI NO: 15450860 NR Description: serine/threonine-protein kinase Mak (male germ
  misc_feature (1)..(271): Homolog of NCBI NO: 27948450 NR Description: GAMYB-binding protein [Hordeum vulgare subsp.
  misc_feature (1)..(271): Homolog of NCBI NO: 18422554 NR Description: serine/threonine-protein kinase Mak (male germ
MASNVETNEIVAVKKMKRKFCHWEECISLREVKALQKLFHPNIVKLKEVTMENHELFFIFEHMECNLYDVIRERQVAFPERDIRNFMVQILQGLAYMHNNGYFHRDLKPENLLVTNGIIKIADFGLAREISSNPPYTDYVSTRWYRAPEVLLQSSVYTPAIDMWAVGAILAELFTLSPLFPGESETDQLYKICTVLGTPDCTIWPEGMNLPRSCSFKFFQNPPRNLWELIPNASSEAIDLIQQLCSWDPRRRPTAEQALQHPFFNVCNWVPRPVHDAYHTKTNGPKAEPRLELNLWDFSTEPDDCVLDLTLSLKPSFSGTDLGKHVPRRTEEEILLYPGFENTPVKSGFWPLVPSDRPVGDVPAIPSWQQAYMVDSQGAFSGSPFLQSNLLENRSLAPIRQVNFF

SEQ ID NO: 8505 - protein, 390 aa, Zea mays subsp. mays
  peptide (1)..(390): Ceres Seq. ID no. 12566859
  misc_feature (1)..(249): Pfam Name: Protein kinase domain Pfam Description: Protein kinase domain
  misc_feature (1)..(390): Homolog of NCBI NO: 34897492 NR Description: putative protein kinase [Oryza sativa (japonica group)] >gi|29244698|gb|AAO73290.1| putative protein kinase
  misc_feature (1)..(352): Homolog of NCBI NO: 7710959 NR Description: putative Cdc2-related protein kinase CRK2 [Beta
  misc_feature (1)..(389): Homolog of NCBI NO: 30682312 NR Description: serine/threonine protein kinase (MHK)
  misc_feature (1)..(389): Homolog of NCBI NO: 481207 NR Description: serine/threonine-specific protein kinase MHK (EC
  misc_feature (1)..(389): Homolog of NCBI NO: 15235551 NR Description: serine/threonine-specific protein kinase MHK; id: At4g13020.1, supported by cDNA: gi_166810 [Arabidopsis
  misc_feature (1)..(275): Homolog of NCBI NO: 18415242 NR Description: kinase-like protein; protein id: At4g19110.1, by cDNA: gi_13430555, supported by cDNA: gi_14532759 [Arabidopsis >gi|13430556|gb|AAK25900.1|AF360190_1 putative kinase
  misc_feature (1)..(275): Homolog of NCBI NO: 30684655 NR Description: protein kinase, putative [Arabidopsis thaliana]
  misc_feature (1)..(256): Homolog of NCBI NO: 15450860 NR Description: serine/threonine-protein kinase Mak (male germ
  misc_feature (1)..(256): Homolog of NCBI NO: 18422554 NR Description: serine/threonine-protein kinase Mak (male germ
  misc_feature (1)..(256): Homolog of NCBI NO: 27948450 NR Description: GAMYB-binding protein [Hordeum vulgare subsp.
MKRKFCHWEECISLREVKALQKLFHPNIVKLKEVTMENHELFFIFEHMECNLYDVIRERQVAFPERDIRNFMVQILQGLAYMHNNGYFHRDLKPENLLVTNGIIKIADFGLAREISSNPPYTDYVSTRWYRAPEVLLQSSVYTPAIDMWAVGAILAELFTLSPLFPGESETDQLYKICTVLGTPDCTIWPEGMNLPRSCSFKFFQNPPRNLWELIPNASSEAIDLIQQLCSWDPRRRPTAEQALQHPFFNVCNWVPRPVHDAYHTKTNGPKAEPRLELNLWDFSTEPDDCVLDLTLSLKPSFSGTDLGKHVPRRTEEEILLYPGFENTPVKSGFWPLVPSDRPVGDVPAIPSWQQAYMVDSQGAFSGSPFLQSNLLENRSLAPIRQVNFF

SEQ ID NO: 8506 - DNA, 1511 bp, Zea mays subsp. mays
  misc_feature (1)..(1511): Ceres Seq. ID no. 12566628
  misc_feature: MA Experiment ID: 20000535 Result: Up-regulated in Transcription
  misc_feature: MA Experiment 20000535 PARAMETER Experiment Name: Zm_Hybrid_Seed_Dev_P Parameter: DAP Value: 30 vs. 12
  misc_feature: MA Experiment 20000535 PARAMETER Experiment Name: Zm_Hybrid_Seed_Dev_P Parameter: Organism Value: Zea mays
  misc_feature: MA Experiment 20000535 PARAMETER Experiment Name: Zm_Hybrid_Seed_Dev_P Parameter: Plant Line Value: 35A19
  misc_feature: MA Experiment 20000535 PARAMETER Experiment Name: Zm_Hybrid_Seed_Dev_P Parameter: Tissue Value: Embryo vs. Unfert Floret
aaagtcaaaagggcaagagggggcaaaaagggagaaatttcctctcacaaaaccctcgccagcttatcccccttcctccctcacacgatctctcctcgacggctaacccggattgccgtctcaggctcgggatccgggcgctcgcggtgatggacggcggcggcggcgctggcggcgcggagggggagctcacggcgcaggagacagcgctctacgaccgccagatccgcgtctggggcgtcgatgcccagaagagactaagtaaggcgcacgtgcttgtgtgtggcatgaacggaaccaccatcgagttctgcaagaatattgttctagctggagttggaagtttatccttgatggatgataatgtagtcacagaggaggatctgaatgcaaatttcctaattcctcctgatgagagcatatatggtggtagatctcgagcccaagtttgctgcgagtctttgatagatttcaatcctatggttcgagtttctgttgaaaagggtgatccatcattaattgatggagaattccttgacaagtttgacattgttgtacttagccgtgcatctcttaaaacaaagttgttgattaatgaaaactgtcgaaagagaagcaaacacattgcattttatactatagattgcaaggattcatgtggtgaaatatttgttgacttacagaagcatagctatgttcagaaaaagcctggaggagcaactgaacaacaggagttgacatattctagtcttcaggaagctatctctgtgccttggaatagtctaccgaagaagacggcaaaattatactttgctatgagagtactggaggattatgaattatctgaagggcgcagccctggcgaaacaacactttctgatatagatgcagttctggctcggaggaaggatatgtgtgataaaatgtctttgaatgagtctcgtattcctactactctcgtggaacgactgctagcagctggaaagaaggagcatcctcctgtatgtgctatccttggtggtattcttggtcaggaggtgatcaaatcgatatcctgcaagggcgatccagtcaagaatttcttctatttcgatgtggctgacggtaaaggtgtcatcgaggatatcccaccaccaccacctgcaaaataaagcactcagctgtgtaactctcgactcgacttggttcactaatcgttttctgtacccactcagcttcgaacatgtagcaacttttagatctagagccatgtgaaaaaaggcaagtttgactttaacccagatgtttagggattgttcgagcagcaaactgtgacagtatgtatgcatcgacaatttaaagctgaagtctggacggtttccatgcttttgggggcggatttcctttgttgtccctttacccatttgtcaaatttggtagcggtggttggggggagtggggaatgaagtgagaaggctatgtttataactgtgaaccgacggttgcagctatacatatcgtcatgcctgtgc

SEQ ID NO: 8507 - protein, 382 aa, Zea mays subsp. mays
  peptide (1)..(382): Ceres Seq. ID no. 12566629
  misc_feature (87)..(225): Pfam Name: ThiF family Pfam Description: ThiF family
  misc_feature (62)..(375): Homolog of NCBI NO: 30695912 NR Description: SUMO activating enzyme 1b (SAE1b) [Arabidopsis
  misc_feature (62)..(375): Homolog of NCBI NO: 7488411 NR Description: ubiquitin-activating enzyme homolog F13M23.80 -
  misc_feature (62)..(375): Homolog of NCBI NO: 21554965 NR Description: ubiquitin activating enzyme [Arabidopsis thaliana]
  misc_feature (62)..(375): Homolog of NCBI NO: 3647283 NR Description: ubiquitin activating enzyme [Lycopersicon
  misc_feature (62)..(375): Homolog of NCBI NO: 22652852 NR Description: SUMO activating enzyme 1b [Arabidopsis thaliana]
  misc_feature (62)..(375): Homolog of NCBI NO: 18423184 NR Description: ubiquitin activating enzyme; protein id: supported by cDNA: gi_20259426 [Arabidopsis thaliana] ubiquitin activating enzyme [Arabidopsis thaliana]
  misc_feature (62)..(375): Homolog of NCBI NO: 18416454 NR Description: ubiquitin activating enzyme - like protein; id: At4g24940.1, supported by cDNA: 25830., supported by cDNA:
  misc_feature (143)..(375): Homolog of NCBI NO: 25494393 NR Description: probable ubiquitin activating enzyme 2 [imported] Picea mariana (fragment) >gi|2982309|gb|AAC32140.1| probable
  misc_feature (52)..(235): Homolog of NCBI NO: 9790247 NR Description: ubiquitin-like 1 (sentrin) activating enzyme
  misc_feature (242)..(377): Homolog of NCBI NO: 9790247 NR Description: ubiquitin-like 1 (sentrin) activating enzyme
SQKGKRGQKGRNFLSQNPRQLIPLPPSHDLSSTANPDCRLRLGIRALAVMDGGGGAGGAEGELTAQETALYDRQIRVWGVDAQKRLSKAHVLVCGMNGTTIEFCKNIVLAGVGSLSLMDDNVVTEEDLNANFLIPPDESIYGGRSRAQVCCESLIDFNPMVRVSVEKGDPSLIDGEFLDKFDIVVLSRASLKTKLLINENCRKRSKHIAFYTIDCKDSCGEIFVDLQKHSYVQKKPGGATEQQELTYSSLQEAISVPWNSLPKKTAKLYFAMRVLEDYELSEGRSPGETTLSDIDAVLARRKDMCDKMSLNESRIPTTLVERLLAAGKKEHPPVCAILGGILGQEVIKSISCKGDPVKNFFYFDVADGKGVIEDIPPPPPAK

SEQ ID NO: 8508 - protein, 333 aa, Zea mays subsp. mays
  peptide (1)..(333): Ceres Seq. ID no. 12566630
  misc_feature (38)..(176): Pfam Name: ThiF family Pfam Description: ThiF family
  misc_feature (13)..(326): Homolog of NCBI NO: 18416454 NR Description: ubiquitin activating enzyme - like protein; id: At4g24940.1, supported by cDNA: 25830., supported by cDNA:
  misc_feature (13)..(326): Homolog of NCBI NO: 22652852 NR Description: SUMO activating enzyme 1b [Arabidopsis thaliana]
  misc_feature (13)..(326): Homolog of NCBI NO: 18423184 NR Description: ubiquitin activating enzyme; protein id: supported by cDNA: gi_20259426 [Arabidopsis thaliana] ubiquitin activating enzyme [Arabidopsis thaliana]
  misc_feature (13)..(326): Homolog of NCBI NO: 30695912 NR Description: SUMO activating enzyme 1b (SAE1b) [Arabidopsis
  misc_feature (13)..(326): Homolog of NCBI NO: 7488411 NR Description: ubiquitin-activating enzyme homolog F13M23.80 -
  misc_feature (13)..(326): Homolog of NCBI NO: 21554965 NR Description: ubiquitin activating enzyme [Arabidopsis thaliana]
  misc_feature (13)..(326): Homolog of NCBI NO: 3647283 NR Description: ubiquitin activating enzyme [Lycopersicon
  misc_feature (94)..(326): Homolog of NCBI NO: 25494393 NR Description: probable ubiquitin activating enzyme 2 [imported] Picea mariana (fragment) >gi|2982309|gb|AAC32140.1| probable
  misc_feature (3)..(186): Homolog of NCBI NO: 9790247 NR Description: ubiquitin-like 1 (sentrin) activating enzyme
  misc_feature (193)..(328): Homolog of NCBI NO: 9790247 NR Description: ubiquitin-like 1 (sentrin) activating enzyme
MDGGGGAGGAEGELTAQETALYDRQIRVWGVDAQKRLSKAHVLVCGMNGTTIEFCKNIVLAGVGSLSLMDDNVVTEEDLNANFLIPPDESIYGGRSRAQVCCESLIDFNPMVRVSVEKGDPSLIDGEFLDKFDIVVLSRASLKTKLLINENCRKRSKHIAFYTIDCKDSCGEIFVDLQKHSYVQKKPGGATEQQELTYSSLQEAISVPWNSLPKKTAKLYFAMRVLEDYELSEGRSPGETTLSDIDAVLARRKDMCDKMSLNESRIPTTLVERLLAAGKKEHPPVCAILGGILGQEVIKSISCKGDPVKNFFYFDVADGKGVIEDIPPPPPAK

SEQ ID NO: 8509 - protein, 287 aa, Zea mays subsp. mays
  peptide (1)..(287): Ceres Seq. ID no. 12566631
  misc_feature (1)..(130): Pfam Name: ThiF family Pfam Description: ThiF family
  misc_feature (1)..(280): Homolog of NCBI NO: 18416454 NR Description: ubiquitin activating enzyme - like protein; id: At4g24940.1, supported by cDNA: 25830., supported by cDNA:
  misc_feature (1)..(280): Homolog of NCBI NO: 22652852 NR Description: SUMO activating enzyme 1b [Arabidopsis thaliana]
  misc_feature (1)..(280): Homolog of NCBI NO: 18423184 NR Description: ubiquitin activating enzyme; protein id: supported by cDNA: gi_20259426 [Arabidopsis thaliana] ubiquitin activating enzyme [Arabidopsis thaliana]
  misc_feature (1)..(280): Homolog of NCBI NO: 30695912 NR Description: SUMO activating enzyme 1b (SAE1b) [Arabidopsis
  misc_feature (1)..(280): Homolog of NCBI NO: 7488411 NR Description: ubiquitin-activating enzyme homolog F13M23.80 -
  misc_feature (1)..(280): Homolog of NCBI NO: 21554965 NR Description: ubiquitin activating enzyme [Arabidopsis thaliana]
  misc_feature (1)..(280): Homolog of NCBI NO: 3647283 NR Description: ubiquitin activating enzyme [Lycopersicon
  misc_feature (48)..(280): Homolog of NCBI NO: 25494393 NR Description: probable ubiquitin activating enzyme 2 [imported] Picea mariana (fragment) >gi|2982309|gb|AAC32140.1| probable
  misc_feature (1)..(140): Homolog of NCBI NO: 9790247 NR Description: ubiquitin-like 1 (sentrin) activating enzyme
  misc_feature (147)..(282): Homolog of NCBI NO: 9790247 NR Description: ubiquitin-like 1 (sentrin) activating enzyme
MNGTTIEFCKNIVLAGVGSLSLMDDNVVTEEDLNANFLIPPDESIYGGRSRAQVCCESLIDFNPMVRVSVEKGDPSLIDGEFLDKFDIVVLSRASLKTKLLINENCRKRSKHIAFYTIDCKDSCGEIFVDLQKHSYVQKKPGGATEQQELTYSSLQEAISVPWNSLPKKTAKLYFAMRVLEDYELSEGRSPGETTLSDIDAVLARRKDMCDKMSLNESRIPTTLVERLLAAGKKEHPPVCAILGGILGQEVIKSISCKGDPVKNFFYFDVADGKGVIEDIPPPPPAK

SEQ ID NO: 8510 - DNA, 1711 bp, Zea mays subsp. mays
  misc_feature (1)..(1711): Ceres Seq. ID no. 12566632
  misc_feature: MA Experiment ID: 108559 Result: Up-regulated in Transcription
  misc_feature: MA Experiment 108559 PARAMETER Experiment Name: Zm_5mM_NO_P Parameter: Age (day) Value: 8
  misc_feature: MA Experiment 108559 PARAMETER Experiment Name: Zm_5mM_NO_P Parameter: Organism Value: Zea mays
  misc_feature: MA Experiment 108559 PARAMETER Experiment Name: Zm_5mM_NO_P Parameter: Plant Line Value: 35A19
  misc_feature: MA Experiment 108559 PARAMETER Experiment Name: Zm_5mM_NO_P Parameter: Timepoint (hr) Value: 12
  misc_feature: MA Experiment 108559 PARAMETER Experiment Name: Zm_5mM_NO_P Parameter: Tissue Value: Aerial
  misc_feature: MA Experiment 108559 PARAMETER Experiment Name: Zm_5mM_NO_P Parameter: Treatment Value: 5mM NO vs. No Treatment
cgttctgagtgaaaccattctccgttcaacgtgtactggtctaccccgggcccggtccgcaccccgccgtcgcacccgcacggcacccccttcgtcccttccgcaagaaaggaaacgagagagaaaatcgagtgaaaaggaagggaaacaacataacaaatcgcaaagaggcgtcttccaagtttgtagggttaccggatcggaggagcatccccgcctaggtcaccacagccatggttcgcggatcgctaggcaagcttgcgtcgcgcgccctctccgtcgccgggagatggcagcaccagcagcttcgccgcctcaacatccacgagtaccagggtgcggagttgatggggaagtacggtatcaacgtacccaggggtgcggcggcggggtccgtacaggaggtcaatgacgccttgaagaacatgttccccagtgagaaagagatagttgttaaaagtcaaatccttgctggtggccgagggctgggaactttcaaaagtgggctgcaaggaggtgtccatattgttaaggctgaggaagctgaaagcattgcacgtaaaatgttaggccagattctggtaacgaaacaaactggtccggagggaaagattgtgagcaaggtctacttgtgtgagaaactgtctcttactaatgagatgtattttgccatcacccttgataggaaaactgctggtccgctcattattgcttgcagcaagggaggaaccagtattgaagatcttgcggagaagtatcctgatatgattatcaaggttcctgttgatgtatttaaaggaataacagacgaggatgcagctaaagttgttgatggtctagctctaaagtcagcggataggcagtcttctatagaacagattaagaaactgtatgaacttttctgcaagtctgattgcacattgctggagataaatcctctggcggagacagctgacaacaagcttgttgctgctgatgcaaagttgaactttgatgataatgctgcatttagacagaaagaaatatttgcacttcgtgatacaactcaggaagaccccagggaggtcgctgctgccaaagcagatttgaactatattggtcttgatggagagattggttgcatggtgaatggagcaggattggccatggcgaccatggatattataaagttgcatggtgggacgcctgccaatttccttgatgttggtgggagtgcatcagaggggcaggttgtggaagcttttaagatactgacttcagatgatagagtgaaggcaattctagtgaacatttttgggggcattatgaaatgtgacgtgatagcaagtggaattgttaatgctgctaaacaggttgacctgaaggttcctgttgttgttcggttggaaggcaccaatgtagaccaaggaaaaaggattcttaaggaaagtggaatgactttgatcactgcagaagatcttgatgatgcggcagagaaagctgtaaaagcatccgtcaaataactatagtgtatcaatctgaagcttattttcttcactggtacaagatgagcagtgctcttttacggatttcgggctggggcagaagtcgcgaactgcaacttttttgaagcggggttattttgacctagttttcctgttaaacattgccagtgccgaaactttgtcgtctcatgttgataaacatttatcggggccattgggcagctgct

SEQ ID NO: 8511 - protein, 422 aa, Zea mays subsp. mays
  peptide (1)..(422): Ceres Seq. ID no. 12566633
  misc_feature (71)..(233): Pfam Name: ATP-grasp domain Pfam Description: ATP-grasp domain
  misc_feature (2)..(419): Homolog of NCBI NO: 15225353 NR Description: succinyl-CoA ligase beta subunit; protein id: supported by cDNA: 36904., supported by cDNA: gi_20466481
  misc_feature (2)..(419): Homolog of NCBI NO: 21593189 NR Description: succinyl-CoA ligase beta subunit [Arabidopsis
  misc_feature (6)..(419): Homolog of NCBI NO: 27803873 NR Description: succinyl CoA ligase beta subunit [Lycopersicon
  misc_feature (24)..(422): Homolog of NCBI NO: 28829983 NR Description: similar to Sus scrofa (Pig). Succinyl-CoA ligase
  misc_feature (24)..(418): Homolog of NCBI NO: 28828953 NR Description: similar to Mus musculus (Mouse). 16 days embryo
  misc_feature (21)..(420): Homolog of NCBI NO: 34874487 NR Description: similar to Succinyl-CoA ligase [ADP-forming]
  misc_feature (1)..(420): Homolog of NCBI NO: 20876884 NR Description: succinate-Coenzyme A ligase, ADP-forming, beta [Mus musculus] >gi|26349481|dbj|BAC38380.1| unnamed protein [Mus musculus] >gi|26353900|dbj|BAC40580.1| unnamed protein
  misc_feature (1)..(420): Homolog of NCBI NO: 11321583 NR Description: succinate-CoA ligase, ADP-forming, beta subunit; for ATP specific succinyl CoA synthetase beta subunit precursor sapiens] >gi|7328935|dbj|BAA92873.1| ATP specific succinyl CoA
  misc_feature (1)..(420): Homolog of NCBI NO: 21263997 NR Description: Succinyl-CoA ligase [ADP-forming] beta-chain,
  misc_feature (1)..(420): Homolog of NCBI NO: 34364605 NR Description: hypothetical protein [Homo sapiens]
MVRGSLGKLASRALSVAGRWQHQQLRRLNIHEYQGAELMGKYGINVPRGAAAGSVQEVNDALKNMFPSEKEIVVKSQILAGGRGLGTFKSGLQGGVHIVKAEEAESIARKMLGQILVTKQTGPEGKIVSKVYLCEKLSLTNEMYFAITLDRKTAGPLIIACSKGGTSIEDLAEKYPDMIIKVPVDVFKGITDEDAAKVVDGLALKSADRQSSIEQIKKLYELFCKSDCTLLEINPLAETADNKLVAADAKLNFDDNAAFRQKEIFALRDTTQEDPREVAAAKADLNYIGLDGEIGCMVNGAGLAMATMDIIKLHGGTPANFLDVGGSASEGQVVEAFKILTSDDRVKAILVNIFGGIMKCDVIASGIVNAAKQVDLKVPVVVRLEGTNVDQGKRILKESGMTLITAEDLDDAAEKAVKASVK

SEQ ID NO: 8512 - protein, 384 aa, Zea mays subsp. mays
  peptide (1)..(384): Ceres Seq. ID no. 12566634
  misc_feature (33)..(195): Pfam Name: ATP-grasp domain Pfam Description: ATP-grasp domain
  misc_feature (1)..(381): Homolog of NCBI NO: 15225353 NR Description: succinyl-CoA ligase beta subunit; protein id: supported by cDNA: 36904., supported by cDNA: gi_20466481
  misc_feature (1)..(381): Homolog of NCBI NO: 21593189 NR Description: succinyl-CoA ligase beta subunit [Arabidopsis
  misc_feature (1)..(381): Homolog of NCBI NO: 27803873 NR Description: succinyl CoA ligase beta subunit [Lycopersicon
  misc_feature (1)..(384): Homolog of NCBI NO: 28829983 NR Description: similar to Sus scrofa (Pig). Succinyl-CoA ligase
  misc_feature (1)..(380): Homolog of NCBI NO: 28828953 NR Description: similar to Mus musculus (Mouse). 16 days embryo
  misc_feature (1)..(382): Homolog of NCBI NO: 34874487 NR Description: similar to Succinyl-CoA ligase [ADP-forming]
  misc_feature (1)..(382): Homolog of NCBI NO: 20876884 NR Description: succinate-Coenzyme A ligase, ADP-forming, beta [Mus musculus] >gi|26349481|dbj|BAC38380.1| unnamed protein [Mus musculus] >gi|26353900|dbj|BAC40580.1| unnamed protein
  misc_feature (1)..(382): Homolog of NCBI NO: 11321583 NR Description: succinate-CoA ligase, ADP-forming, beta subunit; for ATP specific succinyl CoA synthetase beta subunit precursor sapiens] >gi|7328935|dbj|BAA92873.1| ATP specific succinyl CoA
  misc_feature (1)..(382): Homolog of NCBI NO: 21263997 NR Description: Succinyl-CoA ligase [ADP-forming] beta-chain,
  misc_feature (1)..(382): Homolog of NCBI NO: 34364605 NR Description: hypothetical protein [Homo sapiens]
MGKYGINVPRGAAAGSVQEVNDALKNMFPSEKEIVVKSQILAGGRGLGTFKSGLQGGVHIVKAEEAESIARKMLGQILVTKQTGPEGKIVSKVYLCEKLSLTNEMYFAITLDRKTAGPLIIACSKGGTSIEDLAEKYPDMIIKVPVDVFKGITDEDAAKVVDGLALKSADRQSSIEQIKKLYELFCKSDCTLLEINPLAETADNKLVAADAKLNFDDNAAFRQKEIFALRDTTQEDPREVAAAKADLNYIGLDGEIGCMVNGAGLAMATMDIIKLHGGTPANFLDVGGSASEGQVVEAFKILTSDDRVKAILVNIFGGIMKCDVIASGIVNAAKQVDLKVPVVVRLEGTNVDQGKRILKESGMTLITAEDLDDAAEKAVKASVK

SEQ ID NO: 8513 - protein, 358 aa, Zea mays subsp. mays
  peptide (1)..(358): Ceres Seq. ID no. 12566635
  misc_feature (7)..(169): Pfam Name: ATP-grasp domain Pfam Description: ATP-grasp domain
  misc_feature (1)..(355): Homolog of NCBI NO: 15225353 NR Description: succinyl-CoA ligase beta subunit; protein id: supported by cDNA: 36904., supported by cDNA: gi_20466481
  misc_feature (1)..(355): Homolog of NCBI NO: 21593189 NR Description: succinyl-CoA ligase beta subunit [Arabidopsis
  misc_feature (1)..(355): Homolog of NCBI NO: 27803873 NR Description: succinyl CoA ligase beta subunit [Lycopersicon
  misc_feature (1)..(358): Homolog of NCBI NO: 28829983 NR Description: similar to Sus scrofa (Pig). Succinyl-CoA ligase
  misc_feature (1)..(354): Homolog of NCBI NO: 28828953 NR Description: similar to Mus musculus (Mouse). 16 days embryo
  misc_feature (1)..(356): Homolog of NCBI NO: 34874487 NR Description: similar to Succinyl-CoA ligase [ADP-forming]
  misc_feature (1)..(356): Homolog of NCBI NO: 20876884 NR Description: succinate-Coenzyme A ligase, ADP-forming, beta [Mus musculus] >gi|26349481|dbj|BAC38380.1| unnamed protein [Mus musculus] >gi|26353900|dbj|BAC40580.1| unnamed protein
  misc_feature (1)..(356): Homolog of NCBI NO: 11321583 NR Description: succinate-CoA ligase, ADP-forming, beta subunit; for ATP specific succinyl CoA synthetase beta subunit precursor sapiens] >gi|7328935|dbj|BAA92873.1| ATP specific succinyl CoA
  misc_feature (1)..(356): Homolog of NCBI NO: 21263997 NR Description: Succinyl-CoA ligase [ADP-forming] beta-chain,
  misc_feature (1)..(356): Homolog of NCBI NO: 34364605 NR Description: hypothetical protein [Homo sapiens]
MFPSEKEIVVKSQILAGGRGLGTFKSGLQGGVHIVKAEEAESIARKMLGQILVTKQTGPEGKIVSKVYLCEKLSLTNEMYFAITLDRKTAGPLIIACSKGGTSIEDLAEKYPDMIIKVPVDVFKGITDEDAAKVVDGLALKSADRQSSIEQIKKLYELFCKSDCTLLEINPLAETADNKLVAADAKLNFDDNAAFRQKEIFALRDTTQEDPREVAAAKADLNYIGLDGEIGCMVNGAGLAMATMDIIKLHGGTPANFLDVGGSASEGQVVEAFKILTSDDRVKAILVNIFGGIMKCDVIASGIVNAAKQVDLKVPVVVRLEGTNVDQGKRILKESGMTLITAEDLDDAAEKAVKASVK

SEQ ID NO: 8514 - DNA, 1277 bp, Zea mays subsp. mays
  misc_feature (1)..(1277): Ceres Seq. ID no. 12352611
  misc_feature: MA Experiment ID: 108523 Result: Down-regulated in Transcription
  misc_feature: MA Experiment 108523 PARAMETER Experiment Name: Zm_42deg_Heat_P Parameter: Age (day) Value: 8
  misc_feature: MA Experiment 108523 PARAMETER Experiment Name: Zm_42deg_Heat_P Parameter: Organism Value: Zea mays
  misc_feature: MA Experiment 108523 PARAMETER Experiment Name: Zm_42deg_Heat_P Parameter: Plant Line Value: 35A19
  misc_feature: MA Experiment 108523 PARAMETER Experiment Name: Zm_42deg_Heat_P Parameter: Temperature (deg C) Value: 42 vs. 22
  misc_feature: MA Experiment 108523 PARAMETER Experiment Name: Zm_42deg_Heat_P Parameter: Timepoint (hr) Value: 6
  misc_feature: MA Experiment 108523 PARAMETER Experiment Name: Zm_42deg_Heat_P Parameter: Tissue Value: Aerial
  misc_feature: MA Experiment ID: 108527 Result: Down-regulated in Transcription
  misc_feature: MA Experiment 108527 PARAMETER Experiment Name: Zm_5mM_NO_P Parameter: Age (day) Value: 8
  misc_feature: MA Experiment 108527 PARAMETER Experiment Name: Zm_5mM_NO_P Parameter: Organism Value: Zea mays
  misc_feature: MA Experiment 108527 PARAMETER Experiment Name: Zm_5mM_NO_P Parameter: Plant Line Value: 35A19
  misc_feature: MA Experiment 108527 PARAMETER Experiment Name: Zm_5mM_NO_P Parameter: Timepoint (hr) Value: 6
  misc_feature: MA Experiment 108527 PARAMETER Experiment Name: Zm_5mM_NO_P Parameter: Tissue Value: Aerial
  misc_feature: MA Experiment 108527 PARAMETER Experiment Name: Zm_5mM_NO_P Parameter: Treatment Value: 5mM NO vs. No Treatment
  misc_feature: MA Experiment ID: 108528 Result: Down-regulated in Transcription
  misc_feature: MA Experiment 108528 PARAMETER Experiment Name: Zm_Imbibed_Seeds_P Parameter: Age (day) Value: 5 vs. 2
  misc_feature: MA Experiment 108528 PARAMETER Experiment Name: Zm_Imbibed_Seeds_P Parameter: Organism Value: Zea mays
  misc_feature: MA Experiment 108528 PARAMETER Experiment Name: Zm_Imbibed_Seeds_P Parameter: Plant Line Value: 35A19
  misc_feature: MA Experiment 108528 PARAMETER Experiment Name: Zm_Imbibed_Seeds_P Parameter: Tissue Value: Aerial vs. Embryo
  misc_feature: MA Experiment ID: 108529 Result: Up-regulated in Transcription
  misc_feature: MA Experiment 108529 PARAMETER Experiment Name: Zm_Imbibed_Seeds_P Parameter: Age (day) Value: 5 vs. 2
  misc_feature: MA Experiment 108529 PARAMETER Experiment Name: Zm_Imbibed_Seeds_P Parameter: Organism Value: Zea mays
  misc_feature: MA Experiment 108529 PARAMETER Experiment Name: Zm_Imbibed_Seeds_P Parameter: Plant Line Value: 35A19
  misc_feature: MA Experiment 108529 PARAMETER Experiment Name: Zm_Imbibed_Seeds_P Parameter: Tissue Value: Roots vs. Embryo
  misc_feature: MA Experiment ID: 108530 Result: Down-regulated in Transcription
  misc_feature: MA Experiment 108530 PARAMETER Experiment Name: Zm_Imbibed_Seeds_P Parameter: Age (day) Value: 6 vs. 2
  misc_feature: MA Experiment 108530 PARAMETER Experiment Name: Zm_Imbibed_Seeds_P Parameter: Organism Value: Zea mays
  misc_feature: MA Experiment 108530 PARAMETER Experiment Name: Zm_Imbibed_Seeds_P Parameter: Plant Line Value: 35A19
  misc_feature: MA Experiment 108530 PARAMETER Experiment Name: Zm_Imbibed_Seeds_P Parameter: Tissue Value: Aerial vs. Embryo
  misc_feature: MA Experiment ID: 108535 Result: Down-regulated in Transcription
  misc_feature: MA Experiment 108535 PARAMETER Experiment Name: Zm_Meristem_P Parameter: Age (day) Value: 8
  misc_feature: MA Experiment 108535 PARAMETER Experiment Name: Zm_Meristem_P Parameter: Organism Value: Zea mays
  misc_feature: MA Experiment 108535 PARAMETER Experiment Name: Zm_Meristem_P Parameter: Plant Line Value: 35A19
  misc_feature: MA Experiment 108535 PARAMETER Experiment Name: Zm_Meristem_P Parameter: Tissue Value: Root Meristem vs. Above Root Meristem
  misc_feature: MA Experiment ID: 108543 Result: Up-regulated in Transcription
  misc_feature: MA Experiment ID: 108544 Result: Down-regulated in Transcription
  misc_feature: MA Experiment ID: 108547 Result: Down-regulated in Transcription
  misc_feature: MA Experiment 108547 PARAMETER Experiment Name: Zm_Imbibed_Seeds_P Parameter: Age (day) Value: 4 vs. 2
  misc_feature: MA Experiment 108547 PARAMETER Experiment Name: Zm_Imbibed_Seeds_P Parameter: Organism Value: Zea mays
  misc_feature: MA Experiment 108547 PARAMETER Experiment Name: Zm_Imbibed_Seeds_P Parameter: Plant Line Value: 35A19
  misc_feature: MA Experiment 108547 PARAMETER Experiment Name: Zm_Imbibed_Seeds_P Parameter: Tissue Value: Aerial vs. Embryo
  misc_feature: MA Experiment ID: 108559 Result: Down-regulated in Transcription
  misc_feature: MA Experiment 108559 PARAMETER Experiment Name: Zm_5mM_NO_P Parameter: Age (day) Value: 8
  misc_feature: MA Experiment 108559 PARAMETER Experiment Name: Zm_5mM_NO_P Parameter: Organism Value: Zea mays
  misc_feature: MA Experiment 108559 PARAMETER Experiment Name: Zm_5mM_NO_P Parameter: Plant Line Value: 35A19
  misc_feature: MA Experiment 108559 PARAMETER Experiment Name: Zm_5mM_NO_P Parameter: Timepoint (hr) Value: 12
  misc_feature: MA Experiment 108559 PARAMETER Experiment Name: Zm_5mM_NO_P Parameter: Tissue Value: Aerial
  misc_feature: MA Experiment 108559 PARAMETER Experiment Name: Zm_5mM_NO_P Parameter: Treatment Value: 5mM NO vs. No Treatment
  misc_feature: MA Experiment ID: 108597 Result: Down-regulated in Transcription
  misc_feature: MA Experiment 108597 PARAMETER Experiment Name: Zm_100uM_ABA_P Parameter: Age (day) Value: 9
  misc_feature: MA Experiment 108597 PARAMETER Experiment Name: Zm_100uM_ABA_P Parameter: Organism Value: Zea mays
  misc_feature: MA Experiment 108597 PARAMETER Experiment Name: Zm_100uM_ABA_P Parameter: Plant Line Value: 35A19
  misc_feature: MA Experiment 108597 PARAMETER Experiment Name: Zm_100uM_ABA_P Parameter: Timepoint (hr) Value: 24
  misc_feature: MA Experiment 108597 PARAMETER Experiment Name: Zm_100uM_ABA_P Parameter: Tissue Value: Aerial
  misc_feature: MA Experiment 108597 PARAMETER Experiment Name: Zm_100uM_ABA_P Parameter: Treatment Value: 100uM ABA vs. No Treatment
  misc_feature: MA Experiment ID: 108688 Result: Down-regulated in Transcription
  misc_feature: MA Experiment 108688 PARAMETER Experiment Name: Zm_Embryos-Flowers__P Parameter: Tissue Value: Immature Flowers vs. Aerial+
  misc_feature: MA Experiment ID: 108689 Result: Up-regulated in Transcription
  misc_feature: MA Experiment 108689 PARAMETER Experiment Name: Zm_Drought_Roots_P Parameter: Age (day) Value: 9
  misc_feature: MA Experiment 108689 PARAMETER Experiment Name: Zm_Drought_Roots_P Parameter: Organism Value: Zea mays
  misc_feature: MA Experiment 108689 PARAMETER Experiment Name: Zm_Drought_Roots_P Parameter: Plant Line Value: 35A19
  misc_feature: MA Experiment 108689 PARAMETER Experiment Name: Zm_Drought_Roots_P Parameter: Timepoint (hr) Value: 24
  misc_feature: MA Experiment 108689 PARAMETER Experiment Name: Zm_Drought_Roots_P Parameter: Tissue Value: Roots
  misc_feature: MA Experiment 108689 PARAMETER Experiment Name: Zm_Drought_Roots_P Parameter: Treatment Value: Drought vs. No Drought
  misc_feature: MA Experiment ID: 20000108 Result: Down-regulated in Transcription
  misc_feature: MA Experiment 20000108 PARAMETER Experiment Name: Zm_Root-Tips_P Parameter: Age (day) Value: 12
  misc_feature: MA Experiment 20000108 PARAMETER Experiment Name: Zm_Root-Tips_P Parameter: Organism Value: Zea mays
  misc_feature: MA Experiment 20000108 PARAMETER Experiment Name: Zm_Root-Tips_P Parameter: Tissue Value: Root tips vs. Root mid region    35
  misc_feature: MA Experiment 20000108 PARAMETER Experiment Name: Zm_Root-Tips_P Parameter: Tissue Value: Root tips vs. Root mid region   Sequence Listing-Misc Features (4)
  misc_feature: MA Experiment ID: 20000478 Result: Down-regulated in Transcription
  misc_feature: MA Experiment 20000478 PARAMETER Experiment Name: Zm_5mM_SA_P Parameter: Age (day) Value: 11
  misc_feature: MA Experiment 20000478 PARAMETER Experiment Name: Zm_5mM_SA_P Parameter: Organism Value: Zea mays
  misc_feature: MA Experiment 20000478 PARAMETER Experiment Name: Zm_5mM_SA_P Parameter: Plant Line Value: 35A19
  misc_feature: MA Experiment 20000478 PARAMETER Experiment Name: Zm_5mM_SA_P Parameter: Timepoint (hr) Value: 72
  misc_feature: MA Experiment 20000478 PARAMETER Experiment Name: Zm_5mM_SA_P Parameter: Tissue Value: Aerial
  misc_feature: MA Experiment 20000478 PARAMETER Experiment Name: Zm_5mM_SA_P Parameter: Treatment Value: 5mM SA vs. No Treatment
  misc_feature: MA Experiment ID: 20000480 Result: Down-regulated in Transcription
  misc_feature: MA Experiment 20000480 PARAMETER Experiment Name: Zm_Drought_P Parameter: Age (day) Value: 11
  misc_feature: MA Experiment 20000480 PARAMETER Experiment Name: Zm_Drought_P Parameter: Organism Value: Zea mays
  misc_feature: MA Experiment 20000480 PARAMETER Experiment Name: Zm_Drought_P Parameter: Plant Line Value: 35A19
  misc_feature: MA Experiment 20000480 PARAMETER Experiment Name: Zm_Drought_P Parameter: Timepoint (hr) Value: 72
  misc_feature: MA Experiment 20000480 PARAMETER Experiment Name: Zm_Drought_P Parameter: Tissue Value: Aerial
  misc_feature: MA Experiment 20000480 PARAMETER Experiment Name: Zm_Drought_P Parameter: Treatment Value: Drought vs. No Drought
  misc_feature: MA Experiment ID: 20000488 Result: Down-regulated in Transcription
  misc_feature: MA Experiment 20000488 PARAMETER Experiment Name: Zm_50mM_NH4NO3_L_to_H_P Parameter: Organism Value: Zea mays
  misc_feature: MA Experiment 20000488 PARAMETER Experiment Name: Zm_50mM_NH4NO3_L_to_H_P Parameter: Timepoint (hr) Value: 8
  misc_feature: MA Experiment 20000488 PARAMETER Experiment Name: Zm_50mM_NH4NO3_L_to_H_P Parameter: Tissue Value: Leaves
  misc_feature: MA Experiment 20000488 PARAMETER Experiment Name: Zm_50mM_NH4NO3_L_to_H_P Parameter: Treatment Value: 50mM NH4NO3 vs. 100mM Mannitol
  misc_feature: MA Experiment ID: 20000533 Result: Down-regulated in Transcription
  misc_feature: MA Experiment 20000533 PARAMETER Experiment Name: Zm_0.001percent_MeJA_P Parameter: Age (day) Value: 11
  misc_feature: MA Experiment 20000533 PARAMETER Experiment Name: Zm_0.001percent_MeJA_P Parameter: Organism Value: Zea mays
  misc_feature: MA Experiment 20000533 PARAMETER Experiment Name: Zm_0.001percent_MeJA_P Parameter: Plant Line Value: 35A19
  misc_feature: MA Experiment 20000533 PARAMETER Experiment Name: Zm_0.001percent_MeJA_P Parameter: Timepoint (hr) Value: 72
  misc_feature: MA Experiment 20000533 PARAMETER Experiment Name: Zm_0.001percent_MeJA_P Parameter: Tissue Value: Aerial
  misc_feature: MA Experiment 20000533 PARAMETER Experiment Name: Zm_0.001percent_MeJA_P Parameter: Treatment Value: 0.001percent MeJA vs. No Treatment
  misc_feature: MA Experiment ID: 20000534 Result: Down-regulated in Transcription
  misc_feature: MA Experiment 20000534 PARAMETER Experiment Name: Zm_Hybrid_Pollen_P Parameter: Age (day) Value: 8
  misc_feature: MA Experiment 20000534 PARAMETER Experiment Name: Zm_Hybrid_Pollen_P Parameter: Organism Value: Zea mays
  misc_feature: MA Experiment 20000534 PARAMETER Experiment Name: Zm_Hybrid_Pollen_P Parameter: Plant Line Value: 35A19
  misc_feature: MA Experiment 20000534 PARAMETER Experiment Name: Zm_Hybrid_Pollen_P Parameter: Tissue Value: Pollen vs. Aerial
  misc_feature: MA Experiment ID: 20000535 Result: Down-regulated in Transcription
  misc_feature: MA Experiment 20000535 PARAMETER Experiment Name: Zm_Hybrid_Seed_Dev_P Parameter: DAP Value: 30 vs. 12
  misc_feature: MA Experiment 20000535 PARAMETER Experiment Name: Zm_Hybrid_Seed_Dev_P Parameter: Organism Value: Zea mays
  misc_feature: MA Experiment 20000535 PARAMETER Experiment Name: Zm_Hybrid_Seed_Dev_P Parameter: Plant Line Value: 35A19
  misc_feature: MA Experiment 20000535 PARAMETER Experiment Name: Zm_Hybrid_Seed_Dev_P Parameter: Tissue Value: Embryo vs. Unfert Floret
  misc_feature: MA Experiment ID: 20000626 Result: Down-regulated in Transcription
  misc_feature: MA Experiment 20000626 PARAMETER Experiment Name: Zm_Herbicide-Treatments_P Parameter: Timepoint (hr) Value: 12
  misc_feature: MA Experiment 20000626 PARAMETER Experiment Name: Zm_Herbicide-Treatments_P Parameter: Tissue Value: Aerial
  misc_feature: MA Experiment 20000626 PARAMETER Experiment Name: Zm_Herbicide-Treatments_P Parameter: Treatment Value: Roundup vs. No Treatment
aggcacaaggaagaacgaagagagatcagcgacttaacaacaataatggccaccgccatagttcccacggacgccgagctgctgcaggcgcaggccgacctgtggcgccacagcctctactacctgacatccatggcgctcaagtgcgcggtggagctccacatcccgaccgccatccacaacctaggcgggtctgccacgctgccggacctcgtggccgcgctgtccctgccagcggccaagctcccgttcctcgggcgcgtgatgcggctgctggtcacgtcggggcgtcttcgcgtcgtccgacgacgtgcagtaccggctgaacccgctgtcctggctgctggtggagggcgtggagtcggaggaccacacctaccagaagtacttcgtgctgggcaccgtctcccgccactacgtggaggccggcatgtccctggccgactggttcaagaaggaggaggacgaggaccgccagctgccgtcgccgttcgaggccctgcacggggtgcccctcgtccacgagagcaccaagctgctggacgaggagctggacagggtcgtggaggaaggcgtggccgcgcacgacaacctggccatcgggaccgtcatacgggagtgcggcgccgacgtcttcagcggcctccgctcgctcacctactgctgcggcaggcaggggaacgccagcgcggccgccatcgtcaaggccttcccagacatcaagtgcaccgtgctcaaccttcccagggtcgtcgaggagacgacgaccaagaccatcaccatcccgcctgcgcaggctgtcatgctcaagctcgtcctgcacttctggagcgacgacgactgcgtcaagatcctggagctgtgcaggaaggccatcccttcccgccaagaaggagggaaggtgatcatcattgagatactcctgggcccgtacatggggccggtcatgtacgaggcccagctgctgatggacatgctcatgatggtgaacaccaagggcaggcagcgcggcgaagacgactggcgccacatctttaccaaggctggcttctccgactacaaggttgtcaagaaaatcggagctcgtggtgtcatcgaggtctacccatgatccatgatcgatgtcatgtgactgtgagaggacgatactgtacaattaaataaacggggtatctagctactactcagcttttgtacctcgagatccatgcatgttaattacttgcttccatctgttttcaaaatgcatctatgtaatgtacttcgcttcttcgtcc

SEQ ID NO: 8515 - protein, 304 aa, Zea mays subsp. mays
  peptide (1)..(304): Ceres Seq. ID no. 12352612
  misc_feature (29)..(96): Homolog of NCBI NO: 27777630 NR Description: O-methyltransferase [Secale cereale]
  misc_feature (16)..(96): Homolog of NCBI NO: 7447882 NR Description: herbicide safener binding protein 1 - maize
  misc_feature (12)..(96): Homolog of NCBI NO: 38175602 NR Description: putative catechol O-methyltransferase [Oryza
  misc_feature (1)..(96): Homolog of NCBI NO: 453244 NR Description: flavonoid 7-O-methyltransferase [Hordeum vulgare
  misc_feature (1)..(96): Homolog of NCBI NO: 2130032 NR Description: catechol O-methyltransferase (EC 2.1.1.6) - barley
  misc_feature (23)..(96): Homolog of NCBI NO: 37530600 NR Description: putative o-methyltransferase ZRP4 [Oryza sativa
  misc_feature (23)..(95): Homolog of NCBI NO: 1353193 NR Description: O-METHYLTRANSFERASE ZRP4 (OMT)
  misc_feature (20)..(103): Homolog of NCBI NO: 37530606 NR Description: putative o-methyltransferase ZRP4 [Oryza sativa
  misc_feature (26)..(96): Homolog of NCBI NO: 34909608 NR Description: putative o-methyltransferase [Oryza sativa
  misc_feature (26)..(96): Homolog of NCBI NO: 20514369 NR Description: orcinol O-methyltransferase [Rosa hybrid cultivar]
RHKEERREISDLTTIMATAIVPTDAELLQAQADLWRHSLYYLTSMALKCAVELHIPTAIHNLGGSATLPDLVAALSLPAAKLPFLGRVMRLLVTSGRLRVVRRRAVPAEPAVLAAGGGRGVGGPHLPEVLRAGHRLPPLRGGRHVPGRLVQEGGGRGPPAAVAVRGPARGAPRPREHQAAGRGAGQGRGGRRGRARQPGHRDRHTGVRRRRLQRPPLAHLLLRQAGERQRGRHRQGLPRHQVHRAQPSQGRRGDDDQDHHHPACAGCHAQARPALLERRRLRQDPGAVQEGHPFPPRRREGDHH

SEQ ID NO: 8516 - protein, 289 aa, Zea mays subsp. mays
  peptide (1)..(289): Ceres Seq. ID no. 12352613
  misc_feature (14)..(81): Homolog of NCBI NO: 27777630 NR Description: O-methyltransferase [Secale cereale]
  misc_feature (1)..(81): Homolog of NCBI NO: 7447882 NR Description: herbicide safener binding protein 1 - maize
  misc_feature (1)..(81): Homolog of NCBI NO: 38175602 NR Description: putative catechol O-methyltransferase [Oryza
  misc_feature (1)..(81): Homolog of NCBI NO: 453244 NR Description: flavonoid 7-O-methyltransferase [Hordeum vulgare
  misc_feature (1)..(81): Homolog of NCBI NO: 2130032 NR Description: catechol O-methyltransferase (EC 2.1.1.6) - barley
  misc_feature (8)..(81): Homolog of NCBI NO: 37530600 NR Description: putative o-methyltransferase ZRP4 [Oryza sativa
  misc_feature (8)..(80): Homolog of NCBI NO: 1353193 NR Description: O-METHYLTRANSFERASE ZRP4 (OMT)
  misc_feature (5)..(88): Homolog of NCBI NO: 37530606 NR Description: putative o-methyltransferase ZRP4 [Oryza sativa
  misc_feature (11)..(81): Homolog of NCBI NO: 34909608 NR Description: putative o-methyltransferase [Oryza sativa
  misc_feature (11)..(81): Homolog of NCBI NO: 20514369 NR Description: orcinol O-methyltransferase [Rosa hybrid cultivar]
MATAIVPTDAELLQAQADLWRHSLYYLTSMALKCAVELHIPTAIHNLGGSATLPDLVAALSLPAAKLPFLGRVMRLLVTSGRLRVVRRRAVPAEPAVLAAGGGRGVGGPHLPEVLRAGHRLPPLRGGRHVPGRLVQEGGGRGPPAAVAVRGPARGAPRPREHQAAGRGAGQGRGGRRGRARQPGHRDRHTGVRRRRLQRPPLAHLLLRQAGERQRGRHRQGLPRHQVHRAQPSQGRRGDDDQDHHHPACAGCHAQARPALLERRRLRQDPGAVQEGHPFPPRRREGDHH

SEQ ID NO: 8517 - protein, 260 aa, Zea mays subsp. mays
  peptide (1)..(260): Ceres Seq. ID no. 12352614
  misc_feature (1)..(52): Homolog of NCBI NO: 27777630 NR Description: O-methyltransferase [Secale cereale]
  misc_feature (1)..(52): Homolog of NCBI NO: 7447882 NR Description: herbicide safener binding protein 1 - maize
  misc_feature (1)..(52): Homolog of NCBI NO: 38175602 NR Description: putative catechol O-methyltransferase [Oryza
  misc_feature (1)..(52): Homolog of NCBI NO: 453244 NR Description: flavonoid 7-O-methyltransferase [Hordeum vulgare
  misc_feature (1)..(52): Homolog of NCBI NO: 2130032 NR Description: catechol O-methyltransferase (EC 2.1.1.6) - barley
  misc_feature (1)..(52): Homolog of NCBI NO: 37530600 NR Description: putative o-methyltransferase ZRP4 [Oryza sativa
  misc_feature (1)..(51): Homolog of NCBI NO: 1353193 NR Description: O-METHYLTRANSFERASE ZRP4 (OMT)
  misc_feature (1)..(59): Homolog of NCBI NO: 37530606 NR Description: putative o-methyltransferase ZRP4 [Oryza sativa
  misc_feature (1)..(52): Homolog of NCBI NO: 34909608 NR Description: putative o-methyltransferase [Oryza sativa
  misc_feature (1)..(52): Homolog of NCBI NO: 20514369 NR Description: orcinol O-methyltransferase [Rosa hybrid cultivar]
MALKCAVELHIPTAIHNLGGSATLPDLVAALSLPAAKLPFLGRVMRLLVTSGRLRVVRRRAVPAEPAVLAAGGGRGVGGPHLPEVLRAGHRLPPLRGGRHVPGRLVQEGGGRGPPAAVAVRGPARGAPRPREHQAAGRGAGQGRGGRRGRARQPGHRDRHTGVRRRRLQRPPLAHLLLRQAGERQRGRHRQGLPRHQVHRAQPSQGRRGDDDQDHHHPACAGCHAQARPALLERRRLRQDPGAVQEGHPFPPRRREGDHH

SEQ ID NO: 8518 - protein, 226 aa, Zea mays subsp. mays
  peptide (1)..(226): Ceres Seq. ID no. 12352615
  misc_feature (1)..(203): Pfam Name: O-methyltransferase Pfam Description: O-methyltransferase
  misc_feature (1)..(225): Homolog of NCBI NO: 27777630 NR Description: O-methyltransferase [Secale cereale]
  misc_feature (1)..(226): Homolog of NCBI NO: 7447882 NR Description: herbicide safener binding protein 1 - maize
  misc_feature (1)..(226): Homolog of NCBI NO: 38175602 NR Description: putative catechol O-methyltransferase [Oryza
  misc_feature (1)..(226): Homolog of NCBI NO: 453244 NR Description: flavonoid 7-O-methyltransferase [Hordeum vulgare
  misc_feature (1)..(226): Homolog of NCBI NO: 2130032 NR Description: catechol O-methyltransferase (EC 2.1.1.6) - barley
  misc_feature (1)..(226): Homolog of NCBI NO: 37530600 NR Description: putative o-methyltransferase ZRP4 [Oryza sativa
  misc_feature (1)..(226): Homolog of NCBI NO: 1353193 NR Description: O-METHYLTRANSFERASE ZRP4 (OMT)
  misc_feature (1)..(226): Homolog of NCBI NO: 37530606 NR Description: putative o-methyltransferase ZRP4 [Oryza sativa
  misc_feature (10)..(226): Homolog of NCBI NO: 34909608 NR Description: putative o-methyltransferase [Oryza sativa
  misc_feature (3)..(226): Homolog of NCBI NO: 20514369 NR Description: orcinol O-methyltransferase [Rosa hybrid cultivar]
MSLADWFKKEEDEDRQLPSPFEALHGVPLVHESTKLLDEELDRVVEEGVAAHDNLAIGTVIRECGADVFSGLRSLTYCCGRQGNASAAAIVKAFPDIKCTVLNLPRVVEETTTKTITIPPAQAVMLKLVLHFWSDDDCVKILELCRKAIPSRQEGGKVIIIEILLGPYMGPVMYEAQLLMDMLMMVNTKGRQRGEDDWRHIFTKAGFSDYKVVKKIGARGVIEVYP

SEQ ID NO: 8519 - DNA, 1345 bp, Zea mays subsp. mays
  misc_feature (1)..(1345): Ceres Seq. ID no. 13494398
  misc_feature: MA Experiment ID: 108504 Result: Down-regulated in Transcription
  misc_feature: MA Experiment 108504 PARAMETER Experiment Name: Zm_Drought_P Parameter: Age (day) Value: 8
  misc_feature: MA Experiment 108504 PARAMETER Experiment Name: Zm_Drought_P Parameter: Organism Value: Zea mays
  misc_feature: MA Experiment 108504 PARAMETER Experiment Name: Zm_Drought_P Parameter: Plant Line Value: 35A19
  misc_feature: MA Experiment 108504 PARAMETER Experiment Name: Zm_Drought_P Parameter: Timepoint (hr) Value: 12
  misc_feature: MA Experiment 108504 PARAMETER Experiment Name: Zm_Drought_P Parameter: Tissue Value: Aerial
  misc_feature: MA Experiment 108504 PARAMETER Experiment Name: Zm_Drought_P Parameter: Treatment Value: Drought vs. No Drought
  misc_feature: MA Experiment ID: 108523 Result: Down-regulated in Transcription
  misc_feature: MA Experiment 108523 PARAMETER Experiment Name: Zm_42deg_Heat_P Parameter: Age (day) Value: 8
  misc_feature: MA Experiment 108523 PARAMETER Experiment Name: Zm_42deg_Heat_P Parameter: Organism Value: Zea mays
  misc_feature: MA Experiment 108523 PARAMETER Experiment Name: Zm_42deg_Heat_P Parameter: Plant Line Value: 35A19
  misc_feature: MA Experiment 108523 PARAMETER Experiment Name: Zm_42deg_Heat_P Parameter: Temperature (deg C) Value: 42 vs. 22
  misc_feature: MA Experiment 108523 PARAMETER Experiment Name: Zm_42deg_Heat_P Parameter: Timepoint (hr) Value: 6
  misc_feature: MA Experiment 108523 PARAMETER Experiment Name: Zm_42deg_Heat_P Parameter: Tissue Value: Aerial
  misc_feature: MA Experiment ID: 108527 Result: Down-regulated in Transcription
  misc_feature: MA Experiment 108527 PARAMETER Experiment Name: Zm_5mM_NO_P Parameter: Age (day) Value: 8
  misc_feature: MA Experiment 108527 PARAMETER Experiment Name: Zm_5mM_NO_P Parameter: Organism Value: Zea mays
  misc_feature: MA Experiment 108527 PARAMETER Experiment Name: Zm_5mM_NO_P Parameter: Plant Line Value: 35A19
  misc_feature: MA Experiment 108527 PARAMETER Experiment Name: Zm_5mM_NO_P Parameter: Timepoint (hr) Value: 6
  misc_feature: MA Experiment 108527 PARAMETER Experiment Name: Zm_5mM_NO_P Parameter: Tissue Value: Aerial
  misc_feature: MA Experiment 108527 PARAMETER Experiment Name: Zm_5mM_NO_P Parameter: Treatment Value: 5mM NO vs. No Treatment
  misc_feature: MA Experiment ID: 108528 Result: Up-regulated in Transcription
  misc_feature: MA Experiment 108528 PARAMETER Experiment Name: Zm_Imbibed_Seeds_P Parameter: Age (day) Value: 5 vs. 2
  misc_feature: MA Experiment 108528 PARAMETER Experiment Name: Zm_Imbibed_Seeds_P Parameter: Organism Value: Zea mays
  misc_feature: MA Experiment 108528 PARAMETER Experiment Name: Zm_Imbibed_Seeds_P Parameter: Plant Line Value: 35A19
  misc_feature: MA Experiment 108528 PARAMETER Experiment Name: Zm_Imbibed_Seeds_P Parameter: Tissue Value: Aerial vs. Embryo
  misc_feature: MA Experiment ID: 108529 Result: Down-regulated in Transcription
  misc_feature: MA Experiment 108529 PARAMETER Experiment Name: Zm_Imbibed_Seeds_P Parameter: Age (day) Value: 5 vs. 2
  misc_feature: MA Experiment 108529 PARAMETER Experiment Name: Zm_Imbibed_Seeds_P Parameter: Organism Value: Zea mays
  misc_feature: MA Experiment 108529 PARAMETER Experiment Name: Zm_Imbibed_Seeds_P Parameter: Plant Line Value: 35A19
  misc_feature: MA Experiment 108529 PARAMETER Experiment Name: Zm_Imbibed_Seeds_P Parameter: Tissue Value: Roots vs. Embryo
  misc_feature: MA Experiment ID: 108530 Result: Up-regulated in Transcription
  misc_feature: MA Experiment 108530 PARAMETER Experiment Name: Zm_Imbibed_Seeds_P Parameter: Age (day) Value: 6 vs. 2
  misc_feature: MA Experiment 108530 PARAMETER Experiment Name: Zm_Imbibed_Seeds_P Parameter: Organism Value: Zea mays
  misc_feature: MA Experiment 108530 PARAMETER Experiment Name: Zm_Imbibed_Seeds_P Parameter: Plant Line Value: 35A19
  misc_feature: MA Experiment 108530 PARAMETER Experiment Name: Zm_Imbibed_Seeds_P Parameter: Tissue Value: Aerial vs. Embryo
  misc_feature: MA Experiment ID: 108536 Result: Down-regulated in Transcription
  misc_feature: MA Experiment 108536 PARAMETER Experiment Name: Zm_Meristem_P Parameter: Age (day) Value: 8
  misc_feature: MA Experiment 108536 PARAMETER Experiment Name: Zm_Meristem_P Parameter: Organism Value: Zea mays
  misc_feature: MA Experiment 108536 PARAMETER Experiment Name: Zm_Meristem_P Parameter: Plant Line Value: 35A19
  misc_feature: MA Experiment 108536 PARAMETER Experiment Name: Zm_Meristem_P Parameter: Tissue Value: Shoot Meristem vs. Above Shoot Meristem
  misc_feature: MA Experiment ID: 108540 Result: Down-regulated in Transcription
  misc_feature: MA Experiment 108540 PARAMETER Experiment Name: Zm_20percent_PEG_P Parameter: Age (day) Value: 8
  misc_feature: MA Experiment 108540 PARAMETER Experiment Name: Zm_20percent_PEG_P Parameter: Organism Value: Zea mays
  misc_feature: MA Experiment 108540 PARAMETER Experiment Name: Zm_20percent_PEG_P Parameter: Plant Line Value: 35A19
  misc_feature: MA Experiment 108540 PARAMETER Experiment Name: Zm_20percent_PEG_P Parameter: Timepoint (hr) Value: 6
  misc_feature: MA Experiment 108540 PARAMETER Experiment Name: Zm_20percent_PEG_P Parameter: Tissue Value: Aerial
  misc_feature: MA Experiment 108540 PARAMETER Experiment Name: Zm_20percent_PEG_P Parameter: Treatment Value: 20percent PEG vs. No Treatment
  misc_feature: MA Experiment ID: 108543 Result: Up-regulated in Transcription
  misc_feature: MA Experiment ID: 108545 Result: Up-regulated in Transcription
  misc_feature: MA Experiment 108545 PARAMETER Experiment Name: Zm_Imbibed_Seeds_P Parameter: Age (day) Value: 3 vs. 2
  misc_feature: MA Experiment 108545 PARAMETER Experiment Name: Zm_Imbibed_Seeds_P Parameter: Organism Value: Zea mays
  misc_feature: MA Experiment 108545 PARAMETER Experiment Name: Zm_Imbibed_Seeds_P Parameter: Plant Line Value: 35A19
  misc_feature: MA Experiment 108545 PARAMETER Experiment Name: Zm_Imbibed_Seeds_P Parameter: Tissue Value: Aerial vs. Embryo
  misc_feature: MA Experiment ID: 108546 Result: Down-regulated in Transcription
  misc_feature: MA Experiment 108546 PARAMETER Experiment Name: Zm_Imbibed_Seeds_P Parameter: Age (day) Value: 3 vs. 2
  misc_feature: MA Experiment 108546 PARAMETER Experiment Name: Zm_Imbibed_Seeds_P Parameter: Organism Value: Zea mays
  misc_feature: MA Experiment 108546 PARAMETER Experiment Name: Zm_Imbibed_Seeds_P Parameter: Plant Line Value: 35A19
  misc_feature: MA Experiment 108546 PARAMETER Experiment Name: Zm_Imbibed_Seeds_P Parameter: Tissue Value: Roots vs. Embryo
  misc_feature: MA Experiment ID: 108547 Result: Up-regulated in Transcription
  misc_feature: MA Experiment 108547 PARAMETER Experiment Name: Zm_Imbibed_Seeds_P Parameter: Age (day) Value: 4 vs. 2
  misc_feature: MA Experiment 108547 PARAMETER Experiment Name: Zm_Imbibed_Seeds_P Parameter: Organism Value: Zea mays
  misc_feature: MA Experiment 108547 PARAMETER Experiment Name: Zm_Imbibed_Seeds_P Parameter: Plant Line Value: 35A19
  misc_feature: MA Experiment 108547 PARAMETER Experiment Name: Zm_Imbibed_Seeds_P Parameter: Tissue Value: Aerial vs. Embryo
  misc_feature: MA Experiment ID: 108556 Result: Down-regulated in Transcription
  misc_feature: MA Experiment 108556 PARAMETER Experiment Name: Zm_Drought_P Parameter: Age (day) Value: 9
  misc_feature: MA Experiment 108556 PARAMETER Experiment Name: Zm_Drought_P Parameter: Organism Value: Zea mays
  misc_feature: MA Experiment 108556 PARAMETER Experiment Name: Zm_Drought_P Parameter: Plant Line Value: 35A19
  misc_feature: MA Experiment 108556 PARAMETER Experiment Name: Zm_Drought_P Parameter: Timepoint (hr) Value: 24
  misc_feature: MA Experiment 108556 PARAMETER Experiment Name: Zm_Drought_P Parameter: Tissue Value: Aerial
  misc_feature: MA Experiment 108556 PARAMETER Experiment Name: Zm_Drought_P Parameter: Treatment Value: Drought vs. No Drought
  misc_feature: MA Experiment ID: 108559 Result: Down-regulated in Transcription
  misc_feature: MA Experiment 108559 PARAMETER Experiment Name: Zm_5mM_NO_P Parameter: Age (day) Value: 8
  misc_feature: MA Experiment 108559 PARAMETER Experiment Name: Zm_5mM_NO_P Parameter: Organism Value: Zea mays
  misc_feature: MA Experiment 108559 PARAMETER Experiment Name: Zm_5mM_NO_P Parameter: Plant Line Value: 35A19
  misc_feature: MA Experiment 108559 PARAMETER Experiment Name: Zm_5mM_NO_P Parameter: Timepoint (hr) Value: 12
  misc_feature: MA Experiment 108559 PARAMETER Experiment Name: Zm_5mM_NO_P Parameter: Tissue Value: Aerial
  misc_feature: MA Experiment 108559 PARAMETER Experiment Name: Zm_5mM_NO_P Parameter: Treatment Value: 5mM NO vs. No Treatment
  misc_feature: MA Experiment ID: 108687 Result: Down-regulated in Transcription
  misc_feature: MA Experiment 108687 PARAMETER Experiment Name: Zm_Embryos-Flowers__P Parameter: Tissue Value: Embryo vs. Aerial+
  misc_feature: MA Experiment ID: 108688 Result: Down-regulated in Transcription
  misc_feature: MA Experiment 108688 PARAMETER Experiment Name: Zm_Embryos-Flowers__P Parameter: Tissue Value: Immature Flowers vs. Aerial+
  misc_feature: MA Experiment ID: 20000477 Result: Down-regulated in Transcription
  misc_feature: MA Experiment 20000477 PARAMETER Experiment Name: Zm_5mM_SA_P Parameter: Age (day) Value: 10
  misc_feature: MA Experiment 20000477 PARAMETER Experiment Name: Zm_5mM_SA_P Parameter: Organism Value: Zea mays
  misc_feature: MA Experiment 20000477 PARAMETER Experiment Name: Zm_5mM_SA_P Parameter: Plant Line Value: 35A19
  misc_feature: MA Experiment 20000477 PARAMETER Experiment Name: Zm_5mM_SA_P Parameter: Timepoint (hr) Value: 48
  misc_feature: MA Experiment 20000477 PARAMETER Experiment Name: Zm_5mM_SA_P Parameter: Tissue Value: Aerial
  misc_feature: MA Experiment 20000477 PARAMETER Experiment Name: Zm_5mM_SA_P Parameter: Treatment Value: 5mM SA vs. No Treatment
  misc_feature: MA Experiment ID: 20000478 Result: Down-regulated in Transcription
  misc_feature: MA Experiment 20000478 PARAMETER Experiment Name: Zm_5mM_SA_P Parameter: Age (day) Value: 11
  misc_feature: MA Experiment 20000478 PARAMETER Experiment Name: Zm_5mM_SA_P Parameter: Organism Value: Zea mays
  misc_feature: MA Experiment 20000478 PARAMETER Experiment Name: Zm_5mM_SA_P Parameter: Plant Line Value: 35A19
  misc_feature: MA Experiment 20000478 PARAMETER Experiment Name: Zm_5mM_SA_P Parameter: Timepoint (hr) Value: 72
  misc_feature: MA Experiment 20000478 PARAMETER Experiment Name: Zm_5mM_SA_P Parameter: Tissue Value: Aerial
  misc_feature: MA Experiment 20000478 PARAMETER Experiment Name: Zm_5mM_SA_P Parameter: Treatment Value: 5mM SA vs. No Treatment
  misc_feature: MA Experiment ID: 20000480 Result: Down-regulated in Transcription
  misc_feature: MA Experiment 20000480 PARAMETER Experiment Name: Zm_Drought_P Parameter: Age (day) Value: 11
  misc_feature: MA Experiment 20000480 PARAMETER Experiment Name: Zm_Drought_P Parameter: Organism Value: Zea mays
  misc_feature: MA Experiment 20000480 PARAMETER Experiment Name: Zm_Drought_P Parameter: Plant Line Value: 35A19
  misc_feature: MA Experiment 20000480 PARAMETER Experiment Name: Zm_Drought_P Parameter: Timepoint (hr) Value: 72
  misc_feature: MA Experiment 20000480 PARAMETER Experiment Name: Zm_Drought_P Parameter: Tissue Value: Aerial
  misc_feature: MA Experiment 20000480 PARAMETER Experiment Name: Zm_Drought_P Parameter: Treatment Value: Drought vs. No Drought
  misc_feature: MA Experiment ID: 20000626 Result: Down-regulated in Transcription
  misc_feature: MA Experiment 20000626 PARAMETER Experiment Name: Zm_Herbicide-Treatments_P Parameter: Timepoint (hr) Value: 12
  misc_feature: MA Experiment 20000626 PARAMETER Experiment Name: Zm_Herbicide-Treatments_P Parameter: Tissue Value: Aerial
  misc_feature: MA Experiment 20000626 PARAMETER Experiment Name: Zm_Herbicide-Treatments_P Parameter: Treatment Value: Roundup vs. No Treatment
agaacatcctaatcgaaaaaccccactgctcggtgttcactccggtcgggccatggcgcgcgccggcgtctctaccgcgccgctctcccgcactcacctcctcccaccacgtccttccctcctccacaacacgcagcaccactccctcctcctccggccccagcgcaaggcgcccgccaccaccgcggcggcgctgccgccggccgcggacctcccggcgctgtccctcccggccgcggccgccgcggctgccgcgctggcggcggcggtgtcactttccgaccccgagcggcggcggcgctcgcaggccgaggcggccggcggaggtgacaaggaggccgtccgcgcctacttcaactccacggggttcgagcggtggcgcaagatctacgggtcggcgacggagggcgtgaaccgcgtgcagcttgacatccgcgagggccacgcgcagacggtggcggcggcgctggccatgctccgcgactccccgctggagctgtcgggcgccaccgtgtgcgacgccggctgcgggacggggtcgctggccatcccgctcgcggcggcgggcgccgacgtcctggcctccgacatctcggcggccatggtgtcggaggcgcagcggcaggcggcggcgcagtcgtcgtcgtcgtcgttccggatgccgcggttcgaggtccgcgacctggagagcctggaggggcggtacgacgtggtggtgtgcctggacgtgctcatccactacccgcgggaggaggcgcgcgccatgatccgccacctcgcgtcgctggcggacaagcggctgctcatcagcttcgcgcccaggacgctctacttcgacttcctcaagcgcgtgggcgagctgttcccgggcccgtcaaaggccacgcgcgcctacctgcacgccgaggccgacatcgaggacgcgctccgccaggccggctggcgcgtcgccaaccgcggcttcatctccacgcagttctacttcgccaagctcttcgacgccgtgcccgtcggctcctcgacgtagccgtgtaggccgcccgccgtgtgcttgtgtgtttgtttgcctcacgcgactgtttatagagctccagacggtcgccgcagcgcgcgcggcggcgtagcctgtttgtacttgcaagctcactcagttccattccgtagcttgatgccttgattgattcccacgtagacttccatcgacaaacacaattgcagggttttgagtttttgacccaaacgacacgacaaagagttcttatcatccaggggcctcgaccaccgtgctcgttttacaaaagctgtaattaaagactactttgcaagattatcgtgattttcattc

SEQ ID NO: 8520 - protein, 341 aa, Zea mays subsp. mays
  peptide (1)..(341): Ceres Seq. ID no. 13494399
  misc_feature (18)..(341): Homolog of NCBI NO: 6006382 NR Description: Similar to magnesium-protoporphyrin IX
  misc_feature (53)..(337): Homolog of NCBI NO: 15234905 NR Description: magnesium-protoporphyrin O-methyltransferase
  misc_feature (35)..(336): Homolog of NCBI NO: 7839365 NR Description: S-adenosyl-L-methionine Mg-protoporphyrin IX
  misc_feature (110)..(335): Homolog of NCBI NO: 16332013 NR Description: Mg-protoporphyrin IX methyl transferase
  misc_feature (110)..(335): Homolog of NCBI NO: 7470730 NR Description: magnesium-protoporphyrin IX methyltransferase (EC
  misc_feature (96)..(336): Homolog of NCBI NO: 22297994 NR Description: Mg-protoporphyrin IX methyl transferase
  misc_feature (110)..(334): Homolog of NCBI NO: 17230693 NR Description: Mg-protoporphyrin IX methyl transferase [Nostoc
  misc_feature (110)..(334): Homolog of NCBI NO: 23130334 NR Description: hypothetical protein [Nostoc punctiforme]
  misc_feature (110)..(335): Homolog of NCBI NO: 23040051 NR Description: hypothetical protein [Trichodesmium erythraeum
EHPNRKTPLLGVHSGRAMARAGVSTAPLSRTHLLPPRPSLLHNTQHHSLLLRPQRKAPATTAAALPPAADLPALSLPAAAAAAAALAAAVSLSDPERRRRSQAEAAGGGDKEAVRAYFNSTGFERWRKIYGSATEGVNRVQLDIREGHAQTVAAALAMLRDSPLELSGATVCDAGCGTGSLAIPLAAAGADVLASDISAAMVSEAQRQAAAQSSSSSFRMPRFEVRDLESLEGRYDVVVCLDVLIHYPREEARAMIRHLASLADKRLLISFAPRTLYFDFLKRVGELFPGPSKATRAYLHAEADIEDALRQAGWRVANRGFISTQFYFAKLFDAVPVGSST

SEQ ID NO: 8521 - protein, 324 aa, Zea mays subsp. mays
  peptide (1)..(324): Ceres Seq. ID no. 13494400
  misc_feature (1)..(324): Homolog of NCBI NO: 6006382 NR Description: Similar to magnesium-protoporphyrin IX
  misc_feature (36)..(320): Homolog of NCBI NO: 15234905 NR Description: magnesium-protoporphyrin O-methyltransferase
  misc_feature (18)..(319): Homolog of NCBI NO: 7839365 NR Description: S-adenosyl-L-methionine Mg-protoporphyrin IX
  misc_feature (93)..(318): Homolog of NCBI NO: 16332013 NR Description: Mg-protoporphyrin IX methyl transferase
  misc_feature (93)..(318): Homolog of NCBI NO: 7470730 NR Description: magnesium-protoporphyrin IX methyltransferase (EC
  misc_feature (79)..(319): Homolog of NCBI NO: 22297994 NR Description: Mg-protoporphyrin IX methyl transferase
  misc_feature (93)..(317): Homolog of NCBI NO: 17230693 NR Description: Mg-protoporphyrin IX methyl transferase [Nostoc
  misc_feature (93)..(317): Homolog of NCBI NO: 23130334 NR Description: hypothetical protein [Nostoc punctiforme]
  misc_feature (93)..(318): Homolog of NCBI NO: 23040051 NR Description: hypothetical protein [Trichodesmium erythraeum
MARAGVSTAPLSRTHLLPPRPSLLHNTQHHSLLLRPQRKAPATTAAALPPAADLPALSLPAAAAAAAALAAAVSLSDPERRRRSQAEAAGGGDKEAVRAYFNSTGFERWRKIYGSATEGVNRVQLDIREGHAQTVAAALAMLRDSPLELSGATVCDAGCGTGSLAIPLAAAGADVLASDISAAMVSEAQRQAAAQSSSSSFRMPRFEVRDLESLEGRYDVVVCLDVLIHYPREEARAMIRHLASLADKRLLISFAPRTLYFDFLKRVGELFPGPSKATRAYLHAEADIEDALRQAGWRVANRGFISTQFYFAKLFDAVPVGSST

SEQ ID NO: 8522 - protein, 184 aa, Zea mays subsp. mays
  peptide (1)..(184): Ceres Seq. ID no. 13494401
  misc_feature (1)..(184): Homolog of NCBI NO: 6006382 NR Description: Similar to magnesium-protoporphyrin IX
  misc_feature (1)..(180): Homolog of NCBI NO: 15234905 NR Description: magnesium-protoporphyrin O-methyltransferase
  misc_feature (1)..(179): Homolog of NCBI NO: 7839365 NR Description: S-adenosyl-L-methionine Mg-protoporphyrin IX
  misc_feature (1)..(178): Homolog of NCBI NO: 16332013 NR Description: Mg-protoporphyrin IX methyl transferase
  misc_feature (1)..(178): Homolog of NCBI NO: 7470730 NR Description: magnesium-protoporphyrin IX methyltransferase (EC
  misc_feature (1)..(179): Homolog of NCBI NO: 22297994 NR Description: Mg-protoporphyrin IX methyl transferase
  misc_feature (1)..(177): Homolog of NCBI NO: 17230693 NR Description: Mg-protoporphyrin IX methyl transferase [Nostoc
  misc_feature (1)..(177): Homolog of NCBI NO: 23130334 NR Description: hypothetical protein [Nostoc punctiforme]
  misc_feature (1)..(178): Homolog of NCBI NO: 23040051 NR Description: hypothetical protein [Trichodesmium erythraeum
MLRDSPLELSGATVCDAGCGTGSLAIPLAAAGADVLASDISAAMVSEAQRQAAAQSSSSSFRMPRFEVRDLESLEGRYDVVVCLDVLIHYPREEARAMIRHLASLADKRLLISFAPRTLYFDFLKRVGELFPGPSKATRAYLHAEADIEDALRQAGWRVANRGFISTQFYFAKLFDAVPVGSST

SEQ ID NO: 8523 - DNA, 1350 bp, Zea mays subsp. mays
  misc_feature (1)..(1350): Ceres Seq. ID no. 12408432
  misc_feature: MA Experiment ID: 108504 Result: Up-regulated in Transcription
  misc_feature: MA Experiment 108504 PARAMETER Experiment Name: Zm_Drought_P Parameter: Age (day) Value: 8
  misc_feature: MA Experiment 108504 PARAMETER Experiment Name: Zm_Drought_P Parameter: Organism Value: Zea mays
  misc_feature: MA Experiment 108504 PARAMETER Experiment Name: Zm_Drought_P Parameter: Plant Line Value: 35A19
  misc_feature: MA Experiment 108504 PARAMETER Experiment Name: Zm_Drought_P Parameter: Timepoint (hr) Value: 12
  misc_feature: MA Experiment 108504 PARAMETER Experiment Name: Zm_Drought_P Parameter: Tissue Value: Aerial
  misc_feature: MA Experiment 108504 PARAMETER Experiment Name: Zm_Drought_P Parameter: Treatment Value: Drought vs. No Drought
  misc_feature: MA Experiment ID: 108523 Result: Up-regulated in Transcription
  misc_feature: MA Experiment 108523 PARAMETER Experiment Name: Zm_42deg_Heat_P Parameter: Age (day) Value: 8
  misc_feature: MA Experiment 108523 PARAMETER Experiment Name: Zm_42deg_Heat_P Parameter: Organism Value: Zea mays
  misc_feature: MA Experiment 108523 PARAMETER Experiment Name: Zm_42deg_Heat_P Parameter: Plant Line Value: 35A19
  misc_feature: MA Experiment 108523 PARAMETER Experiment Name: Zm_42deg_Heat_P Parameter: Temperature (deg C) Value: 42 vs. 22
  misc_feature: MA Experiment 108523 PARAMETER Experiment Name: Zm_42deg_Heat_P Parameter: Timepoint (hr) Value: 6
  misc_feature: MA Experiment 108523 PARAMETER Experiment Name: Zm_42deg_Heat_P Parameter: Tissue Value: Aerial
  misc_feature: MA Experiment ID: 108526 Result: Up-regulated in Transcription
  misc_feature: MA Experiment 108526 PARAMETER Experiment Name: Zm_5mM_NO_P Parameter: Age (day) Value: 8
  misc_feature: MA Experiment 108526 PARAMETER Experiment Name: Zm_5mM_NO_P Parameter: Organism Value: Zea mays
  misc_feature: MA Experiment 108526 PARAMETER Experiment Name: Zm_5mM_NO_P Parameter: Plant Line Value: 35A19
  misc_feature: MA Experiment 108526 PARAMETER Experiment Name: Zm_5mM_NO_P Parameter: Timepoint (hr) Value: 1
  misc_feature: MA Experiment 108526 PARAMETER Experiment Name: Zm_5mM_NO_P Parameter: Tissue Value: Aerial
  misc_feature: MA Experiment 108526 PARAMETER Experiment Name: Zm_5mM_NO_P Parameter: Treatment Value: 5mM NO vs. No Treatment
  misc_feature: MA Experiment ID: 108527 Result: Up-regulated in Transcription
  misc_feature: MA Experiment 108527 PARAMETER Experiment Name: Zm_5mM_NO_P Parameter: Age (day) Value: 8
  misc_feature: MA Experiment 108527 PARAMETER Experiment Name: Zm_5mM_NO_P Parameter: Organism Value: Zea mays
  misc_feature: MA Experiment 108527 PARAMETER Experiment Name: Zm_5mM_NO_P Parameter: Plant Line Value: 35A19
  misc_feature: MA Experiment 108527 PARAMETER Experiment Name: Zm_5mM_NO_P Parameter: Timepoint (hr) Value: 6
  misc_feature: MA Experiment 108527 PARAMETER Experiment Name: Zm_5mM_NO_P Parameter: Tissue Value: Aerial
  misc_feature: MA Experiment 108527 PARAMETER Experiment Name: Zm_5mM_NO_P Parameter: Treatment Value: 5mM NO vs. No Treatment
  misc_feature: MA Experiment ID: 108529 Result: Up-regulated in Transcription
  misc_feature: MA Experiment 108529 PARAMETER Experiment Name: Zm_Imbibed_Seeds_P Parameter: Age (day) Value: 5 vs. 2
  misc_feature: MA Experiment 108529 PARAMETER Experiment Name: Zm_Imbibed_Seeds_P Parameter: Organism Value: Zea mays
  misc_feature: MA Experiment 108529 PARAMETER Experiment Name: Zm_Imbibed_Seeds_P Parameter: Plant Line Value: 35A19
  misc_feature: MA Experiment 108529 PARAMETER Experiment Name: Zm_Imbibed_Seeds_P Parameter: Tissue Value: Roots vs. Embryo
  misc_feature: MA Experiment ID: 108530 Result: Up-regulated in Transcription
  misc_feature: MA Experiment 108530 PARAMETER Experiment Name: Zm_Imbibed_Seeds_P Parameter: Age (day) Value: 6 vs. 2
  misc_feature: MA Experiment 108530 PARAMETER Experiment Name: Zm_Imbibed_Seeds_P Parameter: Organism Value: Zea mays
  misc_feature: MA Experiment 108530 PARAMETER Experiment Name: Zm_Imbibed_Seeds_P Parameter: Plant Line Value: 35A19
  misc_feature: MA Experiment 108530 PARAMETER Experiment Name: Zm_Imbibed_Seeds_P Parameter: Tissue Value: Aerial vs. Embryo
  misc_feature: MA Experiment ID: 108533 Result: Up-regulated in Transcription
  misc_feature: MA Experiment 108533 PARAMETER Experiment Name: Zm_4deg_Cold_P Parameter: Age (hr) Value: 8
  misc_feature: MA Experiment 108533 PARAMETER Experiment Name: Zm_4deg_Cold_P Parameter: Organism Value: Zea mays
  misc_feature: MA Experiment 108533 PARAMETER Experiment Name: Zm_4deg_Cold_P Parameter: Plant Line Value: 35A19
  misc_feature: MA Experiment 108533 PARAMETER Experiment Name: Zm_4deg_Cold_P Parameter: Temperature (deg C) Value: 4 vs. 22
  misc_feature: MA Experiment 108533 PARAMETER Experiment Name: Zm_4deg_Cold_P Parameter: Timepoint (hr) Value: 1
  misc_feature: MA Experiment 108533 PARAMETER Experiment Name: Zm_4deg_Cold_P Parameter: Tissue Value: Aerial
  misc_feature: MA Experiment ID: 108534 Result: Up-regulated in Transcription
  misc_feature: MA Experiment 108534 PARAMETER Experiment Name: Zm_4deg_Cold_P Parameter: Age (hr) Value: 8
  misc_feature: MA Experiment 108534 PARAMETER Experiment Name: Zm_4deg_Cold_P Parameter: Organism Value: Zea mays
  misc_feature: MA Experiment 108534 PARAMETER Experiment Name: Zm_4deg_Cold_P Parameter: Plant Line Value: 35A19
  misc_feature: MA Experiment 108534 PARAMETER Experiment Name: Zm_4deg_Cold_P Parameter: Temperature (deg C) Value: 4 vs. 22
  misc_feature: MA Experiment 108534 PARAMETER Experiment Name: Zm_4deg_Cold_P Parameter: Timepoint (hr) Value: 6
  misc_feature: MA Experiment 108534 PARAMETER Experiment Name: Zm_4deg_Cold_P Parameter: Tissue Value: Aerial
  misc_feature: MA Experiment ID: 108535 Result: Down-regulated in Transcription
  misc_feature: MA Experiment 108535 PARAMETER Experiment Name: Zm_Meristem_P Parameter: Age (day) Value: 8
  misc_feature: MA Experiment 108535 PARAMETER Experiment Name: Zm_Meristem_P Parameter: Organism Value: Zea mays
  misc_feature: MA Experiment 108535 PARAMETER Experiment Name: Zm_Meristem_P Parameter: Plant Line Value: 35A19
  misc_feature: MA Experiment 108535 PARAMETER Experiment Name: Zm_Meristem_P Parameter: Tissue Value: Root Meristem vs. Above Root Meristem
  misc_feature: MA Experiment ID: 108536 Result: Up-regulated in Transcription
  misc_feature: MA Experiment 108536 PARAMETER Experiment Name: Zm_Meristem_P Parameter: Age (day) Value: 8
  misc_feature: MA Experiment 108536 PARAMETER Experiment Name: Zm_Meristem_P Parameter: Organism Value: Zea mays
  misc_feature: MA Experiment 108536 PARAMETER Experiment Name: Zm_Meristem_P Parameter: Plant Line Value: 35A19
  misc_feature: MA Experiment 108536 PARAMETER Experiment Name: Zm_Meristem_P Parameter: Tissue Value: Shoot Meristem vs. Above Shoot Meristem
  misc_feature: MA Experiment ID: 108542 Result: Up-regulated in Transcription
  misc_feature: MA Experiment 108542 PARAMETER Experiment Name: Zm_150mM_NaCl_P Parameter: Age (day) Value: 8
  misc_feature: MA Experiment 108542 PARAMETER Experiment Name: Zm_150mM_NaCl_P Parameter: Organism Value: Zea mays
  misc_feature: MA Experiment 108542 PARAMETER Experiment Name: Zm_150mM_NaCl_P Parameter: Plant Line Value: 35A19
  misc_feature: MA Experiment 108542 PARAMETER Experiment Name: Zm_150mM_NaCl_P Parameter: Timepoint (hr) Value: 6
  misc_feature: MA Experiment 108542 PARAMETER Experiment Name: Zm_150mM_NaCl_P Parameter: Tissue Value: Aerial
  misc_feature: MA Experiment 108542 PARAMETER Experiment Name: Zm_150mM_NaCl_P Parameter: Treatment Value: 150mM NaCl vs. No Treatment
  misc_feature: MA Experiment ID: 108545 Result: Down-regulated in Transcription
  misc_feature: MA Experiment 108545 PARAMETER Experiment Name: Zm_Imbibed_Seeds_P Parameter: Age (day) Value: 3 vs. 2
  misc_feature: MA Experiment 108545 PARAMETER Experiment Name: Zm_Imbibed_Seeds_P Parameter: Organism Value: Zea mays
  misc_feature: MA Experiment 108545 PARAMETER Experiment Name: Zm_Imbibed_Seeds_P Parameter: Plant Line Value: 35A19
  misc_feature: MA Experiment 108545 PARAMETER Experiment Name: Zm_Imbibed_Seeds_P Parameter: Tissue Value: Aerial vs. Embryo
  misc_feature: MA Experiment ID: 108599 Result: Down-regulated in Transcription
  misc_feature: MA Experiment 108599 PARAMETER Experiment Name: Zm_RT1_P Parameter: Age (day) Value: 11
  misc_feature: MA Experiment 108599 PARAMETER Experiment Name: Zm_RT1_P Parameter: Organism Value: Zea mays
  misc_feature: MA Experiment 108599 PARAMETER Experiment Name: Zm_RT1_P Parameter: Plant Line Value: rt1 mut vs. rt1 wt
  misc_feature: MA Experiment 108599 PARAMETER Experiment Name: Zm_RT1_P Parameter: Tissue Value: Roots
  misc_feature: MA Experiment ID: 108687 Result: Up-regulated in Transcription
  misc_feature: MA Experiment 108687 PARAMETER Experiment Name: Zm_Embryos-Flowers__P Parameter: Tissue Value: Embryo vs. Aerial+
  misc_feature: MA Experiment ID: 108688 Result: Down-regulated in Transcription
  misc_feature: MA Experiment 108688 PARAMETER Experiment Name: Zm_Embryos-Flowers__P Parameter: Tissue Value: Immature Flowers vs. Aerial+
  misc_feature: MA Experiment ID: 20000108 Result: Down-regulated in Transcription
  misc_feature: MA Experiment 20000108 PARAMETER Experiment Name: Zm_Root-Tips_P Parameter: Age (day) Value: 12
  misc_feature: MA Experiment 20000108 PARAMETER Experiment Name: Zm_Root-Tips_P Parameter: Organism Value: Zea mays
  misc_feature: MA Experiment 20000108 PARAMETER Experiment Name: Zm_Root-Tips_P Parameter: Tissue Value: Root tips vs. Root mid region    35
  misc_feature: MA Experiment 20000108 PARAMETER Experiment Name: Zm_Root-Tips_P Parameter: Tissue Value: Root tips vs. Root mid region   Sequence Listing-Misc Features (4)
  misc_feature: MA Experiment ID: 20000478 Result: Up-regulated in Transcription
  misc_feature: MA Experiment 20000478 PARAMETER Experiment Name: Zm_5mM_SA_P Parameter: Age (day) Value: 11
  misc_feature: MA Experiment 20000478 PARAMETER Experiment Name: Zm_5mM_SA_P Parameter: Organism Value: Zea mays
  misc_feature: MA Experiment 20000478 PARAMETER Experiment Name: Zm_5mM_SA_P Parameter: Plant Line Value: 35A19
  misc_feature: MA Experiment 20000478 PARAMETER Experiment Name: Zm_5mM_SA_P Parameter: Timepoint (hr) Value: 72
  misc_feature: MA Experiment 20000478 PARAMETER Experiment Name: Zm_5mM_SA_P Parameter: Tissue Value: Aerial
  misc_feature: MA Experiment 20000478 PARAMETER Experiment Name: Zm_5mM_SA_P Parameter: Treatment Value: 5mM SA vs. No Treatment
  misc_feature: MA Experiment ID: 20000626 Result: Up-regulated in Transcription
  misc_feature: MA Experiment 20000626 PARAMETER Experiment Name: Zm_Herbicide-Treatments_P Parameter: Timepoint (hr) Value: 12
  misc_feature: MA Experiment 20000626 PARAMETER Experiment Name: Zm_Herbicide-Treatments_P Parameter: Tissue Value: Aerial
  misc_feature: MA Experiment 20000626 PARAMETER Experiment Name: Zm_Herbicide-Treatments_P Parameter: Treatment Value: Roundup vs. No Treatment
  misc_feature: MA Experiment ID: 20001608 Result: Down-regulated in Transcription
  misc_feature: MA Experiment 20001608 PARAMETER Experiment Name: Zm_50ppm_KNO3_L-to-H_P Parameter: Age (day) Value: 21
  misc_feature: MA Experiment 20001608 PARAMETER Experiment Name: Zm_50ppm_KNO3_L-to-H_P Parameter: Organism Value: Zea mays
  misc_feature: MA Experiment 20001608 PARAMETER Experiment Name: Zm_50ppm_KNO3_L-to-H_P Parameter: Plant Line Value: 35A19
  misc_feature: MA Experiment 20001608 PARAMETER Experiment Name: Zm_50ppm_KNO3_L-to-H_P Parameter: Timepoint (hr) Value: 48
  misc_feature: MA Experiment 20001608 PARAMETER Experiment Name: Zm_50ppm_KNO3_L-to-H_P Parameter: Tissue Value: Shoots
  misc_feature: MA Experiment 20001608 PARAMETER Experiment Name: Zm_50ppm_KNO3_L-to-H_P Parameter: Treatment Value: 50ppm KNO3 vs. 50ppm KCl
atcacactcgcacagtctcaccacagcgagcgagagcaaggcgcccaagcaaccaccgcgagaacaagtcgcagccaaacagccccgtctcccagcgaagcttgagcttgcattattctaccatgtcttccatggagctgctccacgccgtcgtcccggagaagcagagcgaggaggaggtcgcgcccgcagcgacgaccacgagcagcagcgccaccgccacgggcggggacgagggcgcccacgtgctccaggggtgggccaagaggaagcgctcgcgccgccagcgatcggaggaggagaacctcgcgctctgcctcctcatgctctcccgcggtggccaccaccgcgtccaggcgccgccaacgccggtcccgtccgcggcgccggccgccgcggagttcaggtgctccgtctgcggcaagtccttcagctcctaccaggcgctggggggccacaagaccagccaccgcgtcaagctgcccacccctcctcctcctcctcctgctgtaactgtcccggcagcagtgcccgtcccggaggcccccgccccgaccaccgtcgtcgtcccgccgctgccgccagtcgaggtcggccgcgagccggccacgtcatccaccgccgcgtcctccgacggggcggcctcgagcagagtccaccggtgctccatctgccacaaggagttcccgaccggccaggcgctcggcgggcacaagaggaagcactacgacgggggcgtcggcagcgccgccgcgtccaccgacgtcccggcggcgcccgccgagacgtccgccgaggtcgggagctccgccgcgcgtgcgttcgacctcaacctcccggccgtgccggagttcgtgttccggtgcggcaagcccggcaagatgtgggaggaggacgaggaggtgcagagccccctcgccttcaagaagccccgcctcctcatgaccgcgtgaaaccgctgcgcgcgcgggcggcggatctcatctcatcacccgtccaagattttggtccgcagctgccgagttcagcggtggaagtggaacacactattcgttcattcatttcgtatggtgccagtagcgctattgtttgatttttgtggctgctcctcttgtacagtaccgagtgcgagaaaagatgcatagtcatcgtatacataccaatacaataccgtacctataggtcttcctattcctgtggaagagtagaacttgtatccttattagctgtcagttcatacacacttggttctcattatcagagatcattggtgaattagtggttttgtatcataagcttattgtaaatgatggattggagattagtatggaatcagatacccatttgtgc

SEQ ID NO: 8524 - protein, 363 aa, Zea mays subsp. mays
  peptide (1)..(363): Ceres Seq. ID no. 12408433
  misc_feature (45)..(331): Homolog of NCBI NO: 29247944 NR Description: GLP_26_54603_52153 [Giardia lamblia ATCC 50803]
  misc_feature (48)..(324): Homolog of NCBI NO: 29247944 NR Description: GLP_26_54603_52153 [Giardia lamblia ATCC 50803]
SHSHSLTTASESKAPKQPPREQVAAKQPRLPAKLELALFYHVFHGAAPRRRPGEAERGGGRARSDDHEQQRHRHGRGRGRPRAPGVGQEEALAPPAIGGGEPRALPPHALPRWPPPRPGAANAGPVRGAGRRGVQVLRLRQVLQLLPGAGGPQDQPPRQAAHPSSSSSCCNCPGSSARPGGPRPDHRRRPAAAASRGRPRAGHVIHRRVLRRGGLEQSPPVLHLPQGVPDRPGARRAQEEALRRGRRQRRRVHRRPGGARRDVRRGRELRRACVRPQPPGRAGVRVPVRQARQDVGGGRGGAEPPRLQEAPPPHDRVKPLRARAADLISSPVQDFGPQLPSSAVEVEHTIRSFISYGASSAIV

SEQ ID NO: 8525 - protein, 316 aa, Zea mays subsp. mays
  peptide (1)..(316): Ceres Seq. ID no. 12408434
  misc_feature (219)..(241): Pfam Name: Zinc finger, C2H2 type Pfam Description: Zinc finger, C2H2 type
  misc_feature (39)..(313): Homolog of NCBI NO: 12698882 NR Description: zinc finger transcription factor ZF1 [Oryza >gi|17027281|gb|AAL34135.1|AC090713_22 zinc finger transcription
  misc_feature (54)..(313): Homolog of NCBI NO: 34925590 NR Description: Zinc-finger protein 1 (WZF1)
  misc_feature (45)..(184): Homolog of NCBI NO: 34015350 NR Description: putative zinc finger transcription factor [Oryza
  misc_feature (204)..(314): Homolog of NCBI NO: 33331578 NR Description: zinc finger protein [Capsicum annuum]
  misc_feature (87)..(161): Homolog of NCBI NO: 33331578 NR Description: zinc finger protein [Capsicum annuum]
  misc_feature (57)..(186): Homolog of NCBI NO: 31075792 NR Description: zinc finger transcription factor OsZFP34 [Oryza
  misc_feature (179)..(316): Homolog of NCBI NO: 31075792 NR Description: zinc finger transcription factor OsZFP34 [Oryza
HTRTVSPQRARARRPSNHRENKSQPNSPVSQRSLSLHYSTMSSMELLHAVVPEKQSEEEVAPAATTTSSSATATGGDEGAHVLQGWAKRKRSRRQRSEEENLALCLLMLSRGGHHRVQAPPTPVPSAAPAAAEFRCSVCGKSFSSYQALGGHKTSHRVKLPTPPPPPPAVTVPAAVPVPEAPAPTTVVVPPLPPVEVGREPATSSTAASSDGAASSRVHRCSICHKEFPTGQALGGHKRKHYDGGVGSAAASTDVPAAPAETSAEVGSSAARAFDLNLPAVPEFVFRCGKPGKMWEEDEEVQSPLAFKKPRLLMTA

SEQ ID NO: 8526 - protein, 276 aa, Zea mays subsp. mays
  peptide (1)..(276): Ceres Seq. ID no. 12408435
  misc_feature (179)..(201): Pfam Name: Zinc finger, C2H2 type Pfam Description: Zinc finger, C2H2 type
  misc_feature (1)..(273): Homolog of NCBI NO: 12698882 NR Description: zinc finger transcription factor ZF1 [Oryza >gi|17027281|gb|AAL34135.1|AC090713_22 zinc finger transcription
  misc_feature (14)..(273): Homolog of NCBI NO: 34925590 NR Description: Zinc-finger protein 1 (WZF1)
  misc_feature (5)..(144): Homolog of NCBI NO: 34015350 NR Description: putative zinc finger transcription factor [Oryza
  misc_feature (164)..(274): Homolog of NCBI NO: 33331578 NR Description: zinc finger protein [Capsicum annuum]
  misc_feature (47)..(121): Homolog of NCBI NO: 33331578 NR Description: zinc finger protein [Capsicum annuum]
  misc_feature (17)..(146): Homolog of NCBI NO: 31075792 NR Description: zinc finger transcription factor OsZFP34 [Oryza
  misc_feature (139)..(276): Homolog of NCBI NO: 31075792 NR Description: zinc finger transcription factor OsZFP34 [Oryza
MSSMELLHAVVPEKQSEEEVAPAATTTSSSATATGGDEGAHVLQGWAKRKRSRRQRSEEENLALCLLMLSRGGHHRVQAPPTPVPSAAPAAAEFRCSVCGKSFSSYQALGGHKTSHRVKLPTPPPPPPAVTVPAAVPVPEAPAPTTVVVPPLPPVEVGREPATSSTAASSDGAASSRVHRCSICHKEFPTGQALGGHKRKHYDGGVGSAAASTDVPAAPAETSAEVGSSAARAFDLNLPAVPEFVFRCGKPGKMWEEDEEVQSPLAFKKPRLLMTA

SEQ ID NO: 8527 - DNA, 985 bp, Zea mays subsp. mays
  misc_feature (1)..(985): Ceres Seq. ID no. 12360792
  misc_feature: MA Experiment ID: 108527 Result: Down-regulated in Transcription
  misc_feature: MA Experiment 108527 PARAMETER Experiment Name: Zm_5mM_NO_P Parameter: Age (day) Value: 8
  misc_feature: MA Experiment 108527 PARAMETER Experiment Name: Zm_5mM_NO_P Parameter: Organism Value: Zea mays
  misc_feature: MA Experiment 108527 PARAMETER Experiment Name: Zm_5mM_NO_P Parameter: Plant Line Value: 35A19
  misc_feature: MA Experiment 108527 PARAMETER Experiment Name: Zm_5mM_NO_P Parameter: Timepoint (hr) Value: 6
  misc_feature: MA Experiment 108527 PARAMETER Experiment Name: Zm_5mM_NO_P Parameter: Tissue Value: Aerial
  misc_feature: MA Experiment 108527 PARAMETER Experiment Name: Zm_5mM_NO_P Parameter: Treatment Value: 5mM NO vs. No Treatment
gcagcgaggaacgtgatcagaatcagccagtggtgcttgtgacggggtgctcggagggcggcatcggccacgcgatggcacgcgccttcgctgcggccgggtgcgccgtcgtggccacggcgcggtcacgcggttccatgcgcggtctcgacggcgacccgcggttcctgctgctggagctcgacgtgcgctccgacgagagcgcgcgcgccgccgtggcggatgcgctgcgggagcacggccgcatcgacgtgctcgtcaacaacgctggggttcacctcgtcgcaccactcgccgaggtgcccatggagtccttccaccaggttttcgacaccaatgtctatggtgcaatgaggttaattcaatctgttattcctcacatgatggaaagaaggaaaggaacaattgtgaatgttggaagtattaccgctctggcacctggaccatgggctggtgtgtattcagcatccaaagctgctcttcatgcattgagtgactcgttaagggttgaactaagaagcttcggcataaacgtgatgaccgtcgccccaggagggacgaggtcgaatcttgggaattcttctgcagccaagtatgatcagatgcacgagtggaagtactacaagaaatacgaggaagggctccgagccaggactggcatttcccagggccccaggtccactccagcagaagagcttgcaaaggcggtggttgcatcggttctaaagaagaaccctccagcttggttcgcttacggccagtactctctattctgtcgattttgtattatgcaccgctatggttcagagattgcctctataagtttgtcatgaaatgttagtccctggaagaataatggctgtatggaccaaagagagagctggacaggcccagttcaattcatttcattgtactgacagcctgttacgtcgtactcctatattgtatatatagaactatgctctgtacctgttggcaacttggc

SEQ ID NO: 8528 - protein, 276 aa, Zea mays subsp. mays
  peptide (1)..(276): Ceres Seq. ID no. 12360793
  misc_feature (46)..(255): Homolog of NCBI NO: 38567881 NR Description: OSJNBa0036B21.7 [Oryza sativa (japonica
  misc_feature (3)..(255): Homolog of NCBI NO: 26453106 NR Description: unknown protein [Arabidopsis thaliana]
  misc_feature (3)..(255): Homolog of NCBI NO: 30682984 NR Description: short-chain dehydrogenase/reductase family
  misc_feature (104)..(255): Homolog of NCBI NO: 11358313 NR Description: hypothetical protein T31P16.40 - Arabidopsis >gi|7960724|emb|CAB92046.1| putative protein [Arabidopsis
  misc_feature (3)..(122): Homolog of NCBI NO: 11358313 NR Description: hypothetical protein T31P16.40 - Arabidopsis >gi|7960724|emb|CAB92046.1| putative protein [Arabidopsis
  misc_feature (9)..(264): Homolog of NCBI NO: 18424923 NR Description: Expressed protein; protein id: At5g65205.1, by cDNA: gi_15983431, supported by cDNA: gi_20466144 [Arabidopsis >gi|15983432|gb|AAL11584.1|AF424590_1 AT5g10050/T31P16_40
  misc_feature (9)..(250): Homolog of NCBI NO: 10178182 NR Description: contains similarity to
  misc_feature (46)..(264): Homolog of NCBI NO: 26450169 NR Description: unknown protein [Arabidopsis thaliana]
  misc_feature (9)..(255): Homolog of NCBI NO: 23058177 NR Description: hypothetical protein [Pseudomonas fluorescens
  misc_feature (7)..(246): Homolog of NCBI NO: 32039035 NR Description: hypothetical protein [Pseudomonas aeruginosa
SEERDQNQPVVLVTGCSEGGIGHAMARAFAAAGCAVVATARSRGSMRGLDGDPRFLLLELDVRSDESARAAVADALREHGRIDVLVNNAGVHLVAPLAEVPMESFHQVFDTNVYGAMRLIQSVIPHMMERRKGTIVNVGSITALAPGPWAGVYSASKAALHALSDSLRVELRSFGINVMTVAPGGTRSNLGNSSAAKYDQMHEWKYYKKYEEGLRARTGISQGPRSTPAEELAKAVVASVLKKNPPAWFAYGQYSLFCRFCIMHRYGSEIASISLS

SEQ ID NO: 8529 - protein, 252 aa, Zea mays subsp. mays
  peptide (1)..(252): Ceres Seq. ID no. 12360794
  misc_feature (22)..(231): Homolog of NCBI NO: 38567881 NR Description: OSJNBa0036B21.7 [Oryza sativa (japonica
  misc_feature (1)..(231): Homolog of NCBI NO: 26453106 NR Description: unknown protein [Arabidopsis thaliana]
  misc_feature (1)..(231): Homolog of NCBI NO: 30682984 NR Description: short-chain dehydrogenase/reductase family
  misc_feature (80)..(231): Homolog of NCBI NO: 11358313 NR Description: hypothetical protein T31P16.40 - Arabidopsis >gi|7960724|emb|CAB92046.1| putative protein [Arabidopsis
  misc_feature (1)..(98): Homolog of NCBI NO: 11358313 NR Description: hypothetical protein T31P16.40 - Arabidopsis >gi|7960724|emb|CAB92046.1| putative protein [Arabidopsis
  misc_feature (1)..(240): Homolog of NCBI NO: 18424923 NR Description: Expressed protein; protein id: At5g65205.1, by cDNA: gi_15983431, supported by cDNA: gi_20466144 [Arabidopsis >gi|15983432|gb|AAL11584.1|AF424590_1 AT5g10050/T31P16_40
  misc_feature (1)..(226): Homolog of NCBI NO: 10178182 NR Description: contains similarity to
  misc_feature (22)..(240): Homolog of NCBI NO: 26450169 NR Description: unknown protein [Arabidopsis thaliana]
  misc_feature (1)..(231): Homolog of NCBI NO: 23058177 NR Description: hypothetical protein [Pseudomonas fluorescens
  misc_feature (1)..(222): Homolog of NCBI NO: 32039035 NR Description: hypothetical protein [Pseudomonas aeruginosa
MARAFAAAGCAVVATARSRGSMRGLDGDPRFLLLELDVRSDESARAAVADALREHGRIDVLVNNAGVHLVAPLAEVPMESFHQVFDTNVYGAMRLIQSVIPHMMERRKGTIVNVGSITALAPGPWAGVYSASKAALHALSDSLRVELRSFGINVMTVAPGGTRSNLGNSSAAKYDQMHEWKYYKKYEEGLRARTGISQGPRSTPAEELAKAVVASVLKKNPPAWFAYGQYSLFCRFCIMHRYGSEIASISLS

SEQ ID NO: 8530 - protein, 231 aa, Zea mays subsp. mays
  peptide (1)..(231): Ceres Seq. ID no. 12360795
  misc_feature (1)..(210): Homolog of NCBI NO: 38567881 NR Description: OSJNBa0036B21.7 [Oryza sativa (japonica
  misc_feature (1)..(210): Homolog of NCBI NO: 26453106 NR Description: unknown protein [Arabidopsis thaliana]
  misc_feature (1)..(210): Homolog of NCBI NO: 30682984 NR Description: short-chain dehydrogenase/reductase family
  misc_feature (59)..(210): Homolog of NCBI NO: 11358313 NR Description: hypothetical protein T31P16.40 - Arabidopsis >gi|7960724|emb|CAB92046.1| putative protein [Arabidopsis
  misc_feature (1)..(77): Homolog of NCBI NO: 11358313 NR Description: hypothetical protein T31P16.40 - Arabidopsis >gi|7960724|emb|CAB92046.1| putative protein [Arabidopsis
  misc_feature (1)..(219): Homolog of NCBI NO: 18424923 NR Description: Expressed protein; protein id: At5g65205.1, by cDNA: gi_15983431, supported by cDNA: gi_20466144 [Arabidopsis >gi|15983432|gb|AAL11584.1|AF424590_1 AT5g10050/T31P16_40
  misc_feature (1)..(205): Homolog of NCBI NO: 10178182 NR Description: contains similarity to
  misc_feature (1)..(219): Homolog of NCBI NO: 26450169 NR Description: unknown protein [Arabidopsis thaliana]
  misc_feature (1)..(210): Homolog of NCBI NO: 23058177 NR Description: hypothetical protein [Pseudomonas fluorescens
  misc_feature (1)..(201): Homolog of NCBI NO: 32039035 NR Description: hypothetical protein [Pseudomonas aeruginosa
MRGLDGDPRFLLLELDVRSDESARAAVADALREHGRIDVLVNNAGVHLVAPLAEVPMESFHQVFDTNVYGAMRLIQSVIPHMMERRKGTIVNVGSITALAPGPWAGVYSASKAALHALSDSLRVELRSFGINVMTVAPGGTRSNLGNSSAAKYDQMHEWKYYKKYEEGLRARTGISQGPRSTPAEELAKAVVASVLKKNPPAWFAYGQYSLFCRFCIMHRYGSEIASISLS

SEQ ID NO: 8531 - DNA, 1796 bp, Zea mays subsp. mays
  misc_feature (1)..(1796): Ceres Seq. ID no. 12365735
  misc_feature: MA Experiment ID: 108504 Result: Down-regulated in Transcription
  misc_feature: MA Experiment 108504 PARAMETER Experiment Name: Zm_Drought_P Parameter: Age (day) Value: 8
  misc_feature: MA Experiment 108504 PARAMETER Experiment Name: Zm_Drought_P Parameter: Organism Value: Zea mays
  misc_feature: MA Experiment 108504 PARAMETER Experiment Name: Zm_Drought_P Parameter: Plant Line Value: 35A19
  misc_feature: MA Experiment 108504 PARAMETER Experiment Name: Zm_Drought_P Parameter: Timepoint (hr) Value: 12
  misc_feature: MA Experiment 108504 PARAMETER Experiment Name: Zm_Drought_P Parameter: Tissue Value: Aerial
  misc_feature: MA Experiment 108504 PARAMETER Experiment Name: Zm_Drought_P Parameter: Treatment Value: Drought vs. No Drought
  misc_feature: MA Experiment ID: 108515 Result: Down-regulated in Transcription
  misc_feature: MA Experiment 108515 PARAMETER Experiment Name: Zm_2mM_SA_P Parameter: Age (day) Value: 8
  misc_feature: MA Experiment 108515 PARAMETER Experiment Name: Zm_2mM_SA_P Parameter: Organism Value: Zea mays
  misc_feature: MA Experiment 108515 PARAMETER Experiment Name: Zm_2mM_SA_P Parameter: Plant Line Value: 35A19
  misc_feature: MA Experiment 108515 PARAMETER Experiment Name: Zm_2mM_SA_P Parameter: Timepoint (hr) Value: 12
  misc_feature: MA Experiment 108515 PARAMETER Experiment Name: Zm_2mM_SA_P Parameter: Tissue Value: Aerial
  misc_feature: MA Experiment 108515 PARAMETER Experiment Name: Zm_2mM_SA_P Parameter: Treatment Value: 2mM SA vs. No Treatment
  misc_feature: MA Experiment ID: 108528 Result: Down-regulated in Transcription
  misc_feature: MA Experiment 108528 PARAMETER Experiment Name: Zm_Imbibed_Seeds_P Parameter: Age (day) Value: 5 vs. 2
  misc_feature: MA Experiment 108528 PARAMETER Experiment Name: Zm_Imbibed_Seeds_P Parameter: Organism Value: Zea mays
  misc_feature: MA Experiment 108528 PARAMETER Experiment Name: Zm_Imbibed_Seeds_P Parameter: Plant Line Value: 35A19
  misc_feature: MA Experiment 108528 PARAMETER Experiment Name: Zm_Imbibed_Seeds_P Parameter: Tissue Value: Aerial vs. Embryo
  misc_feature: MA Experiment ID: 108530 Result: Down-regulated in Transcription
  misc_feature: MA Experiment 108530 PARAMETER Experiment Name: Zm_Imbibed_Seeds_P Parameter: Age (day) Value: 6 vs. 2
  misc_feature: MA Experiment 108530 PARAMETER Experiment Name: Zm_Imbibed_Seeds_P Parameter: Organism Value: Zea mays
  misc_feature: MA Experiment 108530 PARAMETER Experiment Name: Zm_Imbibed_Seeds_P Parameter: Plant Line Value: 35A19
  misc_feature: MA Experiment 108530 PARAMETER Experiment Name: Zm_Imbibed_Seeds_P Parameter: Tissue Value: Aerial vs. Embryo
  misc_feature: MA Experiment ID: 108543 Result: Up-regulated in Transcription
  misc_feature: MA Experiment ID: 108556 Result: Down-regulated in Transcription
  misc_feature: MA Experiment 108556 PARAMETER Experiment Name: Zm_Drought_P Parameter: Age (day) Value: 9
  misc_feature: MA Experiment 108556 PARAMETER Experiment Name: Zm_Drought_P Parameter: Organism Value: Zea mays
  misc_feature: MA Experiment 108556 PARAMETER Experiment Name: Zm_Drought_P Parameter: Plant Line Value: 35A19
  misc_feature: MA Experiment 108556 PARAMETER Experiment Name: Zm_Drought_P Parameter: Timepoint (hr) Value: 24
  misc_feature: MA Experiment 108556 PARAMETER Experiment Name: Zm_Drought_P Parameter: Tissue Value: Aerial
  misc_feature: MA Experiment 108556 PARAMETER Experiment Name: Zm_Drought_P Parameter: Treatment Value: Drought vs. No Drought
  misc_feature: MA Experiment ID: 108559 Result: Down-regulated in Transcription
  misc_feature: MA Experiment 108559 PARAMETER Experiment Name: Zm_5mM_NO_P Parameter: Age (day) Value: 8
  misc_feature: MA Experiment 108559 PARAMETER Experiment Name: Zm_5mM_NO_P Parameter: Organism Value: Zea mays
  misc_feature: MA Experiment 108559 PARAMETER Experiment Name: Zm_5mM_NO_P Parameter: Plant Line Value: 35A19
  misc_feature: MA Experiment 108559 PARAMETER Experiment Name: Zm_5mM_NO_P Parameter: Timepoint (hr) Value: 12
  misc_feature: MA Experiment 108559 PARAMETER Experiment Name: Zm_5mM_NO_P Parameter: Tissue Value: Aerial
  misc_feature: MA Experiment 108559 PARAMETER Experiment Name: Zm_5mM_NO_P Parameter: Treatment Value: 5mM NO vs. No Treatment
  misc_feature: MA Experiment ID: 108597 Result: Down-regulated in Transcription
  misc_feature: MA Experiment 108597 PARAMETER Experiment Name: Zm_100uM_ABA_P Parameter: Age (day) Value: 9
  misc_feature: MA Experiment 108597 PARAMETER Experiment Name: Zm_100uM_ABA_P Parameter: Organism Value: Zea mays
  misc_feature: MA Experiment 108597 PARAMETER Experiment Name: Zm_100uM_ABA_P Parameter: Plant Line Value: 35A19
  misc_feature: MA Experiment 108597 PARAMETER Experiment Name: Zm_100uM_ABA_P Parameter: Timepoint (hr) Value: 24
  misc_feature: MA Experiment 108597 PARAMETER Experiment Name: Zm_100uM_ABA_P Parameter: Tissue Value: Aerial
  misc_feature: MA Experiment 108597 PARAMETER Experiment Name: Zm_100uM_ABA_P Parameter: Treatment Value: 100uM ABA vs. No Treatment
  misc_feature: MA Experiment ID: 20000478 Result: Down-regulated in Transcription
  misc_feature: MA Experiment 20000478 PARAMETER Experiment Name: Zm_5mM_SA_P Parameter: Age (day) Value: 11
  misc_feature: MA Experiment 20000478 PARAMETER Experiment Name: Zm_5mM_SA_P Parameter: Organism Value: Zea mays
  misc_feature: MA Experiment 20000478 PARAMETER Experiment Name: Zm_5mM_SA_P Parameter: Plant Line Value: 35A19
  misc_feature: MA Experiment 20000478 PARAMETER Experiment Name: Zm_5mM_SA_P Parameter: Timepoint (hr) Value: 72
  misc_feature: MA Experiment 20000478 PARAMETER Experiment Name: Zm_5mM_SA_P Parameter: Tissue Value: Aerial
  misc_feature: MA Experiment 20000478 PARAMETER Experiment Name: Zm_5mM_SA_P Parameter: Treatment Value: 5mM SA vs. No Treatment
  misc_feature: MA Experiment ID: 20000479 Result: Down-regulated in Transcription
  misc_feature: MA Experiment 20000479 PARAMETER Experiment Name: Zm_Drought_P Parameter: Age (day) Value: 10
  misc_feature: MA Experiment 20000479 PARAMETER Experiment Name: Zm_Drought_P Parameter: Organism Value: Zea mays
  misc_feature: MA Experiment 20000479 PARAMETER Experiment Name: Zm_Drought_P Parameter: Plant Line Value: 35A19
  misc_feature: MA Experiment 20000479 PARAMETER Experiment Name: Zm_Drought_P Parameter: Timepoint (hr) Value: 48
  misc_feature: MA Experiment 20000479 PARAMETER Experiment Name: Zm_Drought_P Parameter: Tissue Value: Aerial
  misc_feature: MA Experiment 20000479 PARAMETER Experiment Name: Zm_Drought_P Parameter: Treatment Value: Drought vs. No Drought
  misc_feature: MA Experiment ID: 20000492 Result: Up-regulated in Transcription
  misc_feature: MA Experiment 20000492 PARAMETER Experiment Name: Zm_Hybrid_Seed_Dev_P Parameter: DAP Value: 12
  misc_feature: MA Experiment 20000492 PARAMETER Experiment Name: Zm_Hybrid_Seed_Dev_P Parameter: Organism Value: Zea mays
  misc_feature: MA Experiment 20000492 PARAMETER Experiment Name: Zm_Hybrid_Seed_Dev_P Parameter: Plant Line Value: 35A19
  misc_feature: MA Experiment 20000492 PARAMETER Experiment Name: Zm_Hybrid_Seed_Dev_P Parameter: Tissue Value: Fert Kernel vs. Unfert Floret
  misc_feature: MA Experiment ID: 20000535 Result: Up-regulated in Transcription
  misc_feature: MA Experiment 20000535 PARAMETER Experiment Name: Zm_Hybrid_Seed_Dev_P Parameter: DAP Value: 30 vs. 12
  misc_feature: MA Experiment 20000535 PARAMETER Experiment Name: Zm_Hybrid_Seed_Dev_P Parameter: Organism Value: Zea mays
  misc_feature: MA Experiment 20000535 PARAMETER Experiment Name: Zm_Hybrid_Seed_Dev_P Parameter: Plant Line Value: 35A19
  misc_feature: MA Experiment 20000535 PARAMETER Experiment Name: Zm_Hybrid_Seed_Dev_P Parameter: Tissue Value: Embryo vs. Unfert Floret
  misc_feature: MA Experiment ID: 20000632 Result: Down-regulated in Transcription
  misc_feature: MA Experiment 20000632 PARAMETER Experiment Name: Zm_Herbicide-Treatments_P Parameter: Timepoint (hr) Value: 4
  misc_feature: MA Experiment 20000632 PARAMETER Experiment Name: Zm_Herbicide-Treatments_P Parameter: Tissue Value: Aerial
  misc_feature: MA Experiment 20000632 PARAMETER Experiment Name: Zm_Herbicide-Treatments_P Parameter: Treatment Value: Glean vs. No Treatment
ctcccacagtcccactcctctctctctcgcgctctctctctttcatcgccaccaccgccgtgaaatccgcacgcgtgcttcctgtcgatttttgagctgtgactgtgagcgccatgcgccgtggaggctgtgtccggaaatggcaccgaggcagtggccgcggcgccggcgaaggaggtgagcaccaagcaggcgtctttccgggaggagagcaacttcctggacgatctcaaggagagcgagcgtaaggcgcttgccgagctccgcgacaaggtcgaggcggccatcgtggagggcaagctgttcgacgacggtaagccggaggtgaaggagaaggagaaggagaaggaggaggccaagaagaaggcagtggagaagaaagatgagcagcccgaagccgaggagaagggagaggaggatgacaagaaggaggccgacgccgaggaggagaagaaggaaggcgtggaggaaggggagaagaaggaaggccaggaggaaggggagaaggaggaggccgaggaggagagcggagacgacaccaagcaggaggccaaggaagaggaagccgacgacaaggcggcggcgaaggagccggagacggcggccgttgtcgtcgacaaggacatcgcgctgtggggcgtgcctttgctccctagcaagggcgacgaggccaccgacgtggtgctcctcaagttcctccgcgcgcgcgacttcaaggccggcgccgcgttcgagatgctccgccgcacgctccgctggcgcagggactggaccggcttcagctccggcgccgagtccgacgccgacctccccgaggagctcgcgggcgcgtgctacctcgacggcgcagaccacgagggccacccggtgtgctacaacgcgctgggcgtgttcgcggacgacgccgtgtacaagaaggcgctgggcaccgaggaaggcaaggccaggttcctccggtggcgggtgcgcgccatggagcgccacgtcgccgagctggacctgaggcccggcggcgtcgcgtcgctgctgcaggtgatcgacctcaggaactcgccggggccggccaagaaggacttccgagtcgccgtcaagcaggtctcgacctgttccaggacaactaccccgagctcgtcgcgagaaacatcttggtcaacgtgccgttctggtactacgcgttcagcaccctgttctacccgttcctgacgcagaggacgaagagcaagttcgtcgttgctcgcccgtcaaaggtcaccgagaccctcctcaagtacattccgatcgaggccatcccggtgaagtacggcggcctgaagcgcgacggcgacaccgagttctcggcggacgacggcgaggtcgcggaggtcaccgtcaagggaagctccacggagaccatcgagatcgaagctactgaggctgatgccacgctgacatgggacctgactgtgctggggtgggaggtgaactacaaggaggagttcgtgccggcggacgagggctcctacactatcatcgtcaggaaaggcaagaagatggcgtccggcgaggaggcggtccgcaactcgttccgcgccggcgagccgggcaaggtcgtgctcaccgtccagaacacctcgcacaggaagaagaaggtgctgttcaggcacaaggccaagagcgcctgcgccaagaagtgctgagaggctaagaaatttgggagtgaaattggttgtggatttcaatattcgttacattctttgtgtgtgtgtaaggagagagagagagaacattgttcgctgattatttgaggtggttgttgc

SEQ ID NO: 8532 - protein, 206 aa, Zea mays subsp. mays
  peptide (1)..(206): Ceres Seq. ID no. 12365736
  misc_feature (1)..(52): Pfam Name: TT viral orf 1 Pfam Description: TT viral orf 1
  misc_feature (1)..(206): Homolog of NCBI NO: 5821145 NR Description: RNA binding protein [Homo sapiens]
  misc_feature (1)..(206): Homolog of NCBI NO: 25143299 NR Description: pre-mRNA splicing SR protein related RSR-1 (68.2
  misc_feature (1)..(206): Homolog of NCBI NO: 5821143 NR Description: RNA binding protein [Homo sapiens]
  misc_feature (1)..(206): Homolog of NCBI NO: 6649242 NR Description: splicing coactivator subunit SRm300 [Homo sapiens]
  misc_feature (1)..(206): Homolog of NCBI NO: 19923466 NR Description: splicing coactivator subunit SRm300; RNA binding
  misc_feature (1)..(206): Homolog of NCBI NO: 28972153 NR Description: mKIAA0324 protein [Mus musculus]
  misc_feature (1)..(206): Homolog of NCBI NO: 28574039 NR Description: Salivary gland secretion 1 CG3047-PA
  misc_feature (1)..(206): Homolog of NCBI NO: 5821151 NR Description: RNA binding protein [Homo sapiens]
  misc_feature (1)..(206): Homolog of NCBI NO: 14017923 NR Description: KIAA1853 protein [Homo sapiens]
  misc_feature (1)..(206): Homolog of NCBI NO: 6634015 NR Description: KIAA0324 protein [Homo sapiens]
MSSPKPRRRERRMTRRRPTPRRRRRKAWRKGRRRKARRKGRRRRPRRRAETTPSRRPRKRKPTTRRRRRSRRRRPLSSTRTSRCGACLCSLARATRPPTWCSSSSSARATSRPAPRSRCSAARSAGAGTGPASAPAPSPTPTSPRSSRARATSTAQTTRATRCATTRWACSRTTPCTRRRWAPRKARPGSSGGGCAPWSATSPSWT

SEQ ID NO: 8533 - protein, 194 aa, Zea mays subsp. mays
  peptide (1)..(194): Ceres Seq. ID no. 12365737
  misc_feature (1)..(62): Pfam Name: Cupin Pfam Description: Cupin
  misc_feature (1)..(194): Homolog of NCBI NO: 5821145 NR Description: RNA binding protein [Homo sapiens]
  misc_feature (1)..(194): Homolog of NCBI NO: 25143299 NR Description: pre-mRNA splicing SR protein related RSR-1 (68.2
  misc_feature (1)..(194): Homolog of NCBI NO: 5821143 NR Description: RNA binding protein [Homo sapiens]
  misc_feature (1)..(194): Homolog of NCBI NO: 6649242 NR Description: splicing coactivator subunit SRm300 [Homo sapiens]
  misc_feature (1)..(194): Homolog of NCBI NO: 19923466 NR Description: splicing coactivator subunit SRm300; RNA binding
  misc_feature (1)..(194): Homolog of NCBI NO: 28972153 NR Description: mKIAA0324 protein [Mus musculus]
  misc_feature (1)..(194): Homolog of NCBI NO: 28574039 NR Description: Salivary gland secretion 1 CG3047-PA
  misc_feature (1)..(194): Homolog of NCBI NO: 5821151 NR Description: RNA binding protein [Homo sapiens]
  misc_feature (1)..(194): Homolog of NCBI NO: 14017923 NR Description: KIAA1853 protein [Homo sapiens]
  misc_feature (1)..(194): Homolog of NCBI NO: 6634015 NR Description: KIAA0324 protein [Homo sapiens]
MTRRRPTPRRRRRKAWRKGRRRKARRKGRRRRPRRRAETTPSRRPRKRKPTTRRRRRSRRRRPLSSTRTSRCGACLCSLARATRPPTWCSSSSSARATSRPAPRSRCSAARSAGAGTGPASAPAPSPTPTSPRSSRARATSTAQTTRATRCATTRWACSRTTPCTRRRWAPRKARPGSSGGGCAPWSATSPSWT

SEQ ID NO: 8534 - protein, 155 aa, Zea mays subsp. mays
  peptide (1)..(155): Ceres Seq. ID no. 12365738
  misc_feature (32)..(121): Pfam Name: CRAL/TRIO domain Pfam Description: CRAL/TRIO domain
  misc_feature (1)..(121): Homolog of NCBI NO: 18397616 NR Description: expressed protein; protein id: At1g30690.1, by cDNA: gi_14334977 [Arabidopsis thaliana]
  misc_feature (1)..(121): Homolog of NCBI NO: 14334978 NR Description: unknown protein [Arabidopsis thaliana]
  misc_feature (1)..(120): Homolog of NCBI NO: 34907288 NR Description: contains ESTs
  misc_feature (1)..(120): Homolog of NCBI NO: 8894548 NR Description: hypothetical protein [Cicer arietinum]
  misc_feature (1)..(120): Homolog of NCBI NO: 15218383 NR Description: cytosolic factor, putative; protein id: supported by cDNA: gi_15081613 [Arabidopsis thaliana]
  misc_feature (1)..(120): Homolog of NCBI NO: 30680992 NR Description: expressed protein [Arabidopsis thaliana]
  misc_feature (1)..(120): Homolog of NCBI NO: 15081614 NR Description: At1g72160/T9N14_8 [Arabidopsis thaliana]
  misc_feature (1)..(130): Homolog of NCBI NO: 15230555 NR Description: putative protein; protein id: At3g51670.1, by cDNA: gi_16930482 [Arabidopsis thaliana]
  misc_feature (1)..(120): Homolog of NCBI NO: 15219901 NR Description: unknown protein; protein id: At1g22530.1
  misc_feature (1)..(120): Homolog of NCBI NO: 15218382 NR Description: cytosolic factor, putative; protein id: supported by cDNA: gi_15028180, supported by cDNA: gi_21280860 thaliana] >gi|25406149|pir||H96744 probable cytosolic factor
MLRRTLRWRRDWTGFSSGAESDADLPEELAGACYLDGADHEGHPVCYNALGVFADDAVYKKALGTEEGKARFLRWRVRAMERHVAELDLRPGGVASLLQVIDLRNSPGPAKKDFRVAVKQVSTCSRTTTPSSSRETSWSTCRSGTTRSAPCSTRS

SEQ ID NO: 8535 - DNA, 1172 bp, Zea mays subsp. mays
  misc_feature (1)..(1172): Ceres Seq. ID no. 12408417
  misc_feature: MA Experiment ID: 108528 Result: Up-regulated in Transcription
  misc_feature: MA Experiment 108528 PARAMETER Experiment Name: Zm_Imbibed_Seeds_P Parameter: Age (day) Value: 5 vs. 2
  misc_feature: MA Experiment 108528 PARAMETER Experiment Name: Zm_Imbibed_Seeds_P Parameter: Organism Value: Zea mays
  misc_feature: MA Experiment 108528 PARAMETER Experiment Name: Zm_Imbibed_Seeds_P Parameter: Plant Line Value: 35A19
  misc_feature: MA Experiment 108528 PARAMETER Experiment Name: Zm_Imbibed_Seeds_P Parameter: Tissue Value: Aerial vs. Embryo
  misc_feature: MA Experiment ID: 108530 Result: Up-regulated in Transcription
  misc_feature: MA Experiment 108530 PARAMETER Experiment Name: Zm_Imbibed_Seeds_P Parameter: Age (day) Value: 6 vs. 2
  misc_feature: MA Experiment 108530 PARAMETER Experiment Name: Zm_Imbibed_Seeds_P Parameter: Organism Value: Zea mays
  misc_feature: MA Experiment 108530 PARAMETER Experiment Name: Zm_Imbibed_Seeds_P Parameter: Plant Line Value: 35A19
  misc_feature: MA Experiment 108530 PARAMETER Experiment Name: Zm_Imbibed_Seeds_P Parameter: Tissue Value: Aerial vs. Embryo
  misc_feature: MA Experiment ID: 108536 Result: Down-regulated in Transcription
  misc_feature: MA Experiment 108536 PARAMETER Experiment Name: Zm_Meristem_P Parameter: Age (day) Value: 8
  misc_feature: MA Experiment 108536 PARAMETER Experiment Name: Zm_Meristem_P Parameter: Organism Value: Zea mays
  misc_feature: MA Experiment 108536 PARAMETER Experiment Name: Zm_Meristem_P Parameter: Plant Line Value: 35A19
  misc_feature: MA Experiment 108536 PARAMETER Experiment Name: Zm_Meristem_P Parameter: Tissue Value: Shoot Meristem vs. Above Shoot Meristem
  misc_feature: MA Experiment ID: 108544 Result: Up-regulated in Transcription
  misc_feature: MA Experiment ID: 108545 Result: Up-regulated in Transcription
  misc_feature: MA Experiment 108545 PARAMETER Experiment Name: Zm_Imbibed_Seeds_P Parameter: Age (day) Value: 3 vs. 2
  misc_feature: MA Experiment 108545 PARAMETER Experiment Name: Zm_Imbibed_Seeds_P Parameter: Organism Value: Zea mays
  misc_feature: MA Experiment 108545 PARAMETER Experiment Name: Zm_Imbibed_Seeds_P Parameter: Plant Line Value: 35A19
  misc_feature: MA Experiment 108545 PARAMETER Experiment Name: Zm_Imbibed_Seeds_P Parameter: Tissue Value: Aerial vs. Embryo
  misc_feature: MA Experiment ID: 108547 Result: Up-regulated in Transcription
  misc_feature: MA Experiment 108547 PARAMETER Experiment Name: Zm_Imbibed_Seeds_P Parameter: Age (day) Value: 4 vs. 2
  misc_feature: MA Experiment 108547 PARAMETER Experiment Name: Zm_Imbibed_Seeds_P Parameter: Organism Value: Zea mays
  misc_feature: MA Experiment 108547 PARAMETER Experiment Name: Zm_Imbibed_Seeds_P Parameter: Plant Line Value: 35A19
  misc_feature: MA Experiment 108547 PARAMETER Experiment Name: Zm_Imbibed_Seeds_P Parameter: Tissue Value: Aerial vs. Embryo
  misc_feature: MA Experiment ID: 108687 Result: Down-regulated in Transcription
  misc_feature: MA Experiment 108687 PARAMETER Experiment Name: Zm_Embryos-Flowers__P Parameter: Tissue Value: Embryo vs. Aerial+
  misc_feature: MA Experiment ID: 108688 Result: Down-regulated in Transcription
  misc_feature: MA Experiment 108688 PARAMETER Experiment Name: Zm_Embryos-Flowers__P Parameter: Tissue Value: Immature Flowers vs. Aerial+
  misc_feature: MA Experiment ID: 20000480 Result: Down-regulated in Transcription
  misc_feature: MA Experiment 20000480 PARAMETER Experiment Name: Zm_Drought_P Parameter: Age (day) Value: 11
  misc_feature: MA Experiment 20000480 PARAMETER Experiment Name: Zm_Drought_P Parameter: Organism Value: Zea mays
  misc_feature: MA Experiment 20000480 PARAMETER Experiment Name: Zm_Drought_P Parameter: Plant Line Value: 35A19
  misc_feature: MA Experiment 20000480 PARAMETER Experiment Name: Zm_Drought_P Parameter: Timepoint (hr) Value: 72
  misc_feature: MA Experiment 20000480 PARAMETER Experiment Name: Zm_Drought_P Parameter: Tissue Value: Aerial
  misc_feature: MA Experiment 20000480 PARAMETER Experiment Name: Zm_Drought_P Parameter: Treatment Value: Drought vs. No Drought
  misc_feature: MA Experiment ID: 20000488 Result: Up-regulated in Transcription
  misc_feature: MA Experiment 20000488 PARAMETER Experiment Name: Zm_50mM_NH4NO3_L_to_H_P Parameter: Organism Value: Zea mays
  misc_feature: MA Experiment 20000488 PARAMETER Experiment Name: Zm_50mM_NH4NO3_L_to_H_P Parameter: Timepoint (hr) Value: 8
  misc_feature: MA Experiment 20000488 PARAMETER Experiment Name: Zm_50mM_NH4NO3_L_to_H_P Parameter: Tissue Value: Leaves
  misc_feature: MA Experiment 20000488 PARAMETER Experiment Name: Zm_50mM_NH4NO3_L_to_H_P Parameter: Treatment Value: 50mM NH4NO3 vs. 100mM Mannitol
  misc_feature: MA Experiment ID: 20000535 Result: Down-regulated in Transcription
  misc_feature: MA Experiment 20000535 PARAMETER Experiment Name: Zm_Hybrid_Seed_Dev_P Parameter: DAP Value: 30 vs. 12
  misc_feature: MA Experiment 20000535 PARAMETER Experiment Name: Zm_Hybrid_Seed_Dev_P Parameter: Organism Value: Zea mays
  misc_feature: MA Experiment 20000535 PARAMETER Experiment Name: Zm_Hybrid_Seed_Dev_P Parameter: Plant Line Value: 35A19
  misc_feature: MA Experiment 20000535 PARAMETER Experiment Name: Zm_Hybrid_Seed_Dev_P Parameter: Tissue Value: Embryo vs. Unfert Floret
atccgcaagtccgcaacccccactactacagtgcccgccgccgctgcgtccaccacctcctttcccaactcctccgcgtacccccgccctctccggcggcccgcgtaaccacccgcgcagatggcgacggcggccacggcgtccgctacggcggcgacccgcttcacgctcctagcgggcgccggcctccgcagccgcatcagccgcctccccaccgccgtgcggttccagcgccagcgggggctcaccaccaccgcgctcctgaagaccgccgacctccagcccaaggagcagggcaagcccgagacgctcgactaccgcgtgttcctcgtcgacggcgggggccggaaggtgtcgccgtggcacgacgtcccgctgcgcgccggggacggggtgttccacttcgtcgtcgagatacccaaggagagcagcgccaagatggaggtcgccaccgacgaggccttcacgcccatcaagcaggacaccaagaagggcaaccttcgatactacccgtacaacattaactggaactatgggttacttcctcaaacatgggaggacccaacttctgcaaattctgaggttgaaggagcatttggggataatgatcctgttgatgttgttgagataggtgaaaggcgtgccaatgtcggggatgttcttaaggttaagccattggcagctttagcaatgattgatgagggagagcttgactggaaaattgtggccatttctttggatgacccgaaagcatctcttgtgaacgacgtggatgatgttgagaagcattttccggggacactgactgccatcagagactggttcagagactacaagatacctgatggaaagcctgctaacaaatttggtctgggcaacaagcccgcaagcaaggaatacgccctgaaggtcattcaagagaccaacgaatcatgggaaaaattggtaaagaggaatattcccgctggagagctctcgttggcctgattttggcccatgggaagccaccacattcttttgaactgctttcgtgagcatgtcgttttgtatgctgtgaccatgcttcttcgtttgcattccaaacctttttacgaactgtttaataaaaatgatcttgtcggatgaataatgattctggtgcgagtttaccagaacggcaaggagtgtttctc

SEQ ID NO: 8536 - protein, 288 aa, Zea mays subsp. mays
  peptide (1)..(288): Ceres Seq. ID no. 12408418
  misc_feature (94)..(274): Pfam Name: Inorganic pyrophosphatase Pfam Description: Inorganic pyrophosphatase
  misc_feature (1)..(287): Homolog of NCBI NO: 15242465 NR Description: inorganic pyrophosphatase - like protein; protein At5g09650.1, supported by cDNA: 33506., supported by cDNA: supported by cDNA: gi_19310710 [Arabidopsis thaliana] Arabidopsis
  misc_feature (1)..(287): Homolog of NCBI NO: 21592878 NR Description: inorganic pyrophosphatase-like protein
  misc_feature (12)..(287): Homolog of NCBI NO: 14571671 NR Description: inorganic pyrophosphatase precursor
  misc_feature (1)..(282): Homolog of NCBI NO: 17539266 NR Description: Inorganic pyrophosphatase [Caenorhabditis >gi|14917011|sp|Q18680|IPYR_CAEEL Probable inorganic
  misc_feature (1)..(282): Homolog of NCBI NO: 39585749 NR Description: Hypothetical protein CBG03439 [Caenorhabditis
  misc_feature (56)..(278): Homolog of NCBI NO: 34852506 NR Description: similar to RIKEN cDNA 2010317E03 [Rattus
  misc_feature (59)..(278): Homolog of NCBI NO: 26353394 NR Description: unnamed protein product [Mus musculus]
  misc_feature (57)..(282): Homolog of NCBI NO: 25290351 NR Description: protein C47E12.4 [imported] - Caenorhabditis
  misc_feature (56)..(278): Homolog of NCBI NO: 27754065 NR Description: RIKEN cDNA 2010317E03 [Mus musculus] unnamed protein product [Mus musculus]
  misc_feature (56)..(278): Homolog of NCBI NO: 585322 NR Description: Inorganic pyrophosphatase (Pyrophosphate
MATAATASATAATRFTLLAGAGLRSRISRLPTAVRFQRQRGLTTTALLKTADLQPKEQGKPETLDYRVFLVDGGGRKVSPWHDVPLRAGDGVFHFVVEIPKESSAKMEVATDEAFTPIKQDTKKGNLRYYPYNINWNYGLLPQTWEDPTSANSEVEGAFGDNDPVDVVEIGERRANVGDVLKVKPLAALAMIDEGELDWKIVAISLDDPKASLVNDVDDVEKHFPGTLTAIRDWFRDYKIPDGKPANKFGLGNKPASKEYALKVIQETNESWEKLVKRNIPAGELSLA

SEQ ID NO: 8537 - protein, 182 aa, Zea mays subsp. mays
  peptide (1)..(182): Ceres Seq. ID no. 12408419
  misc_feature (1)..(168): Pfam Name: Inorganic pyrophosphatase Pfam Description: Inorganic pyrophosphatase
  misc_feature (1)..(181): Homolog of NCBI NO: 15242465 NR Description: inorganic pyrophosphatase - like protein; protein At5g09650.1, supported by cDNA: 33506., supported by cDNA: supported by cDNA: gi_19310710 [Arabidopsis thaliana] Arabidopsis
  misc_feature (1)..(181): Homolog of NCBI NO: 21592878 NR Description: inorganic pyrophosphatase-like protein
  misc_feature (1)..(181): Homolog of NCBI NO: 14571671 NR Description: inorganic pyrophosphatase precursor
  misc_feature (1)..(176): Homolog of NCBI NO: 17539266 NR Description: Inorganic pyrophosphatase [Caenorhabditis >gi|14917011|sp|Q18680|IPYR_CAEEL Probable inorganic
  misc_feature (1)..(176): Homolog of NCBI NO: 39585749 NR Description: Hypothetical protein CBG03439 [Caenorhabditis
  misc_feature (1)..(172): Homolog of NCBI NO: 34852506 NR Description: similar to RIKEN cDNA 2010317E03 [Rattus
  misc_feature (1)..(172): Homolog of NCBI NO: 26353394 NR Description: unnamed protein product [Mus musculus]
  misc_feature (1)..(176): Homolog of NCBI NO: 25290351 NR Description: protein C47E12.4 [imported] - Caenorhabditis
  misc_feature (1)..(172): Homolog of NCBI NO: 27754065 NR Description: RIKEN cDNA 2010317E03 [Mus musculus] unnamed protein product [Mus musculus]
  misc_feature (1)..(172): Homolog of NCBI NO: 585322 NR Description: Inorganic pyrophosphatase (Pyrophosphate
MEVATDEAFTPIKQDTKKGNLRYYPYNINWNYGLLPQTWEDPTSANSEVEGAFGDNDPVDVVEIGERRANVGDVLKVKPLAALAMIDEGELDWKIVAISLDDPKASLVNDVDDVEKHFPGTLTAIRDWFRDYKIPDGKPANKFGLGNKPASKEYALKVIQETNESWEKLVKRNIPAGELSLA

SEQ ID NO: 8538 - protein, 173 aa, Zea mays subsp. mays
  peptide (1)..(173): Ceres Seq. ID no. 12408420
PQVRNPHYYSARRRCVHHLLSQLLRVPPPSPAARVTTRADGDGGHGVRYGGDPLHAPSGRRPPQPHQPPPHRRAVPAPAGAHHHRAPEDRRPPAQGAGQARDARLPRVPRRRRGPEGVAVARRPAARRGRGVPLRRRDTQGEQRQDGGRHRRGLHAHQAGHQEGQPSILPVQH

SEQ ID NO: 8539 - DNA, 1675 bp, Zea mays subsp. mays
  misc_feature (1)..(1675): Ceres Seq. ID no. 12545410
  misc_feature: MA Experiment ID: 108528 Result: Up-regulated in Transcription
  misc_feature: MA Experiment 108528 PARAMETER Experiment Name: Zm_Imbibed_Seeds_P Parameter: Age (day) Value: 5 vs. 2
  misc_feature: MA Experiment 108528 PARAMETER Experiment Name: Zm_Imbibed_Seeds_P Parameter: Organism Value: Zea mays
  misc_feature: MA Experiment 108528 PARAMETER Experiment Name: Zm_Imbibed_Seeds_P Parameter: Plant Line Value: 35A19
  misc_feature: MA Experiment 108528 PARAMETER Experiment Name: Zm_Imbibed_Seeds_P Parameter: Tissue Value: Aerial vs. Embryo
  misc_feature: MA Experiment ID: 108529 Result: Down-regulated in Transcription
  misc_feature: MA Experiment 108529 PARAMETER Experiment Name: Zm_Imbibed_Seeds_P Parameter: Age (day) Value: 5 vs. 2
  misc_feature: MA Experiment 108529 PARAMETER Experiment Name: Zm_Imbibed_Seeds_P Parameter: Organism Value: Zea mays
  misc_feature: MA Experiment 108529 PARAMETER Experiment Name: Zm_Imbibed_Seeds_P Parameter: Plant Line Value: 35A19
  misc_feature: MA Experiment 108529 PARAMETER Experiment Name: Zm_Imbibed_Seeds_P Parameter: Tissue Value: Roots vs. Embryo
  misc_feature: MA Experiment ID: 108530 Result: Up-regulated in Transcription
  misc_feature: MA Experiment 108530 PARAMETER Experiment Name: Zm_Imbibed_Seeds_P Parameter: Age (day) Value: 6 vs. 2
  misc_feature: MA Experiment 108530 PARAMETER Experiment Name: Zm_Imbibed_Seeds_P Parameter: Organism Value: Zea mays
  misc_feature: MA Experiment 108530 PARAMETER Experiment Name: Zm_Imbibed_Seeds_P Parameter: Plant Line Value: 35A19
  misc_feature: MA Experiment 108530 PARAMETER Experiment Name: Zm_Imbibed_Seeds_P Parameter: Tissue Value: Aerial vs. Embryo
  misc_feature: MA Experiment ID: 108535 Result: Down-regulated in Transcription
  misc_feature: MA Experiment 108535 PARAMETER Experiment Name: Zm_Meristem_P Parameter: Age (day) Value: 8
  misc_feature: MA Experiment 108535 PARAMETER Experiment Name: Zm_Meristem_P Parameter: Organism Value: Zea mays
  misc_feature: MA Experiment 108535 PARAMETER Experiment Name: Zm_Meristem_P Parameter: Plant Line Value: 35A19
  misc_feature: MA Experiment 108535 PARAMETER Experiment Name: Zm_Meristem_P Parameter: Tissue Value: Root Meristem vs. Above Root Meristem
  misc_feature: MA Experiment ID: 108536 Result: Down-regulated in Transcription
  misc_feature: MA Experiment 108536 PARAMETER Experiment Name: Zm_Meristem_P Parameter: Age (day) Value: 8
  misc_feature: MA Experiment 108536 PARAMETER Experiment Name: Zm_Meristem_P Parameter: Organism Value: Zea mays
  misc_feature: MA Experiment 108536 PARAMETER Experiment Name: Zm_Meristem_P Parameter: Plant Line Value: 35A19
  misc_feature: MA Experiment 108536 PARAMETER Experiment Name: Zm_Meristem_P Parameter: Tissue Value: Shoot Meristem vs. Above Shoot Meristem
  misc_feature: MA Experiment ID: 108545 Result: Up-regulated in Transcription
  misc_feature: MA Experiment 108545 PARAMETER Experiment Name: Zm_Imbibed_Seeds_P Parameter: Age (day) Value: 3 vs. 2
  misc_feature: MA Experiment 108545 PARAMETER Experiment Name: Zm_Imbibed_Seeds_P Parameter: Organism Value: Zea mays
  misc_feature: MA Experiment 108545 PARAMETER Experiment Name: Zm_Imbibed_Seeds_P Parameter: Plant Line Value: 35A19
  misc_feature: MA Experiment 108545 PARAMETER Experiment Name: Zm_Imbibed_Seeds_P Parameter: Tissue Value: Aerial vs. Embryo
  misc_feature: MA Experiment ID: 108546 Result: Down-regulated in Transcription
  misc_feature: MA Experiment 108546 PARAMETER Experiment Name: Zm_Imbibed_Seeds_P Parameter: Age (day) Value: 3 vs. 2
  misc_feature: MA Experiment 108546 PARAMETER Experiment Name: Zm_Imbibed_Seeds_P Parameter: Organism Value: Zea mays
  misc_feature: MA Experiment 108546 PARAMETER Experiment Name: Zm_Imbibed_Seeds_P Parameter: Plant Line Value: 35A19
  misc_feature: MA Experiment 108546 PARAMETER Experiment Name: Zm_Imbibed_Seeds_P Parameter: Tissue Value: Roots vs. Embryo
  misc_feature: MA Experiment ID: 108547 Result: Up-regulated in Transcription
  misc_feature: MA Experiment 108547 PARAMETER Experiment Name: Zm_Imbibed_Seeds_P Parameter: Age (day) Value: 4 vs. 2
  misc_feature: MA Experiment 108547 PARAMETER Experiment Name: Zm_Imbibed_Seeds_P Parameter: Organism Value: Zea mays
  misc_feature: MA Experiment 108547 PARAMETER Experiment Name: Zm_Imbibed_Seeds_P Parameter: Plant Line Value: 35A19
  misc_feature: MA Experiment 108547 PARAMETER Experiment Name: Zm_Imbibed_Seeds_P Parameter: Tissue Value: Aerial vs. Embryo
  misc_feature: MA Experiment ID: 108556 Result: Down-regulated in Transcription
  misc_feature: MA Experiment 108556 PARAMETER Experiment Name: Zm_Drought_P Parameter: Age (day) Value: 9
  misc_feature: MA Experiment 108556 PARAMETER Experiment Name: Zm_Drought_P Parameter: Organism Value: Zea mays
  misc_feature: MA Experiment 108556 PARAMETER Experiment Name: Zm_Drought_P Parameter: Plant Line Value: 35A19
  misc_feature: MA Experiment 108556 PARAMETER Experiment Name: Zm_Drought_P Parameter: Timepoint (hr) Value: 24
  misc_feature: MA Experiment 108556 PARAMETER Experiment Name: Zm_Drought_P Parameter: Tissue Value: Aerial
  misc_feature: MA Experiment 108556 PARAMETER Experiment Name: Zm_Drought_P Parameter: Treatment Value: Drought vs. No Drought
  misc_feature: MA Experiment ID: 108597 Result: Down-regulated in Transcription
  misc_feature: MA Experiment 108597 PARAMETER Experiment Name: Zm_100uM_ABA_P Parameter: Age (day) Value: 9
  misc_feature: MA Experiment 108597 PARAMETER Experiment Name: Zm_100uM_ABA_P Parameter: Organism Value: Zea mays
  misc_feature: MA Experiment 108597 PARAMETER Experiment Name: Zm_100uM_ABA_P Parameter: Plant Line Value: 35A19
  misc_feature: MA Experiment 108597 PARAMETER Experiment Name: Zm_100uM_ABA_P Parameter: Timepoint (hr) Value: 24
  misc_feature: MA Experiment 108597 PARAMETER Experiment Name: Zm_100uM_ABA_P Parameter: Tissue Value: Aerial
  misc_feature: MA Experiment 108597 PARAMETER Experiment Name: Zm_100uM_ABA_P Parameter: Treatment Value: 100uM ABA vs. No Treatment
  misc_feature: MA Experiment ID: 108687 Result: Down-regulated in Transcription
  misc_feature: MA Experiment 108687 PARAMETER Experiment Name: Zm_Embryos-Flowers__P Parameter: Tissue Value: Embryo vs. Aerial+
  misc_feature: MA Experiment ID: 20000477 Result: Down-regulated in Transcription
  misc_feature: MA Experiment 20000477 PARAMETER Experiment Name: Zm_5mM_SA_P Parameter: Age (day) Value: 10
  misc_feature: MA Experiment 20000477 PARAMETER Experiment Name: Zm_5mM_SA_P Parameter: Organism Value: Zea mays
  misc_feature: MA Experiment 20000477 PARAMETER Experiment Name: Zm_5mM_SA_P Parameter: Plant Line Value: 35A19
  misc_feature: MA Experiment 20000477 PARAMETER Experiment Name: Zm_5mM_SA_P Parameter: Timepoint (hr) Value: 48
  misc_feature: MA Experiment 20000477 PARAMETER Experiment Name: Zm_5mM_SA_P Parameter: Tissue Value: Aerial
  misc_feature: MA Experiment 20000477 PARAMETER Experiment Name: Zm_5mM_SA_P Parameter: Treatment Value: 5mM SA vs. No Treatment
  misc_feature: MA Experiment ID: 20000478 Result: Down-regulated in Transcription
  misc_feature: MA Experiment 20000478 PARAMETER Experiment Name: Zm_5mM_SA_P Parameter: Age (day) Value: 11
  misc_feature: MA Experiment 20000478 PARAMETER Experiment Name: Zm_5mM_SA_P Parameter: Organism Value: Zea mays
  misc_feature: MA Experiment 20000478 PARAMETER Experiment Name: Zm_5mM_SA_P Parameter: Plant Line Value: 35A19
  misc_feature: MA Experiment 20000478 PARAMETER Experiment Name: Zm_5mM_SA_P Parameter: Timepoint (hr) Value: 72
  misc_feature: MA Experiment 20000478 PARAMETER Experiment Name: Zm_5mM_SA_P Parameter: Tissue Value: Aerial
  misc_feature: MA Experiment 20000478 PARAMETER Experiment Name: Zm_5mM_SA_P Parameter: Treatment Value: 5mM SA vs. No Treatment
  misc_feature: MA Experiment ID: 20000479 Result: Down-regulated in Transcription
  misc_feature: MA Experiment 20000479 PARAMETER Experiment Name: Zm_Drought_P Parameter: Age (day) Value: 10
  misc_feature: MA Experiment 20000479 PARAMETER Experiment Name: Zm_Drought_P Parameter: Organism Value: Zea mays
  misc_feature: MA Experiment 20000479 PARAMETER Experiment Name: Zm_Drought_P Parameter: Plant Line Value: 35A19
  misc_feature: MA Experiment 20000479 PARAMETER Experiment Name: Zm_Drought_P Parameter: Timepoint (hr) Value: 48
  misc_feature: MA Experiment 20000479 PARAMETER Experiment Name: Zm_Drought_P Parameter: Tissue Value: Aerial
  misc_feature: MA Experiment 20000479 PARAMETER Experiment Name: Zm_Drought_P Parameter: Treatment Value: Drought vs. No Drought
  misc_feature: MA Experiment ID: 20000480 Result: Down-regulated in Transcription
  misc_feature: MA Experiment 20000480 PARAMETER Experiment Name: Zm_Drought_P Parameter: Age (day) Value: 11
  misc_feature: MA Experiment 20000480 PARAMETER Experiment Name: Zm_Drought_P Parameter: Organism Value: Zea mays
  misc_feature: MA Experiment 20000480 PARAMETER Experiment Name: Zm_Drought_P Parameter: Plant Line Value: 35A19
  misc_feature: MA Experiment 20000480 PARAMETER Experiment Name: Zm_Drought_P Parameter: Timepoint (hr) Value: 72
  misc_feature: MA Experiment 20000480 PARAMETER Experiment Name: Zm_Drought_P Parameter: Tissue Value: Aerial
  misc_feature: MA Experiment 20000480 PARAMETER Experiment Name: Zm_Drought_P Parameter: Treatment Value: Drought vs. No Drought
  misc_feature: MA Experiment ID: 20000534 Result: Down-regulated in Transcription
  misc_feature: MA Experiment 20000534 PARAMETER Experiment Name: Zm_Hybrid_Pollen_P Parameter: Age (day) Value: 8
  misc_feature: MA Experiment 20000534 PARAMETER Experiment Name: Zm_Hybrid_Pollen_P Parameter: Organism Value: Zea mays
  misc_feature: MA Experiment 20000534 PARAMETER Experiment Name: Zm_Hybrid_Pollen_P Parameter: Plant Line Value: 35A19
  misc_feature: MA Experiment 20000534 PARAMETER Experiment Name: Zm_Hybrid_Pollen_P Parameter: Tissue Value: Pollen vs. Aerial
  misc_feature: MA Experiment ID: 20000535 Result: Down-regulated in Transcription
  misc_feature: MA Experiment 20000535 PARAMETER Experiment Name: Zm_Hybrid_Seed_Dev_P Parameter: DAP Value: 30 vs. 12
  misc_feature: MA Experiment 20000535 PARAMETER Experiment Name: Zm_Hybrid_Seed_Dev_P Parameter: Organism Value: Zea mays
  misc_feature: MA Experiment 20000535 PARAMETER Experiment Name: Zm_Hybrid_Seed_Dev_P Parameter: Plant Line Value: 35A19
  misc_feature: MA Experiment 20000535 PARAMETER Experiment Name: Zm_Hybrid_Seed_Dev_P Parameter: Tissue Value: Embryo vs. Unfert Floret
  misc_feature: MA Experiment ID: 20000626 Result: Down-regulated in Transcription
  misc_feature: MA Experiment 20000626 PARAMETER Experiment Name: Zm_Herbicide-Treatments_P Parameter: Timepoint (hr) Value: 12
  misc_feature: MA Experiment 20000626 PARAMETER Experiment Name: Zm_Herbicide-Treatments_P Parameter: Tissue Value: Aerial
  misc_feature: MA Experiment 20000626 PARAMETER Experiment Name: Zm_Herbicide-Treatments_P Parameter: Treatment Value: Roundup vs. No Treatment
gcacgagaccattacctagaacatcctaatcgaaaaatccccgccccgcgcaccgcgagctagctagctactgacacccggcgccggcgccgagtacaatacaaggaaagcagcatggtgttcgagcagcaacaggaggaggcggtgttgccgggcgcggtgcacgggcaccggctctccacggtggtgccgagctccgtgacgggggaggtggactacgcgctggcggacgcggacctggccttcaagctgcactacctgcgcggggtgtactactaccggtccggggacggcctcgccaccaaggtgctcaaggaccccatgttcccgtggctggacgaccacttccccgtcgccggccgcgtccgccgcgccgaggcggagggggacggcgcgcggccctacatcaagtgcaacgactgcggcgtgcgcatcgtggaggccaggtgcgaccgcgacatggccgagtggatccgcgacggcggcgcgcccggcaggatcaggcagctctgctacgacaaggtgctcggccccgagctcttcttctcgccgctgctctacgtccagatcacaaacttcaaatgcggtgggctggcgctggggttcagctgggcgcacctcatcggcgacatcccgtcggccgccacctgcttcaacaagtgggcgcagatcctcagcggcaagaagccggaagccaccgtcctcaccccgccgaaccagccgctgcagggccagtcccccgcggcgccgcgctccgtcaagcaggtcgggcccatggaggacctctggctggtccccgcgggccgcgacatggcgtgctactccttccacgtcagcgacgcggtgctcaagaagctccaccagcagcagaatgggcgccaggacgcggccgctggcaccttcgagctcgtgtcggcgctggtgtggcaggcggtggccaagatcaggggcgacgtggacaccgtgaccgtggtcagggccgacgctgccgcgcggagcggcaagtccctggccaacgagatgaaggtcgggtacgtggagtcggcggggtcgtcgccggcgaagacggacgtcgcggagctggcggcgctgctggccaagaacgtggtcgacgagaccgccgcggtggcggcgttccagggggacgtgctcgtgtacggcggcgccaacctaacgctcgtggacatggagcaggtggacctgtacgggctggagatcaaggggcagcgcccggtccacgtggagtacggcatggacggcgtcggcgacgagggcgcggtgctggtgcagcccgacgccgacgggcgcggccgcctcgtcacggcggttttgcccggcgacgagatcgacagcctccgcgcagcgctcggtagcgcgctgcaggtcgcctgaaaactctagtacgtatcataatactacgctgctgcctacgtgctcgttgcatcgttcggtttcgcgatatcagagtaccacctcttgaagaaagtgtagtagcgtaatgaggcgtgactagtgatgggatgtattgtattgcaggatgttgcgcaaatactgtggtcgatttgcgatgtttgttctgtatcgcatgatgtttccttaataagctgctcgaatagatcatgcatgctcaatgtaccaatatttacactggagactagacaaaaacaatcgtttg

SEQ ID NO: 8540 - protein, 425 aa, Zea mays subsp. mays
  peptide (1)..(425): Ceres Seq. ID no. 12545411
  misc_feature (14)..(421): Pfam Name: Transferase family Pfam Description: Transferase family
  misc_feature (14)..(421): Pfam Name: Transferase family Pfam Description: Transferase family
  misc_feature (1)..(425): Homolog of NCBI NO: 2130139 NR Description: hypothetical protein - maize
  misc_feature (1)..(422): Homolog of NCBI NO: 38345799 NR Description: OSJNBa0085I10.16 [Oryza sativa (japonica
  misc_feature (160)..(422): Homolog of NCBI NO: 38568010 NR Description: OSJNBa0070C17.2 [Oryza sativa (japonica
  misc_feature (7)..(415): Homolog of NCBI NO: 21593424 NR Description: fatty acid elongase-like protein (cer2-like)
  misc_feature (7)..(415): Homolog of NCBI NO: 18403923 NR Description: expressed protein; protein id: At3g23840.1, by cDNA: 38849. [Arabidopsis thaliana]
  misc_feature (1)..(422): Homolog of NCBI NO: 38345799 NR Description: OSJNBa0085I10.16 [Oryza sativa (japonica
  misc_feature (7)..(415): Homolog of NCBI NO: 21593424 NR Description: fatty acid elongase-like protein (cer2-like)
  misc_feature (20)..(294): Homolog of NCBI NO: 15239747 NR Description: anthranilate N-benzoyltransferase; protein id: supported by cDNA: 114130. [Arabidopsis thaliana]
  misc_feature (35)..(407): Homolog of NCBI NO: 30017587 NR Description: unknown protein [Oryza sativa (japonica
  misc_feature (1)..(152): Homolog of NCBI NO: 38568009 NR Description: OSJNBa0070C17.1 [Oryza sativa (japonica
  misc_feature (20)..(415): Homolog of NCBI NO: 15233851 NR Description: CER2; protein id: At4g24510.1, supported by cDNA:
  misc_feature (5)..(415): Homolog of NCBI NO: 15236357 NR Description: fatty acid elongase - like protein (cer2-like); id: At4g13840.1, supported by cDNA: gi_17933316 [Arabidopsis
  misc_feature (7)..(415): Homolog of NCBI NO: 18403923 NR Description: expressed protein; protein id: At3g23840.1, by cDNA: 38849. [Arabidopsis thaliana]
  misc_feature (160)..(422): Homolog of NCBI NO: 38568010 NR Description: OSJNBa0070C17.2 [Oryza sativa (japonica
  misc_feature (1)..(425): Homolog of NCBI NO: 2130139 NR Description: hypothetical protein - maize
  misc_feature (5)..(415): Homolog of NCBI NO: 15236357 NR Description: fatty acid elongase - like protein (cer2-like); id: At4g13840.1, supported by cDNA: gi_17933316 [Arabidopsis
  misc_feature (20)..(415): Homolog of NCBI NO: 15233851 NR Description: CER2; protein id: At4g24510.1, supported by cDNA:
  misc_feature (1)..(152): Homolog of NCBI NO: 38568009 NR Description: OSJNBa0070C17.1 [Oryza sativa (japonica
  misc_feature (35)..(407): Homolog of NCBI NO: 30017587 NR Description: unknown protein [Oryza sativa (japonica
  misc_feature (20)..(294): Homolog of NCBI NO: 15239747 NR Description: anthranilate N-benzoyltransferase; protein id: supported by cDNA: 114130. [Arabidopsis thaliana]
MVFEQQQEEAVLPGAVHGHRLSTVVPSSVTGEVDYALADADLAFKLHYLRGVYYYRSGDGLATKVLKDPMFPWLDDHFPVAGRVRRAEAEGDGARPYIKCNDCGVRIVEARCDRDMAEWIRDGGAPGRIRQLCYDKVLGPELFFSPLLYVQITNFKCGGLALGFSWAHLIGDIPSAATCFNKWAQILSGKKPEATVLTPPNQPLQGQSPAAPRSVKQVGPMEDLWLVPAGRDMACYSFHVSDAVLKKLHQQQNGRQDAAAGTFELVSALVWQAVAKIRGDVDTVTVVRADAAARSGKSLANEMKVGYVESAGSSPAKTDVAELAALLAKNVVDETAAVAAFQGDVLVYGGANLTLVDMEQVDLYGLEIKGQRPVHVEYGMDGVGDEGAVLVQPDADGRGRLVTAVLPGDEIDSLRAALGSALQVA

SEQ ID NO: 8541 - protein, 356 aa, Zea mays subsp. mays
  peptide (1)..(356): Ceres Seq. ID no. 12545412
  misc_feature (1)..(352): Pfam Name: Transferase family Pfam Description: Transferase family
  misc_feature (1)..(352): Pfam Name: Transferase family Pfam Description: Transferase family
  misc_feature (1)..(356): Homolog of NCBI NO: 2130139 NR Description: hypothetical protein - maize
  misc_feature (1)..(353): Homolog of NCBI NO: 38345799 NR Description: OSJNBa0085I10.16 [Oryza sativa (japonica
  misc_feature (91)..(353): Homolog of NCBI NO: 38568010 NR Description: OSJNBa0070C17.2 [Oryza sativa (japonica
  misc_feature (1)..(346): Homolog of NCBI NO: 21593424 NR Description: fatty acid elongase-like protein (cer2-like)
  misc_feature (1)..(346): Homolog of NCBI NO: 18403923 NR Description: expressed protein; protein id: At3g23840.1, by cDNA: 38849. [Arabidopsis thaliana]
  misc_feature (1)..(353): Homolog of NCBI NO: 38345799 NR Description: OSJNBa0085I10.16 [Oryza sativa (japonica
  misc_feature (1)..(346): Homolog of NCBI NO: 21593424 NR Description: fatty acid elongase-like protein (cer2-like)
  misc_feature (1)..(225): Homolog of NCBI NO: 15239747 NR Description: anthranilate N-benzoyltransferase; protein id: supported by cDNA: 114130. [Arabidopsis thaliana]
  misc_feature (1)..(338): Homolog of NCBI NO: 30017587 NR Description: unknown protein [Oryza sativa (japonica
  misc_feature (1)..(83): Homolog of NCBI NO: 38568009 NR Description: OSJNBa0070C17.1 [Oryza sativa (japonica
  misc_feature (1)..(346): Homolog of NCBI NO: 15233851 NR Description: CER2; protein id: At4g24510.1, supported by cDNA:
  misc_feature (1)..(346): Homolog of NCBI NO: 15236357 NR Description: fatty acid elongase - like protein (cer2-like); id: At4g13840.1, supported by cDNA: gi_17933316 [Arabidopsis
  misc_feature (1)..(346): Homolog of NCBI NO: 18403923 NR Description: expressed protein; protein id: At3g23840.1, by cDNA: 38849. [Arabidopsis thaliana]
  misc_feature (91)..(353): Homolog of NCBI NO: 38568010 NR Description: OSJNBa0070C17.2 [Oryza sativa (japonica
  misc_feature (1)..(356): Homolog of NCBI NO: 2130139 NR Description: hypothetical protein - maize
  misc_feature (1)..(346): Homolog of NCBI NO: 15236357 NR Description: fatty acid elongase - like protein (cer2-like); id: At4g13840.1, supported by cDNA: gi_17933316 [Arabidopsis
  misc_feature (1)..(346): Homolog of NCBI NO: 15233851 NR Description: CER2; protein id: At4g24510.1, supported by cDNA:
  misc_feature (1)..(83): Homolog of NCBI NO: 38568009 NR Description: OSJNBa0070C17.1 [Oryza sativa (japonica
  misc_feature (1)..(338): Homolog of NCBI NO: 30017587 NR Description: unknown protein [Oryza sativa (japonica
  misc_feature (1)..(225): Homolog of NCBI NO: 15239747 NR Description: anthranilate N-benzoyltransferase; protein id: supported by cDNA: 114130. [Arabidopsis thaliana]
MFPWLDDHFPVAGRVRRAEAEGDGARPYIKCNDCGVRIVEARCDRDMAEWIRDGGAPGRIRQLCYDKVLGPELFFSPLLYVQITNFKCGGLALGFSWAHLIGDIPSAATCFNKWAQILSGKKPEATVLTPPNQPLQGQSPAAPRSVKQVGPMEDLWLVPAGRDMACYSFHVSDAVLKKLHQQQNGRQDAAAGTFELVSALVWQAVAKIRGDVDTVTVVRADAAARSGKSLANEMKVGYVESAGSSPAKTDVAELAALLAKNVVDETAAVAAFQGDVLVYGGANLTLVDMEQVDLYGLEIKGQRPVHVEYGMDGVGDEGAVLVQPDADGRGRLVTAVLPGDEIDSLRAALGSALQVA

SEQ ID NO: 8542 - protein, 310 aa, Zea mays subsp. mays
  peptide (1)..(310): Ceres Seq. ID no. 12545413
  misc_feature (1)..(306): Pfam Name: Transferase family Pfam Description: Transferase family
  misc_feature (1)..(306): Pfam Name: Transferase family Pfam Description: Transferase family
  misc_feature (1)..(310): Homolog of NCBI NO: 2130139 NR Description: hypothetical protein - maize
  misc_feature (1)..(307): Homolog of NCBI NO: 38345799 NR Description: OSJNBa0085I10.16 [Oryza sativa (japonica
  misc_feature (45)..(307): Homolog of NCBI NO: 38568010 NR Description: OSJNBa0070C17.2 [Oryza sativa (japonica
  misc_feature (1)..(300): Homolog of NCBI NO: 21593424 NR Description: fatty acid elongase-like protein (cer2-like)
  misc_feature (1)..(300): Homolog of NCBI NO: 18403923 NR Description: expressed protein; protein id: At3g23840.1, by cDNA: 38849. [Arabidopsis thaliana]
  misc_feature (1)..(300): Homolog of NCBI NO: 15236357 NR Description: fatty acid elongase - like protein (cer2-like); id: At4g13840.1, supported by cDNA: gi_17933316 [Arabidopsis
  misc_feature (1)..(307): Homolog of NCBI NO: 38345799 NR Description: OSJNBa0085I10.16 [Oryza sativa (japonica
  misc_feature (1)..(37): Homolog of NCBI NO: 38568009 NR Description: OSJNBa0070C17.1 [Oryza sativa (japonica
  misc_feature (1)..(300): Homolog of NCBI NO: 15233851 NR Description: CER2; protein id: At4g24510.1, supported by cDNA:
  misc_feature (1)..(300): Homolog of NCBI NO: 15236357 NR Description: fatty acid elongase - like protein (cer2-like); id: At4g13840.1, supported by cDNA: gi_17933316 [Arabidopsis
  misc_feature (1)..(300): Homolog of NCBI NO: 18403923 NR Description: expressed protein; protein id: At3g23840.1, by cDNA: 38849. [Arabidopsis thaliana]
  misc_feature (1)..(300): Homolog of NCBI NO: 21593424 NR Description: fatty acid elongase-like protein (cer2-like)
  misc_feature (45)..(307): Homolog of NCBI NO: 38568010 NR Description: OSJNBa0070C17.2 [Oryza sativa (japonica
  misc_feature (1)..(310): Homolog of NCBI NO: 2130139 NR Description: hypothetical protein - maize
  misc_feature (1)..(300): Homolog of NCBI NO: 15233851 NR Description: CER2; protein id: At4g24510.1, supported by cDNA:
  misc_feature (1)..(37): Homolog of NCBI NO: 38568009 NR Description: OSJNBa0070C17.1 [Oryza sativa (japonica
  misc_feature (1)..(292): Homolog of NCBI NO: 30017587 NR Description: unknown protein [Oryza sativa (japonica
  misc_feature (1)..(179): Homolog of NCBI NO: 15239747 NR Description: anthranilate N-benzoyltransferase; protein id: supported by cDNA: 114130. [Arabidopsis thaliana]
  misc_feature (1)..(292): Homolog of NCBI NO: 30017587 NR Description: unknown protein [Oryza sativa (japonica
  misc_feature (1)..(179): Homolog of NCBI NO: 15239747 NR Description: anthranilate N-benzoyltransferase; protein id: supported by cDNA: 114130. [Arabidopsis thaliana]
MAEWIRDGGAPGRIRQLCYDKVLGPELFFSPLLYVQITNFKCGGLALGFSWAHLIGDIPSAATCFNKWAQILSGKKPEATVLTPPNQPLQGQSPAAPRSVKQVGPMEDLWLVPAGRDMACYSFHVSDAVLKKLHQQQNGRQDAAAGTFELVSALVWQAVAKIRGDVDTVTVVRADAAARSGKSLANEMKVGYVESAGSSPAKTDVAELAALLAKNVVDETAAVAAFQGDVLVYGGANLTLVDMEQVDLYGLEIKGQRPVHVEYGMDGVGDEGAVLVQPDADGRGRLVTAVLPGDEIDSLRAALGSALQVA

SEQ ID NO: 8543 - DNA, 1237 bp, Zea mays subsp. mays
  misc_feature (1)..(1237): Ceres Seq. ID no. 13498675
  misc_feature: MA Experiment ID: 108536 Result: Up-regulated in Transcription
  misc_feature: MA Experiment 108536 PARAMETER Experiment Name: Zm_Meristem_P Parameter: Age (day) Value: 8
  misc_feature: MA Experiment 108536 PARAMETER Experiment Name: Zm_Meristem_P Parameter: Organism Value: Zea mays
  misc_feature: MA Experiment 108536 PARAMETER Experiment Name: Zm_Meristem_P Parameter: Plant Line Value: 35A19
  misc_feature: MA Experiment 108536 PARAMETER Experiment Name: Zm_Meristem_P Parameter: Tissue Value: Shoot Meristem vs. Above Shoot Meristem
  misc_feature: MA Experiment ID: 108543 Result: Down-regulated in Transcription
  misc_feature: MA Experiment ID: 20000477 Result: Up-regulated in Transcription
  misc_feature: MA Experiment 20000477 PARAMETER Experiment Name: Zm_5mM_SA_P Parameter: Age (day) Value: 10
  misc_feature: MA Experiment 20000477 PARAMETER Experiment Name: Zm_5mM_SA_P Parameter: Organism Value: Zea mays
  misc_feature: MA Experiment 20000477 PARAMETER Experiment Name: Zm_5mM_SA_P Parameter: Plant Line Value: 35A19
  misc_feature: MA Experiment 20000477 PARAMETER Experiment Name: Zm_5mM_SA_P Parameter: Timepoint (hr) Value: 48
  misc_feature: MA Experiment 20000477 PARAMETER Experiment Name: Zm_5mM_SA_P Parameter: Tissue Value: Aerial
  misc_feature: MA Experiment 20000477 PARAMETER Experiment Name: Zm_5mM_SA_P Parameter: Treatment Value: 5mM SA vs. No Treatment
  misc_feature: MA Experiment ID: 20000478 Result: Up-regulated in Transcription
  misc_feature: MA Experiment 20000478 PARAMETER Experiment Name: Zm_5mM_SA_P Parameter: Age (day) Value: 11
  misc_feature: MA Experiment 20000478 PARAMETER Experiment Name: Zm_5mM_SA_P Parameter: Organism Value: Zea mays
  misc_feature: MA Experiment 20000478 PARAMETER Experiment Name: Zm_5mM_SA_P Parameter: Plant Line Value: 35A19
  misc_feature: MA Experiment 20000478 PARAMETER Experiment Name: Zm_5mM_SA_P Parameter: Timepoint (hr) Value: 72
  misc_feature: MA Experiment 20000478 PARAMETER Experiment Name: Zm_5mM_SA_P Parameter: Tissue Value: Aerial
  misc_feature: MA Experiment 20000478 PARAMETER Experiment Name: Zm_5mM_SA_P Parameter: Treatment Value: 5mM SA vs. No Treatment
  misc_feature: MA Experiment ID: 20000479 Result: Up-regulated in Transcription
  misc_feature: MA Experiment 20000479 PARAMETER Experiment Name: Zm_Drought_P Parameter: Age (day) Value: 10
  misc_feature: MA Experiment 20000479 PARAMETER Experiment Name: Zm_Drought_P Parameter: Organism Value: Zea mays
  misc_feature: MA Experiment 20000479 PARAMETER Experiment Name: Zm_Drought_P Parameter: Plant Line Value: 35A19
  misc_feature: MA Experiment 20000479 PARAMETER Experiment Name: Zm_Drought_P Parameter: Timepoint (hr) Value: 48
  misc_feature: MA Experiment 20000479 PARAMETER Experiment Name: Zm_Drought_P Parameter: Tissue Value: Aerial
  misc_feature: MA Experiment 20000479 PARAMETER Experiment Name: Zm_Drought_P Parameter: Treatment Value: Drought vs. No Drought
  misc_feature: MA Experiment ID: 20000480 Result: Up-regulated in Transcription
  misc_feature: MA Experiment 20000480 PARAMETER Experiment Name: Zm_Drought_P Parameter: Age (day) Value: 11
  misc_feature: MA Experiment 20000480 PARAMETER Experiment Name: Zm_Drought_P Parameter: Organism Value: Zea mays
  misc_feature: MA Experiment 20000480 PARAMETER Experiment Name: Zm_Drought_P Parameter: Plant Line Value: 35A19
  misc_feature: MA Experiment 20000480 PARAMETER Experiment Name: Zm_Drought_P Parameter: Timepoint (hr) Value: 72
  misc_feature: MA Experiment 20000480 PARAMETER Experiment Name: Zm_Drought_P Parameter: Tissue Value: Aerial
  misc_feature: MA Experiment 20000480 PARAMETER Experiment Name: Zm_Drought_P Parameter: Treatment Value: Drought vs. No Drought
  misc_feature: MA Experiment ID: 20000487 Result: Up-regulated in Transcription
  misc_feature: MA Experiment 20000487 PARAMETER Experiment Name: Zm_50mM_NH4NO3_L_to_H_P Parameter: Organism Value: Zea mays
  misc_feature: MA Experiment 20000487 PARAMETER Experiment Name: Zm_50mM_NH4NO3_L_to_H_P Parameter: Timepoint (hr) Value: 4
  misc_feature: MA Experiment 20000487 PARAMETER Experiment Name: Zm_50mM_NH4NO3_L_to_H_P Parameter: Tissue Value: Leaves
  misc_feature: MA Experiment 20000487 PARAMETER Experiment Name: Zm_50mM_NH4NO3_L_to_H_P Parameter: Treatment Value: 50mM NH4NO3 vs. 100mM Mannitol
  misc_feature: MA Experiment ID: 20000488 Result: Up-regulated in Transcription
  misc_feature: MA Experiment 20000488 PARAMETER Experiment Name: Zm_50mM_NH4NO3_L_to_H_P Parameter: Organism Value: Zea mays
  misc_feature: MA Experiment 20000488 PARAMETER Experiment Name: Zm_50mM_NH4NO3_L_to_H_P Parameter: Timepoint (hr) Value: 8
  misc_feature: MA Experiment 20000488 PARAMETER Experiment Name: Zm_50mM_NH4NO3_L_to_H_P Parameter: Tissue Value: Leaves
  misc_feature: MA Experiment 20000488 PARAMETER Experiment Name: Zm_50mM_NH4NO3_L_to_H_P Parameter: Treatment Value: 50mM NH4NO3 vs. 100mM Mannitol
  misc_feature: MA Experiment ID: 20001614 Result: Up-regulated in Transcription
  misc_feature: MA Experiment 20001614 PARAMETER Experiment Name: Zm_50ppm_KNO3_L-to-H_P Parameter: Age (day) Value: 21
  misc_feature: MA Experiment 20001614 PARAMETER Experiment Name: Zm_50ppm_KNO3_L-to-H_P Parameter: Organism Value: Zea mays
  misc_feature: MA Experiment 20001614 PARAMETER Experiment Name: Zm_50ppm_KNO3_L-to-H_P Parameter: Plant Line Value: 35A19
  misc_feature: MA Experiment 20001614 PARAMETER Experiment Name: Zm_50ppm_KNO3_L-to-H_P Parameter: Timepoint (hr) Value: 48
  misc_feature: MA Experiment 20001614 PARAMETER Experiment Name: Zm_50ppm_KNO3_L-to-H_P Parameter: Tissue Value: Roots
  misc_feature: MA Experiment 20001614 PARAMETER Experiment Name: Zm_50ppm_KNO3_L-to-H_P Parameter: Treatment Value: 50ppm KNO3 vs. 50ppm KCl
gcacgagaccattacctagaacatcctaatcgaaaagatttgattccctatccctgcgctgcccacctcccctttcccgcctgtgncctcccattcacttgcccccttttttccctctcccgacctcccaattcccgaaatcacccccgacactccccacccaagaacccctcgtccccacctcgccatgggcagcgccgccgcctcgccgccgccgtccgggaagctgacgcaggaagagctgaagcgcgtggcggcgcaccgcgcggtggagttcgtggagcccggcatgacgctgggcctgggcacgggctccacggcggcgcacgcgctggaccgcctgggcgacctcctccgcgcgggcgcgctgccgggggtggccggcgtgcccacctccctcaagacggaggcccacgcggcgcgcgccgggatcccgctgctcccgctcccgggcgccaggatcgcgctctccatcgacggcgccgacgaggtcgacccggacctcaacctcgtcaagggccgcggcggctcgctgctccgcgagaagatgatcgagggcgccggcgcccgcttcgtcgtcatcgtcgacgagtccaagctcgtgccgcgcctcggctgcacgggcgccatccccgtcgaggtcatccccttcggcgcgctccacacgctgggcctcatccgcggcctcttcgacggattgcctggattccacgccaggctgaggactgtccccgccgctcccgccaaggggggagaagactcggactcggagtcggagcagcccttcgtcaccgacaacggcaactacatcgtcgagatgttcttcgaggacggcatccgcggcgacctgcgcgacatcagtgaccgcctgctccggatcaccggcgtcgtagagcacggcatgttcctgggcatggccaccaccgtcatcgtcgccaacaaggacggcacggtgtcagtcatggacaggaagaagtagcagtagtaatctacaagcagtagcctgttcttcgaaacagcgatcgcctgatcaccggcatgttccttgacgtggccaccaccaccatcgtcgctgccaacagcgacgacaagaagtactaataattttgcaagtagcctgtgtctgtgcaacacccagctactcttatctaagttggagttgtatcgtgtccgtgcgttatcctcatatgctgagtgtctgcaggagtatgttaatcatcatcctggtgttattatc

SEQ ID NO: 8544 - protein, 287 aa, Zea mays subsp. mays
  peptide (1)..(287): Ceres Seq. ID no. 13498676
  misc_feature (70)..(287): Pfam Name: HlyD family secretion protein Pfam Description: HlyD family secretion protein
  misc_feature (29)..(29): Xaa is any aa, unknown or other
ARDHYLEHPNRKDLIPYPCAAHLPFPACXLPFTCPLFSLSRPPNSRNHPRHSPPKNPSSPPRHGQRRRLAAAVREADAGRAEARGGAPRGGVRGARHDAGPGHGLHGGARAGPPGRPPPRGRAAGGGRRAHLPQDGGPRGARRDPAAPAPGRQDRALHRRRRRGRPGPQPRQGPRRLAAPREDDRGRRRPLRRHRRRVQARAAPRLHGRHPRRGHPLRRAPHAGPHPRPLRRIAWIPRQAEDCPRRSRQGGRRLGLGVGAALRHRQRQLHRRDVLRGRHPRRPARHQ

SEQ ID NO: 8545 - protein, 263 aa, Zea mays subsp. mays
  peptide (1)..(263): Ceres Seq. ID no. 13498677
  misc_feature (64)..(254): Pfam Name: Ribose 5-phosphate isomerase A (phosphoriboisomerase A) Pfam Description: Ribose 5-phosphate isomerase A
  misc_feature (1)..(263): Homolog of NCBI NO: 38347196 NR Description: OSJNBa0023J03.8 [Oryza sativa (japonica
  misc_feature (3)..(261): Homolog of NCBI NO: 21592672 NR Description: putative ribose 5-phosphate isomerase
  misc_feature (3)..(261): Homolog of NCBI NO: 15223936 NR Description: ribose 5-phosphate isomerase -related
  misc_feature (3)..(261): Homolog of NCBI NO: 13430836 NR Description: putative ribose 5-phosphate isomerase
  misc_feature (1)..(254): Homolog of NCBI NO: 15226223 NR Description: ribose 5-phosphate isomerase -related
  misc_feature (6)..(258): Homolog of NCBI NO: 18654317 NR Description: ribose-5-phosphate isomerase [Spinacia oleracea]
  misc_feature (3)..(258): Homolog of NCBI NO: 34393836 NR Description: putative ribose-5-phosphate isomerase [Oryza
  misc_feature (3)..(258): Homolog of NCBI NO: 34393835 NR Description: putative ribose-5-phosphate isomerase [Oryza
  misc_feature (1)..(261): Homolog of NCBI NO: 15229349 NR Description: ribose 5-phosphate isomerase -related
  misc_feature (1)..(261): Homolog of NCBI NO: 21594002 NR Description: putative ribose 5-phosphate isomerase
MGSAAASPPPSGKLTQEELKRVAAHRAVEFVEPGMTLGLGTGSTAAHALDRLGDLLRAGALPGVAGVPTSLKTEAHAARAGIPLLPLPGARIALSIDGADEVDPDLNLVKGRGGSLLREKMIEGAGARFVVIVDESKLVPRLGCTGAIPVEVIPFGALHTLGLIRGLFDGLPGFHARLRTVPAAPAKGGEDSDSESEQPFVTDNGNYIVEMFFEDGIRGDLRDISDRLLRITGVVEHGMFLGMATTVIVANKDGTVSVMDRKK

SEQ ID NO: 8546 - protein, 229 aa, Zea mays subsp. mays
  peptide (1)..(229): Ceres Seq. ID no. 13498678
  misc_feature (30)..(220): Pfam Name: Ribose 5-phosphate isomerase A (phosphoriboisomerase A) Pfam Description: Ribose 5-phosphate isomerase A
  misc_feature (1)..(229): Homolog of NCBI NO: 38347196 NR Description: OSJNBa0023J03.8 [Oryza sativa (japonica
  misc_feature (1)..(227): Homolog of NCBI NO: 21592672 NR Description: putative ribose 5-phosphate isomerase
  misc_feature (1)..(227): Homolog of NCBI NO: 15223936 NR Description: ribose 5-phosphate isomerase -related
  misc_feature (1)..(227): Homolog of NCBI NO: 13430836 NR Description: putative ribose 5-phosphate isomerase
  misc_feature (1)..(220): Homolog of NCBI NO: 15226223 NR Description: ribose 5-phosphate isomerase -related
  misc_feature (1)..(224): Homolog of NCBI NO: 18654317 NR Description: ribose-5-phosphate isomerase [Spinacia oleracea]
  misc_feature (1)..(224): Homolog of NCBI NO: 34393836 NR Description: putative ribose-5-phosphate isomerase [Oryza
  misc_feature (1)..(224): Homolog of NCBI NO: 34393835 NR Description: putative ribose-5-phosphate isomerase [Oryza
  misc_feature (1)..(227): Homolog of NCBI NO: 15229349 NR Description: ribose 5-phosphate isomerase -related
  misc_feature (1)..(227): Homolog of NCBI NO: 21594002 NR Description: putative ribose 5-phosphate isomerase
MTLGLGTGSTAAHALDRLGDLLRAGALPGVAGVPTSLKTEAHAARAGIPLLPLPGARIALSIDGADEVDPDLNLVKGRGGSLLREKMIEGAGARFVVIVDESKLVPRLGCTGAIPVEVIPFGALHTLGLIRGLFDGLPGFHARLRTVPAAPAKGGEDSDSESEQPFVTDNGNYIVEMFFEDGIRGDLRDISDRLLRITGVVEHGMFLGMATTVIVANKDGTVSVMDRKK

SEQ ID NO: 8547 - DNA, 1602 bp, Zea mays subsp. mays
  misc_feature (1)..(1602): Ceres Seq. ID no. 12356556
  misc_feature: MA Experiment ID: 108527 Result: Down-regulated in Transcription
  misc_feature: MA Experiment 108527 PARAMETER Experiment Name: Zm_5mM_NO_P Parameter: Age (day) Value: 8
  misc_feature: MA Experiment 108527 PARAMETER Experiment Name: Zm_5mM_NO_P Parameter: Organism Value: Zea mays
  misc_feature: MA Experiment 108527 PARAMETER Experiment Name: Zm_5mM_NO_P Parameter: Plant Line Value: 35A19
  misc_feature: MA Experiment 108527 PARAMETER Experiment Name: Zm_5mM_NO_P Parameter: Timepoint (hr) Value: 6
  misc_feature: MA Experiment 108527 PARAMETER Experiment Name: Zm_5mM_NO_P Parameter: Tissue Value: Aerial
  misc_feature: MA Experiment 108527 PARAMETER Experiment Name: Zm_5mM_NO_P Parameter: Treatment Value: 5mM NO vs. No Treatment
  misc_feature: MA Experiment ID: 108530 Result: Down-regulated in Transcription
  misc_feature: MA Experiment 108530 PARAMETER Experiment Name: Zm_Imbibed_Seeds_P Parameter: Age (day) Value: 6 vs. 2
  misc_feature: MA Experiment 108530 PARAMETER Experiment Name: Zm_Imbibed_Seeds_P Parameter: Organism Value: Zea mays
  misc_feature: MA Experiment 108530 PARAMETER Experiment Name: Zm_Imbibed_Seeds_P Parameter: Plant Line Value: 35A19
  misc_feature: MA Experiment 108530 PARAMETER Experiment Name: Zm_Imbibed_Seeds_P Parameter: Tissue Value: Aerial vs. Embryo
  misc_feature: MA Experiment ID: 108535 Result: Up-regulated in Transcription
  misc_feature: MA Experiment 108535 PARAMETER Experiment Name: Zm_Meristem_P Parameter: Age (day) Value: 8
  misc_feature: MA Experiment 108535 PARAMETER Experiment Name: Zm_Meristem_P Parameter: Organism Value: Zea mays
  misc_feature: MA Experiment 108535 PARAMETER Experiment Name: Zm_Meristem_P Parameter: Plant Line Value: 35A19
  misc_feature: MA Experiment 108535 PARAMETER Experiment Name: Zm_Meristem_P Parameter: Tissue Value: Root Meristem vs. Above Root Meristem
aaacgaaaacgagccagccgggcaaacaacactcacatcttacaccagccgcactcccctgtcctcctctccgagacgagacggacgggacggcaggcaccaccgcaccggcgccaccccacccgccggctcagagcgggggcccggccacccgaatcacacagatcggaacgccggaggaggagcaacgcgggcgcggagaggcccgccagcgaaggcgcagtgcaagctctgggttcccggatccgataccaccggtctctcggcgagtgtgtaatccagcgagcgagcgctcggtttttgccgtgagagcgggagatgagtgctctgaagaaatccgacaagaaagccgccctcgacttcgcggcatggagcttcaacgtcaccacgtcggtcggactcatcatggtcaacaaggcgttgatggctacgtatggattcagttttgccacgacattaactgggcttcattttgtgaccactaccttgatgactatcgtatttcgatggttaggcctgagccagccatcccacttacccctagcagatctagttaaatttgtgatattttcgaacttgtcaattgttgggatgaatgtgagcttgatgtggaactctgtgggcttttatcagatagcaaagctgtgcatgatacctgcatcctgtcttctggaggttgtctttgatcatgtacattattcccgggacacaaagctgagcataatggtcgtgcttataggagttgcagtctgcacagttactgatgtcagtgtgaatgcaagaggtctaatcgcggctgttatagctgtttggagcacagctttgcaacaatattatgtccattttctccaacgcaagtactctttgaactcattcaacctgctgggccacactgctccagcccaagctgggtcactcctgctagtgggaccatttgcagattacttgttgacaggcaaaagggtggatcacttcagtttctcatcacttgctctgtttttcctggcactctcatgcttcatcgccattggtgttaatctgagccaattcatctgtattgggcgcttctctgctgtatccttccaagtcttaggccacatgaagaccgtacttgttctgtcccttgggttcctactctttggcaaggagggcctgaatcttcaggtagtccttgggatggttctggccgttcttggaatgatatggtacgggaacgcatctgccaaaccaggcggcaaagagcggcgcagcgtcctaccgctgaggtctgcaagtctcaagggaagttcggaagaaaagggcggtgccgagaaatagtcttgctctctctgattgccaacttgaacggggagttttccgttccaaggttgaatttctggtgaggtgacgtgaagtaccacatattgggaactcttgcctaatatttgacgcagagaacaaactcgttccatctagaaacccaggattgttatagttacaggtatactgtaaaggttcattttttttggcgctctgaatcaatttgcagtgaggggaaagacagacatggttgttacgagtcttcaagacagttttttatcgaatatataatgcagttgtttg

SEQ ID NO: 8548 - protein, 332 aa, Zea mays subsp. mays
  peptide (1)..(332): Ceres Seq. ID no. 12356557
  misc_feature (1)..(325): Homolog of NCBI NO: 18420440 NR Description: putative protein; protein id: At4g39390.1, by cDNA: 35002., supported by cDNA: gi_20259515 [Arabidopsis >gi|20259516|gb|AAM13878.1| unknown protein [Arabidopsis
  misc_feature (1)..(327): Homolog of NCBI NO: 30313364 NR Description: putative transmembrane protein [Oryza sativa]
  misc_feature (1)..(332): Homolog of NCBI NO: 15234794 NR Description: hypothetical protein; protein id: At4g09810.1
  misc_feature (1)..(325): Homolog of NCBI NO: 21593003 NR Description: unknown [Arabidopsis thaliana]
  misc_feature (1)..(332): Homolog of NCBI NO: 18399097 NR Description: expressed protein; protein id: At1g34020.1, by cDNA: 7642. [Arabidopsis thaliana] >gi|25354483|pir||A86464
  misc_feature (1)..(332): Homolog of NCBI NO: 21595054 NR Description: unknown [Arabidopsis thaliana]
  misc_feature (1)..(325): Homolog of NCBI NO: 7486049 NR Description: hypothetical protein F23K16.20 - Arabidopsis >gi|5042155|emb|CAB44674.1| putative protein [Arabidopsis >gi|7270923|emb|CAB80602.1| putative protein [Arabidopsis
  misc_feature (6)..(314): Homolog of NCBI NO: 18394949 NR Description: expressed protein; protein id: At1g21070.1, by cDNA: 108746. [Arabidopsis thaliana] >gi|25354485|pir||G86343
  misc_feature (1)..(314): Homolog of NCBI NO: 21536703 NR Description: unknown [Arabidopsis thaliana]
  misc_feature (6)..(307): Homolog of NCBI NO: 18411172 NR Description: expressed protein; protein id: At1g76670.1, by cDNA: gi_14532697, supported by cDNA: gi_16604379, supported cDNA: gi_18491194 [Arabidopsis thaliana] >gi|25354481|pir||A96795
MSALKKSDKKAALDFAAWSFNVTTSVGLIMVNKALMATYGFSFATTLTGLHFVTTTLMTIVFRWLGLSQPSHLPLADLVKFVIFSNLSIVGMNVSLMWNSVGFYQIAKLCMIPASCLLEVVFDHVHYSRDTKLSIMVVLIGVAVCTVTDVSVNARGLIAAVIAVWSTALQQYYVHFLQRKYSLNSFNLLGHTAPAQAGSLLLVGPFADYLLTGKRVDHFSFSSLALFFLALSCFIAIGVNLSQFICIGRFSAVSFQVLGHMKTVLVLSLGFLLFGKEGLNLQVVLGMVLAVLGMIWYGNASAKPGGKERRSVLPLRSASLKGSSEEKGGAEK

SEQ ID NO: 8549 - protein, 303 aa, Zea mays subsp. mays
  peptide (1)..(303): Ceres Seq. ID no. 12356558
  misc_feature (1)..(296): Homolog of NCBI NO: 18420440 NR Description: putative protein; protein id: At4g39390.1, by cDNA: 35002., supported by cDNA: gi_20259515 [Arabidopsis >gi|20259516|gb|AAM13878.1| unknown protein [Arabidopsis
  misc_feature (1)..(298): Homolog of NCBI NO: 30313364 NR Description: putative transmembrane protein [Oryza sativa]
  misc_feature (1)..(303): Homolog of NCBI NO: 15234794 NR Description: hypothetical protein; protein id: At4g09810.1
  misc_feature (1)..(296): Homolog of NCBI NO: 21593003 NR Description: unknown [Arabidopsis thaliana]
  misc_feature (1)..(303): Homolog of NCBI NO: 18399097 NR Description: expressed protein; protein id: At1g34020.1, by cDNA: 7642. [Arabidopsis thaliana] >gi|25354483|pir||A86464
  misc_feature (1)..(303): Homolog of NCBI NO: 21595054 NR Description: unknown [Arabidopsis thaliana]
  misc_feature (1)..(296): Homolog of NCBI NO: 7486049 NR Description: hypothetical protein F23K16.20 - Arabidopsis >gi|5042155|emb|CAB44674.1| putative protein [Arabidopsis >gi|7270923|emb|CAB80602.1| putative protein [Arabidopsis
  misc_feature (1)..(285): Homolog of NCBI NO: 18394949 NR Description: expressed protein; protein id: At1g21070.1, by cDNA: 108746. [Arabidopsis thaliana] >gi|25354485|pir||G86343
  misc_feature (1)..(285): Homolog of NCBI NO: 21536703 NR Description: unknown [Arabidopsis thaliana]
  misc_feature (1)..(278): Homolog of NCBI NO: 18411172 NR Description: expressed protein; protein id: At1g76670.1, by cDNA: gi_14532697, supported by cDNA: gi_16604379, supported cDNA: gi_18491194 [Arabidopsis thaliana] >gi|25354481|pir||A96795
MVNKALMATYGFSFATTLTGLHFVTTTLMTIVFRWLGLSQPSHLPLADLVKFVIFSNLSIVGMNVSLMWNSVGFYQIAKLCMIPASCLLEVVFDHVHYSRDTKLSIMVVLIGVAVCTVTDVSVNARGLIAAVIAVWSTALQQYYVHFLQRKYSLNSFNLLGHTAPAQAGSLLLVGPFADYLLTGKRVDHFSFSSLALFFLALSCFIAIGVNLSQFICIGRFSAVSFQVLGHMKTVLVLSLGFLLFGKEGLNLQVVLGMVLAVLGMIWYGNASAKPGGKERRSVLPLRSASLKGSSEEKGGAEK

SEQ ID NO: 8550 - protein, 297 aa, Zea mays subsp. mays
  peptide (1)..(297): Ceres Seq. ID no. 12356559
  misc_feature (1)..(290): Homolog of NCBI NO: 18420440 NR Description: putative protein; protein id: At4g39390.1, by cDNA: 35002., supported by cDNA: gi_20259515 [Arabidopsis >gi|20259516|gb|AAM13878.1| unknown protein [Arabidopsis
  misc_feature (1)..(292): Homolog of NCBI NO: 30313364 NR Description: putative transmembrane protein [Oryza sativa]
  misc_feature (1)..(297): Homolog of NCBI NO: 15234794 NR Description: hypothetical protein; protein id: At4g09810.1
  misc_feature (1)..(290): Homolog of NCBI NO: 21593003 NR Description: unknown [Arabidopsis thaliana]
  misc_feature (1)..(297): Homolog of NCBI NO: 18399097 NR Description: expressed protein; protein id: At1g34020.1, by cDNA: 7642. [Arabidopsis thaliana] >gi|25354483|pir||A86464
  misc_feature (1)..(297): Homolog of NCBI NO: 21595054 NR Description: unknown [Arabidopsis thaliana]
  misc_feature (1)..(290): Homolog of NCBI NO: 7486049 NR Description: hypothetical protein F23K16.20 - Arabidopsis >gi|5042155|emb|CAB44674.1| putative protein [Arabidopsis >gi|7270923|emb|CAB80602.1| putative protein [Arabidopsis
  misc_feature (1)..(279): Homolog of NCBI NO: 18394949 NR Description: expressed protein; protein id: At1g21070.1, by cDNA: 108746. [Arabidopsis thaliana] >gi|25354485|pir||G86343
  misc_feature (1)..(279): Homolog of NCBI NO: 21536703 NR Description: unknown [Arabidopsis thaliana]
  misc_feature (1)..(272): Homolog of NCBI NO: 18411172 NR Description: expressed protein; protein id: At1g76670.1, by cDNA: gi_14532697, supported by cDNA: gi_16604379, supported cDNA: gi_18491194 [Arabidopsis thaliana] >gi|25354481|pir||A96795
MATYGFSFATTLTGLHFVTTTLMTIVFRWLGLSQPSHLPLADLVKFVIFSNLSIVGMNVSLMWNSVGFYQIAKLCMIPASCLLEVVFDHVHYSRDTKLSIMVVLIGVAVCTVTDVSVNARGLIAAVIAVWSTALQQYYVHFLQRKYSLNSFNLLGHTAPAQAGSLLLVGPFADYLLTGKRVDHFSFSSLALFFLALSCFIAIGVNLSQFICIGRFSAVSFQVLGHMKTVLVLSLGFLLFGKEGLNLQVVLGMVLAVLGMIWYGNASAKPGGKERRSVLPLRSASLKGSSEEKGGAEK

SEQ ID NO: 8551 - DNA, 1161 bp, Zea mays subsp. mays
  misc_feature (1)..(1161): Ceres Seq. ID no. 12340900
  misc_feature: MA Experiment ID: 108534 Result: Down-regulated in Transcription
  misc_feature: MA Experiment 108534 PARAMETER Experiment Name: Zm_4deg_Cold_P Parameter: Age (hr) Value: 8
  misc_feature: MA Experiment 108534 PARAMETER Experiment Name: Zm_4deg_Cold_P Parameter: Organism Value: Zea mays
  misc_feature: MA Experiment 108534 PARAMETER Experiment Name: Zm_4deg_Cold_P Parameter: Plant Line Value: 35A19
  misc_feature: MA Experiment 108534 PARAMETER Experiment Name: Zm_4deg_Cold_P Parameter: Temperature (deg C) Value: 4 vs. 22
  misc_feature: MA Experiment 108534 PARAMETER Experiment Name: Zm_4deg_Cold_P Parameter: Timepoint (hr) Value: 6
  misc_feature: MA Experiment 108534 PARAMETER Experiment Name: Zm_4deg_Cold_P Parameter: Tissue Value: Aerial
  misc_feature: MA Experiment ID: 108535 Result: Down-regulated in Transcription
  misc_feature: MA Experiment 108535 PARAMETER Experiment Name: Zm_Meristem_P Parameter: Age (day) Value: 8
  misc_feature: MA Experiment 108535 PARAMETER Experiment Name: Zm_Meristem_P Parameter: Organism Value: Zea mays
  misc_feature: MA Experiment 108535 PARAMETER Experiment Name: Zm_Meristem_P Parameter: Plant Line Value: 35A19
  misc_feature: MA Experiment 108535 PARAMETER Experiment Name: Zm_Meristem_P Parameter: Tissue Value: Root Meristem vs. Above Root Meristem
  misc_feature: MA Experiment ID: 108543 Result: Down-regulated in Transcription
  misc_feature: MA Experiment ID: 108544 Result: Up-regulated in Transcription
  misc_feature: MA Experiment ID: 20000478 Result: Up-regulated in Transcription
  misc_feature: MA Experiment 20000478 PARAMETER Experiment Name: Zm_5mM_SA_P Parameter: Age (day) Value: 11
  misc_feature: MA Experiment 20000478 PARAMETER Experiment Name: Zm_5mM_SA_P Parameter: Organism Value: Zea mays
  misc_feature: MA Experiment 20000478 PARAMETER Experiment Name: Zm_5mM_SA_P Parameter: Plant Line Value: 35A19
  misc_feature: MA Experiment 20000478 PARAMETER Experiment Name: Zm_5mM_SA_P Parameter: Timepoint (hr) Value: 72
  misc_feature: MA Experiment 20000478 PARAMETER Experiment Name: Zm_5mM_SA_P Parameter: Tissue Value: Aerial
  misc_feature: MA Experiment 20000478 PARAMETER Experiment Name: Zm_5mM_SA_P Parameter: Treatment Value: 5mM SA vs. No Treatment
aactcacaaggcttttacacgactagttctgcgaggctaagagcagaaaaaactccacctgcctggctgatttcatcaactccggcggcttggagaagacgaagctgctccagaatccgataggaagtttggtgctcgcgtgttgacgggttgatttcggtgcgccgatggggcaggcgttccgcaagctgttcgatgccttcctcggcaccagcgagatgagggttgtgatgcttggtctggatgccgccggtaaaaccaccatcttgtacaagctgcaaatcggggaggttttgtcgactgttcccacgattggtttcaatgtcgagaaagttcaatacaagaatgtgatgtttactgtttgggatgttggtggccaagaaaagttgaggcccttgtggaggcactacttcaacaatactgatggcttgatctatgtagttgattcattggatcgggagaggattggaaaagctaaagctgaatttcaggcaataatcaatgatcctttcatgcttaacagtgtcatattggtatttgccaataaacaagatatgaaaggggcaatgacaccaatggaggtgtgtgagggccttggcctctacgatttgaagaatcgcacctggcacatccaaggctcctgtgcgcttaaaggtgatggcctttatgagggcttggactggatggcaagcactctgaaggaattgcaagcttcaggtcgcctaccctctggagggacatcgttgttctaagaagcaaatctgcatgtaagatccttgggttgatactagtaataatggatcaagagatcatcaatgatgttaacatcttgatgagaatttcctttcaaattcatgctgcactgctcaggctccgtggggtgattctactaaagaaaaggtgaaacatgggcctgaccgcataaaaatatcggtcatgcgtttgtactcacccctggggatttcttgtcaatgatctaacctgtgatataggccttgtaacttccgttgtgagtaagtttcattcaaagctaaccggcggatgcatttgtcacatatgagaattgaggagtcaacttccacatcctgttgttgtaagaatttctgtaaatcgaagttggcaaacataatttatctcaacaagttggtccggtcattatcc

SEQ ID NO: 8552 - protein, 194 aa, Zea mays subsp. mays
  peptide (1)..(194): Ceres Seq. ID no. 12340901
  misc_feature (4)..(177): Pfam Name: ADP-ribosylation factor family Pfam Description: ADP-ribosylation factor family
  misc_feature (1)..(192): Homolog of NCBI NO: 37537196 NR Description: putative ADP-ribosylation factor [Oryza sativa
  misc_feature (1)..(184): Homolog of NCBI NO: 15237901 NR Description: ADP-ribosylation factor -like protein; protein At5g17060.1, supported by cDNA: 26844., supported by cDNA:
  misc_feature (1)..(184): Homolog of NCBI NO: 15228464 NR Description: putative ADP-ribosylation factor; protein id:
  misc_feature (1)..(184): Homolog of NCBI NO: 34897926 NR Description: Similar to Drosophila melanogaster
  misc_feature (1)..(178): Homolog of NCBI NO: 3182915 NR Description: ADP-RIBOSYLATION FACTOR
  misc_feature (1)..(178): Homolog of NCBI NO: 32401087 NR Description: ADP-ribosylation factor 1 [Aiptasia pulchella]
  misc_feature (1)..(179): Homolog of NCBI NO: 461532 NR Description: ADP-RIBOSYLATION FACTOR >gi|1362500|pir||D49993
  misc_feature (1)..(178): Homolog of NCBI NO: 17136866 NR Description: ADP ribosylation factor 79F CG8385-PB
  misc_feature (1)..(178): Homolog of NCBI NO: 31240205 NR Description: ENSANGP00000015770 [Anopheles gambiae]
  misc_feature (1)..(179): Homolog of NCBI NO: 40747088 NR Description: ARF_AJECA ADP-RIBOSYLATION FACTOR [Aspergillus
MGQAFRKLFDAFLGTSEMRVVMLGLDAAGKTTILYKLQIGEVLSTVPTIGFNVEKVQYKNVMFTVWDVGGQEKLRPLWRHYFNNTDGLIYVVDSLDRERIGKAKAEFQAIINDPFMLNSVILVFANKQDMKGAMTPMEVCEGLGLYDLKNRTWHIQGSCALKGDGLYEGLDWMASTLKELQASGRLPSGGTSLF

SEQ ID NO: 8553 - protein, 177 aa, Zea mays subsp. mays
  peptide (1)..(177): Ceres Seq. ID no. 12340902
  misc_feature (1)..(160): Pfam Name: ADP-ribosylation factor family Pfam Description: ADP-ribosylation factor family
  misc_feature (1)..(175): Homolog of NCBI NO: 37537196 NR Description: putative ADP-ribosylation factor [Oryza sativa
  misc_feature (1)..(167): Homolog of NCBI NO: 15237901 NR Description: ADP-ribosylation factor -like protein; protein At5g17060.1, supported by cDNA: 26844., supported by cDNA:
  misc_feature (1)..(167): Homolog of NCBI NO: 15228464 NR Description: putative ADP-ribosylation factor; protein id:
  misc_feature (1)..(167): Homolog of NCBI NO: 34897926 NR Description: Similar to Drosophila melanogaster
  misc_feature (1)..(161): Homolog of NCBI NO: 3182915 NR Description: ADP-RIBOSYLATION FACTOR
  misc_feature (1)..(161): Homolog of NCBI NO: 32401087 NR Description: ADP-ribosylation factor 1 [Aiptasia pulchella]
  misc_feature (1)..(162): Homolog of NCBI NO: 461532 NR Description: ADP-RIBOSYLATION FACTOR >gi|1362500|pir||D49993
  misc_feature (1)..(161): Homolog of NCBI NO: 17136866 NR Description: ADP ribosylation factor 79F CG8385-PB
  misc_feature (1)..(161): Homolog of NCBI NO: 31240205 NR Description: ENSANGP00000015770 [Anopheles gambiae]
  misc_feature (1)..(162): Homolog of NCBI NO: 40747088 NR Description: ARF_AJECA ADP-RIBOSYLATION FACTOR [Aspergillus
MRVVMLGLDAAGKTTILYKLQIGEVLSTVPTIGFNVEKVQYKNVMFTVWDVGGQEKLRPLWRHYFNNTDGLIYVVDSLDRERIGKAKAEFQAIINDPFMLNSVILVFANKQDMKGAMTPMEVCEGLGLYDLKNRTWHIQGSCALKGDGLYEGLDWMASTLKELQASGRLPSGGTSLF

SEQ ID NO: 8554 - protein, 173 aa, Zea mays subsp. mays
  peptide (1)..(173): Ceres Seq. ID no. 12340903
  misc_feature (1)..(156): Pfam Name: ADP-ribosylation factor family Pfam Description: ADP-ribosylation factor family
  misc_feature (1)..(171): Homolog of NCBI NO: 37537196 NR Description: putative ADP-ribosylation factor [Oryza sativa
  misc_feature (1)..(163): Homolog of NCBI NO: 15237901 NR Description: ADP-ribosylation factor -like protein; protein At5g17060.1, supported by cDNA: 26844., supported by cDNA:
  misc_feature (1)..(163): Homolog of NCBI NO: 15228464 NR Description: putative ADP-ribosylation factor; protein id:
  misc_feature (1)..(163): Homolog of NCBI NO: 34897926 NR Description: Similar to Drosophila melanogaster
  misc_feature (1)..(157): Homolog of NCBI NO: 3182915 NR Description: ADP-RIBOSYLATION FACTOR
  misc_feature (1)..(157): Homolog of NCBI NO: 32401087 NR Description: ADP-ribosylation factor 1 [Aiptasia pulchella]
  misc_feature (1)..(158): Homolog of NCBI NO: 461532 NR Description: ADP-RIBOSYLATION FACTOR >gi|1362500|pir||D49993
  misc_feature (1)..(157): Homolog of NCBI NO: 17136866 NR Description: ADP ribosylation factor 79F CG8385-PB
  misc_feature (1)..(157): Homolog of NCBI NO: 31240205 NR Description: ENSANGP00000015770 [Anopheles gambiae]
  misc_feature (1)..(158): Homolog of NCBI NO: 40747088 NR Description: ARF_AJECA ADP-RIBOSYLATION FACTOR [Aspergillus
MLGLDAAGKTTILYKLQIGEVLSTVPTIGFNVEKVQYKNVMFTVWDVGGQEKLRPLWRHYFNNTDGLIYVVDSLDRERIGKAKAEFQAIINDPFMLNSVILVFANKQDMKGAMTPMEVCEGLGLYDLKNRTWHIQGSCALKGDGLYEGLDWMASTLKELQASGRLPSGGTSLF

SEQ ID NO: 8555 - DNA, 1323 bp, Zea mays subsp. mays
  misc_feature (1)..(1323): Ceres Seq. ID no. 12408405
  misc_feature: MA Experiment ID: 108535 Result: Up-regulated in Transcription
  misc_feature: MA Experiment 108535 PARAMETER Experiment Name: Zm_Meristem_P Parameter: Age (day) Value: 8
  misc_feature: MA Experiment 108535 PARAMETER Experiment Name: Zm_Meristem_P Parameter: Organism Value: Zea mays
  misc_feature: MA Experiment 108535 PARAMETER Experiment Name: Zm_Meristem_P Parameter: Plant Line Value: 35A19
  misc_feature: MA Experiment 108535 PARAMETER Experiment Name: Zm_Meristem_P Parameter: Tissue Value: Root Meristem vs. Above Root Meristem
aagcttgggagttgggagtgacaccgcggcacctccactgcagtagtcttgttgccggcggcggcggcgggcggcggcgcggagaaattcggcgaacgatggcggactccggaagcctgaggaagcgggaggagaaggaagaggaggacgacattgtctgcctggatccttccttcttcgtggaccgcagctacgagatgacgaccttcaccttcggatcccacgagttgcgcctcctctgcctccgcgccgcttccactgattttgatcttactggacagttagtgtggccaggggcagtccttatgaacaactacctatctcaacaccctgaaattgtgaagggatgttcagtagttgagctaggatctgggattggcattactggcatattgtgtagccgtttctgcaaggaggttgtcttgactgatcacaatgatgaagttctggagattataaagaaaaatatagagttgcagtcatgttctgagaatgcacatgcagtgttgacagccgagaaactagagtggggaaactcagatcatttaagcggtattattgaaaaacatcctggtggatttgatcttgttcttggagctgatatttgcttccagcaatctagcatttcctgcctctttgatactgtagagaggattgttcgtattcaagctggtaaatgcagattcatattggcttatgtatcccgaactaaagtcatggatgcactagtactcaaggaagctgaaaagcatggaatgcgtgttgaagaagtgaacggaacaagaacaaccatctcgaatcttgaaggagtcatatttgacattaccctgaaatgacagtccgtccttcgactctcctttgtcgaagtgcttgagtggttattcgtcatgaagtcctgtgtaacttccttttagcgggaaaatcgaagttccgcatcatgatgagctggagttgtgtcagttgtatctctgtagaggaggaggcaccacagtaagaacattagccgatgatggtctttgattcatgcgcccatttggtgtggctttctactgttcaactgctccatcctttaagccaatatataagatgtaagatgcgtgctacaactttctcggactatctatctatctatcggtgagatgaccagactgtgaaagttcctgtgacaaggagttgctgaaagcagtgccatcatgtatgggttgcagatgcttggtctgaactctgtaaaaggctctggattaccatgagtttttcgtgcttggtgcagtagcatgtaagtaagcaccaactgaacagaagaaaccttcagcacccccttcg

SEQ ID NO: 8556 - protein, 277 aa, Zea mays subsp. mays
  peptide (1)..(277): Ceres Seq. ID no. 12408406
  misc_feature (33)..(277): Homolog of NCBI NO: 33146643 NR Description: unknown protein [Oryza sativa (japonica
  misc_feature (34)..(277): Homolog of NCBI NO: 26449997 NR Description: unknown protein [Arabidopsis thaliana]
  misc_feature (152)..(277): Homolog of NCBI NO: 30683273 NR Description: expressed protein [Arabidopsis thaliana]
  misc_feature (34)..(125): Homolog of NCBI NO: 7460191 NR Description: hypothetical protein At2g26810 [imported] - thaliana >gi|3426045|gb|AAC32244.1| hypothetical protein
  misc_feature (34)..(125): Homolog of NCBI NO: 30683273 NR Description: expressed protein [Arabidopsis thaliana]
  misc_feature (41)..(267): Homolog of NCBI NO: 30683042 NR Description: expressed protein [Arabidopsis thaliana] At2g26200/T1D16.16 [Arabidopsis thaliana]
  misc_feature (41)..(267): Homolog of NCBI NO: 20197178 NR Description: hypothetical protein [Arabidopsis thaliana]
  misc_feature (41)..(267): Homolog of NCBI NO: 25407826 NR Description: hypothetical protein At2g26200 [imported] -
  misc_feature (66)..(215): Homolog of NCBI NO: 34877084 NR Description: similar to RIKEN cDNA 2310038H17 [Rattus
  misc_feature (91)..(254): Homolog of NCBI NO: 28950234 NR Description: conserved hypothetical protein [Neurospora crassa]
AWELGVTPRHLHCSSLVAGGGGGRRRGEIRRTMADSGSLRKREEKEEEDDIVCLDPSFFVDRSYEMTTFTFGSHELRLLCLRAASTDFDLTGQLVWPGAVLMNNYLSQHPEIVKGCSVVELGSGIGITGILCSRFCKEVVLTDHNDEVLEIIKKNIELQSCSENAHAVLTAEKLEWGNSDHLSGIIEKHPGGFDLVLGADICFQQSSISCLFDTVERIVRIQAGKCRFILAYVSRTKVMDALVLKEAEKHGMRVEEVNGTRTTISNLEGVIFDITLK

SEQ ID NO: 8557 - protein, 245 aa, Zea mays subsp. mays
  peptide (1)..(245): Ceres Seq. ID no. 12408407
  misc_feature (1)..(245): Homolog of NCBI NO: 33146643 NR Description: unknown protein [Oryza sativa (japonica
  misc_feature (2)..(245): Homolog of NCBI NO: 26449997 NR Description: unknown protein [Arabidopsis thaliana]
  misc_feature (120)..(245): Homolog of NCBI NO: 30683273 NR Description: expressed protein [Arabidopsis thaliana]
  misc_feature (2)..(93): Homolog of NCBI NO: 7460191 NR Description: hypothetical protein At2g26810 [imported] - thaliana >gi|3426045|gb|AAC32244.1| hypothetical protein
  misc_feature (2)..(93): Homolog of NCBI NO: 30683273 NR Description: expressed protein [Arabidopsis thaliana]
  misc_feature (9)..(235): Homolog of NCBI NO: 30683042 NR Description: expressed protein [Arabidopsis thaliana] At2g26200/T1D16.16 [Arabidopsis thaliana]
  misc_feature (9)..(235): Homolog of NCBI NO: 20197178 NR Description: hypothetical protein [Arabidopsis thaliana]
  misc_feature (9)..(235): Homolog of NCBI NO: 25407826 NR Description: hypothetical protein At2g26200 [imported] -
  misc_feature (34)..(183): Homolog of NCBI NO: 34877084 NR Description: similar to RIKEN cDNA 2310038H17 [Rattus
  misc_feature (59)..(222): Homolog of NCBI NO: 28950234 NR Description: conserved hypothetical protein [Neurospora crassa]
MADSGSLRKREEKEEEDDIVCLDPSFFVDRSYEMTTFTFGSHELRLLCLRAASTDFDLTGQLVWPGAVLMNNYLSQHPEIVKGCSVVELGSGIGITGILCSRFCKEVVLTDHNDEVLEIIKKNIELQSCSENAHAVLTAEKLEWGNSDHLSGIIEKHPGGFDLVLGADICFQQSSISCLFDTVERIVRIQAGKCRFILAYVSRTKVMDALVLKEAEKHGMRVEEVNGTRTTISNLEGVIFDITLK

SEQ ID NO: 8558 - protein, 212 aa, Zea mays subsp. mays
  peptide (1)..(212): Ceres Seq. ID no. 12408408
  misc_feature (1)..(212): Homolog of NCBI NO: 33146643 NR Description: unknown protein [Oryza sativa (japonica
  misc_feature (1)..(212): Homolog of NCBI NO: 26449997 NR Description: unknown protein [Arabidopsis thaliana]
  misc_feature (87)..(212): Homolog of NCBI NO: 30683273 NR Description: expressed protein [Arabidopsis thaliana]
  misc_feature (1)..(60): Homolog of NCBI NO: 7460191 NR Description: hypothetical protein At2g26810 [imported] - thaliana >gi|3426045|gb|AAC32244.1| hypothetical protein
  misc_feature (1)..(60): Homolog of NCBI NO: 30683273 NR Description: expressed protein [Arabidopsis thaliana]
  misc_feature (1)..(202): Homolog of NCBI NO: 30683042 NR Description: expressed protein [Arabidopsis thaliana] At2g26200/T1D16.16 [Arabidopsis thaliana]
  misc_feature (1)..(202): Homolog of NCBI NO: 20197178 NR Description: hypothetical protein [Arabidopsis thaliana]
  misc_feature (1)..(202): Homolog of NCBI NO: 25407826 NR Description: hypothetical protein At2g26200 [imported] -
  misc_feature (1)..(150): Homolog of NCBI NO: 34877084 NR Description: similar to RIKEN cDNA 2310038H17 [Rattus
  misc_feature (26)..(189): Homolog of NCBI NO: 28950234 NR Description: conserved hypothetical protein [Neurospora crassa]
MTTFTFGSHELRLLCLRAASTDFDLTGQLVWPGAVLMNNYLSQHPEIVKGCSVVELGSGIGITGILCSRFCKEVVLTDHNDEVLEIIKKNIELQSCSENAHAVLTAEKLEWGNSDHLSGIIEKHPGGFDLVLGADICFQQSSISCLFDTVERIVRIQAGKCRFILAYVSRTKVMDALVLKEAEKHGMRVEEVNGTRTTISNLEGVIFDITLK

SEQ ID NO: 8559 - DNA, 2037 bp, Zea mays subsp. mays
  misc_feature (1)..(2037): Ceres Seq. ID no. 12408401
  misc_feature: MA Experiment ID: 108522 Result: Up-regulated in Transcription
  misc_feature: MA Experiment 108522 PARAMETER Experiment Name: Zm_42deg_Heat_P Parameter: Age (day) Value: 8
  misc_feature: MA Experiment 108522 PARAMETER Experiment Name: Zm_42deg_Heat_P Parameter: Organism Value: Zea mays
  misc_feature: MA Experiment 108522 PARAMETER Experiment Name: Zm_42deg_Heat_P Parameter: Plant Line Value: 35A19
  misc_feature: MA Experiment 108522 PARAMETER Experiment Name: Zm_42deg_Heat_P Parameter: Temperature (deg C) Value: 42 vs. 22
  misc_feature: MA Experiment 108522 PARAMETER Experiment Name: Zm_42deg_Heat_P Parameter: Timepoint (hr) Value: 1
  misc_feature: MA Experiment 108522 PARAMETER Experiment Name: Zm_42deg_Heat_P Parameter: Tissue Value: Aerial
  misc_feature: MA Experiment ID: 108527 Result: Up-regulated in Transcription
  misc_feature: MA Experiment 108527 PARAMETER Experiment Name: Zm_5mM_NO_P Parameter: Age (day) Value: 8
  misc_feature: MA Experiment 108527 PARAMETER Experiment Name: Zm_5mM_NO_P Parameter: Organism Value: Zea mays
  misc_feature: MA Experiment 108527 PARAMETER Experiment Name: Zm_5mM_NO_P Parameter: Plant Line Value: 35A19
  misc_feature: MA Experiment 108527 PARAMETER Experiment Name: Zm_5mM_NO_P Parameter: Timepoint (hr) Value: 6
  misc_feature: MA Experiment 108527 PARAMETER Experiment Name: Zm_5mM_NO_P Parameter: Tissue Value: Aerial
  misc_feature: MA Experiment 108527 PARAMETER Experiment Name: Zm_5mM_NO_P Parameter: Treatment Value: 5mM NO vs. No Treatment
  misc_feature: MA Experiment ID: 108556 Result: Down-regulated in Transcription
  misc_feature: MA Experiment 108556 PARAMETER Experiment Name: Zm_Drought_P Parameter: Age (day) Value: 9
  misc_feature: MA Experiment 108556 PARAMETER Experiment Name: Zm_Drought_P Parameter: Organism Value: Zea mays
  misc_feature: MA Experiment 108556 PARAMETER Experiment Name: Zm_Drought_P Parameter: Plant Line Value: 35A19
  misc_feature: MA Experiment 108556 PARAMETER Experiment Name: Zm_Drought_P Parameter: Timepoint (hr) Value: 24
  misc_feature: MA Experiment 108556 PARAMETER Experiment Name: Zm_Drought_P Parameter: Tissue Value: Aerial
  misc_feature: MA Experiment 108556 PARAMETER Experiment Name: Zm_Drought_P Parameter: Treatment Value: Drought vs. No Drought
cttcgcccaactcgtcccattatttctctaaaaatccaacaaataaatccttgtgccagcagaaagtatagatcgtgttagctaaaagacatccgcgatgacgtcgacagcggtggggggcgagccggcggcgttgccacgggtactggcggtggagcaaagccgactttttcccggagccctcgttccagagctggcgcgcgtacggcggcgcgctcttgtccactgggccacggctgcgcgaccgcgtcacgagtcgctcatccgaggccgttgaggcggggacgctgctcgcccagagcgagaaccccctccggcggtgcctgtcgtgggtggatctcgccttcctcggattcggctccgtcgtcggctcgggcgtcttcgtgctcaccggccaggaggcgcggttcgacgccggcccggccatcccgctggcctacgccgccgcgggcttctcggcgctgctctcgtccttctgctacgcggagctcgccggcgagatcccgtcggctggcggctcgttctcgtacctgcgcgtcgagctcggggacctggccgcgttcatcgccgccgggaacatcctgctcgaggccgtggtgggcgcggccggcctgggccggtcctggacgtcgtacctcgcggcgctcatcggccgcgacagcgacgcgctccgcatccacgtccccgcgctcgccgacggcttcaatctgctggacccgatcgccgtcgtcgtgctgtgcgccacttccgcgctcgccgtgtccggcgcgcgcctcacctccaccgtcaactcggtggcgtccgcggtcggcatcgccatcatcgcgttcgtgctggccgcggggttctcgcacttcgagccagccaacctcgcgccgtcattcttccccttcggcgccgcgggcgtcttccgcgcggcggccgtcgtgtactggtcctacacgggattcgacatggtggccaccatggccgaggagaccaagaaccccggcccgcgacgtgccgctgggcctcatctcgtccatgtccgccatcaccctcgtctactgcgccatgtccctcgcgctcgtggggatgcagcgctacagcgacattgacgccaacgcggcctactcggtggcgttcgcggcggccgggatgaagtgggcgcgctacgtcgtggcgctcggcgcgctcaagggcatgacgagcggcctcctcgtcggcgcgctcggccaggcgcgctacaccacgcagatcgcgcgcacgcacatgatcccgccctacttcgcgctcgtgcaccccaggaccggcacgcccatctacgccaccatcgccgtcacgctcggcgccgcctgcgtcgcgctcttctccagcctcgacgtgctcgcgtccgtctcctccatcagcacgctcttcatcttcgcgctcgtcgccgttgcgctcctcgtccgacgatactacgtcgcgggaaccacgtcacccgcgcaggcccgcaccttcgtcggcttcctggcgctgatcgtgctgtcgtccatcgggctgtccgtgtactacaactcgggctacgctgctcggtggcccgggtacgtagcgttcggcgctttgtgggcggccggcacggcggggctggcgctattcgcggagcagcagcgcgcgcccagggtatacggcgcgccgctcatgccgtggctgccggccatgtccgtcgccacaaacctcttccttatgggctctctcggctccctcgcctacatgcgctttggcatctgcacggcggcgatgcttgtgtactacgtgctcttcagcgtgcacgccacctatgacatggtgcactctcaaggtcagacgacatcggcggccgacgctgccaccgacggagtggagcagaggaagataatgccggtgtgacacagaggatgtcatttcttggttagttgagcaaaaggtttgttcaactgtagtgtagggtagacttgagtttggtttgttcaattgctctagttaattggatccctcgttcagaatagctcatctgtatgaaaaaatggtttgtgc

SEQ ID NO: 8560 - protein, 288 aa, Zea mays subsp. mays
  peptide (1)..(288): Ceres Seq. ID no. 12408402
  misc_feature (1)..(279): Homolog of NCBI NO: 30685317 NR Description: amino acid transport protein AAT1 [Arabidopsis
  misc_feature (1)..(266): Homolog of NCBI NO: 19699365 NR Description: At2g34960/F19I3.19 [Arabidopsis thaliana]
  misc_feature (1)..(279): Homolog of NCBI NO: 1076291 NR Description: amino acid transport protein AAT1 - Arabidopsis >gi|2911069|emb|CAA17531.1| amino acid transport protein AAT1 thaliana] >gi|7268909|emb|CAB79112.1| amino acid transport
  misc_feature (1)..(261): Homolog of NCBI NO: 15228334 NR Description: putative amino acid transporter; protein id: [Arabidopsis thaliana] >gi|8567793|gb|AAF76365.1| amino acid putative [Arabidopsis thaliana]
  misc_feature (1)..(261): Homolog of NCBI NO: 15238312 NR Description: amino acid transport - like protein; protein id: supported by cDNA: 158156., supported by cDNA: gi_13430547, by cDNA: gi_14532753 [Arabidopsis thaliana]
  misc_feature (1)..(260): Homolog of NCBI NO: 38345948 NR Description: OSJNBb0103I08.20 [Oryza sativa (japonica
  misc_feature (1)..(139): Homolog of NCBI NO: 37521235 NR Description: probable amino acid transporter [Gloeobacter
  misc_feature (1)..(264): Homolog of NCBI NO: 34903850 NR Description: unnamed protein product [Oryza sativa (japonica group)] >gi|8096566|dbj|BAA96139.1| unnamed protein product
  misc_feature (1)..(264): Homolog of NCBI NO: 15220035 NR Description: putative amino acid transporter; protein id: supported by cDNA: gi_18176203 [Arabidopsis thaliana] amino acid transporter homolog [imported] similar to amino acid
  misc_feature (1)..(266): Homolog of NCBI NO: 15226868 NR Description: putative amino acid transporter; protein id: supported by cDNA: gi_19699364 [Arabidopsis thaliana]
MSAITLVYCAMSLALVGMQRYSDIDANAAYSVAFAAAGMKWARYVVALGALKGMTSGLLVGALGQARYTTQIARTHMIPPYFALVHPRTGTPIYATIAVTLGAACVALFSSLDVLASVSSISTLFIFALVAVALLVRRYYVAGTTSPAQARTFVGFLALIVLSSIGLSVYYNSGYAARWPGYVAFGALWAAGTAGLALFAEQQRAPRVYGAPLMPWLPAMSVATNLFLMGSLGSLAYMRFGICTAAMLVYYVLFSVHATYDMVHSQGQTTSAADAATDGVEQRKIMPV

SEQ ID NO: 8561 - protein, 278 aa, Zea mays subsp. mays
  peptide (1)..(278): Ceres Seq. ID no. 12408403
  misc_feature (1)..(254): Homolog of NCBI NO: 34903850 NR Description: unnamed protein product [Oryza sativa (japonica group)] >gi|8096566|dbj|BAA96139.1| unnamed protein product
  misc_feature (1)..(254): Homolog of NCBI NO: 15220035 NR Description: putative amino acid transporter; protein id: supported by cDNA: gi_18176203 [Arabidopsis thaliana] amino acid transporter homolog [imported] similar to amino acid
  misc_feature (1)..(256): Homolog of NCBI NO: 15226868 NR Description: putative amino acid transporter; protein id: supported by cDNA: gi_19699364 [Arabidopsis thaliana]
  misc_feature (1)..(269): Homolog of NCBI NO: 30685317 NR Description: amino acid transport protein AAT1 [Arabidopsis
  misc_feature (1)..(256): Homolog of NCBI NO: 19699365 NR Description: At2g34960/F19I3.19 [Arabidopsis thaliana]
  misc_feature (1)..(269): Homolog of NCBI NO: 1076291 NR Description: amino acid transport protein AAT1 - Arabidopsis >gi|2911069|emb|CAA17531.1| amino acid transport protein AAT1 thaliana] >gi|7268909|emb|CAB79112.1| amino acid transport
  misc_feature (1)..(251): Homolog of NCBI NO: 15228334 NR Description: putative amino acid transporter; protein id: [Arabidopsis thaliana] >gi|8567793|gb|AAF76365.1| amino acid putative [Arabidopsis thaliana]
  misc_feature (1)..(251): Homolog of NCBI NO: 15238312 NR Description: amino acid transport - like protein; protein id: supported by cDNA: 158156., supported by cDNA: gi_13430547, by cDNA: gi_14532753 [Arabidopsis thaliana]
  misc_feature (1)..(250): Homolog of NCBI NO: 38345948 NR Description: OSJNBb0103I08.20 [Oryza sativa (japonica
  misc_feature (1)..(129): Homolog of NCBI NO: 37521235 NR Description: probable amino acid transporter [Gloeobacter
MSLALVGMQRYSDIDANAAYSVAFAAAGMKWARYVVALGALKGMTSGLLVGALGQARYTTQIARTHMIPPYFALVHPRTGTPIYATIAVTLGAACVALFSSLDVLASVSSISTLFIFALVAVALLVRRYYVAGTTSPAQARTFVGFLALIVLSSIGLSVYYNSGYAARWPGYVAFGALWAAGTAGLALFAEQQRAPRVYGAPLMPWLPAMSVATNLFLMGSLGSLAYMRFGICTAAMLVYYVLFSVHATYDMVHSQGQTTSAADAATDGVEQRKIMPV

SEQ ID NO: 8562 - protein, 271 aa, Zea mays subsp. mays
  peptide (1)..(271): Ceres Seq. ID no. 12408404
  misc_feature (1)..(247): Homolog of NCBI NO: 34903850 NR Description: unnamed protein product [Oryza sativa (japonica group)] >gi|8096566|dbj|BAA96139.1| unnamed protein product
  misc_feature (1)..(247): Homolog of NCBI NO: 15220035 NR Description: putative amino acid transporter; protein id: supported by cDNA: gi_18176203 [Arabidopsis thaliana] amino acid transporter homolog [imported] similar to amino acid
  misc_feature (1)..(249): Homolog of NCBI NO: 15226868 NR Description: putative amino acid transporter; protein id: supported by cDNA: gi_19699364 [Arabidopsis thaliana]
  misc_feature (1)..(262): Homolog of NCBI NO: 30685317 NR Description: amino acid transport protein AAT1 [Arabidopsis
  misc_feature (1)..(249): Homolog of NCBI NO: 19699365 NR Description: At2g34960/F19I3.19 [Arabidopsis thaliana]
  misc_feature (1)..(262): Homolog of NCBI NO: 1076291 NR Description: amino acid transport protein AAT1 - Arabidopsis >gi|2911069|emb|CAA17531.1| amino acid transport protein AAT1 thaliana] >gi|7268909|emb|CAB79112.1| amino acid transport
  misc_feature (1)..(244): Homolog of NCBI NO: 15228334 NR Description: putative amino acid transporter; protein id: [Arabidopsis thaliana] >gi|8567793|gb|AAF76365.1| amino acid putative [Arabidopsis thaliana]
  misc_feature (1)..(244): Homolog of NCBI NO: 15238312 NR Description: amino acid transport - like protein; protein id: supported by cDNA: 158156., supported by cDNA: gi_13430547, by cDNA: gi_14532753 [Arabidopsis thaliana]
  misc_feature (1)..(243): Homolog of NCBI NO: 38345948 NR Description: OSJNBb0103I08.20 [Oryza sativa (japonica
  misc_feature (1)..(122): Homolog of NCBI NO: 37521235 NR Description: probable amino acid transporter [Gloeobacter
MQRYSDIDANAAYSVAFAAAGMKWARYVVALGALKGMTSGLLVGALGQARYTTQIARTHMIPPYFALVHPRTGTPIYATIAVTLGAACVALFSSLDVLASVSSISTLFIFALVAVALLVRRYYVAGTTSPAQARTFVGFLALIVLSSIGLSVYYNSGYAARWPGYVAFGALWAAGTAGLALFAEQQRAPRVYGAPLMPWLPAMSVATNLFLMGSLGSLAYMRFGICTAAMLVYYVLFSVHATYDMVHSQGQTTSAADAATDGVEQRKIMPV

SEQ ID NO: 8563 - DNA, 1450 bp, Zea mays subsp. mays
  misc_feature (1)..(1450): Ceres Seq. ID no. 12423817
  misc_feature: MA Experiment ID: 108522 Result: Up-regulated in Transcription
  misc_feature: MA Experiment 108522 PARAMETER Experiment Name: Zm_42deg_Heat_P Parameter: Age (day) Value: 8
  misc_feature: MA Experiment 108522 PARAMETER Experiment Name: Zm_42deg_Heat_P Parameter: Organism Value: Zea mays
  misc_feature: MA Experiment 108522 PARAMETER Experiment Name: Zm_42deg_Heat_P Parameter: Plant Line Value: 35A19
  misc_feature: MA Experiment 108522 PARAMETER Experiment Name: Zm_42deg_Heat_P Parameter: Temperature (deg C) Value: 42 vs. 22
  misc_feature: MA Experiment 108522 PARAMETER Experiment Name: Zm_42deg_Heat_P Parameter: Timepoint (hr) Value: 1
  misc_feature: MA Experiment 108522 PARAMETER Experiment Name: Zm_42deg_Heat_P Parameter: Tissue Value: Aerial
  misc_feature: MA Experiment ID: 108527 Result: Up-regulated in Transcription
  misc_feature: MA Experiment 108527 PARAMETER Experiment Name: Zm_5mM_NO_P Parameter: Age (day) Value: 8
  misc_feature: MA Experiment 108527 PARAMETER Experiment Name: Zm_5mM_NO_P Parameter: Organism Value: Zea mays
  misc_feature: MA Experiment 108527 PARAMETER Experiment Name: Zm_5mM_NO_P Parameter: Plant Line Value: 35A19
  misc_feature: MA Experiment 108527 PARAMETER Experiment Name: Zm_5mM_NO_P Parameter: Timepoint (hr) Value: 6
  misc_feature: MA Experiment 108527 PARAMETER Experiment Name: Zm_5mM_NO_P Parameter: Tissue Value: Aerial
  misc_feature: MA Experiment 108527 PARAMETER Experiment Name: Zm_5mM_NO_P Parameter: Treatment Value: 5mM NO vs. No Treatment
  misc_feature: MA Experiment ID: 108529 Result: Up-regulated in Transcription
  misc_feature: MA Experiment 108529 PARAMETER Experiment Name: Zm_Imbibed_Seeds_P Parameter: Age (day) Value: 5 vs. 2
  misc_feature: MA Experiment 108529 PARAMETER Experiment Name: Zm_Imbibed_Seeds_P Parameter: Organism Value: Zea mays
  misc_feature: MA Experiment 108529 PARAMETER Experiment Name: Zm_Imbibed_Seeds_P Parameter: Plant Line Value: 35A19
  misc_feature: MA Experiment 108529 PARAMETER Experiment Name: Zm_Imbibed_Seeds_P Parameter: Tissue Value: Roots vs. Embryo
  misc_feature: MA Experiment ID: 108535 Result: Down-regulated in Transcription
  misc_feature: MA Experiment 108535 PARAMETER Experiment Name: Zm_Meristem_P Parameter: Age (day) Value: 8
  misc_feature: MA Experiment 108535 PARAMETER Experiment Name: Zm_Meristem_P Parameter: Organism Value: Zea mays
  misc_feature: MA Experiment 108535 PARAMETER Experiment Name: Zm_Meristem_P Parameter: Plant Line Value: 35A19
  misc_feature: MA Experiment 108535 PARAMETER Experiment Name: Zm_Meristem_P Parameter: Tissue Value: Root Meristem vs. Above Root Meristem
  misc_feature: MA Experiment ID: 108543 Result: Down-regulated in Transcription
  misc_feature: MA Experiment ID: 108556 Result: Up-regulated in Transcription
  misc_feature: MA Experiment 108556 PARAMETER Experiment Name: Zm_Drought_P Parameter: Age (day) Value: 9
  misc_feature: MA Experiment 108556 PARAMETER Experiment Name: Zm_Drought_P Parameter: Organism Value: Zea mays
  misc_feature: MA Experiment 108556 PARAMETER Experiment Name: Zm_Drought_P Parameter: Plant Line Value: 35A19
  misc_feature: MA Experiment 108556 PARAMETER Experiment Name: Zm_Drought_P Parameter: Timepoint (hr) Value: 24
  misc_feature: MA Experiment 108556 PARAMETER Experiment Name: Zm_Drought_P Parameter: Tissue Value: Aerial
  misc_feature: MA Experiment 108556 PARAMETER Experiment Name: Zm_Drought_P Parameter: Treatment Value: Drought vs. No Drought
  misc_feature: MA Experiment ID: 108689 Result: Up-regulated in Transcription
  misc_feature: MA Experiment 108689 PARAMETER Experiment Name: Zm_Drought_Roots_P Parameter: Age (day) Value: 9
  misc_feature: MA Experiment 108689 PARAMETER Experiment Name: Zm_Drought_Roots_P Parameter: Organism Value: Zea mays
  misc_feature: MA Experiment 108689 PARAMETER Experiment Name: Zm_Drought_Roots_P Parameter: Plant Line Value: 35A19
  misc_feature: MA Experiment 108689 PARAMETER Experiment Name: Zm_Drought_Roots_P Parameter: Timepoint (hr) Value: 24
  misc_feature: MA Experiment 108689 PARAMETER Experiment Name: Zm_Drought_Roots_P Parameter: Tissue Value: Roots
  misc_feature: MA Experiment 108689 PARAMETER Experiment Name: Zm_Drought_Roots_P Parameter: Treatment Value: Drought vs. No Drought
  misc_feature: MA Experiment ID: 20000478 Result: Up-regulated in Transcription
  misc_feature: MA Experiment 20000478 PARAMETER Experiment Name: Zm_5mM_SA_P Parameter: Age (day) Value: 11
  misc_feature: MA Experiment 20000478 PARAMETER Experiment Name: Zm_5mM_SA_P Parameter: Organism Value: Zea mays
  misc_feature: MA Experiment 20000478 PARAMETER Experiment Name: Zm_5mM_SA_P Parameter: Plant Line Value: 35A19
  misc_feature: MA Experiment 20000478 PARAMETER Experiment Name: Zm_5mM_SA_P Parameter: Timepoint (hr) Value: 72
  misc_feature: MA Experiment 20000478 PARAMETER Experiment Name: Zm_5mM_SA_P Parameter: Tissue Value: Aerial
  misc_feature: MA Experiment 20000478 PARAMETER Experiment Name: Zm_5mM_SA_P Parameter: Treatment Value: 5mM SA vs. No Treatment
  misc_feature: MA Experiment ID: 20000626 Result: Up-regulated in Transcription
  misc_feature: MA Experiment 20000626 PARAMETER Experiment Name: Zm_Herbicide-Treatments_P Parameter: Timepoint (hr) Value: 12
  misc_feature: MA Experiment 20000626 PARAMETER Experiment Name: Zm_Herbicide-Treatments_P Parameter: Tissue Value: Aerial
  misc_feature: MA Experiment 20000626 PARAMETER Experiment Name: Zm_Herbicide-Treatments_P Parameter: Treatment Value: Roundup vs. No Treatment
  misc_feature: MA Experiment ID: 20000630 Result: Up-regulated in Transcription
  misc_feature: MA Experiment 20000630 PARAMETER Experiment Name: Zm_Herbicide-Treatments_P Parameter: Timepoint (hr) Value: 4
  misc_feature: MA Experiment 20000630 PARAMETER Experiment Name: Zm_Herbicide-Treatments_P Parameter: Tissue Value: Aerial
  misc_feature: MA Experiment 20000630 PARAMETER Experiment Name: Zm_Herbicide-Treatments_P Parameter: Treatment Value: Roundup vs. No Treatment
cactctgcctttccattcccccatccgccatggcggcgccgccggagctcgttgacgacacgatcgccgagatctgcctccgccttcccccggacgagcccgcgcacctcgtccgtgccgccctggtctccaggcgctggcgccgcatcctctccggcggggccttcctccgccggtaccgcgcgttccacggggcaccccctctgctcggcttcgtcgacaacaccatcgggctccacggcgccacggcccctcgcttctcccccaccacctcatccggctcccctttccccaggcggacgttcgactgcatctgctgggaggccctcgactgccgccacggccgcgtcctcctcggcctcttcgccgagagggtcaacctcgtcgtgtgggaccccgtcaccggcgaccactgtgggctgcctgaccccggggtgctccccggttactacagcgcggcggtgctctgcgccgcgcgcggctgcgaccacctccactgccgcggcggcggcccgttccgcgtcgtcctggcgggcatggactacttctcaagggacgccggcgtgcgggcgcgcctctactgctcggaggccgctgcctgggtcgcctctgctcagttggcctccgattcccatgtcatgcggaagcccagcgcgctcgtcggagacaacgtctacttccagctcatggagggtgacgtgtttctgaggtacgacatgggcaggaaccgtctgtccaccttcgaccctccggcggcgcacgtcgacgaagggggcgtcgtgctcatgcccatgggcggtgacggctcgctggggcttgccggcgtcaggggatcaaggctttgcctgtggtcgacgagtgtcggcgcagaggggattggaaggatgggttcgacgcggggacattgagcttatgacacggatcccctttatgccctatagcgaagcacatgtgattgcttctgcggagggcttgggtttcggtacaatcttcttggtctcaactgaggttggcctcttcgcggtcgacctcaaatcagggcaggagcgcaaactaagcgagcctgggaactacaacgacttcgctgtcttccccttcatgagcttctatactccagactgtacaagcggcaaggtaccgtcacccaggaggacacactaatcactgtaatactgaggcgaagaatggtattgcctggctcatctncagatccatcaagttgagtttgcaggtgctgtcatctttctgttgcaggaatgacgtctcgcaagaaacacaagccatgaagccaacatattggtcgcttatgctcctatgctctctagctgattcttagatgcataatgtatacgcagccttttttttgttctcgtaatatgtgtgttgtttggttcacatatttgtaatataataggtaacagataacgttaaattatgtttgtttaaatcc

SEQ ID NO: 8564 - protein, 301 aa, Zea mays subsp. mays
  peptide (1)..(301): Ceres Seq. ID no. 12423818
  misc_feature (14)..(61): Pfam Name: F-box domain Pfam Description: F-box domain
  misc_feature (9)..(291): Homolog of NCBI NO: 34395380 NR Description: unknown protein [Oryza sativa (japonica
  misc_feature (11)..(292): Homolog of NCBI NO: 33146558 NR Description: unknown protein [Oryza sativa (japonica
  misc_feature (11)..(292): Homolog of NCBI NO: 34915424 NR Description: hypothetical protein~similar to Oryza sativa
  misc_feature (11)..(291): Homolog of NCBI NO: 34394504 NR Description: unknown protein [Oryza sativa (japonica
  misc_feature (10)..(284): Homolog of NCBI NO: 34915420 NR Description: contains EST C98814(E3124)~similar to Oryza sativa
  misc_feature (13)..(290): Homolog of NCBI NO: 34914028 NR Description: OJ1014_G12.29 [Oryza sativa (japonica
  misc_feature (10)..(301): Homolog of NCBI NO: 34915428 NR Description: hypothetical protein~similar to Oryza sativa
  misc_feature (10)..(291): Homolog of NCBI NO: 35215058 NR Description: hypothetical protein [Oryza sativa (japonica group)] >gi|35215249|dbj|BAC92599.1| hypothetical protein [Oryza
  misc_feature (12)..(294): Homolog of NCBI NO: 34394503 NR Description: unknown protein [Oryza sativa (japonica
  misc_feature (16)..(284): Homolog of NCBI NO: 35215055 NR Description: hypothetical protein [Oryza sativa (japonica group)] >gi|35215246|dbj|BAC92596.1| hypothetical protein [Oryza
LCLSIPPSAMAAPPELVDDTIAEICLRLPPDEPAHLVRAALVSRRWRRILSGGAFLRRYRAFHGAPPLLGFVDNTIGLHGATAPRFSPTTSSGSPFPRRTFDCICWEALDCRHGRVLLGLFAERVNLVVWDPVTGDHCGLPDPGVLPGYYSAAVLCAARGCDHLHCRGGGPFRVVLAGMDYFSRDAGVRARLYCSEAAAWVASAQLASDSHVMRKPSALVGDNVYFQLMEGDVFLRYDMGRNRLSTFDPPAAHVDEGGVVLMPMGGDGSLGLAGVRGSRLCLWSTSVGAEGIGRMGSTRGH

SEQ ID NO: 8565 - protein, 292 aa, Zea mays subsp. mays
  peptide (1)..(292): Ceres Seq. ID no. 12423819
  misc_feature (5)..(52): Pfam Name: F-box domain Pfam Description: F-box domain
  misc_feature (1)..(282): Homolog of NCBI NO: 34395380 NR Description: unknown protein [Oryza sativa (japonica
  misc_feature (2)..(283): Homolog of NCBI NO: 33146558 NR Description: unknown protein [Oryza sativa (japonica
  misc_feature (2)..(283): Homolog of NCBI NO: 34915424 NR Description: hypothetical protein~similar to Oryza sativa
  misc_feature (2)..(282): Homolog of NCBI NO: 34394504 NR Description: unknown protein [Oryza sativa (japonica
  misc_feature (1)..(275): Homolog of NCBI NO: 34915420 NR Description: contains EST C98814(E3124)~similar to Oryza sativa
  misc_feature (4)..(281): Homolog of NCBI NO: 34914028 NR Description: OJ1014_G12.29 [Oryza sativa (japonica
  misc_feature (1)..(292): Homolog of NCBI NO: 34915428 NR Description: hypothetical protein~similar to Oryza sativa
  misc_feature (1)..(282): Homolog of NCBI NO: 35215058 NR Description: hypothetical protein [Oryza sativa (japonica group)] >gi|35215249|dbj|BAC92599.1| hypothetical protein [Oryza
  misc_feature (3)..(285): Homolog of NCBI NO: 34394503 NR Description: unknown protein [Oryza sativa (japonica
  misc_feature (7)..(275): Homolog of NCBI NO: 35215055 NR Description: hypothetical protein [Oryza sativa (japonica group)] >gi|35215246|dbj|BAC92596.1| hypothetical protein [Oryza
MAAPPELVDDTIAEICLRLPPDEPAHLVRAALVSRRWRRILSGGAFLRRYRAFHGAPPLLGFVDNTIGLHGATAPRFSPTTSSGSPFPRRTFDCICWEALDCRHGRVLLGLFAERVNLVVWDPVTGDHCGLPDPGVLPGYYSAAVLCAARGCDHLHCRGGGPFRVVLAGMDYFSRDAGVRARLYCSEAAAWVASAQLASDSHVMRKPSALVGDNVYFQLMEGDVFLRYDMGRNRLSTFDPPAAHVDEGGVVLMPMGGDGSLGLAGVRGSRLCLWSTSVGAEGIGRMGSTRGH

SEQ ID NO: 8566 - protein, 235 aa, Zea mays subsp. mays
  peptide (1)..(235): Ceres Seq. ID no. 12423820
  misc_feature (16)..(235): Pfam Name: Equine herpesvirus glycoprotein gp2 Pfam Description: Equine herpesvirus glycoprotein gp2
  misc_feature (16)..(235): Homolog of NCBI NO: 17221114 NR Description: glycoprotein gp2 [Equine herpesvirus 1]
  misc_feature (16)..(235): Homolog of NCBI NO: 13592175 NR Description: ppg3 [Leishmania major]
  misc_feature (16)..(235): Homolog of NCBI NO: 17221116 NR Description: glycoprotein gp2 [Equine herpesvirus 1]
  misc_feature (22)..(229): Homolog of NCBI NO: 11359723 NR Description: proteophosphoglycan, membrane-associated - Leishmania major (fragment) >gi|5420389|emb|CAB46680.1|
  misc_feature (16)..(229): Homolog of NCBI NO: 5420387 NR Description: proteophosphoglycan [Leishmania major]
  misc_feature (16)..(229): Homolog of NCBI NO: 13592175 NR Description: ppg3 [Leishmania major]
  misc_feature (16)..(229): Homolog of NCBI NO: 13592175 NR Description: ppg3 [Leishmania major]
  misc_feature (19)..(235): Homolog of NCBI NO: 9626808 NR Description: membrane glycoprotein [Equine herpesvirus 1]
  misc_feature (16)..(229): Homolog of NCBI NO: 11359723 NR Description: proteophosphoglycan, membrane-associated - Leishmania major (fragment) >gi|5420389|emb|CAB46680.1|
  misc_feature (10)..(229): Homolog of NCBI NO: 13592175 NR Description: ppg3 [Leishmania major]
HSAFPFPHPPWRRRRSSLTTRSPRSASAFPRTSPRTSSVPPWSPGAGAASSPAGPSSAGTARSTGHPLCSASSTTPSGSTAPRPLASPPPPHPAPLSPGGRSTASAGRPSTAATAASSSASSPRGSTSSCGTPSPATTVGCLTPGCSPVTTARRCSAPRAAATTSTAAAAARSASSWRAWTTSQGTPACGRASTARRPLPGSPLLSWPPIPMSCGSPARSSETTSTSSSWRVTCF

SEQ ID NO: 8567 - DNA, 1511 bp, Zea mays subsp. mays
  misc_feature (1)..(1511): Ceres Seq. ID no. 12408397
  misc_feature: MA Experiment ID: 108529 Result: Down-regulated in Transcription
  misc_feature: MA Experiment 108529 PARAMETER Experiment Name: Zm_Imbibed_Seeds_P Parameter: Age (day) Value: 5 vs. 2
  misc_feature: MA Experiment 108529 PARAMETER Experiment Name: Zm_Imbibed_Seeds_P Parameter: Organism Value: Zea mays
  misc_feature: MA Experiment 108529 PARAMETER Experiment Name: Zm_Imbibed_Seeds_P Parameter: Plant Line Value: 35A19
  misc_feature: MA Experiment 108529 PARAMETER Experiment Name: Zm_Imbibed_Seeds_P Parameter: Tissue Value: Roots vs. Embryo
  misc_feature: MA Experiment ID: 108535 Result: Up-regulated in Transcription
  misc_feature: MA Experiment 108535 PARAMETER Experiment Name: Zm_Meristem_P Parameter: Age (day) Value: 8
  misc_feature: MA Experiment 108535 PARAMETER Experiment Name: Zm_Meristem_P Parameter: Organism Value: Zea mays
  misc_feature: MA Experiment 108535 PARAMETER Experiment Name: Zm_Meristem_P Parameter: Plant Line Value: 35A19
  misc_feature: MA Experiment 108535 PARAMETER Experiment Name: Zm_Meristem_P Parameter: Tissue Value: Root Meristem vs. Above Root Meristem
  misc_feature: MA Experiment ID: 108536 Result: Up-regulated in Transcription
  misc_feature: MA Experiment 108536 PARAMETER Experiment Name: Zm_Meristem_P Parameter: Age (day) Value: 8
  misc_feature: MA Experiment 108536 PARAMETER Experiment Name: Zm_Meristem_P Parameter: Organism Value: Zea mays
  misc_feature: MA Experiment 108536 PARAMETER Experiment Name: Zm_Meristem_P Parameter: Plant Line Value: 35A19
  misc_feature: MA Experiment 108536 PARAMETER Experiment Name: Zm_Meristem_P Parameter: Tissue Value: Shoot Meristem vs. Above Shoot Meristem
  misc_feature: MA Experiment ID: 108544 Result: Down-regulated in Transcription
  misc_feature: MA Experiment ID: 108547 Result: Down-regulated in Transcription
  misc_feature: MA Experiment 108547 PARAMETER Experiment Name: Zm_Imbibed_Seeds_P Parameter: Age (day) Value: 4 vs. 2
  misc_feature: MA Experiment 108547 PARAMETER Experiment Name: Zm_Imbibed_Seeds_P Parameter: Organism Value: Zea mays
  misc_feature: MA Experiment 108547 PARAMETER Experiment Name: Zm_Imbibed_Seeds_P Parameter: Plant Line Value: 35A19
  misc_feature: MA Experiment 108547 PARAMETER Experiment Name: Zm_Imbibed_Seeds_P Parameter: Tissue Value: Aerial vs. Embryo
  misc_feature: MA Experiment ID: 20000535 Result: Up-regulated in Transcription
  misc_feature: MA Experiment 20000535 PARAMETER Experiment Name: Zm_Hybrid_Seed_Dev_P Parameter: DAP Value: 30 vs. 12
  misc_feature: MA Experiment 20000535 PARAMETER Experiment Name: Zm_Hybrid_Seed_Dev_P Parameter: Organism Value: Zea mays
  misc_feature: MA Experiment 20000535 PARAMETER Experiment Name: Zm_Hybrid_Seed_Dev_P Parameter: Plant Line Value: 35A19
  misc_feature: MA Experiment 20000535 PARAMETER Experiment Name: Zm_Hybrid_Seed_Dev_P Parameter: Tissue Value: Embryo vs. Unfert Floret
  misc_feature: MA Experiment ID: 20000632 Result: Down-regulated in Transcription
  misc_feature: MA Experiment 20000632 PARAMETER Experiment Name: Zm_Herbicide-Treatments_P Parameter: Timepoint (hr) Value: 4
  misc_feature: MA Experiment 20000632 PARAMETER Experiment Name: Zm_Herbicide-Treatments_P Parameter: Tissue Value: Aerial
  misc_feature: MA Experiment 20000632 PARAMETER Experiment Name: Zm_Herbicide-Treatments_P Parameter: Treatment Value: Glean vs. No Treatment
cctgcccgcagctgagctcccccatagttactagctagcttatattgcatatctcctccccctcctccgtcctcgctagctcgtgttcttcttcctctcatcttttgcttgtcctccattccatcgatctcctattcctgtgccgaccgcgaggccatcgtcaaagagaaacacagagcgggtcggggactctcggggagtcgggggaggctgctagtgctagctagctcgaccatatacagtttgtgggcgcggccgggcgggcaacaagctgctaaggtaccagcataccacccatctccatggctttcctggtggagcggtgcggcgagatggtggtgtcgatggagagcccgcacgcgaaccggtgccggcgccgttcctgaccaagacgtaccagctggtggacgacccctgcaccgaccacttcgtgtcgtggggcgacgacgacaccaccttcgtcgtgtggcgcccgcccgagttcgcccgcgacctcctcccaaactacttcaagcacaacaacttctccagcttcgtcaggcagctcaacacctatggcttcaggaagatagtggcggacaggtgggagttcgccaacgagttcttcaggaagggcgccaagcacctcctcgccgagatccaccggaggaagtcgtcgcagccgctgccgacgccgctgccgccgcaccagccctaccaccaccaccaccaccatctccaccaccacctcagcccgttctccccgccgccgctggcacagccggtgccgtcgtaccaccaccaccacttccaagaagagcccatcgccaccgccaccgcgccgcacggcggtgctcaagccgccgccgccggcggcaacaatgaaggcagcggcgccggctccggcggggactttctggccgcgctgtcggaggacaaccggcagctgtggcggcgcaactcgctgctgctgtcggagctggcgcacatgaagaagctctacaacgacatcatctacttcctgcagaaccacgtggccccggtgacgagcccctcgtcggcggcgcacgcgtccctgcccaangcgccggcggcggcngcgccgcggcntcctcctgcaggctaatggagctggacccggcggactccccatcncnccgccgcggcggccggaggcggacgacggcacggacacggtgaagctgttcggcgtggccctgcagggcaagaagaagaagcgggcgcaccaggaggatggggacgacggcaaccatgagcagggaagcagcgacgtctagccgccggccggcttgcattgctagctctctcgttcgtgtacatacagagatcagatcagagagtagtagtttgcctcgctagctaggctaggctaggctttggtaattttcttctgagtgcgtactgaaattaatgtgcaagagcgaagtgtttgtctgagtaaaactaacaagaatctacggatgcgtgcatggaagctaagctagatgcagaggcttgcaccaccttctctt

SEQ ID NO: 8568 - protein, 45 aa, Zea mays subsp. mays
  peptide (1)..(45): Ceres Seq. ID no. 12408398
  misc_feature (1)..(29): Homolog of NCBI NO: 15220101 NR Description: heat shock transcription factor, putative; id: At1g46264.1 [Arabidopsis thaliana] >gi|25296103|pir||C96511
  misc_feature (32)..(32): Xaa is any aa, unknown or other
  misc_feature (37)..(37): Xaa is any aa, unknown or other
  misc_feature (41)..(41): Xaa is any aa, unknown or other
MKKLYNDIIYFLQNHVAPVTSPSSAAHASLPXAPAAXAPRXPPAG

SEQ ID NO: 8569 - protein, 41 aa, Zea mays subsp. mays
  peptide (1)..(41): Ceres Seq. ID no. 12408399
MGTTATMSREAATSSRRPACIASSLVRVHTEIRSESSSLPR

SEQ ID NO: 8570 - protein, 36 aa, Zea mays subsp. mays
  peptide (1)..(36): Ceres Seq. ID no. 12408400
  misc_feature (1)..(36): Homolog of NCBI NO: 28574039 NR Description: Salivary gland secretion 1 CG3047-PA
  misc_feature (1)..(36): Homolog of NCBI NO: 28574039 NR Description: Salivary gland secretion 1 CG3047-PA
  misc_feature (1)..(36): Homolog of NCBI NO: 28574039 NR Description: Salivary gland secretion 1 CG3047-PA
  misc_feature (1)..(36): Homolog of NCBI NO: 28574039 NR Description: Salivary gland secretion 1 CG3047-PA
  misc_feature (1)..(36): Homolog of NCBI NO: 28574039 NR Description: Salivary gland secretion 1 CG3047-PA
  misc_feature (1)..(36): Homolog of NCBI NO: 28574039 NR Description: Salivary gland secretion 1 CG3047-PA
  misc_feature (1)..(36): Homolog of NCBI NO: 28574039 NR Description: Salivary gland secretion 1 CG3047-PA
  misc_feature (1)..(36): Homolog of NCBI NO: 28574039 NR Description: Salivary gland secretion 1 CG3047-PA
  misc_feature (1)..(36): Homolog of NCBI NO: 28574039 NR Description: Salivary gland secretion 1 CG3047-PA
  misc_feature (1)..(36): Homolog of NCBI NO: 28574039 NR Description: Salivary gland secretion 1 CG3047-PA
MKAAAPAPAGTFWPRCRRTTGSCGGATRCCCRSWRT

SEQ ID NO: 8571 - DNA, 1528 bp, Zea mays subsp. mays
  misc_feature (1)..(1528): Ceres Seq. ID no. 12408393
  misc_feature: MA Experiment ID: 108543 Result: Down-regulated in Transcription
  misc_feature: MA Experiment ID: 108689 Result: Up-regulated in Transcription
  misc_feature: MA Experiment 108689 PARAMETER Experiment Name: Zm_Drought_Roots_P Parameter: Age (day) Value: 9
  misc_feature: MA Experiment 108689 PARAMETER Experiment Name: Zm_Drought_Roots_P Parameter: Organism Value: Zea mays
  misc_feature: MA Experiment 108689 PARAMETER Experiment Name: Zm_Drought_Roots_P Parameter: Plant Line Value: 35A19
  misc_feature: MA Experiment 108689 PARAMETER Experiment Name: Zm_Drought_Roots_P Parameter: Timepoint (hr) Value: 24
  misc_feature: MA Experiment 108689 PARAMETER Experiment Name: Zm_Drought_Roots_P Parameter: Tissue Value: Roots
  misc_feature: MA Experiment 108689 PARAMETER Experiment Name: Zm_Drought_Roots_P Parameter: Treatment Value: Drought vs. No Drought
atctcgcttgcgaaacaaaggacggcgcgcgagaggaggggaaaggaaaacaaccaccacgaccccgtccattccgttccacttccacccgagctcagcgatcgcggcggcggatgcggatggggaaggggctgtcgtcgcgggcggggtcgcggcaccggcagttccgcgcccgagccatgacccgcgtcgacgacctccaggaggtcttctcgggcctgcagtccgcgcgcaaggactcacgctccgcggacgccgccgtcctcgaggcgcagctccagcagatgctgcgcgagtggcgctccgagctcaacgctccctctcccacctcctccctgcagggcaacgccagggaactgtcggatccgccttcggatactcttcgtctactgcagttggtggtggccgaggaggaggatgacgccacgagcaagatggtcgagcagcagcagcagcccccacctccgctcccagctaaccggagccagggccacgcgcatgttgtgtgccagggcatgaagccggagccgcacgaggaagcagttgacgttgctgtggaccagccgcagctgctgagtcagggggttctgcctaatggtgctgctaccgcgtctgcggtgttccatgatcagctgtactatgtgaaccaggagctcacggtcgaggattttctttatgatgatgattacaagatagatctttctgggtctaatctggatgtcattaataacctagaagggattgttcagctggaatatccagatcacaatttgccgcaagggttagcccctaatgcataccttgacatgaatagttgtgggcagagtgccggggctgttttcctgcacatgccagatttgctcacaacaatgacttcagcaccttctgcattcctgaagccaaaatgcgctctctgggactgccccaggcctgctattggatcagaaagatggcataattattgcagcatgtatcatgctgatttggctgtgcaggaagagggccctccgggcacaatgcctgtgatccgtccaagaggcattgatctgaaagatggccccctgtttgctgctcttagtgcaaaagtccaaggaaaaaatgttggggtccctatctgtgaaggagctgccactgcaaagtctccatggaatgcacctgaacttttcgatctttacatatttgaaggtgaatctatcagagaatggttgttttttgacaaaccaaggagggcatttgatagtggaaatcggaagcagcggtccttgccagactacaacggccgtggttggcatgaatctaggaagcaggtgatgaaggactttgggggtctgaagaggtcctattacatggatccacaaccatccaacagctatgaatggcacctatatgaatatgagatcaatgactgtgatgcttttgccttatatcggcttgaattcaagtcttcagatgcaaagaaaattgcaaaatccaaattaggttgtaatccactgaatgaaattcagcagcaaatggatagactcagtcc

SEQ ID NO: 8572 - protein, 508 aa, Zea mays subsp. mays
  peptide (1)..(508): Ceres Seq. ID no. 12408394
  misc_feature (48)..(507): Homolog of NCBI NO: 34909602 NR Description: P0435B05.21 [Oryza sativa (japonica
  misc_feature (62)..(267): Homolog of NCBI NO: 18405962 NR Description: expressed protein; protein id: At2g42400.1, by cDNA: gi_13605699, supported by cDNA: gi_18700277 [Arabidopsis >gi|13605700|gb|AAK32843.1|AF361831_1 At2g42400/MHK10.12
  misc_feature (294)..(504): Homolog of NCBI NO: 18405962 NR Description: expressed protein; protein id: At2g42400.1, by cDNA: gi_13605699, supported by cDNA: gi_18700277 [Arabidopsis >gi|13605700|gb|AAK32843.1|AF361831_1 At2g42400/MHK10.12
  misc_feature (105)..(507): Homolog of NCBI NO: 15218694 NR Description: unknown protein; protein id: At1g28520.1
  misc_feature (62)..(504): Homolog of NCBI NO: 25370817 NR Description: hypothetical protein At2g42400 [imported] -
  misc_feature (386)..(507): Homolog of NCBI NO: 6691215 NR Description: F1K23.24 [Arabidopsis thaliana]
  misc_feature (47)..(217): Homolog of NCBI NO: 15218694 NR Description: unknown protein; protein id: At1g28520.1
LACETKDGAREEGKGKQPPRPRPFRSTSTRAQRSRRRMRMGKGLSSRAGSRHRQFRARAMTRVDDLQEVFSGLQSARKDSRSADAAVLEAQLQQMLREWRSELNAPSPTSSLQGNARELSDPPSDTLRLLQLVVAEEEDDATSKMVEQQQQPPPPLPANRSQGHAHVVCQGMKPEPHEEAVDVAVDQPQLLSQGVLPNGAATASAVFHDQLYYVNQELTVEDFLYDDDYKIDLSGSNLDVINNLEGIVQLEYPDHNLPQGLAPNAYLDMNSCGQSAGAVFLHMPDLLTTMTSAPSAFLKPKCALWDCPRPAIGSERWHNYCSMYHADLAVQEEGPPGTMPVIRPRGIDLKDGPLFAALSAKVQGKNVGVPICEGAATAKSPWNAPELFDLYIFEGESIREWLFFDKPRRAFDSGNRKQRSLPDYNGRGWHESRKQVMKDFGGLKRSYYMDPQPSNSYEWHLYEYEINDCDAFALYRLEFKSSDAKKIAKSKLGCNPLNEIQQQMDRLS

SEQ ID NO: 8573 - protein, 471 aa, Zea mays subsp. mays
  peptide (1)..(471): Ceres Seq. ID no. 12408395
  misc_feature (11)..(470): Homolog of NCBI NO: 34909602 NR Description: P0435B05.21 [Oryza sativa (japonica
  misc_feature (25)..(230): Homolog of NCBI NO: 18405962 NR Description: expressed protein; protein id: At2g42400.1, by cDNA: gi_13605699, supported by cDNA: gi_18700277 [Arabidopsis >gi|13605700|gb|AAK32843.1|AF361831_1 At2g42400/MHK10.12
  misc_feature (257)..(467): Homolog of NCBI NO: 18405962 NR Description: expressed protein; protein id: At2g42400.1, by cDNA: gi_13605699, supported by cDNA: gi_18700277 [Arabidopsis >gi|13605700|gb|AAK32843.1|AF361831_1 At2g42400/MHK10.12
  misc_feature (68)..(470): Homolog of NCBI NO: 15218694 NR Description: unknown protein; protein id: At1g28520.1
  misc_feature (25)..(467): Homolog of NCBI NO: 25370817 NR Description: hypothetical protein At2g42400 [imported] -
  misc_feature (349)..(470): Homolog of NCBI NO: 6691215 NR Description: F1K23.24 [Arabidopsis thaliana]
  misc_feature (10)..(180): Homolog of NCBI NO: 15218694 NR Description: unknown protein; protein id: At1g28520.1
MRMGKGLSSRAGSRHRQFRARAMTRVDDLQEVFSGLQSARKDSRSADAAVLEAQLQQMLREWRSELNAPSPTSSLQGNARELSDPPSDTLRLLQLVVAEEEDDATSKMVEQQQQPPPPLPANRSQGHAHVVCQGMKPEPHEEAVDVAVDQPQLLSQGVLPNGAATASAVFHDQLYYVNQELTVEDFLYDDDYKIDLSGSNLDVINNLEGIVQLEYPDHNLPQGLAPNAYLDMNSCGQSAGAVFLHMPDLLTTMTSAPSAFLKPKCALWDCPRPAIGSERWHNYCSMYHADLAVQEEGPPGTMPVIRPRGIDLKDGPLFAALSAKVQGKNVGVPICEGAATAKSPWNAPELFDLYIFEGESIREWLFFDKPRRAFDSGNRKQRSLPDYNGRGWHESRKQVMKDFGGLKRSYYMDPQPSNSYEWHLYEYEINDCDAFALYRLEFKSSDAKKIAKSKLGCNPLNEIQQQMDRLS

SEQ ID NO: 8574 - protein, 469 aa, Zea mays subsp. mays
  peptide (1)..(469): Ceres Seq. ID no. 12408396
  misc_feature (9)..(468): Homolog of NCBI NO: 34909602 NR Description: P0435B05.21 [Oryza sativa (japonica
  misc_feature (23)..(228): Homolog of NCBI NO: 18405962 NR Description: expressed protein; protein id: At2g42400.1, by cDNA: gi_13605699, supported by cDNA: gi_18700277 [Arabidopsis >gi|13605700|gb|AAK32843.1|AF361831_1 At2g42400/MHK10.12
  misc_feature (255)..(465): Homolog of NCBI NO: 18405962 NR Description: expressed protein; protein id: At2g42400.1, by cDNA: gi_13605699, supported by cDNA: gi_18700277 [Arabidopsis >gi|13605700|gb|AAK32843.1|AF361831_1 At2g42400/MHK10.12
  misc_feature (66)..(468): Homolog of NCBI NO: 15218694 NR Description: unknown protein; protein id: At1g28520.1
  misc_feature (23)..(465): Homolog of NCBI NO: 25370817 NR Description: hypothetical protein At2g42400 [imported] -
  misc_feature (347)..(468): Homolog of NCBI NO: 6691215 NR Description: F1K23.24 [Arabidopsis thaliana]
  misc_feature (8)..(178): Homolog of NCBI NO: 15218694 NR Description: unknown protein; protein id: At1g28520.1
MGKGLSSRAGSRHRQFRARAMTRVDDLQEVFSGLQSARKDSRSADAAVLEAQLQQMLREWRSELNAPSPTSSLQGNARELSDPPSDTLRLLQLVVAEEEDDATSKMVEQQQQPPPPLPANRSQGHAHVVCQGMKPEPHEEAVDVAVDQPQLLSQGVLPNGAATASAVFHDQLYYVNQELTVEDFLYDDDYKIDLSGSNLDVINNLEGIVQLEYPDHNLPQGLAPNAYLDMNSCGQSAGAVFLHMPDLLTTMTSAPSAFLKPKCALWDCPRPAIGSERWHNYCSMYHADLAVQEEGPPGTMPVIRPRGIDLKDGPLFAALSAKVQGKNVGVPICEGAATAKSPWNAPELFDLYIFEGESIREWLFFDKPRRAFDSGNRKQRSLPDYNGRGWHESRKQVMKDFGGLKRSYYMDPQPSNSYEWHLYEYEINDCDAFALYRLEFKSSDAKKIAKSKLGCNPLNEIQQQMDRLS

SEQ ID NO: 8575 - DNA, 1814 bp, Zea mays subsp. mays
  misc_feature (1)..(1814): Ceres Seq. ID no. 12406604
  misc_feature: MA Experiment ID: 108530 Result: Down-regulated in Transcription
  misc_feature: MA Experiment 108530 PARAMETER Experiment Name: Zm_Imbibed_Seeds_P Parameter: Age (day) Value: 6 vs. 2
  misc_feature: MA Experiment 108530 PARAMETER Experiment Name: Zm_Imbibed_Seeds_P Parameter: Organism Value: Zea mays
  misc_feature: MA Experiment 108530 PARAMETER Experiment Name: Zm_Imbibed_Seeds_P Parameter: Plant Line Value: 35A19
  misc_feature: MA Experiment 108530 PARAMETER Experiment Name: Zm_Imbibed_Seeds_P Parameter: Tissue Value: Aerial vs. Embryo
  misc_feature: MA Experiment ID: 108535 Result: Up-regulated in Transcription
  misc_feature: MA Experiment 108535 PARAMETER Experiment Name: Zm_Meristem_P Parameter: Age (day) Value: 8
  misc_feature: MA Experiment 108535 PARAMETER Experiment Name: Zm_Meristem_P Parameter: Organism Value: Zea mays
  misc_feature: MA Experiment 108535 PARAMETER Experiment Name: Zm_Meristem_P Parameter: Plant Line Value: 35A19
  misc_feature: MA Experiment 108535 PARAMETER Experiment Name: Zm_Meristem_P Parameter: Tissue Value: Root Meristem vs. Above Root Meristem
  misc_feature: MA Experiment ID: 108544 Result: Down-regulated in Transcription
  misc_feature: MA Experiment ID: 108556 Result: Down-regulated in Transcription
  misc_feature: MA Experiment 108556 PARAMETER Experiment Name: Zm_Drought_P Parameter: Age (day) Value: 9
  misc_feature: MA Experiment 108556 PARAMETER Experiment Name: Zm_Drought_P Parameter: Organism Value: Zea mays
  misc_feature: MA Experiment 108556 PARAMETER Experiment Name: Zm_Drought_P Parameter: Plant Line Value: 35A19
  misc_feature: MA Experiment 108556 PARAMETER Experiment Name: Zm_Drought_P Parameter: Timepoint (hr) Value: 24
  misc_feature: MA Experiment 108556 PARAMETER Experiment Name: Zm_Drought_P Parameter: Tissue Value: Aerial
  misc_feature: MA Experiment 108556 PARAMETER Experiment Name: Zm_Drought_P Parameter: Treatment Value: Drought vs. No Drought
  misc_feature: MA Experiment ID: 20000492 Result: Up-regulated in Transcription
  misc_feature: MA Experiment 20000492 PARAMETER Experiment Name: Zm_Hybrid_Seed_Dev_P Parameter: DAP Value: 12
  misc_feature: MA Experiment 20000492 PARAMETER Experiment Name: Zm_Hybrid_Seed_Dev_P Parameter: Organism Value: Zea mays
  misc_feature: MA Experiment 20000492 PARAMETER Experiment Name: Zm_Hybrid_Seed_Dev_P Parameter: Plant Line Value: 35A19
  misc_feature: MA Experiment 20000492 PARAMETER Experiment Name: Zm_Hybrid_Seed_Dev_P Parameter: Tissue Value: Fert Kernel vs. Unfert Floret
  misc_feature: MA Experiment ID: 20000534 Result: Down-regulated in Transcription
  misc_feature: MA Experiment 20000534 PARAMETER Experiment Name: Zm_Hybrid_Pollen_P Parameter: Age (day) Value: 8
  misc_feature: MA Experiment 20000534 PARAMETER Experiment Name: Zm_Hybrid_Pollen_P Parameter: Organism Value: Zea mays
  misc_feature: MA Experiment 20000534 PARAMETER Experiment Name: Zm_Hybrid_Pollen_P Parameter: Plant Line Value: 35A19
  misc_feature: MA Experiment 20000534 PARAMETER Experiment Name: Zm_Hybrid_Pollen_P Parameter: Tissue Value: Pollen vs. Aerial
gcacgagaccattacctagaacatcctaatcgaaaatcatttcctctcttttgacgacggaaacgaggcacgatcacacgctgaacgcttccgccccgccgccaccttccccgctctcctccctccgctcgcctccgcttccgttccgcgccctgcccccggaaggcaagcaaagccctcgctacttgcggagcgtcgttggtcaaaccctagcacacgtacgagcaggccagccccgcccgctcccattcccaggccctcatccatggcggcgctctccgtgcccctccacgccgccgccggatcccgcgccgccgcggccgaccccgtcaaggttccgtgcgtgaggagcactggttcagcccatttcggccgcgccttcccctccgtcgcggtctcctctttggctgcgaggcacatcgagccgatgagagcgatagctacacaggcgccccctgccgtgccacaatatttgagtggcgagaagacaaagatcggcatcaacggctttgggcggattggcaggttggtcctgcgaattgcaactagcagagacgatattgaagttgtggctgtgaatgaccctttcgttgatgctaagtacatggcctatatgttcaagtatgactctactcatggcccgtttaaaggttctatttgtgttgtggatgattcaaccctggagatcaatgggaagaaggtcacaattacaagcaaaagagatcctgcagagattccatggggtaactttggggctgaatatgttgttgaatcttctggtgtctttacaacgactgataaagcatcagcacacttaaagggtggtgctaagaaagtggtgatatctgcaccatcagcagatgctcccatgtttgtagttggagttaatgagaatagctatgattcgaagatgaatgttgtttctaatgcaagttgcaccaccaactgccttgctccacttgccaaggttgtacatgaggaatttggcatcgtggagggccttatgacaactgttcatgccacaacagccacccagaagaccgttgatggtccttcaatgaaggattggagagaggacgtggtgctggccaaaacataattcctagctccactggtgcagcaaaggctgttggaaaagttctgcctgagctgaatggaaagctcactggcatggccttccgagttccaacaccaaatgtctctgttgtggacttgacatgccggattgagaaaaacgcctcctatgatgatgtgaaagcagccatcaaggcggcatcagagggtgcactcaaaggaattcttggctacacagacgaggacgttgtttccaatgattttgttggtgattctaggtcaagcatctttgatgccaaggctggtatcggactgagctcttctttcatgaagctcgtgtcttggtatgacaacgagtggggctacagcaaccgggttctggatctgatcgcccacatggccctcgtcagcgccgccgccaagctctgacgtccgtgctcgttcctccagtagtagcctaggagaaaggctgcaattttgacggccattttctgttagctgttgtctggaataaagatcaaatgctgtaacacttcgaactcgcgcgagactggactcagatccatggcctgtattttagttgtagaagggggcaaatttgcaccgtagtaccatggcatggttatacgcggaattgttgattgatgagtcgttgtacggtttgtcgacttgatgatatgttgatgtgggagcccctgaatgaggcggtattaatggaaatatataggatggcaatggct

SEQ ID NO: 8576 - protein, 277 aa, Zea mays subsp. mays
  peptide (1)..(277): Ceres Seq. ID no. 12406605
  misc_feature (5)..(269): Homolog of NCBI NO: 2129471 NR Description: glyceraldehyde-3-phosphate dehydrogenase
  misc_feature (5)..(269): Homolog of NCBI NO: 2129472 NR Description: glyceraldehyde-3-phosphate dehydrogenase
  misc_feature (32)..(269): Homolog of NCBI NO: 18072805 NR Description: glyceraldehyde-3-phosphate dehydrogenase
  misc_feature (29)..(269): Homolog of NCBI NO: 27754473 NR Description: putative glyceraldehyde-3-phosphate dehydrogenase
  misc_feature (29)..(269): Homolog of NCBI NO: 15219206 NR Description: putative glyceraldehyde-3-phosphate protein id: At1g16300.1, supported by cDNA: 94597. [Arabidopsis
  misc_feature (29)..(269): Homolog of NCBI NO: 21618027 NR Description: putative glyceraldehyde-3-phosphate dehydrogenase
  misc_feature (48)..(269): Homolog of NCBI NO: 3059140 NR Description: NAD-dependent glyceraldehyde-3-phosphate
  misc_feature (39)..(269): Homolog of NCBI NO: 15219406 NR Description: glyceraldehyde-3-phosphate dehydrogenase, protein id: At1g79530.1, supported by cDNA: gi_13194783
  misc_feature (29)..(269): Homolog of NCBI NO: 25284351 NR Description: hypothetical protein F3O9.10 - Arabidopsis
  misc_feature (48)..(269): Homolog of NCBI NO: 3059122 NR Description: glyeraldehyde-3-phosphate dehydrogenase [Marsilea
MAALSVPLHAAAGSRAAAADPVKVPCVRSTGSAHFGRAFPSVAVSSLAARHIEPMRAIATQAPPAVPQYLSGEKTKIGINGFGRIGRLVLRIATSRDDIEVVAVNDPFVDAKYMAYMFKYDSTHGPFKGSICVVDDSTLEINGKKVTITSKRDPAEIPWGNFGAEYVVESSGVFTTTDKASAHLKGGAKKVVISAPSADAPMFVVGVNENSYDSKMNVVSNASCTTNCLAPLAKVVHEEFGIVEGLMTTVHATTATQKTVDGPSMKDWREDVVLAKT

SEQ ID NO: 8577 - protein, 223 aa, Zea mays subsp. mays
  peptide (1)..(223): Ceres Seq. ID no. 12406606
  misc_feature (1)..(215): Homolog of NCBI NO: 25284351 NR Description: hypothetical protein F3O9.10 - Arabidopsis
  misc_feature (1)..(215): Homolog of NCBI NO: 3059122 NR Description: glyeraldehyde-3-phosphate dehydrogenase [Marsilea
  misc_feature (1)..(215): Homolog of NCBI NO: 2129471 NR Description: glyceraldehyde-3-phosphate dehydrogenase
  misc_feature (1)..(215): Homolog of NCBI NO: 2129472 NR Description: glyceraldehyde-3-phosphate dehydrogenase
  misc_feature (1)..(215): Homolog of NCBI NO: 18072805 NR Description: glyceraldehyde-3-phosphate dehydrogenase
  misc_feature (1)..(215): Homolog of NCBI NO: 27754473 NR Description: putative glyceraldehyde-3-phosphate dehydrogenase
  misc_feature (1)..(215): Homolog of NCBI NO: 15219206 NR Description: putative glyceraldehyde-3-phosphate protein id: At1g16300.1, supported by cDNA: 94597. [Arabidopsis
  misc_feature (1)..(215): Homolog of NCBI NO: 21618027 NR Description: putative glyceraldehyde-3-phosphate dehydrogenase
  misc_feature (1)..(215): Homolog of NCBI NO: 3059140 NR Description: NAD-dependent glyceraldehyde-3-phosphate
  misc_feature (1)..(215): Homolog of NCBI NO: 15219406 NR Description: glyceraldehyde-3-phosphate dehydrogenase, protein id: At1g79530.1, supported by cDNA: gi_13194783
MRAIATQAPPAVPQYLSGEKTKIGINGFGRIGRLVLRIATSRDDIEVVAVNDPFVDAKYMAYMFKYDSTHGPFKGSICVVDDSTLEINGKKVTITSKRDPAEIPWGNFGAEYVVESSGVFTTTDKASAHLKGGAKKVVISAPSADAPMFVVGVNENSYDSKMNVVSNASCTTNCLAPLAKVVHEEFGIVEGLMTTVHATTATQKTVDGPSMKDWREDVVLAKT

SEQ ID NO: 8578 - protein, 164 aa, Zea mays subsp. mays
  peptide (1)..(164): Ceres Seq. ID no. 12406607
  misc_feature (1)..(156): Homolog of NCBI NO: 2129471 NR Description: glyceraldehyde-3-phosphate dehydrogenase
  misc_feature (1)..(156): Homolog of NCBI NO: 2129472 NR Description: glyceraldehyde-3-phosphate dehydrogenase
  misc_feature (1)..(156): Homolog of NCBI NO: 18072805 NR Description: glyceraldehyde-3-phosphate dehydrogenase
  misc_feature (1)..(156): Homolog of NCBI NO: 27754473 NR Description: putative glyceraldehyde-3-phosphate dehydrogenase
  misc_feature (1)..(156): Homolog of NCBI NO: 15219206 NR Description: putative glyceraldehyde-3-phosphate protein id: At1g16300.1, supported by cDNA: 94597. [Arabidopsis
  misc_feature (1)..(156): Homolog of NCBI NO: 21618027 NR Description: putative glyceraldehyde-3-phosphate dehydrogenase
  misc_feature (1)..(156): Homolog of NCBI NO: 3059140 NR Description: NAD-dependent glyceraldehyde-3-phosphate
  misc_feature (1)..(156): Homolog of NCBI NO: 15219406 NR Description: glyceraldehyde-3-phosphate dehydrogenase, protein id: At1g79530.1, supported by cDNA: gi_13194783
  misc_feature (1)..(156): Homolog of NCBI NO: 25284351 NR Description: hypothetical protein F3O9.10 - Arabidopsis
  misc_feature (1)..(156): Homolog of NCBI NO: 3059122 NR Description: glyeraldehyde-3-phosphate dehydrogenase [Marsilea
MAYMFKYDSTHGPFKGSICVVDDSTLEINGKKVTITSKRDPAEIPWGNFGAEYVVESSGVFTTTDKASAHLKGGAKKVVISAPSADAPMFVVGVNENSYDSKMNVVSNASCTTNCLAPLAKVVHEEFGIVEGLMTTVHATTATQKTVDGPSMKDWREDVVLAKT

SEQ ID NO: 8579 - DNA, 1859 bp, Zea mays subsp. mays
  misc_feature (1)..(1859): Ceres Seq. ID no. 13498667
  misc_feature: MA Experiment ID: 108504 Result: Up-regulated in Transcription
  misc_feature: MA Experiment 108504 PARAMETER Experiment Name: Zm_Drought_P Parameter: Age (day) Value: 8
  misc_feature: MA Experiment 108504 PARAMETER Experiment Name: Zm_Drought_P Parameter: Organism Value: Zea mays
  misc_feature: MA Experiment 108504 PARAMETER Experiment Name: Zm_Drought_P Parameter: Plant Line Value: 35A19
  misc_feature: MA Experiment 108504 PARAMETER Experiment Name: Zm_Drought_P Parameter: Timepoint (hr) Value: 12
  misc_feature: MA Experiment 108504 PARAMETER Experiment Name: Zm_Drought_P Parameter: Tissue Value: Aerial
  misc_feature: MA Experiment 108504 PARAMETER Experiment Name: Zm_Drought_P Parameter: Treatment Value: Drought vs. No Drought
  misc_feature: MA Experiment ID: 108523 Result: Up-regulated in Transcription
  misc_feature: MA Experiment 108523 PARAMETER Experiment Name: Zm_42deg_Heat_P Parameter: Age (day) Value: 8
  misc_feature: MA Experiment 108523 PARAMETER Experiment Name: Zm_42deg_Heat_P Parameter: Organism Value: Zea mays
  misc_feature: MA Experiment 108523 PARAMETER Experiment Name: Zm_42deg_Heat_P Parameter: Plant Line Value: 35A19
  misc_feature: MA Experiment 108523 PARAMETER Experiment Name: Zm_42deg_Heat_P Parameter: Temperature (deg C) Value: 42 vs. 22
  misc_feature: MA Experiment 108523 PARAMETER Experiment Name: Zm_42deg_Heat_P Parameter: Timepoint (hr) Value: 6
  misc_feature: MA Experiment 108523 PARAMETER Experiment Name: Zm_42deg_Heat_P Parameter: Tissue Value: Aerial
  misc_feature: MA Experiment ID: 108527 Result: Up-regulated in Transcription
  misc_feature: MA Experiment 108527 PARAMETER Experiment Name: Zm_5mM_NO_P Parameter: Age (day) Value: 8
  misc_feature: MA Experiment 108527 PARAMETER Experiment Name: Zm_5mM_NO_P Parameter: Organism Value: Zea mays
  misc_feature: MA Experiment 108527 PARAMETER Experiment Name: Zm_5mM_NO_P Parameter: Plant Line Value: 35A19
  misc_feature: MA Experiment 108527 PARAMETER Experiment Name: Zm_5mM_NO_P Parameter: Timepoint (hr) Value: 6
  misc_feature: MA Experiment 108527 PARAMETER Experiment Name: Zm_5mM_NO_P Parameter: Tissue Value: Aerial
  misc_feature: MA Experiment 108527 PARAMETER Experiment Name: Zm_5mM_NO_P Parameter: Treatment Value: 5mM NO vs. No Treatment
  misc_feature: MA Experiment ID: 108528 Result: Down-regulated in Transcription
  misc_feature: MA Experiment 108528 PARAMETER Experiment Name: Zm_Imbibed_Seeds_P Parameter: Age (day) Value: 5 vs. 2
  misc_feature: MA Experiment 108528 PARAMETER Experiment Name: Zm_Imbibed_Seeds_P Parameter: Organism Value: Zea mays
  misc_feature: MA Experiment 108528 PARAMETER Experiment Name: Zm_Imbibed_Seeds_P Parameter: Plant Line Value: 35A19
  misc_feature: MA Experiment 108528 PARAMETER Experiment Name: Zm_Imbibed_Seeds_P Parameter: Tissue Value: Aerial vs. Embryo
  misc_feature: MA Experiment ID: 108529 Result: Down-regulated in Transcription
  misc_feature: MA Experiment 108529 PARAMETER Experiment Name: Zm_Imbibed_Seeds_P Parameter: Age (day) Value: 5 vs. 2
  misc_feature: MA Experiment 108529 PARAMETER Experiment Name: Zm_Imbibed_Seeds_P Parameter: Organism Value: Zea mays
  misc_feature: MA Experiment 108529 PARAMETER Experiment Name: Zm_Imbibed_Seeds_P Parameter: Plant Line Value: 35A19
  misc_feature: MA Experiment 108529 PARAMETER Experiment Name: Zm_Imbibed_Seeds_P Parameter: Tissue Value: Roots vs. Embryo
  misc_feature: MA Experiment ID: 108530 Result: Down-regulated in Transcription
  misc_feature: MA Experiment 108530 PARAMETER Experiment Name: Zm_Imbibed_Seeds_P Parameter: Age (day) Value: 6 vs. 2
  misc_feature: MA Experiment 108530 PARAMETER Experiment Name: Zm_Imbibed_Seeds_P Parameter: Organism Value: Zea mays
  misc_feature: MA Experiment 108530 PARAMETER Experiment Name: Zm_Imbibed_Seeds_P Parameter: Plant Line Value: 35A19
  misc_feature: MA Experiment 108530 PARAMETER Experiment Name: Zm_Imbibed_Seeds_P Parameter: Tissue Value: Aerial vs. Embryo
  misc_feature: MA Experiment ID: 108534 Result: Down-regulated in Transcription
  misc_feature: MA Experiment 108534 PARAMETER Experiment Name: Zm_4deg_Cold_P Parameter: Age (hr) Value: 8
  misc_feature: MA Experiment 108534 PARAMETER Experiment Name: Zm_4deg_Cold_P Parameter: Organism Value: Zea mays
  misc_feature: MA Experiment 108534 PARAMETER Experiment Name: Zm_4deg_Cold_P Parameter: Plant Line Value: 35A19
  misc_feature: MA Experiment 108534 PARAMETER Experiment Name: Zm_4deg_Cold_P Parameter: Temperature (deg C) Value: 4 vs. 22
  misc_feature: MA Experiment 108534 PARAMETER Experiment Name: Zm_4deg_Cold_P Parameter: Timepoint (hr) Value: 6
  misc_feature: MA Experiment 108534 PARAMETER Experiment Name: Zm_4deg_Cold_P Parameter: Tissue Value: Aerial
  misc_feature: MA Experiment ID: 108543 Result: Up-regulated in Transcription
  misc_feature: MA Experiment ID: 108547 Result: Down-regulated in Transcription
  misc_feature: MA Experiment 108547 PARAMETER Experiment Name: Zm_Imbibed_Seeds_P Parameter: Age (day) Value: 4 vs. 2
  misc_feature: MA Experiment 108547 PARAMETER Experiment Name: Zm_Imbibed_Seeds_P Parameter: Organism Value: Zea mays
  misc_feature: MA Experiment 108547 PARAMETER Experiment Name: Zm_Imbibed_Seeds_P Parameter: Plant Line Value: 35A19
  misc_feature: MA Experiment 108547 PARAMETER Experiment Name: Zm_Imbibed_Seeds_P Parameter: Tissue Value: Aerial vs. Embryo
  misc_feature: MA Experiment ID: 108556 Result: Up-regulated in Transcription
  misc_feature: MA Experiment 108556 PARAMETER Experiment Name: Zm_Drought_P Parameter: Age (day) Value: 9
  misc_feature: MA Experiment 108556 PARAMETER Experiment Name: Zm_Drought_P Parameter: Organism Value: Zea mays
  misc_feature: MA Experiment 108556 PARAMETER Experiment Name: Zm_Drought_P Parameter: Plant Line Value: 35A19
  misc_feature: MA Experiment 108556 PARAMETER Experiment Name: Zm_Drought_P Parameter: Timepoint (hr) Value: 24
  misc_feature: MA Experiment 108556 PARAMETER Experiment Name: Zm_Drought_P Parameter: Tissue Value: Aerial
  misc_feature: MA Experiment 108556 PARAMETER Experiment Name: Zm_Drought_P Parameter: Treatment Value: Drought vs. No Drought
  misc_feature: MA Experiment ID: 108559 Result: Up-regulated in Transcription
  misc_feature: MA Experiment 108559 PARAMETER Experiment Name: Zm_5mM_NO_P Parameter: Age (day) Value: 8
  misc_feature: MA Experiment 108559 PARAMETER Experiment Name: Zm_5mM_NO_P Parameter: Organism Value: Zea mays
  misc_feature: MA Experiment 108559 PARAMETER Experiment Name: Zm_5mM_NO_P Parameter: Plant Line Value: 35A19
  misc_feature: MA Experiment 108559 PARAMETER Experiment Name: Zm_5mM_NO_P Parameter: Timepoint (hr) Value: 12
  misc_feature: MA Experiment 108559 PARAMETER Experiment Name: Zm_5mM_NO_P Parameter: Tissue Value: Aerial
  misc_feature: MA Experiment 108559 PARAMETER Experiment Name: Zm_5mM_NO_P Parameter: Treatment Value: 5mM NO vs. No Treatment
  misc_feature: MA Experiment ID: 108597 Result: Up-regulated in Transcription
  misc_feature: MA Experiment 108597 PARAMETER Experiment Name: Zm_100uM_ABA_P Parameter: Age (day) Value: 9
  misc_feature: MA Experiment 108597 PARAMETER Experiment Name: Zm_100uM_ABA_P Parameter: Organism Value: Zea mays
  misc_feature: MA Experiment 108597 PARAMETER Experiment Name: Zm_100uM_ABA_P Parameter: Plant Line Value: 35A19
  misc_feature: MA Experiment 108597 PARAMETER Experiment Name: Zm_100uM_ABA_P Parameter: Timepoint (hr) Value: 24
  misc_feature: MA Experiment 108597 PARAMETER Experiment Name: Zm_100uM_ABA_P Parameter: Tissue Value: Aerial
  misc_feature: MA Experiment 108597 PARAMETER Experiment Name: Zm_100uM_ABA_P Parameter: Treatment Value: 100uM ABA vs. No Treatment
  misc_feature: MA Experiment ID: 108689 Result: Up-regulated in Transcription
  misc_feature: MA Experiment 108689 PARAMETER Experiment Name: Zm_Drought_Roots_P Parameter: Age (day) Value: 9
  misc_feature: MA Experiment 108689 PARAMETER Experiment Name: Zm_Drought_Roots_P Parameter: Organism Value: Zea mays
  misc_feature: MA Experiment 108689 PARAMETER Experiment Name: Zm_Drought_Roots_P Parameter: Plant Line Value: 35A19
  misc_feature: MA Experiment 108689 PARAMETER Experiment Name: Zm_Drought_Roots_P Parameter: Timepoint (hr) Value: 24
  misc_feature: MA Experiment 108689 PARAMETER Experiment Name: Zm_Drought_Roots_P Parameter: Tissue Value: Roots
  misc_feature: MA Experiment 108689 PARAMETER Experiment Name: Zm_Drought_Roots_P Parameter: Treatment Value: Drought vs. No Drought
  misc_feature: MA Experiment ID: 20000478 Result: Up-regulated in Transcription
  misc_feature: MA Experiment 20000478 PARAMETER Experiment Name: Zm_5mM_SA_P Parameter: Age (day) Value: 11
  misc_feature: MA Experiment 20000478 PARAMETER Experiment Name: Zm_5mM_SA_P Parameter: Organism Value: Zea mays
  misc_feature: MA Experiment 20000478 PARAMETER Experiment Name: Zm_5mM_SA_P Parameter: Plant Line Value: 35A19
  misc_feature: MA Experiment 20000478 PARAMETER Experiment Name: Zm_5mM_SA_P Parameter: Timepoint (hr) Value: 72
  misc_feature: MA Experiment 20000478 PARAMETER Experiment Name: Zm_5mM_SA_P Parameter: Tissue Value: Aerial
  misc_feature: MA Experiment 20000478 PARAMETER Experiment Name: Zm_5mM_SA_P Parameter: Treatment Value: 5mM SA vs. No Treatment
  misc_feature: MA Experiment ID: 20000480 Result: Up-regulated in Transcription
  misc_feature: MA Experiment 20000480 PARAMETER Experiment Name: Zm_Drought_P Parameter: Age (day) Value: 11
  misc_feature: MA Experiment 20000480 PARAMETER Experiment Name: Zm_Drought_P Parameter: Organism Value: Zea mays
  misc_feature: MA Experiment 20000480 PARAMETER Experiment Name: Zm_Drought_P Parameter: Plant Line Value: 35A19
  misc_feature: MA Experiment 20000480 PARAMETER Experiment Name: Zm_Drought_P Parameter: Timepoint (hr) Value: 72
  misc_feature: MA Experiment 20000480 PARAMETER Experiment Name: Zm_Drought_P Parameter: Tissue Value: Aerial
  misc_feature: MA Experiment 20000480 PARAMETER Experiment Name: Zm_Drought_P Parameter: Treatment Value: Drought vs. No Drought
  misc_feature: MA Experiment ID: 20000487 Result: Up-regulated in Transcription
  misc_feature: MA Experiment 20000487 PARAMETER Experiment Name: Zm_50mM_NH4NO3_L_to_H_P Parameter: Organism Value: Zea mays
  misc_feature: MA Experiment 20000487 PARAMETER Experiment Name: Zm_50mM_NH4NO3_L_to_H_P Parameter: Timepoint (hr) Value: 4
  misc_feature: MA Experiment 20000487 PARAMETER Experiment Name: Zm_50mM_NH4NO3_L_to_H_P Parameter: Tissue Value: Leaves
  misc_feature: MA Experiment 20000487 PARAMETER Experiment Name: Zm_50mM_NH4NO3_L_to_H_P Parameter: Treatment Value: 50mM NH4NO3 vs. 100mM Mannitol
  misc_feature: MA Experiment ID: 20000488 Result: Up-regulated in Transcription
  misc_feature: MA Experiment 20000488 PARAMETER Experiment Name: Zm_50mM_NH4NO3_L_to_H_P Parameter: Organism Value: Zea mays
  misc_feature: MA Experiment 20000488 PARAMETER Experiment Name: Zm_50mM_NH4NO3_L_to_H_P Parameter: Timepoint (hr) Value: 8
  misc_feature: MA Experiment 20000488 PARAMETER Experiment Name: Zm_50mM_NH4NO3_L_to_H_P Parameter: Tissue Value: Leaves
  misc_feature: MA Experiment 20000488 PARAMETER Experiment Name: Zm_50mM_NH4NO3_L_to_H_P Parameter: Treatment Value: 50mM NH4NO3 vs. 100mM Mannitol
  misc_feature: MA Experiment ID: 20000535 Result: Down-regulated in Transcription
  misc_feature: MA Experiment 20000535 PARAMETER Experiment Name: Zm_Hybrid_Seed_Dev_P Parameter: DAP Value: 30 vs. 12
  misc_feature: MA Experiment 20000535 PARAMETER Experiment Name: Zm_Hybrid_Seed_Dev_P Parameter: Organism Value: Zea mays
  misc_feature: MA Experiment 20000535 PARAMETER Experiment Name: Zm_Hybrid_Seed_Dev_P Parameter: Plant Line Value: 35A19
  misc_feature: MA Experiment 20000535 PARAMETER Experiment Name: Zm_Hybrid_Seed_Dev_P Parameter: Tissue Value: Embryo vs. Unfert Floret
  misc_feature: MA Experiment ID: 20000626 Result: Up-regulated in Transcription
  misc_feature: MA Experiment 20000626 PARAMETER Experiment Name: Zm_Herbicide-Treatments_P Parameter: Timepoint (hr) Value: 12
  misc_feature: MA Experiment 20000626 PARAMETER Experiment Name: Zm_Herbicide-Treatments_P Parameter: Tissue Value: Aerial
  misc_feature: MA Experiment 20000626 PARAMETER Experiment Name: Zm_Herbicide-Treatments_P Parameter: Treatment Value: Roundup vs. No Treatment
  misc_feature: MA Experiment ID: 20000630 Result: Up-regulated in Transcription
  misc_feature: MA Experiment 20000630 PARAMETER Experiment Name: Zm_Herbicide-Treatments_P Parameter: Timepoint (hr) Value: 4
  misc_feature: MA Experiment 20000630 PARAMETER Experiment Name: Zm_Herbicide-Treatments_P Parameter: Tissue Value: Aerial
  misc_feature: MA Experiment 20000630 PARAMETER Experiment Name: Zm_Herbicide-Treatments_P Parameter: Treatment Value: Roundup vs. No Treatment
gaaaaagaacagaggttattcgttttggctacccgttttgaagacgatgatgagtccggcgtcggagcgcagcctcatcatccagagcgacgacgacgacgacgcccgatccggccacgacgtggaggagccggagccagagcaggagcaggactccgactcctcgtcgtcgtcctcatcctgcgccaccccacgccgcggcccaagctcacccccctacatccagcaatggccgcagagttacaggcaatcgatcgacattctcagcagcgtgcagtcacccaacctgacctttctggggactccaactctgagcaggctgtcgaactcattcctcgccatcaccgattctttccggagcaaggcccccgaaacgatctctagctttatcaagccactccttggccccacgccaagtgacgatcagcagcggcagcatgaaggcacccgaaagagttccgagtaccttgtgccctcgagaagatcatctctgcagcagatcccagaggatcaaaagccacctgtaggtggccatggggcgtctcatgaccagaactgctcttacacccagggagtgatgaatggaataaatgttctatgtggtgtggggatcctatcaacaccttatgccatcaaacaggggggctggattgggctggcgatactctgtatatatgctcttctcgcatggtacacaggtgtgctcctgcgccattgcctggacagcaaggagggcctcaagacatacccagatattggccatgcagcctttggcagcacaggccgcatagttatctcgataatactgtacgtggagttgtatgcatgttgcatcgagtatttgatattggagggtgacaatttgtcaaaattattccccaatgctcacctgaccattgggagcatgacactgaactcacatgtattttttgcaatcttgactaccatcatagtcatgccaaccacctggctccgtgacctgagctggctgagctacatttcagctgggggtgtcattgcatcaatccttgtagtcatctgcctgttcttggttggggttgtcaatgatgtcggctttgagaatgaagggactgcactgaacgccccaggaattcctattgcaattggattatatggttactgctactcagggcatgggttttttccaaatatctattcttccctgaagaatcgcaaccagtttccttcaattctttttacttgtattgggctgtctacctttttgtatgctggtgctgcagtgatgggatacaaaatgtttggtgaagccacagagtcccaattcacactcaacttaccagataattctgtcatttctaagattgctgtttggacaacggtggcaaatccaataaccaaatatgcattaactattattccattggctatgagtttggaagagctgctgccaccaaaccaacaaaagtattttacaataatcatgcttagatcatctctggtgatatcaaccctcctgattgctctatttgtgcctttctttggacttgtgatggccttggttggttctttgtttgccatgcttgtgacctacattttgccttgcgcgtgttttttggcgatcctcaagacaaaagtggggtggcatcagatagcagcttgctcgttcatcatagttgtcggggtttgctgtgcctacgtgggaacatactcgtccctgtcgaagataatccagaactacgcgtagcacagctgttcctgtgatcctgtatatgcatctgcctgacaaaatcatgtgtgtgctatatgggccgaacatatgtacaagatgaaagtttaccattcaattcactcgatgtataataaattattggtgcctc

SEQ ID NO: 8580 - protein, 574 aa, Zea mays subsp. mays
  peptide (1)..(574): Ceres Seq. ID no. 13498668
  misc_feature (199)..(562): Pfam Name: Tryptophan/tyrosine permease family Pfam Description: Tryptophan/tyrosine permease family
  misc_feature (21)..(571): Homolog of NCBI NO: 30687791 NR Description: amino acid transporter family [Arabidopsis
  misc_feature (21)..(571): Homolog of NCBI NO: 15292735 NR Description: unknown protein [Arabidopsis thaliana]
  misc_feature (157)..(569): Homolog of NCBI NO: 30679549 NR Description: amino acid transporter family [Arabidopsis >gi|26449931|dbj|BAC42086.1| unknown protein [Arabidopsis
  misc_feature (31)..(142): Homolog of NCBI NO: 30679549 NR Description: amino acid transporter family [Arabidopsis >gi|26449931|dbj|BAC42086.1| unknown protein [Arabidopsis
  misc_feature (21)..(526): Homolog of NCBI NO: 25408639 NR Description: hypothetical protein At2g39130 [imported] -
  misc_feature (96)..(570): Homolog of NCBI NO: 22326569 NR Description: amino acid transporter family [Arabidopsis >gi|20856761|gb|AAM26683.1| AT5g02170/T7H20_220 [Arabidopsis >gi|29028738|gb|AAO64748.1| At5g02170/T7H20_220 [Arabidopsis
  misc_feature (49)..(117): Homolog of NCBI NO: 22326569 NR Description: amino acid transporter family [Arabidopsis >gi|20856761|gb|AAM26683.1| AT5g02170/T7H20_220 [Arabidopsis >gi|29028738|gb|AAO64748.1| At5g02170/T7H20_220 [Arabidopsis
  misc_feature (157)..(569): Homolog of NCBI NO: 11358406 NR Description: hypothetical protein T7H20.230 - Arabidopsis >gi|7340692|emb|CAB82991.1| putative protein [Arabidopsis
  misc_feature (31)..(142): Homolog of NCBI NO: 11358406 NR Description: hypothetical protein T7H20.230 - Arabidopsis >gi|7340692|emb|CAB82991.1| putative protein [Arabidopsis
  misc_feature (101)..(513): Homolog of NCBI NO: 15233103 NR Description: amino acid transporter family [Arabidopsis
KKNRGYSFWLPVLKTMMSPASERSLIIQSDDDDDARSGHDVEEPEPEQEQDSDSSSSSSSCATPRRGPSSPPYIQQWPQSYRQSIDILSSVQSPNLTFLGTPTLSRLSNSFLAITDSFRSKAPETISSFIKPLLGPTPSDDQQRQHEGTRKSSEYLVPSRRSSLQQIPEDQKPPVGGHGASHDQNCSYTQGVMNGINVLCGVGILSTPYAIKQGGWIGLAILCIYALLAWYTGVLLRHCLDSKEGLKTYPDIGHAAFGSTGRIVISIILYVELYACCIEYLILEGDNLSKLFPNAHLTIGSMTLNSHVFFAILTTIIVMPTTWLRDLSWLSYISAGGVIASILVVICLFLVGVVNDVGFENEGTALNAPGIPIAIGLYGYCYSGHGFFPNIYSSLKNRNQFPSILFTCIGLSTFLYAGAAVMGYKMFGEATESQFTLNLPDNSVISKIAVWTTVANPITKYALTIIPLAMSLEELLPPNQQKYFTIIMLRSSLVISTLLIALFVPFFGLVMALVGSLFAMLVTYILPCACFLAILKTKVGWHQIAACSFIIVVGVCCAYVGTYSSLSKIIQNYA

SEQ ID NO: 8581 - protein, 559 aa, Zea mays subsp. mays
  peptide (1)..(559): Ceres Seq. ID no. 13498669
  misc_feature (184)..(547): Pfam Name: Tryptophan/tyrosine permease family Pfam Description: Tryptophan/tyrosine permease family
  misc_feature (6)..(556): Homolog of NCBI NO: 30687791 NR Description: amino acid transporter family [Arabidopsis
  misc_feature (6)..(556): Homolog of NCBI NO: 15292735 NR Description: unknown protein [Arabidopsis thaliana]
  misc_feature (142)..(554): Homolog of NCBI NO: 30679549 NR Description: amino acid transporter family [Arabidopsis >gi|26449931|dbj|BAC42086.1| unknown protein [Arabidopsis
  misc_feature (16)..(127): Homolog of NCBI NO: 30679549 NR Description: amino acid transporter family [Arabidopsis >gi|26449931|dbj|BAC42086.1| unknown protein [Arabidopsis
  misc_feature (6)..(511): Homolog of NCBI NO: 25408639 NR Description: hypothetical protein At2g39130 [imported] -
  misc_feature (81)..(555): Homolog of NCBI NO: 22326569 NR Description: amino acid transporter family [Arabidopsis >gi|20856761|gb|AAM26683.1| AT5g02170/T7H20_220 [Arabidopsis >gi|29028738|gb|AAO64748.1| At5g02170/T7H20_220 [Arabidopsis
  misc_feature (34)..(102): Homolog of NCBI NO: 22326569 NR Description: amino acid transporter family [Arabidopsis >gi|20856761|gb|AAM26683.1| AT5g02170/T7H20_220 [Arabidopsis >gi|29028738|gb|AAO64748.1| At5g02170/T7H20_220 [Arabidopsis
  misc_feature (142)..(554): Homolog of NCBI NO: 11358406 NR Description: hypothetical protein T7H20.230 - Arabidopsis >gi|7340692|emb|CAB82991.1| putative protein [Arabidopsis
  misc_feature (16)..(127): Homolog of NCBI NO: 11358406 NR Description: hypothetical protein T7H20.230 - Arabidopsis >gi|7340692|emb|CAB82991.1| putative protein [Arabidopsis
  misc_feature (86)..(498): Homolog of NCBI NO: 15233103 NR Description: amino acid transporter family [Arabidopsis
MMSPASERSLIIQSDDDDDARSGHDVEEPEPEQEQDSDSSSSSSSCATPRRGPSSPPYIQQWPQSYRQSIDILSSVQSPNLTFLGTPTLSRLSNSFLAITDSFRSKAPETISSFIKPLLGPTPSDDQQRQHEGTRKSSEYLVPSRRSSLQQIPEDQKPPVGGHGASHDQNCSYTQGVMNGINVLCGVGILSTPYAIKQGGWIGLAILCIYALLAWYTGVLLRHCLDSKEGLKTYPDIGHAAFGSTGRIVISIILYVELYACCIEYLILEGDNLSKLFPNAHLTIGSMTLNSHVFFAILTTIIVMPTTWLRDLSWLSYISAGGVIASILVVICLFLVGVVNDVGFENEGTALNAPGIPIAIGLYGYCYSGHGFFPNIYSSLKNRNQFPSILFTCIGLSTFLYAGAAVMGYKMFGEATESQFTLNLPDNSVISKIAVWTTVANPITKYALTIIPLAMSLEELLPPNQQKYFTIIMLRSSLVISTLLIALFVPFFGLVMALVGSLFAMLVTYILPCACFLAILKTKVGWHQIAACSFIIVVGVCCAYVGTYSSLSKIIQNYA

SEQ ID NO: 8582 - protein, 558 aa, Zea mays subsp. mays
  peptide (1)..(558): Ceres Seq. ID no. 13498670
  misc_feature (183)..(546): Pfam Name: Tryptophan/tyrosine permease family Pfam Description: Tryptophan/tyrosine permease family
  misc_feature (5)..(555): Homolog of NCBI NO: 30687791 NR Description: amino acid transporter family [Arabidopsis
  misc_feature (5)..(555): Homolog of NCBI NO: 15292735 NR Description: unknown protein [Arabidopsis thaliana]
  misc_feature (141)..(553): Homolog of NCBI NO: 30679549 NR Description: amino acid transporter family [Arabidopsis >gi|26449931|dbj|BAC42086.1| unknown protein [Arabidopsis
  misc_feature (15)..(126): Homolog of NCBI NO: 30679549 NR Description: amino acid transporter family [Arabidopsis >gi|26449931|dbj|BAC42086.1| unknown protein [Arabidopsis
  misc_feature (5)..(510): Homolog of NCBI NO: 25408639 NR Description: hypothetical protein At2g39130 [imported] -
  misc_feature (80)..(554): Homolog of NCBI NO: 22326569 NR Description: amino acid transporter family [Arabidopsis >gi|20856761|gb|AAM26683.1| AT5g02170/T7H20_220 [Arabidopsis >gi|29028738|gb|AAO64748.1| At5g02170/T7H20_220 [Arabidopsis
  misc_feature (33)..(101): Homolog of NCBI NO: 22326569 NR Description: amino acid transporter family [Arabidopsis >gi|20856761|gb|AAM26683.1| AT5g02170/T7H20_220 [Arabidopsis >gi|29028738|gb|AAO64748.1| At5g02170/T7H20_220 [Arabidopsis
  misc_feature (141)..(553): Homolog of NCBI NO: 11358406 NR Description: hypothetical protein T7H20.230 - Arabidopsis >gi|7340692|emb|CAB82991.1| putative protein [Arabidopsis
  misc_feature (15)..(126): Homolog of NCBI NO: 11358406 NR Description: hypothetical protein T7H20.230 - Arabidopsis >gi|7340692|emb|CAB82991.1| putative protein [Arabidopsis
  misc_feature (85)..(497): Homolog of NCBI NO: 15233103 NR Description: amino acid transporter family [Arabidopsis
MSPASERSLIIQSDDDDDARSGHDVEEPEPEQEQDSDSSSSSSSCATPRRGPSSPPYIQQWPQSYRQSIDILSSVQSPNLTFLGTPTLSRLSNSFLAITDSFRSKAPETISSFIKPLLGPTPSDDQQRQHEGTRKSSEYLVPSRRSSLQQIPEDQKPPVGGHGASHDQNCSYTQGVMNGINVLCGVGILSTPYAIKQGGWIGLAILCIYALLAWYTGVLLRHCLDSKEGLKTYPDIGHAAFGSTGRIVISIILYVELYACCIEYLILEGDNLSKLFPNAHLTIGSMTLNSHVFFAILTTIIVMPTTWLRDLSWLSYISAGGVIASILVVICLFLVGVVNDVGFENEGTALNAPGIPIAIGLYGYCYSGHGFFPNIYSSLKNRNQFPSILFTCIGLSTFLYAGAAVMGYKMFGEATESQFTLNLPDNSVISKIAVWTTVANPITKYALTIIPLAMSLEELLPPNQQKYFTIIMLRSSLVISTLLIALFVPFFGLVMALVGSLFAMLVTYILPCACFLAILKTKVGWHQIAACSFIIVVGVCCAYVGTYSSLSKIIQNYA

SEQ ID NO: 8583 - DNA, 1781 bp, Zea mays subsp. mays
  misc_feature (1)..(1781): Ceres Seq. ID no. 12408381
  misc_feature: MA Experiment ID: 108522 Result: Up-regulated in Transcription
  misc_feature: MA Experiment 108522 PARAMETER Experiment Name: Zm_42deg_Heat_P Parameter: Age (day) Value: 8
  misc_feature: MA Experiment 108522 PARAMETER Experiment Name: Zm_42deg_Heat_P Parameter: Organism Value: Zea mays
  misc_feature: MA Experiment 108522 PARAMETER Experiment Name: Zm_42deg_Heat_P Parameter: Plant Line Value: 35A19
  misc_feature: MA Experiment 108522 PARAMETER Experiment Name: Zm_42deg_Heat_P Parameter: Temperature (deg C) Value: 42 vs. 22
  misc_feature: MA Experiment 108522 PARAMETER Experiment Name: Zm_42deg_Heat_P Parameter: Timepoint (hr) Value: 1
  misc_feature: MA Experiment 108522 PARAMETER Experiment Name: Zm_42deg_Heat_P Parameter: Tissue Value: Aerial
  misc_feature: MA Experiment ID: 108527 Result: Up-regulated in Transcription
  misc_feature: MA Experiment 108527 PARAMETER Experiment Name: Zm_5mM_NO_P Parameter: Age (day) Value: 8
  misc_feature: MA Experiment 108527 PARAMETER Experiment Name: Zm_5mM_NO_P Parameter: Organism Value: Zea mays
  misc_feature: MA Experiment 108527 PARAMETER Experiment Name: Zm_5mM_NO_P Parameter: Plant Line Value: 35A19
  misc_feature: MA Experiment 108527 PARAMETER Experiment Name: Zm_5mM_NO_P Parameter: Timepoint (hr) Value: 6
  misc_feature: MA Experiment 108527 PARAMETER Experiment Name: Zm_5mM_NO_P Parameter: Tissue Value: Aerial
  misc_feature: MA Experiment 108527 PARAMETER Experiment Name: Zm_5mM_NO_P Parameter: Treatment Value: 5mM NO vs. No Treatment
  misc_feature: MA Experiment ID: 108556 Result: Up-regulated in Transcription
  misc_feature: MA Experiment 108556 PARAMETER Experiment Name: Zm_Drought_P Parameter: Age (day) Value: 9
  misc_feature: MA Experiment 108556 PARAMETER Experiment Name: Zm_Drought_P Parameter: Organism Value: Zea mays
  misc_feature: MA Experiment 108556 PARAMETER Experiment Name: Zm_Drought_P Parameter: Plant Line Value: 35A19
  misc_feature: MA Experiment 108556 PARAMETER Experiment Name: Zm_Drought_P Parameter: Timepoint (hr) Value: 24
  misc_feature: MA Experiment 108556 PARAMETER Experiment Name: Zm_Drought_P Parameter: Tissue Value: Aerial
  misc_feature: MA Experiment 108556 PARAMETER Experiment Name: Zm_Drought_P Parameter: Treatment Value: Drought vs. No Drought
  misc_feature: MA Experiment ID: 108559 Result: Up-regulated in Transcription
  misc_feature: MA Experiment 108559 PARAMETER Experiment Name: Zm_5mM_NO_P Parameter: Age (day) Value: 8
  misc_feature: MA Experiment 108559 PARAMETER Experiment Name: Zm_5mM_NO_P Parameter: Organism Value: Zea mays
  misc_feature: MA Experiment 108559 PARAMETER Experiment Name: Zm_5mM_NO_P Parameter: Plant Line Value: 35A19
  misc_feature: MA Experiment 108559 PARAMETER Experiment Name: Zm_5mM_NO_P Parameter: Timepoint (hr) Value: 12
  misc_feature: MA Experiment 108559 PARAMETER Experiment Name: Zm_5mM_NO_P Parameter: Tissue Value: Aerial
  misc_feature: MA Experiment 108559 PARAMETER Experiment Name: Zm_5mM_NO_P Parameter: Treatment Value: 5mM NO vs. No Treatment
  misc_feature: MA Experiment ID: 20000477 Result: Up-regulated in Transcription
  misc_feature: MA Experiment 20000477 PARAMETER Experiment Name: Zm_5mM_SA_P Parameter: Age (day) Value: 10
  misc_feature: MA Experiment 20000477 PARAMETER Experiment Name: Zm_5mM_SA_P Parameter: Organism Value: Zea mays
  misc_feature: MA Experiment 20000477 PARAMETER Experiment Name: Zm_5mM_SA_P Parameter: Plant Line Value: 35A19
  misc_feature: MA Experiment 20000477 PARAMETER Experiment Name: Zm_5mM_SA_P Parameter: Timepoint (hr) Value: 48
  misc_feature: MA Experiment 20000477 PARAMETER Experiment Name: Zm_5mM_SA_P Parameter: Tissue Value: Aerial
  misc_feature: MA Experiment 20000477 PARAMETER Experiment Name: Zm_5mM_SA_P Parameter: Treatment Value: 5mM SA vs. No Treatment
  misc_feature: MA Experiment ID: 20000478 Result: Up-regulated in Transcription
  misc_feature: MA Experiment 20000478 PARAMETER Experiment Name: Zm_5mM_SA_P Parameter: Age (day) Value: 11
  misc_feature: MA Experiment 20000478 PARAMETER Experiment Name: Zm_5mM_SA_P Parameter: Organism Value: Zea mays
  misc_feature: MA Experiment 20000478 PARAMETER Experiment Name: Zm_5mM_SA_P Parameter: Plant Line Value: 35A19
  misc_feature: MA Experiment 20000478 PARAMETER Experiment Name: Zm_5mM_SA_P Parameter: Timepoint (hr) Value: 72
  misc_feature: MA Experiment 20000478 PARAMETER Experiment Name: Zm_5mM_SA_P Parameter: Tissue Value: Aerial
  misc_feature: MA Experiment 20000478 PARAMETER Experiment Name: Zm_5mM_SA_P Parameter: Treatment Value: 5mM SA vs. No Treatment
  misc_feature: MA Experiment ID: 20000480 Result: Up-regulated in Transcription
  misc_feature: MA Experiment 20000480 PARAMETER Experiment Name: Zm_Drought_P Parameter: Age (day) Value: 11
  misc_feature: MA Experiment 20000480 PARAMETER Experiment Name: Zm_Drought_P Parameter: Organism Value: Zea mays
  misc_feature: MA Experiment 20000480 PARAMETER Experiment Name: Zm_Drought_P Parameter: Plant Line Value: 35A19
  misc_feature: MA Experiment 20000480 PARAMETER Experiment Name: Zm_Drought_P Parameter: Timepoint (hr) Value: 72
  misc_feature: MA Experiment 20000480 PARAMETER Experiment Name: Zm_Drought_P Parameter: Tissue Value: Aerial
  misc_feature: MA Experiment 20000480 PARAMETER Experiment Name: Zm_Drought_P Parameter: Treatment Value: Drought vs. No Drought
aaactccaaatccaatccaagcaagtcctccccatgctcctcccgctcctcctcctcgccgccttcctccatggcttggcggaggcgcagggcggcctcccgtcgctgccgatcggggtgaactacggcgcgaacgcagacaacctaccctcgcccgccgccgtggcggcgttcctggccaagagcacgaccatcgaccgcgtgaagctgttcgacgcgaacccggccttcctcgacgcgttcgccgccaacgcgccctccatcgccctcgccgtctccatccccaactccgccctcccgtccttcgccgacagatccacgggcctggacgcggcgcgcgggtgggtccgcgacaacctgtccccgcacgtgtccgcgggcgccaacatcaccctcctcatggcggggaacgaggtgctgggccccaccgtgtgcccgacctcgtcgtggcgctgctcccggccatgcgccgcctgtaccaggcgctgcagctggagggcctgcccaaggtccacgtcaccacgccgcactacctcggcatcctggcgccctcggacgggatcccctccaacgcgagcttccgcccggggctggacgccaaggtgctggcgcccatgctcaggttccacaacgacaccggctcccccttcatggtgaacgcctacccctacttcagctacaacgccgccacgctggactacgcggtgttccgccccaacgccggcgtgtacgacccggcgacgcggctcaactacaccagcatgttcgacgcgcagatggacgccatccacacggcgatgaagaagctcgggtacggcggcgtgcagatcgcggtgggcgaggccgggtggcccaccaaggcggaggccgggcaggtcggcgtaggccccgaggaggccagggatttcaacgccggcatgatccgggtgtgcagcggcgggaagggcacgccgctgatgcctgggaggacgttcgagacgtacgtcttctcgctgttcgacgagaaccagaagcccgggccggtcgcggagcggaacttcggcatcttcaacacggatctcacacccaaatacgacctggggctgctccgccaaggaccgcagtctggatctccaaccccatctccggagccctcgccgtcggtcggcggaggcaagtggtgcgtggccaagtccggcgcgagcgcaaccgacctgcagaacaacattaactacgcctgtgcctacgtcgactgtaggccgatccagagcggcggcgcgtgcttggaccccaacaacatccactcacatgcctcgtacgtcatgaacgcgtactaccaggccaatggcatgcacgactatgactgcgacttcaagggcaccggcgtggtcacctccagtgaccccagttacgggagctgcaaatacaacgcctcctcctgacggcgcgcagcaagtccagctggcactactgcaccagcctccagtccacatcgtcctccagctccaggctccagccatggccacgctggggacgggaggaggtccgtactgccgccgggcttgcgccacatacttgtatactcatgtctcacacccatgcttcttgttgctctcaaccactactagcactactatttgtctagttccataattacaagtccctctcccctcatgttaacttgatcattgtccgtgtgtagtggactagtggtggtgaataaaatagcttccattccatgtagacaaacaaacaaattgtaacatctgttatccttgggttatttgatatatttatttttc

SEQ ID NO: 8584 - protein, 472 aa, Zea mays subsp. mays
  peptide (1)..(472): Ceres Seq. ID no. 12408382
  misc_feature (146)..(361): Pfam Name: Glycosyl hydrolases family 17 Pfam Description: Glycosyl hydrolases family 17
  misc_feature (146)..(468): Homolog of NCBI NO: 1706551 NR Description: GLUCAN ENDO-1,3-BETA-GLUCOSIDASE PRECURSOR
  misc_feature (151)..(467): Homolog of NCBI NO: 11279328 NR Description: glucan endo-1,3-beta-D-glucosidase (EC 3.2.1.39)
  misc_feature (146)..(468): Homolog of NCBI NO: 21617932 NR Description: beta-1,3-glucanase-like protein [Arabidopsis
  misc_feature (146)..(468): Homolog of NCBI NO: 15028379 NR Description: putative beta-1,3-glucanase [Arabidopsis thaliana]
  misc_feature (146)..(468): Homolog of NCBI NO: 15233271 NR Description: glycosyl hydrolase family 17 protein id: At3g55430.1, supported by cDNA: 8980., supported by
  misc_feature (147)..(468): Homolog of NCBI NO: 31126737 NR Description: putative beta 1,3-glucanase [Oryza sativa
  misc_feature (146)..(466): Homolog of NCBI NO: 15225516 NR Description: glycosyl hydrolase family 17; protein id:
  misc_feature (147)..(472): Homolog of NCBI NO: 14279169 NR Description: beta-1,3-glucanase-like protein [Olea europaea]
  misc_feature (147)..(383): Homolog of NCBI NO: 34395169 NR Description: putative glucan endo-1,3-beta-glucosidase
  misc_feature (147)..(419): Homolog of NCBI NO: 34900642 NR Description: putative glucan endo-1,3-beta-glucosidase
TPNPIQASPPHAPPAPPPRRLPPWLGGGAGRPPVAADRGELRRERRQPTLARRRGGVPGQEHDHRPREAVRREPGLPRRVRRQRALHRPRRLHPQLRPPVLRRQIHGPGRGARVGPRQPVPARVRGRQHHPPHGGERGAGPHRVPDLVVALLPAMRRLYQALQLEGLPKVHVTTPHYLGILAPSDGIPSNASFRPGLDAKVLAPMLRFHNDTGSPFMVNAYPYFSYNAATLDYAVFRPNAGVYDPATRLNYTSMFDAQMDAIHTAMKKLGYGGVQIAVGEAGWPTKAEAGQVGVGPEEARDFNAGMIRVCSGGKGTPLMPGRTFETYVFSLFDENQKPGPVAERNFGIFNTDLTPKYDLGLLRQGPQSGSPTPSPEPSPSVGGGKWCVAKSGASATDLQNNINYACAYVDCRPIQSGGACLDPNNIHSHASYVMNAYYQANGMHDYDCDFKGTGVVTSSDPSYGSCKYNASS

SEQ ID NO: 8585 - protein, 318 aa, Zea mays subsp. mays
  peptide (1)..(318): Ceres Seq. ID no. 12408383
  misc_feature (1)..(207): Pfam Name: Glycosyl hydrolases family 17 Pfam Description: Glycosyl hydrolases family 17
  misc_feature (1)..(314): Homolog of NCBI NO: 1706551 NR Description: GLUCAN ENDO-1,3-BETA-GLUCOSIDASE PRECURSOR
  misc_feature (1)..(313): Homolog of NCBI NO: 11279328 NR Description: glucan endo-1,3-beta-D-glucosidase (EC 3.2.1.39)
  misc_feature (1)..(314): Homolog of NCBI NO: 21617932 NR Description: beta-1,3-glucanase-like protein [Arabidopsis
  misc_feature (1)..(314): Homolog of NCBI NO: 15028379 NR Description: putative beta-1,3-glucanase [Arabidopsis thaliana]
  misc_feature (1)..(314): Homolog of NCBI NO: 15233271 NR Description: glycosyl hydrolase family 17 protein id: At3g55430.1, supported by cDNA: 8980., supported by
  misc_feature (1)..(314): Homolog of NCBI NO: 31126737 NR Description: putative beta 1,3-glucanase [Oryza sativa
  misc_feature (1)..(312): Homolog of NCBI NO: 15225516 NR Description: glycosyl hydrolase family 17; protein id:
  misc_feature (1)..(318): Homolog of NCBI NO: 14279169 NR Description: beta-1,3-glucanase-like protein [Olea europaea]
  misc_feature (1)..(229): Homolog of NCBI NO: 34395169 NR Description: putative glucan endo-1,3-beta-glucosidase
  misc_feature (1)..(265): Homolog of NCBI NO: 34900642 NR Description: putative glucan endo-1,3-beta-glucosidase
MRRLYQALQLEGLPKVHVTTPHYLGILAPSDGIPSNASFRPGLDAKVLAPMLRFHNDTGSPFMVNAYPYFSYNAATLDYAVFRPNAGVYDPATRLNYTSMFDAQMDAIHTAMKKLGYGGVQIAVGEAGWPTKAEAGQVGVGPEEARDFNAGMIRVCSGGKGTPLMPGRTFETYVFSLFDENQKPGPVAERNFGIFNTDLTPKYDLGLLRQGPQSGSPTPSPEPSPSVGGGKWCVAKSGASATDLQNNINYACAYVDCRPIQSGGACLDPNNIHSHASYVMNAYYQANGMHDYDCDFKGTGVVTSSDPSYGSCKYNASS

SEQ ID NO: 8586 - protein, 268 aa, Zea mays subsp. mays
  peptide (1)..(268): Ceres Seq. ID no. 12408384
  misc_feature (1)..(157): Pfam Name: Glycosyl hydrolases family 17 Pfam Description: Glycosyl hydrolases family 17
  misc_feature (1)..(264): Homolog of NCBI NO: 1706551 NR Description: GLUCAN ENDO-1,3-BETA-GLUCOSIDASE PRECURSOR
  misc_feature (1)..(263): Homolog of NCBI NO: 11279328 NR Description: glucan endo-1,3-beta-D-glucosidase (EC 3.2.1.39)
  misc_feature (1)..(264): Homolog of NCBI NO: 21617932 NR Description: beta-1,3-glucanase-like protein [Arabidopsis
  misc_feature (1)..(264): Homolog of NCBI NO: 15028379 NR Description: putative beta-1,3-glucanase [Arabidopsis thaliana]
  misc_feature (1)..(264): Homolog of NCBI NO: 15233271 NR Description: glycosyl hydrolase family 17 protein id: At3g55430.1, supported by cDNA: 8980., supported by
  misc_feature (1)..(264): Homolog of NCBI NO: 31126737 NR Description: putative beta 1,3-glucanase [Oryza sativa
  misc_feature (1)..(262): Homolog of NCBI NO: 15225516 NR Description: glycosyl hydrolase family 17; protein id:
  misc_feature (1)..(268): Homolog of NCBI NO: 14279169 NR Description: beta-1,3-glucanase-like protein [Olea europaea]
  misc_feature (1)..(179): Homolog of NCBI NO: 34395169 NR Description: putative glucan endo-1,3-beta-glucosidase
  misc_feature (1)..(215): Homolog of NCBI NO: 34900642 NR Description: putative glucan endo-1,3-beta-glucosidase
MLRFHNDTGSPFMVNAYPYFSYNAATLDYAVFRPNAGVYDPATRLNYTSMFDAQMDAIHTAMKKLGYGGVQIAVGEAGWPTKAEAGQVGVGPEEARDFNAGMIRVCSGGKGTPLMPGRTFETYVFSLFDENQKPGPVAERNFGIFNTDLTPKYDLGLLRQGPQSGSPTPSPEPSPSVGGGKWCVAKSGASATDLQNNINYACAYVDCRPIQSGGACLDPNNIHSHASYVMNAYYQANGMHDYDCDFKGTGVVTSSDPSYGSCKYNASS

SEQ ID NO: 8587 - DNA, 1608 bp, Zea mays subsp. mays
  misc_feature (1)..(1608): Ceres Seq. ID no. 12408379
  misc_feature: MA Experiment ID: 108687 Result: Down-regulated in Transcription
  misc_feature: MA Experiment 108687 PARAMETER Experiment Name: Zm_Embryos-Flowers__P Parameter: Tissue Value: Embryo vs. Aerial+
aaacgggcggcctcgtagcggagtcctagtcctctcgctttctccctgcgattcgcctcagcttccatccgatccgattcgggagtcgggactcgggagatagaggcagacggagagagaagaaaggcaaggcaatcgccgcgcgcgtgcttcctgccttctcggtcggctccagctcgccgttcattcccgcaatcccgctccgctcgcggtatcgggccgtggtagtgatgccgctggctgagccgccccagtggcgccgcaaagccacggatttcttctccacatctagtgtcaagctgaagcaggcagggcaatcggccggggataatatagctgatgttgctgggaaggttgggtccgcggtgaagagtcggtgggtcgtcttccaggaggctaggcagcagcagcagcaacggccaccgcatgagacagtgcaagagcgtatcatcaccgctgctgccaccactggtttgcttttcaggaaaggcatttcagagacaaaggagaaggttgcagtgggaaaggttaaagttgaagaggttgctaaaaaaactgcagataaaagcaagaatatcttgaacaatattgaacgctggcagaagggagtcgcaagcactgatgtgtttggtgttcctattgaagccactgtacaacgagagcaatctggtaaagctgtgcccttggtgctagtgagatgtgcagactacctggttatatcaggtttgaataatgagtacttattcaaatctgaaggtgacaaaaaagttcttcagcagttagtttctctttacaatgaagactctggcgcatctttacctgaaggtgtgaatcctattgatgtaggtgcactggtgaagtgctaccttgccagtatccctgagccgcttactacattttcgctttatgatgagcttcgagctgcgagggttagcattcctgatcttagggatatattgaagaagcttccaaatgtgaactacatgacaatagagtttgttacagcattgcttcttcgagtcagccataaatcatcacttaacaagatggactcccgcagccttgctgtggaatttgcgcctttgatcatgtggcggcaaggtgatgctggcacagatttgcgtaaccacctcaagttaaccctgaaaccgcctccaaaaattgtggatacaacatcaaatactgccacgtgggacctgtttgatgaggatggcgaggatgcttcatcccagatccccttggacgatgcttcacccccagactacaactccattgaggtcatccagtgtctgatcgagcatcataatgccatcttcactgatgcaaatgaaaccgtgtggagatgatcaaggtctcctctagatctctctggtgttagctcgtgctacgtattagttccaggtaggaaggtggattaccgtccgttattgttagggataagcattttggccggaacatttttggagtaggtttgtatatatgcgctagtgttaattctccccgggactaggatctggtcatgttatagcaatataagtcttgggtggatgtaaaccagatggacacgattgtgctgcatttgctaaattcggcttatacactgctgtt

SEQ ID NO: 8588 - protein, 371 aa, Zea mays subsp. mays
  peptide (1)..(371): Ceres Seq. ID no. 12408380
  misc_feature (151)..(290): Pfam Name: RhoGAP domain Pfam Description: RhoGAP domain
  misc_feature (1)..(371): Homolog of NCBI NO: 28564771 NR Description: putative auxin-regulated protein [Oryza sativa
  misc_feature (1)..(371): Homolog of NCBI NO: 18424478 NR Description: auxin-regulated protein; protein id: At5g61530.1, by cDNA: 152557., supported by cDNA: gi_15028202 [Arabidopsis >gi|15028203|gb|AAK76598.1| unknown protein [Arabidopsis
  misc_feature (1)..(371): Homolog of NCBI NO: 21553593 NR Description: unknown [Arabidopsis thaliana]
  misc_feature (133)..(298): Homolog of NCBI NO: 2624718 NR Description: Gtpase-Activation Domain From Rhogap
  misc_feature (133)..(298): Homolog of NCBI NO: 3402094 NR Description: Chain A, Complex Between Cdc42hs.Gmppnp And P50 (H. Sapiens) >gi|3402096|pdb|1AM4|B Chain B, Complex Between
  misc_feature (133)..(298): Homolog of NCBI NO: 3660275 NR Description: Chain A, RhoRHOGAPGDP(DOT)ALF4 COMPLEX
  misc_feature (133)..(298): Homolog of NCBI NO: 6730013 NR Description: Chain B, Crystal Structure Of The
  misc_feature (133)..(298): Homolog of NCBI NO: 4139447 NR Description: Chain B, Transition State Complex For Gtp By Cdc42: Comparisons Of The High Resolution Structures For Cdc42
  misc_feature (125)..(287): Homolog of NCBI NO: 34878082 NR Description: similar to Glucocorticoid receptor DNA binding
  misc_feature (6)..(355): Homolog of NCBI NO: 34865207 NR Description: similar to p190-B [Rattus norvegicus]
MPLAEPPQWRRKATDFFSTSSVKLKQAGQSAGDNIADVAGKVGSAVKSRWVVFQEARQQQQQRPPHETVQERIITAAATTGLLFRKGISETKEKVAVGKVKVEEVAKKTADKSKNILNNIERWQKGVASTDVFGVPIEATVQREQSGKAVPLVLVRCADYLVISGLNNEYLFKSEGDKKVLQQLVSLYNEDSGASLPEGVNPIDVGALVKCYLASIPEPLTTFSLYDELRAARVSIPDLRDILKKLPNVNYMTIEFVTALLLRVSHKSSLNKMDSRSLAVEFAPLIMWRQGDAGTDLRNHLKLTLKPPPKIVDTTSNTATWDLFDEDGEDASSQIPLDDASPPDYNSIEVIQCLIEHHNAIFTDANETVWR

SEQ ID NO: 8589 - DNA, 1228 bp, Zea mays subsp. mays
  misc_feature (1)..(1228): Ceres Seq. ID no. 12344372
  misc_feature: MA Experiment ID: 20000492 Result: Up-regulated in Transcription
  misc_feature: MA Experiment 20000492 PARAMETER Experiment Name: Zm_Hybrid_Seed_Dev_P Parameter: DAP Value: 12
  misc_feature: MA Experiment 20000492 PARAMETER Experiment Name: Zm_Hybrid_Seed_Dev_P Parameter: Organism Value: Zea mays
  misc_feature: MA Experiment 20000492 PARAMETER Experiment Name: Zm_Hybrid_Seed_Dev_P Parameter: Plant Line Value: 35A19
  misc_feature: MA Experiment 20000492 PARAMETER Experiment Name: Zm_Hybrid_Seed_Dev_P Parameter: Tissue Value: Fert Kernel vs. Unfert Floret
actgcttgcagttgcgccacgcccgccaccccgccaggccgccactagggtttttcggggcctcgccatcgtctccgaccccgtgtctccgaacaacatcgcgcggccgccgcctcctcccagtcgccatggtcaggctcaccgccgacctgatatggaagagcccgcacttcttcaacgccgtcaaggagcgcgagctcgacctccgaggcaacaagatcgccgtcatcgagaatgtcggagccaccgaggaccagtttgacacaattgacttgtcggataatgagattgtcaagcttgaaaacttcccatacttgaatcgtcttggcactctactagttaataataacagaatcacacgtatcaatcccaatcttggcgagtttttgccaaagctgcatacgctggtgctcacgaataatcgtctgacaaatcttgcggagattgatcccctggcatctcttccaaagctacaattccttagcttactggataatactgtaactaagcagccagattacaggctgtatgtgatccataaattgaagcatttgcgtttgctggatttcaagaaagtgaaacaacaggagagagttgcggcagcgaaaaagttccactcaaaggaagcagaggaagaggcaaagaaggtgcctgccaaaacgtttactcctggtctgcctgatgctcaggacatcacaatggagccacaaggtcctaaagtagttgctccaactcctgaacaaatcacagctatcaaggctgctattgcaaatgcccacactctcgaggaagctgcaaggctagaacaggtactaagcactggccaagttcctgctgaatttgcagtgcccaagcccgatgcaaacatggccgaagcttcagatggagccgagaagatggacacagatggtgagaaccaagagggcggtgaggctgatgggcagaaacaaggcgaaggaagcacaagcaccccaattcaggaggattgaaggcatggtgacatgggctgggtcatccattgtctgagttttaggtttgccagttttcgtgggggtgcaggaaagagctagagccttgttgccgcagaactccccctctatggatcgcatgtggatgctaacaacattcttgcttatttttgcagtagatggtactgagaacagaatcagatgttgtaaactatacatacagtcgtgcatgttgccgaatgaaccattgtttcggtcgt

SEQ ID NO: 8590 - protein, 328 aa, Zea mays subsp. mays
  peptide (1)..(328): Ceres Seq. ID no. 12344373
  misc_feature (43)..(288): Homolog of NCBI NO: 322619 NR Description: U2 snRNP protein A' - Arabidopsis thaliana
  misc_feature (43)..(288): Homolog of NCBI NO: 15218274 NR Description: putative U2 small nuclear ribonucleoprotein A (U2 protein id: At1g09760.1, supported by cDNA: gi_16649064
  misc_feature (43)..(302): Homolog of NCBI NO: 4507121 NR Description: u2 small nuclear ribonucleoprotein polypeptide A' sapiens] >gi|134094|sp|P09661|RU2A_HUMAN U2 small nuclear
  misc_feature (43)..(302): Homolog of NCBI NO: 31077165 NR Description: U2 small nuclear ribonucleoprotein A' (U2 >gi|18605961|gb|AAH22816.1| Unknown (protein for MGC:39248) [Homo
  misc_feature (43)..(302): Homolog of NCBI NO: 7263962 NR Description: bA395L14.12 (novel protein similar to small
  misc_feature (43)..(327): Homolog of NCBI NO: 3955033 NR Description: U2 snRNP-specific A' protein [Salmo salar]
  misc_feature (43)..(295): Homolog of NCBI NO: 34857187 NR Description: similar to U2 small nuclear ribonucleoprotein
  misc_feature (43)..(302): Homolog of NCBI NO: 31077178 NR Description: U2 small nuclear ribonucleoprotein A' (U2 >gi|20987274|gb|AAH29642.1| U2 small nuclear ribonucleoprotein A' [Mus musculus] >gi|26353446|dbj|BAC40353.1| unnamed protein
  misc_feature (43)..(302): Homolog of NCBI NO: 31981942 NR Description: U2 small nuclear ribonucleoprotein polypeptide U2 snRNP- A' [Mus musculus] >gi|15489364|gb|AAH13777.1| U2 small
  misc_feature (43)..(302): Homolog of NCBI NO: 7021537 NR Description: U2 small nuclear ribonucleoprotein A' [Mus
CLQLRHARHPARPPLGFFGASPSSPTPCLRTTSRGRRLLPVAMVRLTADLIWKSPHFFNAVKERELDLRGNKIAVIENVGATEDQFDTIDLSDNEIVKLENFPYLNRLGTLLVNNNRITRINPNLGEFLPKLHTLVLTNNRLTNLAEIDPLASLPKLQFLSLLDNTVTKQPDYRLYVIHKLKHLRLLDFKKVKQQERVAAAKKFHSKEAEEEAKKVPAKTFTPGLPDAQDITMEPQGPKVVAPTPEQITAIKAAIANAHTLEEAARLEQVLSTGQVPAEFAVPKPDANMAEASDGAEKMDTDGENQEGGEADGQKQGEGSTSTPIQED

SEQ ID NO: 8591 - protein, 286 aa, Zea mays subsp. mays
  peptide (1)..(286): Ceres Seq. ID no. 12344374
  misc_feature (1)..(246): Homolog of NCBI NO: 322619 NR Description: U2 snRNP protein A' - Arabidopsis thaliana
  misc_feature (1)..(246): Homolog of NCBI NO: 15218274 NR Description: putative U2 small nuclear ribonucleoprotein A (U2 protein id: At1g09760.1, supported by cDNA: gi_16649064
  misc_feature (1)..(260): Homolog of NCBI NO: 4507121 NR Description: u2 small nuclear ribonucleoprotein polypeptide A' sapiens] >gi|134094|sp|P09661|RU2A_HUMAN U2 small nuclear
  misc_feature (1)..(260): Homolog of NCBI NO: 31077165 NR Description: U2 small nuclear ribonucleoprotein A' (U2 >gi|18605961|gb|AAH22816.1| Unknown (protein for MGC:39248) [Homo
  misc_feature (1)..(260): Homolog of NCBI NO: 7263962 NR Description: bA395L14.12 (novel protein similar to small
  misc_feature (1)..(285): Homolog of NCBI NO: 3955033 NR Description: U2 snRNP-specific A' protein [Salmo salar]
  misc_feature (1)..(253): Homolog of NCBI NO: 34857187 NR Description: similar to U2 small nuclear ribonucleoprotein
  misc_feature (1)..(260): Homolog of NCBI NO: 31077178 NR Description: U2 small nuclear ribonucleoprotein A' (U2 >gi|20987274|gb|AAH29642.1| U2 small nuclear ribonucleoprotein A' [Mus musculus] >gi|26353446|dbj|BAC40353.1| unnamed protein
  misc_feature (1)..(260): Homolog of NCBI NO: 31981942 NR Description: U2 small nuclear ribonucleoprotein polypeptide U2 snRNP- A' [Mus musculus] >gi|15489364|gb|AAH13777.1| U2 small
  misc_feature (1)..(260): Homolog of NCBI NO: 7021537 NR Description: U2 small nuclear ribonucleoprotein A' [Mus
MVRLTADLIWKSPHFFNAVKERELDLRGNKIAVIENVGATEDQFDTIDLSDNEIVKLENFPYLNRLGTLLVNNNRITRINPNLGEFLPKLHTLVLTNNRLTNLAEIDPLASLPKLQFLSLLDNTVTKQPDYRLYVIHKLKHLRLLDFKKVKQQERVAAAKKFHSKEAEEEAKKVPAKTFTPGLPDAQDITMEPQGPKVVAPTPEQITAIKAAIANAHTLEEAARLEQVLSTGQVPAEFAVPKPDANMAEASDGAEKMDTDGENQEGGEADGQKQGEGSTSTPIQED

SEQ ID NO: 8592 - DNA, 1202 bp, Zea mays subsp. mays
  misc_feature (1)..(1202): Ceres Seq. ID no. 12412510
  misc_feature: MA Experiment ID: 20000488 Result: Down-regulated in Transcription
  misc_feature: MA Experiment 20000488 PARAMETER Experiment Name: Zm_50mM_NH4NO3_L_to_H_P Parameter: Organism Value: Zea mays
  misc_feature: MA Experiment 20000488 PARAMETER Experiment Name: Zm_50mM_NH4NO3_L_to_H_P Parameter: Timepoint (hr) Value: 8
  misc_feature: MA Experiment 20000488 PARAMETER Experiment Name: Zm_50mM_NH4NO3_L_to_H_P Parameter: Tissue Value: Leaves
  misc_feature: MA Experiment 20000488 PARAMETER Experiment Name: Zm_50mM_NH4NO3_L_to_H_P Parameter: Treatment Value: 50mM NH4NO3 vs. 100mM Mannitol
agaagaaagctccaatctttctcgccctctcgcggttcggaggagggacccgggcgcaaagactaaagcgcaggtgagctccgggcggggaagatgttccccagcctgatccaccacgctagccacggccgacccgacgtcgccgtcgccgaggacgcaccacgcagtggctgcgggttagggctgcccgggcacggcggcgggcccagcgtggtgctcacggccgatcccaagcctaggctccgctggacggccgacctccacgaccgtttcgtcgatgccgtcgcccagctcggcgggcctgataaagcaacaccgaaagctatcatgaggacaatgggagtgaagggcctcaccctttttcacttgaaaagccatcttcagaaatacagattgggaagacagtctggaaaagagttaacggagcaatcaaaagatgcttcttaccttatggaagctcaaagtggaacaactttgtctcctagaggttctactccagatgtgaaagagagtcaagaagttaaagaagcactcagagcacaaatggaagtgcaacgaagattgcacgaacaagtggaggtccagaagcatatgcagatccgaatggaggcgaaccagaagtacatcgacacgatactagataaggcgttcaagatagtatctgagcaactgagtggcttcagcatatctgaccaagacctaccgattctcacctctgctagggccatgcttagccctgcagatcacttgagttcgtctgtcttcccccagctctccgtcagctccgttagccttcacaatcctggtcctggaggagggaaaggccttccgcatgttgccgacagccacgtgttctcccagaggccacctgaacaattcaagcgcaaatcacgttgagaagcattgctagctcgacgcagatgcatgacctgatcaagggcacactggaaaatcagaggaatttcgtctgacatgtgcacggtgcaatcgttcgcccatcctcccgtagcacatctgtgaaaatcaaggttatcttggtctatttcggtacatctagactgacctttattaatatctaatgtaatgcctaagtggactagataagtaattcgcttgttgtataaactgcccagctgtaggatccagttttaaagtcctgttccacgcacttaaaacttgggggccgtctcttgggcggcttc

SEQ ID NO: 8593 - protein, 267 aa, Zea mays subsp. mays
  peptide (1)..(267): Ceres Seq. ID no. 12412511
  misc_feature (49)..(100): Pfam Name: Myb-like DNA-binding domain Pfam Description: Myb-like DNA-binding domain
  misc_feature (36)..(185): Homolog of NCBI NO: 25406584 NR Description: hypothetical protein T8K14.15 [imported] - thaliana >gi|4835766|gb|AAD30233.1|AC007202_15 Contains
  misc_feature (40)..(197): Homolog of NCBI NO: 7485694 NR Description: hypothetical protein F18A5.30 - Arabidopsis >gi|4455293|emb|CAB36828.1| putative protein [Arabidopsis >gi|7268068|emb|CAB78406.1| putative protein [Arabidopsis
  misc_feature (29)..(115): Homolog of NCBI NO: 15242435 NR Description: putative protein; protein id: At5g45580.1 thaliana] >gi|10177932|dbj|BAB11197.1| contains similarity to
  misc_feature (28)..(236): Homolog of NCBI NO: 18404044 NR Description: transfactor, putative; protein id: At3g24120.1, by cDNA: 6626., supported by cDNA: gi_15215653, supported by gi_20334891 [Arabidopsis thaliana] >gi|15215654|gb|AAK91372.1|
  misc_feature (28)..(236): Homolog of NCBI NO: 11994231 NR Description: contains similarity to transfactor~gene_id:MUJ8.2
  misc_feature (28)..(214): Homolog of NCBI NO: 32470629 NR Description: putative phosphate starvation response regulator
  misc_feature (40)..(197): Homolog of NCBI NO: 18414049 NR Description: putative protein; protein id: At4g13640.1, by cDNA: 38327. [Arabidopsis thaliana]
  misc_feature (1)..(266): Homolog of NCBI NO: 29647444 NR Description: P0410E11.32 [Oryza sativa (japonica
  misc_feature (145)..(187): Homolog of NCBI NO: 15242435 NR Description: putative protein; protein id: At5g45580.1 thaliana] >gi|10177932|dbj|BAB11197.1| contains similarity to
  misc_feature (36)..(185): Homolog of NCBI NO: 30699418 NR Description: transfactor -related [Arabidopsis thaliana]
MFPSLIHHASHGRPDVAVAEDAPRSGCGLGLPGHGGGPSVVLTADPKPRLRWTADLHDRFVDAVAQLGGPDKATPKAIMRTMGVKGLTLFHLKSHLQKYRLGRQSGKELTEQSKDASYLMEAQSGTTLSPRGSTPDVKESQEVKEALRAQMEVQRRLHEQVEVQKHMQIRMEANQKYIDTILDKAFKIVSEQLSGFSISDQDLPILTSARAMLSPADHLSSSVFPQLSVSSVSLHNPGPGGGKGLPHVADSHVFSQRPPEQFKRKSR

SEQ ID NO: 8594 - protein, 189 aa, Zea mays subsp. mays
  peptide (1)..(189): Ceres Seq. ID no. 12412512
  misc_feature (1)..(188): Homolog of NCBI NO: 29647444 NR Description: P0410E11.32 [Oryza sativa (japonica
  misc_feature (1)..(158): Homolog of NCBI NO: 18404044 NR Description: transfactor, putative; protein id: At3g24120.1, by cDNA: 6626., supported by cDNA: gi_15215653, supported by gi_20334891 [Arabidopsis thaliana] >gi|15215654|gb|AAK91372.1|
  misc_feature (1)..(119): Homolog of NCBI NO: 18414049 NR Description: putative protein; protein id: At4g13640.1, by cDNA: 38327. [Arabidopsis thaliana]
  misc_feature (1)..(158): Homolog of NCBI NO: 11994231 NR Description: contains similarity to transfactor~gene_id:MUJ8.2
  misc_feature (1)..(136): Homolog of NCBI NO: 32470629 NR Description: putative phosphate starvation response regulator
  misc_feature (1)..(107): Homolog of NCBI NO: 25406584 NR Description: hypothetical protein T8K14.15 [imported] - thaliana >gi|4835766|gb|AAD30233.1|AC007202_15 Contains
  misc_feature (1)..(119): Homolog of NCBI NO: 7485694 NR Description: hypothetical protein F18A5.30 - Arabidopsis >gi|4455293|emb|CAB36828.1| putative protein [Arabidopsis >gi|7268068|emb|CAB78406.1| putative protein [Arabidopsis
  misc_feature (1)..(37): Homolog of NCBI NO: 15242435 NR Description: putative protein; protein id: At5g45580.1 thaliana] >gi|10177932|dbj|BAB11197.1| contains similarity to
  misc_feature (67)..(109): Homolog of NCBI NO: 15242435 NR Description: putative protein; protein id: At5g45580.1 thaliana] >gi|10177932|dbj|BAB11197.1| contains similarity to
  misc_feature (1)..(107): Homolog of NCBI NO: 30699418 NR Description: transfactor -related [Arabidopsis thaliana]
MRTMGVKGLTLFHLKSHLQKYRLGRQSGKELTEQSKDASYLMEAQSGTTLSPRGSTPDVKESQEVKEALRAQMEVQRRLHEQVEVQKHMQIRMEANQKYIDTILDKAFKIVSEQLSGFSISDQDLPILTSARAMLSPADHLSSSVFPQLSVSSVSLHNPGPGGGKGLPHVADSHVFSQRPPEQFKRKSR

SEQ ID NO: 8595 - protein, 186 aa, Zea mays subsp. mays
  peptide (1)..(186): Ceres Seq. ID no. 12412513
  misc_feature (1)..(185): Homolog of NCBI NO: 29647444 NR Description: P0410E11.32 [Oryza sativa (japonica
  misc_feature (1)..(155): Homolog of NCBI NO: 18404044 NR Description: transfactor, putative; protein id: At3g24120.1, by cDNA: 6626., supported by cDNA: gi_15215653, supported by gi_20334891 [Arabidopsis thaliana] >gi|15215654|gb|AAK91372.1|
  misc_feature (1)..(116): Homolog of NCBI NO: 18414049 NR Description: putative protein; protein id: At4g13640.1, by cDNA: 38327. [Arabidopsis thaliana]
  misc_feature (1)..(155): Homolog of NCBI NO: 11994231 NR Description: contains similarity to transfactor~gene_id:MUJ8.2
  misc_feature (1)..(133): Homolog of NCBI NO: 32470629 NR Description: putative phosphate starvation response regulator
  misc_feature (1)..(104): Homolog of NCBI NO: 25406584 NR Description: hypothetical protein T8K14.15 [imported] - thaliana >gi|4835766|gb|AAD30233.1|AC007202_15 Contains
  misc_feature (1)..(116): Homolog of NCBI NO: 7485694 NR Description: hypothetical protein F18A5.30 - Arabidopsis >gi|4455293|emb|CAB36828.1| putative protein [Arabidopsis >gi|7268068|emb|CAB78406.1| putative protein [Arabidopsis
  misc_feature (1)..(34): Homolog of NCBI NO: 15242435 NR Description: putative protein; protein id: At5g45580.1 thaliana] >gi|10177932|dbj|BAB11197.1| contains similarity to
  misc_feature (64)..(106): Homolog of NCBI NO: 15242435 NR Description: putative protein; protein id: At5g45580.1 thaliana] >gi|10177932|dbj|BAB11197.1| contains similarity to
  misc_feature (1)..(104): Homolog of NCBI NO: 30699418 NR Description: transfactor -related [Arabidopsis thaliana]
MGVKGLTLFHLKSHLQKYRLGRQSGKELTEQSKDASYLMEAQSGTTLSPRGSTPDVKESQEVKEALRAQMEVQRRLHEQVEVQKHMQIRMEANQKYIDTILDKAFKIVSEQLSGFSISDQDLPILTSARAMLSPADHLSSSVFPQLSVSSVSLHNPGPGGGKGLPHVADSHVFSQRPPEQFKRKSR

SEQ ID NO: 8596 - DNA, 1690 bp, Zea mays subsp. mays
  misc_feature (1)..(1690): Ceres Seq. ID no. 12373176
  misc_feature: MA Experiment ID: 108504 Result: Down-regulated in Transcription
  misc_feature: MA Experiment 108504 PARAMETER Experiment Name: Zm_Drought_P Parameter: Age (day) Value: 8
  misc_feature: MA Experiment 108504 PARAMETER Experiment Name: Zm_Drought_P Parameter: Organism Value: Zea mays
  misc_feature: MA Experiment 108504 PARAMETER Experiment Name: Zm_Drought_P Parameter: Plant Line Value: 35A19
  misc_feature: MA Experiment 108504 PARAMETER Experiment Name: Zm_Drought_P Parameter: Timepoint (hr) Value: 12
  misc_feature: MA Experiment 108504 PARAMETER Experiment Name: Zm_Drought_P Parameter: Tissue Value: Aerial
  misc_feature: MA Experiment 108504 PARAMETER Experiment Name: Zm_Drought_P Parameter: Treatment Value: Drought vs. No Drought
  misc_feature: MA Experiment ID: 108543 Result: Up-regulated in Transcription
  misc_feature: MA Experiment ID: 108597 Result: Down-regulated in Transcription
  misc_feature: MA Experiment 108597 PARAMETER Experiment Name: Zm_100uM_ABA_P Parameter: Age (day) Value: 9
  misc_feature: MA Experiment 108597 PARAMETER Experiment Name: Zm_100uM_ABA_P Parameter: Organism Value: Zea mays
  misc_feature: MA Experiment 108597 PARAMETER Experiment Name: Zm_100uM_ABA_P Parameter: Plant Line Value: 35A19
  misc_feature: MA Experiment 108597 PARAMETER Experiment Name: Zm_100uM_ABA_P Parameter: Timepoint (hr) Value: 24
  misc_feature: MA Experiment 108597 PARAMETER Experiment Name: Zm_100uM_ABA_P Parameter: Tissue Value: Aerial
  misc_feature: MA Experiment 108597 PARAMETER Experiment Name: Zm_100uM_ABA_P Parameter: Treatment Value: 100uM ABA vs. No Treatment
  misc_feature: MA Experiment ID: 108687 Result: Down-regulated in Transcription
  misc_feature: MA Experiment 108687 PARAMETER Experiment Name: Zm_Embryos-Flowers__P Parameter: Tissue Value: Embryo vs. Aerial+
gttcctgccgacgccgccggcaagccgcacgccgtgctcgtgccgttcccggcgcagggccacgtcacaccgatgctgaagctagcaaagatcctccactgccggggcttccacgtcaccttcgtcaacagcgagtacaaccgccgccgcttgctccggtcccgcggcgcggacgcgctcgacggcctcccaggcttccgtttcgcgaccatcccggatggcctgccgccgtccgacaccgacgccacccaggacgtgccgtccctctgccgctccacggaggagacctgtctcccgcatttcagggccctgctccagtgtctcaacgcctcctcccctgtcccctgacgtgccgctggtcacctgcgtcgtcggcgacgacatcatgggctttaccttggatgccgccagggagataggcgtgccgtgcgctctgttctggactgccagcacctgcgggtacatgggctaccgctactaccgcaccctcatcgacaagggcatcttcccgttgaaagaggagcagctgacgaatgggttcttagacacgccggtggagttcgcgccgcccgggatgagcaagcacatgcggctcaaggacttcccaagcttcatgcgctccacggacccctacgagttcatggtccactacgccgtcagggtgacggatcacacagccggcgcggacgccgtccttctcaacaccttcgacgagctcgagcaggaggcgctggacgccatgcgcgccgtgatctcatctgccgcgtccatcaacaccatcggcccgctcaccctcctcgccgaacagatcgtgcccagaggcagccaactggactcgctgggctctaacctctggaaggaggacgcctcctgcttccgctggctcgacggccggaagcccaggtccgtggtgttcgtgaactacggcagtgtgacggtgatgaccagcgcggagctggtggagttcgcgtggggtctggccaacagcggccacgacttcctgtggatcatccggccggacctcgtaagcggcgacgccgccgtgctgcccccggagttccaggaggcgatcgaggggcgcggcctgctggcgaactggtgcgctcaggacgcggtgctgcgtcacgaggcggtgggcgtgttcctgacgcactctgggtggaactcgacgctggagagcctctgcgccggggtgccgatgctgtgctggcctttcttcgcggagcagcagaccaactgccggtacacatgcgcggagtggggcgtggagatcggccacgacgtgcgacgggaggccgtggaagagaagatacgggaggccatgggcggggagaaagggaaggagatgcgtcgccgactcgccgcgcggtggagtggcgggagaccgccgtgcgcgcgacgcggcccggcgggcgctcgtacgccaacctggagaagctggtgactgacgtactcctctcgggtggcaagaattattaaacctccttgctatcaggcttcaggcatcagcactgctccatatgcatgcataaaccatcaaatacactttagctcagttttaagatctacgtgtcattgctctctctagtacgtgatgtattatgcacccgcctcttgttggcattattgttgtattatttagatctggtttctggaaacgagtgtgcatatattttgattctctaagcgg

SEQ ID NO: 8597 - protein, 408 aa, Zea mays subsp. mays
  peptide (1)..(408): Ceres Seq. ID no. 12373177
  misc_feature (44)..(385): Pfam Name: UDP-glucoronosyl and UDP-glucosyl transferase Pfam Description: UDP-glucoronosyl and UDP-glucosyl transferase
  misc_feature (42)..(385): Homolog of NCBI NO: 38569188 NR Description: OSJNBa0086B14.13 [Oryza sativa (japonica
  misc_feature (45)..(385): Homolog of NCBI NO: 38569140 NR Description: OSJNBb0033P05.8 [Oryza sativa (japonica
  misc_feature (45)..(385): Homolog of NCBI NO: 38344775 NR Description: OSJNBb0026L04.6 [Oryza sativa (japonica
  misc_feature (46)..(398): Homolog of NCBI NO: 38344776 NR Description: OSJNBb0026L04.7 [Oryza sativa (japonica
  misc_feature (48)..(382): Homolog of NCBI NO: 38344780 NR Description: OSJNBb0026L04.11 [Oryza sativa (japonica
  misc_feature (45)..(385): Homolog of NCBI NO: 19911203 NR Description: glucosyltransferase-10 [Vigna angularis]
  misc_feature (44)..(385): Homolog of NCBI NO: 15219870 NR Description: UDP-glucose glucosyltransferase; protein id: supported by cDNA: gi_12083243, supported by cDNA: gi_17065005,
  misc_feature (44)..(385): Homolog of NCBI NO: 17065006 NR Description: UDP-glucose glucosyltransferase [Arabidopsis
  misc_feature (44)..(385): Homolog of NCBI NO: 25286821 NR Description: T16E15.2 protein - Arabidopsis thaliana
  misc_feature (44)..(385): Homolog of NCBI NO: 15219876 NR Description: UDP-glucose glucosyltransferase, putative; id: At1g22400.1, supported by cDNA: gi_19698984 [Arabidopsis
MACRRPTPTPPRTCRPSAAPRRRPVSRISGPCSSVSTPPPLSPDVPLVTCVVGDDIMGFTLDAAREIGVPCALFWTASTCGYMGYRYYRTLIDKGIFPLKEEQLTNGFLDTPVEFAPPGMSKHMRLKDFPSFMRSTDPYEFMVHYAVRVTDHTAGADAVLLNTFDELEQEALDAMRAVISSAASINTIGPLTLLAEQIVPRGSQLDSLGSNLWKEDASCFRWLDGRKPRSVVFVNYGSVTVMTSAELVEFAWGLANSGHDFLWIIRPDLVSGDAAVLPPEFQEAIEGRGLLANWCAQDAVLRHEAVGVFLTHSGWNSTLESLCAGVPMLCWPFFAEQQTNCRYTCAEWGVEIGHDVRREAVEEKIREAMGGEKGKEMRRRLAARWSGGRPPCARRGPAGARTPTWRSW

SEQ ID NO: 8598 - protein, 352 aa, Zea mays subsp. mays
  peptide (1)..(352): Ceres Seq. ID no. 12373178
  misc_feature (1)..(329): Pfam Name: UDP-glucoronosyl and UDP-glucosyl transferase Pfam Description: UDP-glucoronosyl and UDP-glucosyl transferase
  misc_feature (1)..(329): Homolog of NCBI NO: 38569188 NR Description: OSJNBa0086B14.13 [Oryza sativa (japonica
  misc_feature (1)..(329): Homolog of NCBI NO: 38569140 NR Description: OSJNBb0033P05.8 [Oryza sativa (japonica
  misc_feature (1)..(329): Homolog of NCBI NO: 38344775 NR Description: OSJNBb0026L04.6 [Oryza sativa (japonica
  misc_feature (1)..(342): Homolog of NCBI NO: 38344776 NR Description: OSJNBb0026L04.7 [Oryza sativa (japonica
  misc_feature (1)..(326): Homolog of NCBI NO: 38344780 NR Description: OSJNBb0026L04.11 [Oryza sativa (japonica
  misc_feature (1)..(329): Homolog of NCBI NO: 19911203 NR Description: glucosyltransferase-10 [Vigna angularis]
  misc_feature (1)..(329): Homolog of NCBI NO: 15219870 NR Description: UDP-glucose glucosyltransferase; protein id: supported by cDNA: gi_12083243, supported by cDNA: gi_17065005,
  misc_feature (1)..(329): Homolog of NCBI NO: 17065006 NR Description: UDP-glucose glucosyltransferase [Arabidopsis
  misc_feature (1)..(329): Homolog of NCBI NO: 25286821 NR Description: T16E15.2 protein - Arabidopsis thaliana
  misc_feature (1)..(329): Homolog of NCBI NO: 15219876 NR Description: UDP-glucose glucosyltransferase, putative; id: At1g22400.1, supported by cDNA: gi_19698984 [Arabidopsis
MGFTLDAAREIGVPCALFWTASTCGYMGYRYYRTLIDKGIFPLKEEQLTNGFLDTPVEFAPPGMSKHMRLKDFPSFMRSTDPYEFMVHYAVRVTDHTAGADAVLLNTFDELEQEALDAMRAVISSAASINTIGPLTLLAEQIVPRGSQLDSLGSNLWKEDASCFRWLDGRKPRSVVFVNYGSVTVMTSAELVEFAWGLANSGHDFLWIIRPDLVSGDAAVLPPEFQEAIEGRGLLANWCAQDAVLRHEAVGVFLTHSGWNSTLESLCAGVPMLCWPFFAEQQTNCRYTCAEWGVEIGHDVRREAVEEKIREAMGGEKGKEMRRRLAARWSGGRPPCARRGPAGARTPTWRSW

SEQ ID NO: 8599 - protein, 326 aa, Zea mays subsp. mays
  peptide (1)..(326): Ceres Seq. ID no. 12373179
  misc_feature (1)..(303): Pfam Name: UDP-glucoronosyl and UDP-glucosyl transferase Pfam Description: UDP-glucoronosyl and UDP-glucosyl transferase
  misc_feature (1)..(303): Homolog of NCBI NO: 38569188 NR Description: OSJNBa0086B14.13 [Oryza sativa (japonica
  misc_feature (1)..(303): Homolog of NCBI NO: 38569140 NR Description: OSJNBb0033P05.8 [Oryza sativa (japonica
  misc_feature (1)..(303): Homolog of NCBI NO: 38344775 NR Description: OSJNBb0026L04.6 [Oryza sativa (japonica
  misc_feature (1)..(316): Homolog of NCBI NO: 38344776 NR Description: OSJNBb0026L04.7 [Oryza sativa (japonica
  misc_feature (1)..(300): Homolog of NCBI NO: 38344780 NR Description: OSJNBb0026L04.11 [Oryza sativa (japonica
  misc_feature (1)..(303): Homolog of NCBI NO: 19911203 NR Description: glucosyltransferase-10 [Vigna angularis]
  misc_feature (1)..(303): Homolog of NCBI NO: 15219870 NR Description: UDP-glucose glucosyltransferase; protein id: supported by cDNA: gi_12083243, supported by cDNA: gi_17065005,
  misc_feature (1)..(303): Homolog of NCBI NO: 17065006 NR Description: UDP-glucose glucosyltransferase [Arabidopsis
  misc_feature (1)..(303): Homolog of NCBI NO: 25286821 NR Description: T16E15.2 protein - Arabidopsis thaliana
  misc_feature (1)..(303): Homolog of NCBI NO: 15219876 NR Description: UDP-glucose glucosyltransferase, putative; id: At1g22400.1, supported by cDNA: gi_19698984 [Arabidopsis
MGYRYYRTLIDKGIFPLKEEQLTNGFLDTPVEFAPPGMSKHMRLKDFPSFMRSTDPYEFMVHYAVRVTDHTAGADAVLLNTFDELEQEALDAMRAVISSAASINTIGPLTLLAEQIVPRGSQLDSLGSNLWKEDASCFRWLDGRKPRSVVFVNYGSVTVMTSAELVEFAWGLANSGHDFLWIIRPDLVSGDAAVLPPEFQEAIEGRGLLANWCAQDAVLRHEAVGVFLTHSGWNSTLESLCAGVPMLCWPFFAEQQTNCRYTCAEWGVEIGHDVRREAVEEKIREAMGGEKGKEMRRRLAARWSGGRPPCARRGPAGARTPTWRSW

SEQ ID NO: 8600 - DNA, 1522 bp, Zea mays subsp. mays
  misc_feature (1)..(1522): Ceres Seq. ID no. 12373476
  misc_feature: MA Experiment ID: 108527 Result: Down-regulated in Transcription
  misc_feature: MA Experiment 108527 PARAMETER Experiment Name: Zm_5mM_NO_P Parameter: Age (day) Value: 8
  misc_feature: MA Experiment 108527 PARAMETER Experiment Name: Zm_5mM_NO_P Parameter: Organism Value: Zea mays
  misc_feature: MA Experiment 108527 PARAMETER Experiment Name: Zm_5mM_NO_P Parameter: Plant Line Value: 35A19
  misc_feature: MA Experiment 108527 PARAMETER Experiment Name: Zm_5mM_NO_P Parameter: Timepoint (hr) Value: 6
  misc_feature: MA Experiment 108527 PARAMETER Experiment Name: Zm_5mM_NO_P Parameter: Tissue Value: Aerial
  misc_feature: MA Experiment 108527 PARAMETER Experiment Name: Zm_5mM_NO_P Parameter: Treatment Value: 5mM NO vs. No Treatment
  misc_feature: MA Experiment ID: 108535 Result: Up-regulated in Transcription
  misc_feature: MA Experiment 108535 PARAMETER Experiment Name: Zm_Meristem_P Parameter: Age (day) Value: 8
  misc_feature: MA Experiment 108535 PARAMETER Experiment Name: Zm_Meristem_P Parameter: Organism Value: Zea mays
  misc_feature: MA Experiment 108535 PARAMETER Experiment Name: Zm_Meristem_P Parameter: Plant Line Value: 35A19
  misc_feature: MA Experiment 108535 PARAMETER Experiment Name: Zm_Meristem_P Parameter: Tissue Value: Root Meristem vs. Above Root Meristem
ctgggtcttctataccgtgcctcatctagtcatctcgtctcaggttgcggccgaaccagagccccgtcccaactccaccacctctcttctctacggcgcgagcaagggcggcgccggccgcggcgtcggcgggaaccgggcctcgctctccccatctctccgatcacttctgtcctgtgaaaatggcggatgaactacgctcaacgtctgtgggtcagaagttccatgggcagtccgtgctgttgagcagaatctcttcctattccgccatgaacaaccctgtattcaacaatgcctattctgcttacaatgtgccccagaggtcatatcatgggatgaatgcaactgctggactctcatctgtcatggcaccatctcctgtctttgcttctgccccaaaagagaaaggcttttctggatttatgatcgactttatgatgggtggagtttctgctgctgtctccaagacagctgcagctccgattgagcgtgtcaagcttttgattcagaaccaggatgaaatgctcaagactggcaggctttctgaaccgtacaagggtattggggactgctttggccggacaatcagagatgagggttttgtctcactgtggagaggaaacacagctaatgtcatccgttacttccccacacaggcattgaactttgcgttcaaggatcacttcaagcgcatgttcaactttaagaaggacaaggatgggtactggaagtggtttgctggaaatctggcttctggtggagctgctggtgcttgctctctattctttgtctattctctggactacgcccgtacgcgtttggccaatgatgccaaggctgcaaagaagggtggtgagaggcagttcaatggactcgttgatgtttaccgcaagacccttgccagtgatggtattcgtggcctctaccgtggattcaatatctcttgtgtggggatcattgtgtaccgaggtctttactttggtatgtatgattccctgaagccagtgcttcttgttggtaccctgcaggataacttcttggccagcttcttgctcgggtggggtataaccattggtgctggccttgcctcctaccccattgacactgttcgccgtcgcatgatgatgacatctggtgaggccgtcaagtacaacagctccttggacgctttcaagcagattgtcgcaaaggagggtaccaagtccctcttcaagggtgctggcgcaaacatcctccgcgctgtagctggtgctggtgtccttgctgggtacgacaagctccaggtggttgtcttcggcaagaagtacgggtctggtggtggctaaggatgtataatgatgatgacgacgaacaacaaacatgatgttttaggtgcctcctttaagtaaacatacgtacggaccctcgacaccattttaagttcgctctcgcagaggctggtgagtttgtagcgtggctgtgaccgcacctctttttatgtcagagattggaaataagtgacgttagaaattgctgtcttgct

SEQ ID NO: 8601 - protein, 380 aa, Zea mays subsp. mays
  peptide (1)..(380): Ceres Seq. ID no. 12373477
  misc_feature (1)..(379): Homolog of NCBI NO: 399015 NR Description: ADP,ATP carrier protein, mitochondrial precursor translocase) (Adenine nucleotide translocator) (ANT)
  misc_feature (1)..(379): Homolog of NCBI NO: 2780194 NR Description: adenine nucleotide translocator [Lupinus albus]
  misc_feature (1)..(379): Homolog of NCBI NO: 113460 NR Description: ADP,ATP carrier protein 2, mitochondrial (ADP/ATP translocase 2) (Adenine nucleotide translocator 2) (ANT
  misc_feature (3)..(380): Homolog of NCBI NO: 15235280 NR Description: mitochondrial ADP,ATP carrier protein, putative;
  misc_feature (1)..(379): Homolog of NCBI NO: 1890116 NR Description: ADP/ATP translocator [Lycopersicon esculentum]
  misc_feature (1)..(379): Homolog of NCBI NO: 485517 NR Description: ADP,ATP carrier protein - rice
  misc_feature (1)..(379): Homolog of NCBI NO: 100424 NR Description: ADP,ATP carrier protein precursor - potato
  misc_feature (1)..(379): Homolog of NCBI NO: 444790 NR Description: nucleotide translocator
  misc_feature (1)..(379): Homolog of NCBI NO: 22168 NR Description: adenine nucleotide translocator [Zea mays]
  misc_feature (1)..(379): Homolog of NCBI NO: 113457 NR Description: ADP,ATP carrier protein, mitochondrial precursor translocase) (Adenine nucleotide translocator) (ANT)
MADELRSTSVGQKFHGQSVLLSRISSYSAMNNPVFNNAYSAYNVPQRSYHGMNATAGLSSVMAPSPVFASAPKEKGFSGFMIDFMMGGVSAAVSKTAAAPIERVKLLIQNQDEMLKTGRLSEPYKGIGDCFGRTIRDEGFVSLWRGNTANVIRYFPTQALNFAFKDHFKRMFNFKKDKDGYWKWFAGNLASGGAAGACSLFFVYSLDYARTRLANDAKAAKKGGERQFNGLVDVYRKTLASDGIRGLYRGFNISCVGIIVYRGLYFGMYDSLKPVLLVGTLQDNFLASFLLGWGITIGAGLASYPIDTVRRRMMMTSGEAVKYNSSLDAFKQIVAKEGTKSLFKGAGANILRAVAGAGVLAGYDKLQVVVFGKKYGSGGG

SEQ ID NO: 8602 - protein, 351 aa, Zea mays subsp. mays
  peptide (1)..(351): Ceres Seq. ID no. 12373478
  misc_feature (1)..(350): Homolog of NCBI NO: 399015 NR Description: ADP,ATP carrier protein, mitochondrial precursor translocase) (Adenine nucleotide translocator) (ANT)
  misc_feature (1)..(350): Homolog of NCBI NO: 2780194 NR Description: adenine nucleotide translocator [Lupinus albus]
  misc_feature (1)..(350): Homolog of NCBI NO: 113460 NR Description: ADP,ATP carrier protein 2, mitochondrial (ADP/ATP translocase 2) (Adenine nucleotide translocator 2) (ANT
  misc_feature (1)..(351): Homolog of NCBI NO: 15235280 NR Description: mitochondrial ADP,ATP carrier protein, putative;
  misc_feature (1)..(350): Homolog of NCBI NO: 1890116 NR Description: ADP/ATP translocator [Lycopersicon esculentum]
  misc_feature (1)..(350): Homolog of NCBI NO: 485517 NR Description: ADP,ATP carrier protein - rice
  misc_feature (1)..(350): Homolog of NCBI NO: 100424 NR Description: ADP,ATP carrier protein precursor - potato
  misc_feature (1)..(350): Homolog of NCBI NO: 444790 NR Description: nucleotide translocator
  misc_feature (1)..(350): Homolog of NCBI NO: 22168 NR Description: adenine nucleotide translocator [Zea mays]
  misc_feature (1)..(350): Homolog of NCBI NO: 113457 NR Description: ADP,ATP carrier protein, mitochondrial precursor translocase) (Adenine nucleotide translocator) (ANT)
MNNPVFNNAYSAYNVPQRSYHGMNATAGLSSVMAPSPVFASAPKEKGFSGFMIDFMMGGVSAAVSKTAAAPIERVKLLIQNQDEMLKTGRLSEPYKGIGDCFGRTIRDEGFVSLWRGNTANVIRYFPTQALNFAFKDHFKRMFNFKKDKDGYWKWFAGNLASGGAAGACSLFFVYSLDYARTRLANDAKAAKKGGERQFNGLVDVYRKTLASDGIRGLYRGFNISCVGIIVYRGLYFGMYDSLKPVLLVGTLQDNFLASFLLGWGITIGAGLASYPIDTVRRRMMMTSGEAVKYNSSLDAFKQIVAKEGTKSLFKGAGANILRAVAGAGVLAGYDKLQVVVFGKKYGSGGG

SEQ ID NO: 8603 - protein, 329 aa, Zea mays subsp. mays
  peptide (1)..(329): Ceres Seq. ID no. 12373479
  misc_feature (1)..(328): Homolog of NCBI NO: 399015 NR Description: ADP,ATP carrier protein, mitochondrial precursor translocase) (Adenine nucleotide translocator) (ANT)
  misc_feature (1)..(328): Homolog of NCBI NO: 2780194 NR Description: adenine nucleotide translocator [Lupinus albus]
  misc_feature (1)..(328): Homolog of NCBI NO: 113460 NR Description: ADP,ATP carrier protein 2, mitochondrial (ADP/ATP translocase 2) (Adenine nucleotide translocator 2) (ANT
  misc_feature (1)..(329): Homolog of NCBI NO: 15235280 NR Description: mitochondrial ADP,ATP carrier protein, putative;
  misc_feature (1)..(328): Homolog of NCBI NO: 1890116 NR Description: ADP/ATP translocator [Lycopersicon esculentum]
  misc_feature (1)..(328): Homolog of NCBI NO: 485517 NR Description: ADP,ATP carrier protein - rice
  misc_feature (1)..(328): Homolog of NCBI NO: 100424 NR Description: ADP,ATP carrier protein precursor - potato
  misc_feature (1)..(328): Homolog of NCBI NO: 444790 NR Description: nucleotide translocator
  misc_feature (1)..(328): Homolog of NCBI NO: 22168 NR Description: adenine nucleotide translocator [Zea mays]
  misc_feature (1)..(328): Homolog of NCBI NO: 113457 NR Description: ADP,ATP carrier protein, mitochondrial precursor translocase) (Adenine nucleotide translocator) (ANT)
MNATAGLSSVMAPSPVFASAPKEKGFSGFMIDFMMGGVSAAVSKTAAAPIERVKLLIQNQDEMLKTGRLSEPYKGIGDCFGRTIRDEGFVSLWRGNTANVIRYFPTQALNFAFKDHFKRMFNFKKDKDGYWKWFAGNLASGGAAGACSLFFVYSLDYARTRLANDAKAAKKGGERQFNGLVDVYRKTLASDGIRGLYRGFNISCVGIIVYRGLYFGMYDSLKPVLLVGTLQDNFLASFLLGWGITIGAGLASYPIDTVRRRMMMTSGEAVKYNSSLDAFKQIVAKEGTKSLFKGAGANILRAVAGAGVLAGYDKLQVVVFGKKYGSGGG

SEQ ID NO: 8604 - DNA, 1843 bp, Zea mays subsp. mays
  misc_feature (1)..(1843): Ceres Seq. ID no. 12367930
  misc_feature: MA Experiment ID: 108526 Result: Down-regulated in Transcription
  misc_feature: MA Experiment 108526 PARAMETER Experiment Name: Zm_5mM_NO_P Parameter: Age (day) Value: 8
  misc_feature: MA Experiment 108526 PARAMETER Experiment Name: Zm_5mM_NO_P Parameter: Organism Value: Zea mays
  misc_feature: MA Experiment 108526 PARAMETER Experiment Name: Zm_5mM_NO_P Parameter: Plant Line Value: 35A19
  misc_feature: MA Experiment 108526 PARAMETER Experiment Name: Zm_5mM_NO_P Parameter: Timepoint (hr) Value: 1
  misc_feature: MA Experiment 108526 PARAMETER Experiment Name: Zm_5mM_NO_P Parameter: Tissue Value: Aerial
  misc_feature: MA Experiment 108526 PARAMETER Experiment Name: Zm_5mM_NO_P Parameter: Treatment Value: 5mM NO vs. No Treatment
  misc_feature: MA Experiment ID: 108534 Result: Down-regulated in Transcription
  misc_feature: MA Experiment 108534 PARAMETER Experiment Name: Zm_4deg_Cold_P Parameter: Age (hr) Value: 8
  misc_feature: MA Experiment 108534 PARAMETER Experiment Name: Zm_4deg_Cold_P Parameter: Organism Value: Zea mays
  misc_feature: MA Experiment 108534 PARAMETER Experiment Name: Zm_4deg_Cold_P Parameter: Plant Line Value: 35A19
  misc_feature: MA Experiment 108534 PARAMETER Experiment Name: Zm_4deg_Cold_P Parameter: Temperature (deg C) Value: 4 vs. 22
  misc_feature: MA Experiment 108534 PARAMETER Experiment Name: Zm_4deg_Cold_P Parameter: Timepoint (hr) Value: 6
  misc_feature: MA Experiment 108534 PARAMETER Experiment Name: Zm_4deg_Cold_P Parameter: Tissue Value: Aerial
  misc_feature: MA Experiment ID: 108535 Result: Down-regulated in Transcription
  misc_feature: MA Experiment 108535 PARAMETER Experiment Name: Zm_Meristem_P Parameter: Age (day) Value: 8
  misc_feature: MA Experiment 108535 PARAMETER Experiment Name: Zm_Meristem_P Parameter: Organism Value: Zea mays
  misc_feature: MA Experiment 108535 PARAMETER Experiment Name: Zm_Meristem_P Parameter: Plant Line Value: 35A19
  misc_feature: MA Experiment 108535 PARAMETER Experiment Name: Zm_Meristem_P Parameter: Tissue Value: Root Meristem vs. Above Root Meristem
  misc_feature: MA Experiment ID: 20000108 Result: Down-regulated in Transcription
  misc_feature: MA Experiment 20000108 PARAMETER Experiment Name: Zm_Root-Tips_P Parameter: Age (day) Value: 12
  misc_feature: MA Experiment 20000108 PARAMETER Experiment Name: Zm_Root-Tips_P Parameter: Organism Value: Zea mays
  misc_feature: MA Experiment 20000108 PARAMETER Experiment Name: Zm_Root-Tips_P Parameter: Tissue Value: Root tips vs. Root mid region    35
  misc_feature: MA Experiment 20000108 PARAMETER Experiment Name: Zm_Root-Tips_P Parameter: Tissue Value: Root tips vs. Root mid region   Sequence Listing-Misc Features (4)
  misc_feature: MA Experiment ID: 20000535 Result: Down-regulated in Transcription
  misc_feature: MA Experiment 20000535 PARAMETER Experiment Name: Zm_Hybrid_Seed_Dev_P Parameter: DAP Value: 30 vs. 12
  misc_feature: MA Experiment 20000535 PARAMETER Experiment Name: Zm_Hybrid_Seed_Dev_P Parameter: Organism Value: Zea mays
  misc_feature: MA Experiment 20000535 PARAMETER Experiment Name: Zm_Hybrid_Seed_Dev_P Parameter: Plant Line Value: 35A19
  misc_feature: MA Experiment 20000535 PARAMETER Experiment Name: Zm_Hybrid_Seed_Dev_P Parameter: Tissue Value: Embryo vs. Unfert Floret
  misc_feature: MA Experiment ID: 20000626 Result: Up-regulated in Transcription
  misc_feature: MA Experiment 20000626 PARAMETER Experiment Name: Zm_Herbicide-Treatments_P Parameter: Timepoint (hr) Value: 12
  misc_feature: MA Experiment 20000626 PARAMETER Experiment Name: Zm_Herbicide-Treatments_P Parameter: Tissue Value: Aerial
  misc_feature: MA Experiment 20000626 PARAMETER Experiment Name: Zm_Herbicide-Treatments_P Parameter: Treatment Value: Roundup vs. No Treatment
aactcggcaactccgcctcccaagtcacacccccactccctcgctcaccagaggaactagcggaccaggcaaagccgagccgcaaccgcgaagatcttgcgtggcctccttttcccagatcgtcactgtgccgctcgtgccctccactcccggtccgcccaaccaataatccatccatccatccaccaccaccaccccgctgcggcgatgtgcggcggcgccatcctctcgggtttcatcccgccgtccggggtggcggcggcggcggcggcggccaagaagaagcagcagcagcggtgccgtgtgactgcggacctgctatggccggggcccggcagtaaggaagctccccaggaccaggaggaggacttcgaggccgacttccgcgagttcgagcgcggcctcggcgaggatgacgtggacagcgccggcgaaggcggcgaccccgaggtccaggagcttcctccgccggagccgacgaggtttgccttcgccaccgcggccaaggcagcagttgatggcgtgatgacgacgactccaaaggatgtcaaaggagatagaccagtaaagcgcggccggaagaaccagtacaggggaatccggcagcgcccttggggcaaatgggcagctgagatcagggaccctaacaagggcgtccgcgtctggctcggaacctacaacaccgccgaggaggcagctagggcatacgacgccgaagctcgcaagatccgcggcaagaaagcgaaggtgaatttccccgatgacgacgcgccaggcactggtcacaggccagcgaacgcagcgcctaggctagtagctccacccccaccccccaaggcctgcgccgatgagatctttaacaacctgaagaacgacgacgacgacaacaacaacaacaacgatgatctgtttgcgatgtttgcgttcggtgacaataagaagaaggttcctgcagcgaagccagccgccgccgagggtggcagtggcagtggcagcttcctcgtccctgcgcctgcggtggcggtggtgcccggtaataagaggaggtcgtccgcgaccaacactatgctctccgtctccgacgaccagcgcagcaactcctacggctccggctcctccgacttggtggggtcgtggtcgtgggacgacgacgcggcggccgccgccatgacctcggactacacctcctcggtcttcgctcccgataacgccgtgctgccggcggcgtcttacacgcaaggcggagcgccgaagagaatgaggagcagctacggcggcgcgccgcccagcctcgcacatgacgcggccatgcctggctttggccttgataaagtgagctaccaccactaccaggcgttgcctccttattacgtcgggagcagcaacgcgtcggtgggcaacctcggtcttctgcagcaggctgatgatgctccagctccacaggatggggcgagcgccggggatatctggagcctcgacgagctgctcatgctggcagcagctggtgcttattgagaaccgcaagaaaaaaaaatgtgttgggcgctgctagctggagacgagacgagggcgagaggcagttgcatcatccgccatccgctatcgttttgtctctcctatatctagtatatatatgcttctggcagtcgaactctatggcaatgcgtgtgtatagtgtgttgctgccgtctatgattggaagcgagctcgagactggttcaataattcacctttgcctaccgtcgtaccgccggcctgctggactgtagtgtgcgtactgcatatatatgccataattatgtatgcactcctcctatataaactatattattatgatgtgctt

SEQ ID NO: 8605 - protein, 435 aa, Zea mays subsp. mays
  peptide (1)..(435): Ceres Seq. ID no. 12367931
  misc_feature (125)..(188): Pfam Name: AP2 domain Pfam Description: AP2 domain
  misc_feature (1)..(253): Homolog of NCBI NO: 19880313 NR Description: putative EREBP-type transcription factor [Oryza
  misc_feature (267)..(435): Homolog of NCBI NO: 19880313 NR Description: putative EREBP-type transcription factor [Oryza
MCGGAILSGFIPPSGVAAAAAAAKKKQQQRCRVTADLLWPGPGSKEAPQDQEEDFEADFREFERGLGEDDVDSAGEGGDPEVQELPPPEPTRFAFATAAKAAVDGVMTTTPKDVKGDRPVKRGRKNQYRGIRQRPWGKWAAEIRDPNKGVRVWLGTYNTAEEAARAYDAEARKIRGKKAKVNFPDDDAPGTGHRPANAAPRLVAPPPPPKACADEIFNNLKNDDDDNNNNNDDLFAMFAFGDNKKKVPAAKPAAAEGGSGSGSFLVPAPAVAVVPGNKRRSSATNTMLSVSDDQRSNSYGSGSSDLVGSWSWDDDAAAAAMTSDYTSSVFAPDNAVLPAASYTQGGAPKRMRSSYGGAPPSLAHDAAMPGFGLDKVSYHHYQALPPYYVGSSNASVGNLGLLQQADDAPAPQDGASAGDIWSLDELLMLAAAGAY

SEQ ID NO: 8606 - protein, 329 aa, Zea mays subsp. mays
  peptide (1)..(329): Ceres Seq. ID no. 12367932
  misc_feature (19)..(82): Pfam Name: AP2 domain Pfam Description: AP2 domain
  misc_feature (1)..(147): Homolog of NCBI NO: 19880313 NR Description: putative EREBP-type transcription factor [Oryza
  misc_feature (161)..(329): Homolog of NCBI NO: 19880313 NR Description: putative EREBP-type transcription factor [Oryza
MTTTPKDVKGDRPVKRGRKNQYRGIRQRPWGKWAAEIRDPNKGVRVWLGTYNTAEEAARAYDAEARKIRGKKAKVNFPDDDAPGTGHRPANAAPRLVAPPPPPKACADEIFNNLKNDDDDNNNNNDDLFAMFAFGDNKKKVPAAKPAAAEGGSGSGSFLVPAPAVAVVPGNKRRSSATNTMLSVSDDQRSNSYGSGSSDLVGSWSWDDDAAAAAMTSDYTSSVFAPDNAVLPAASYTQGGAPKRMRSSYGGAPPSLAHDAAMPGFGLDKVSYHHYQALPPYYVGSSNASVGNLGLLQQADDAPAPQDGASAGDIWSLDELLMLAAAGAY

SEQ ID NO: 8607 - DNA, 1608 bp, Zea mays subsp. mays
  misc_feature (1)..(1608): Ceres Seq. ID no. 12349247
  misc_feature: MA Experiment ID: 108522 Result: Down-regulated in Transcription
  misc_feature: MA Experiment 108522 PARAMETER Experiment Name: Zm_42deg_Heat_P Parameter: Age (day) Value: 8
  misc_feature: MA Experiment 108522 PARAMETER Experiment Name: Zm_42deg_Heat_P Parameter: Organism Value: Zea mays
  misc_feature: MA Experiment 108522 PARAMETER Experiment Name: Zm_42deg_Heat_P Parameter: Plant Line Value: 35A19
  misc_feature: MA Experiment 108522 PARAMETER Experiment Name: Zm_42deg_Heat_P Parameter: Temperature (deg C) Value: 42 vs. 22
  misc_feature: MA Experiment 108522 PARAMETER Experiment Name: Zm_42deg_Heat_P Parameter: Timepoint (hr) Value: 1
  misc_feature: MA Experiment 108522 PARAMETER Experiment Name: Zm_42deg_Heat_P Parameter: Tissue Value: Aerial
  misc_feature: MA Experiment ID: 108535 Result: Down-regulated in Transcription
  misc_feature: MA Experiment 108535 PARAMETER Experiment Name: Zm_Meristem_P Parameter: Age (day) Value: 8
  misc_feature: MA Experiment 108535 PARAMETER Experiment Name: Zm_Meristem_P Parameter: Organism Value: Zea mays
  misc_feature: MA Experiment 108535 PARAMETER Experiment Name: Zm_Meristem_P Parameter: Plant Line Value: 35A19
  misc_feature: MA Experiment 108535 PARAMETER Experiment Name: Zm_Meristem_P Parameter: Tissue Value: Root Meristem vs. Above Root Meristem
  misc_feature: MA Experiment ID: 20000478 Result: Up-regulated in Transcription
  misc_feature: MA Experiment 20000478 PARAMETER Experiment Name: Zm_5mM_SA_P Parameter: Age (day) Value: 11
  misc_feature: MA Experiment 20000478 PARAMETER Experiment Name: Zm_5mM_SA_P Parameter: Organism Value: Zea mays
  misc_feature: MA Experiment 20000478 PARAMETER Experiment Name: Zm_5mM_SA_P Parameter: Plant Line Value: 35A19
  misc_feature: MA Experiment 20000478 PARAMETER Experiment Name: Zm_5mM_SA_P Parameter: Timepoint (hr) Value: 72
  misc_feature: MA Experiment 20000478 PARAMETER Experiment Name: Zm_5mM_SA_P Parameter: Tissue Value: Aerial
  misc_feature: MA Experiment 20000478 PARAMETER Experiment Name: Zm_5mM_SA_P Parameter: Treatment Value: 5mM SA vs. No Treatment
  misc_feature: MA Experiment ID: 20000487 Result: Up-regulated in Transcription
  misc_feature: MA Experiment 20000487 PARAMETER Experiment Name: Zm_50mM_NH4NO3_L_to_H_P Parameter: Organism Value: Zea mays
  misc_feature: MA Experiment 20000487 PARAMETER Experiment Name: Zm_50mM_NH4NO3_L_to_H_P Parameter: Timepoint (hr) Value: 4
  misc_feature: MA Experiment 20000487 PARAMETER Experiment Name: Zm_50mM_NH4NO3_L_to_H_P Parameter: Tissue Value: Leaves
  misc_feature: MA Experiment 20000487 PARAMETER Experiment Name: Zm_50mM_NH4NO3_L_to_H_P Parameter: Treatment Value: 50mM NH4NO3 vs. 100mM Mannitol
  misc_feature: MA Experiment ID: 20001610 Result: Up-regulated in Transcription
  misc_feature: MA Experiment 20001610 PARAMETER Experiment Name: Zm_50ppm_KNO3_L-to-H_P Parameter: Age (day) Value: 19
  misc_feature: MA Experiment 20001610 PARAMETER Experiment Name: Zm_50ppm_KNO3_L-to-H_P Parameter: Organism Value: Zea mays
  misc_feature: MA Experiment 20001610 PARAMETER Experiment Name: Zm_50ppm_KNO3_L-to-H_P Parameter: Plant Line Value: 35A19
  misc_feature: MA Experiment 20001610 PARAMETER Experiment Name: Zm_50ppm_KNO3_L-to-H_P Parameter: Timepoint (hr) Value: 2
  misc_feature: MA Experiment 20001610 PARAMETER Experiment Name: Zm_50ppm_KNO3_L-to-H_P Parameter: Tissue Value: Roots
  misc_feature: MA Experiment 20001610 PARAMETER Experiment Name: Zm_50ppm_KNO3_L-to-H_P Parameter: Treatment Value: 50ppm KNO3 vs. 50ppm KCl
  misc_feature: MA Experiment ID: 20001612 Result: Up-regulated in Transcription
  misc_feature: MA Experiment 20001612 PARAMETER Experiment Name: Zm_50ppm_KNO3_L-to-H_P Parameter: Age (day) Value: 19
  misc_feature: MA Experiment 20001612 PARAMETER Experiment Name: Zm_50ppm_KNO3_L-to-H_P Parameter: Organism Value: Zea mays
  misc_feature: MA Experiment 20001612 PARAMETER Experiment Name: Zm_50ppm_KNO3_L-to-H_P Parameter: Plant Line Value: 35A19
  misc_feature: MA Experiment 20001612 PARAMETER Experiment Name: Zm_50ppm_KNO3_L-to-H_P Parameter: Timepoint (hr) Value: 8
  misc_feature: MA Experiment 20001612 PARAMETER Experiment Name: Zm_50ppm_KNO3_L-to-H_P Parameter: Tissue Value: Roots
  misc_feature: MA Experiment 20001612 PARAMETER Experiment Name: Zm_50ppm_KNO3_L-to-H_P Parameter: Treatment Value: 50ppm KNO3 vs. 50ppm KCl
  misc_feature: MA Experiment ID: 20001613 Result: Up-regulated in Transcription
  misc_feature: MA Experiment 20001613 PARAMETER Experiment Name: Zm_50ppm_KNO3_L-to-H_P Parameter: Age (day) Value: 20
  misc_feature: MA Experiment 20001613 PARAMETER Experiment Name: Zm_50ppm_KNO3_L-to-H_P Parameter: Organism Value: Zea mays
  misc_feature: MA Experiment 20001613 PARAMETER Experiment Name: Zm_50ppm_KNO3_L-to-H_P Parameter: Plant Line Value: 35A19
  misc_feature: MA Experiment 20001613 PARAMETER Experiment Name: Zm_50ppm_KNO3_L-to-H_P Parameter: Timepoint (hr) Value: 24
  misc_feature: MA Experiment 20001613 PARAMETER Experiment Name: Zm_50ppm_KNO3_L-to-H_P Parameter: Tissue Value: Roots
  misc_feature: MA Experiment 20001613 PARAMETER Experiment Name: Zm_50ppm_KNO3_L-to-H_P Parameter: Treatment Value: 50ppm KNO3 vs. 50ppm KCl
aacagaaacgaaagagcctccaaaacctcgcaacaaccccgtgacacccacacccatccgccctgcccctcctcgcgctccccaccaaccccgacgagcggcgatgaccggcacggtgtccaagctggcggcgccccggcctgcggcgccaccgctccggccggcgtccatccgcgccgccgcaatcgccttcgctccctccccgcgccgggtcagcgtctccgtcgccgggcgggccaggatcccctccgtcattgcgatggcttctgccaaggaaggaaatggagcaccgaccaagaaaacctcccttcacgatctctacgagctccagggcctctccccgtggtatgacaacctctgccgacctgtcaccgacttgctgccccttatcgccagcggtgttcgtggagtcaccagcaaccctacaattttccagaaggccatctcatcctccagcgcatatgatgatcagttcaagcagctcatttcgggcggaaaggacgcggagagcgcttactgggaactcgttataaaggatatccaagacgcgtgcagtctttttgagcctatctacgatgagaccgatggggctgatgggtatgtctccgtggaggtgtctcctaggttggcaaatgacactcaaggaactgttgaggcggcaaagtggttacacaaagtggtcaaccgccccaatgtctacataaagatccctgctaccgccgaatgtgttccttccatccgggaagttatcgctaatggcattagcgtcaacgtcacgcttattttctctattgcgacatacgaggctgtgattgatgcttaccttgatgggctagaggcttcgggcttgagcgacttatctcgagttaccagtgtcgcatccttctttgtcagccgagtcgacacccttatcgacaaaatgcttgaaaagattggaacacctgaggcacttgccttgagagggaaggctgccgtcgcacaggccaaactagcaaatcggctctaccagaagaaattctctggcccaaggtgggaggcgttggccaagaaaggtgccaagaaacagaggttgttgtgggcatccaccggtgtcaagaacccagcttatcccgacactctttacatcgacagtctcattggacctgacacggtcaacacgatgcccgaccaagctttgcaggcattcatagaccacggcactgtctcgaggacagttgatgcgaatgtgtccgaggcggaaggtgtatacagcgccttggagaagcttggcattgactgggccgaggtcggaaagcagcttgagctggaaggtgtggactccttcaagaagagctttgacagcctactcgtgagcctgcaggagaagggcaacagcctcaagacggcaactgtgtaaaactgagaagattgggtaccggcgggtgaacgattttactaaataaaatgctagcttgctggctctcttagtttttacgatgtacctttgctctccattttctgaatcgggattgtattctaggcttgcctggccgtcattgtgtgaccaacgttcatggcttgggacgtaaacggttggaaaacatctctgttactttctatacgattttt

SEQ ID NO: 8608 - protein, 464 aa, Zea mays subsp. mays
  peptide (1)..(464): Ceres Seq. ID no. 12349248
  misc_feature (113)..(452): Pfam Name: Transaldolase Pfam Description: Transaldolase
  misc_feature (143)..(460): Homolog of NCBI NO: 34907042 NR Description: putative transaldolase [Oryza sativa (japonica group)] >gi|20160725|dbj|BAB89667.1| putative transaldolase
  misc_feature (86)..(143): Homolog of NCBI NO: 34907042 NR Description: putative transaldolase [Oryza sativa (japonica group)] >gi|20160725|dbj|BAB89667.1| putative transaldolase
  misc_feature (35)..(90): Homolog of NCBI NO: 34907042 NR Description: putative transaldolase [Oryza sativa (japonica group)] >gi|20160725|dbj|BAB89667.1| putative transaldolase
  misc_feature (81)..(463): Homolog of NCBI NO: 15240625 NR Description: transaldolase - like protein; protein id: supported by cDNA: 32114., supported by cDNA: gi_21280862
  misc_feature (46)..(464): Homolog of NCBI NO: 10441272 NR Description: transaldolase [Lycopersicon esculentum]
  misc_feature (83)..(460): Homolog of NCBI NO: 7489279 NR Description: transaldolase (EC 2.2.1.2) - potato
  misc_feature (46)..(464): Homolog of NCBI NO: 32481059 NR Description: transaldolase [Lycopersicon esculentum]
  misc_feature (110)..(453): Homolog of NCBI NO: 29832856 NR Description: putative transaldolase [Streptomyces avermitilis >gi|29609977|dbj|BAC74025.1| putative transaldolase [Streptomyces
  misc_feature (98)..(456): Homolog of NCBI NO: 29828309 NR Description: putative transaldolase [Streptomyces avermitilis >gi|29605412|dbj|BAC69478.1| putative transaldolase [Streptomyces
  misc_feature (111)..(449): Homolog of NCBI NO: 23019683 NR Description: hypothetical protein [Thermobifida fusca]
TETKEPPKPRNNPVTPTPIRPAPPRAPHQPRRAAMTGTVSKLAAPRPAAPPLRPASIRAAAIAFAPSPRRVSVSVAGRARIPSVIAMASAKEGNGAPTKKTSLHDLYELQGLSPWYDNLCRPVTDLLPLIASGVRGVTSNPTIFQKAISSSSAYDDQFKQLISGGKDAESAYWELVIKDIQDACSLFEPIYDETDGADGYVSVEVSPRLANDTQGTVEAAKWLHKVVNRPNVYIKIPATAECVPSIREVIANGISVNVTLIFSIATYEAVIDAYLDGLEASGLSDLSRVTSVASFFVSRVDTLIDKMLEKIGTPEALALRGKAAVAQAKLANRLYQKKFSGPRWEALAKKGAKKQRLLWASTGVKNPAYPDTLYIDSLIGPDTVNTMPDQALQAFIDHGTVSRTVDANVSEAEGVYSALEKLGIDWAEVGKQLELEGVDSFKKSFDSLLVSLQEKGNSLKTATV

SEQ ID NO: 8609 - protein, 430 aa, Zea mays subsp. mays
  peptide (1)..(430): Ceres Seq. ID no. 12349249
  misc_feature (79)..(418): Pfam Name: Transaldolase Pfam Description: Transaldolase
  misc_feature (109)..(426): Homolog of NCBI NO: 34907042 NR Description: putative transaldolase [Oryza sativa (japonica group)] >gi|20160725|dbj|BAB89667.1| putative transaldolase
  misc_feature (52)..(109): Homolog of NCBI NO: 34907042 NR Description: putative transaldolase [Oryza sativa (japonica group)] >gi|20160725|dbj|BAB89667.1| putative transaldolase
  misc_feature (1)..(56): Homolog of NCBI NO: 34907042 NR Description: putative transaldolase [Oryza sativa (japonica group)] >gi|20160725|dbj|BAB89667.1| putative transaldolase
  misc_feature (47)..(429): Homolog of NCBI NO: 15240625 NR Description: transaldolase - like protein; protein id: supported by cDNA: 32114., supported by cDNA: gi_21280862
  misc_feature (12)..(430): Homolog of NCBI NO: 10441272 NR Description: transaldolase [Lycopersicon esculentum]
  misc_feature (49)..(426): Homolog of NCBI NO: 7489279 NR Description: transaldolase (EC 2.2.1.2) - potato
  misc_feature (12)..(430): Homolog of NCBI NO: 32481059 NR Description: transaldolase [Lycopersicon esculentum]
  misc_feature (76)..(419): Homolog of NCBI NO: 29832856 NR Description: putative transaldolase [Streptomyces avermitilis >gi|29609977|dbj|BAC74025.1| putative transaldolase [Streptomyces
  misc_feature (64)..(422): Homolog of NCBI NO: 29828309 NR Description: putative transaldolase [Streptomyces avermitilis >gi|29605412|dbj|BAC69478.1| putative transaldolase [Streptomyces
  misc_feature (77)..(415): Homolog of NCBI NO: 23019683 NR Description: hypothetical protein [Thermobifida fusca]
MTGTVSKLAAPRPAAPPLRPASIRAAAIAFAPSPRRVSVSVAGRARIPSVIAMASAKEGNGAPTKKTSLHDLYELQGLSPWYDNLCRPVTDLLPLIASGVRGVTSNPTIFQKAISSSSAYDDQFKQLISGGKDAESAYWELVIKDIQDACSLFEPIYDETDGADGYVSVEVSPRLANDTQGTVEAAKWLHKVVNRPNVYIKIPATAECVPSIREVIANGISVNVTLIFSIATYEAVIDAYLDGLEASGLSDLSRVTSVASFFVSRVDTLIDKMLEKIGTPEALALRGKAAVAQAKLANRLYQKKFSGPRWEALAKKGAKKQRLLWASTGVKNPAYPDTLYIDSLIGPDTVNTMPDQALQAFIDHGTVSRTVDANVSEAEGVYSALEKLGIDWAEVGKQLELEGVDSFKKSFDSLLVSLQEKGNSLKTATV

SEQ ID NO: 8610 - protein, 378 aa, Zea mays subsp. mays
  peptide (1)..(378): Ceres Seq. ID no. 12349250
  misc_feature (27)..(366): Pfam Name: Transaldolase Pfam Description: Transaldolase
  misc_feature (57)..(374): Homolog of NCBI NO: 34907042 NR Description: putative transaldolase [Oryza sativa (japonica group)] >gi|20160725|dbj|BAB89667.1| putative transaldolase
  misc_feature (1)..(57): Homolog of NCBI NO: 34907042 NR Description: putative transaldolase [Oryza sativa (japonica group)] >gi|20160725|dbj|BAB89667.1| putative transaldolase
  misc_feature (1)..(377): Homolog of NCBI NO: 15240625 NR Description: transaldolase - like protein; protein id: supported by cDNA: 32114., supported by cDNA: gi_21280862
  misc_feature (1)..(378): Homolog of NCBI NO: 10441272 NR Description: transaldolase [Lycopersicon esculentum]
  misc_feature (1)..(374): Homolog of NCBI NO: 7489279 NR Description: transaldolase (EC 2.2.1.2) - potato
  misc_feature (1)..(378): Homolog of NCBI NO: 32481059 NR Description: transaldolase [Lycopersicon esculentum]
  misc_feature (24)..(367): Homolog of NCBI NO: 29832856 NR Description: putative transaldolase [Streptomyces avermitilis >gi|29609977|dbj|BAC74025.1| putative transaldolase [Streptomyces
  misc_feature (12)..(370): Homolog of NCBI NO: 29828309 NR Description: putative transaldolase [Streptomyces avermitilis >gi|29605412|dbj|BAC69478.1| putative transaldolase [Streptomyces
  misc_feature (25)..(363): Homolog of NCBI NO: 23019683 NR Description: hypothetical protein [Thermobifida fusca]
  misc_feature (25)..(367): Homolog of NCBI NO: 23335136 NR Description: hypothetical protein [Bifidobacterium longum
MASAKEGNGAPTKKTSLHDLYELQGLSPWYDNLCRPVTDLLPLIASGVRGVTSNPTIFQKAISSSSAYDDQFKQLISGGKDAESAYWELVIKDIQDACSLFEPIYDETDGADGYVSVEVSPRLANDTQGTVEAAKWLHKVVNRPNVYIKIPATAECVPSIREVIANGISVNVTLIFSIATYEAVIDAYLDGLEASGLSDLSRVTSVASFFVSRVDTLIDKMLEKIGTPEALALRGKAAVAQAKLANRLYQKKFSGPRWEALAKKGAKKQRLLWASTGVKNPAYPDTLYIDSLIGPDTVNTMPDQALQAFIDHGTVSRTVDANVSEAEGVYSALEKLGIDWAEVGKQLELEGVDSFKKSFDSLLVSLQEKGNSLKTATV

SEQ ID NO: 8611 - DNA, 411 bp, Zea mays subsp. mays
  misc_feature (1)..(411): Ceres Seq. ID no. 2870951
  misc_feature: MA Experiment ID: 20000487 Result: Up-regulated in Transcription
  misc_feature: MA Experiment 20000487 PARAMETER Experiment Name: Zm_50mM_NH4NO3_L_to_H_P Parameter: Organism Value: Zea mays
  misc_feature: MA Experiment 20000487 PARAMETER Experiment Name: Zm_50mM_NH4NO3_L_to_H_P Parameter: Timepoint (hr) Value: 4
  misc_feature: MA Experiment 20000487 PARAMETER Experiment Name: Zm_50mM_NH4NO3_L_to_H_P Parameter: Tissue Value: Leaves
  misc_feature: MA Experiment 20000487 PARAMETER Experiment Name: Zm_50mM_NH4NO3_L_to_H_P Parameter: Treatment Value: 50mM NH4NO3 vs. 100mM Mannitol
gaaccctagcgccccgcccgtcctgccgccgccgcagccgccatcgcacggccatkggtatcgatctcgtagccggcggccgcaacaagawraccaagcgcacggcsccaagtccgacgatgtctacctcaagctcctcgtcaagctctaccgcttccttgtgcgcaggacaaagagcaacttcaacgccgtgatcctcaagcgcctcttcatgagcaagaccaaccgcccgccgctctcgatgcgccgcctcgtcaggttcatggaggggaagggtgatcagatcgccgtgattgtgggcacgtgaccgacgacaagaggatcagcgaggtgccggcgatgaaggtctgcgcgctcaggttcactgagacagcgagggccaggatcatcaatgctggcggctgcagcgag

SEQ ID NO: 8612 - protein, 101 aa, Zea mays subsp. mays
  peptide (1)..(101): Ceres Seq. ID no. 2870952
  misc_feature (37)..(101): Homolog of NCBI NO: 34393858 NR Description: putative cytoplasmic ribosomal protein L18 [Oryza
  misc_feature (37)..(101): Homolog of NCBI NO: 15241061 NR Description: 60S ribosomal protein - like; protein id: supported by cDNA: gi_15810152 [Arabidopsis thaliana] putative 60S ribosomal protein [Arabidopsis thaliana]
  misc_feature (37)..(101): Homolog of NCBI NO: 606970 NR Description: cytoplasmic ribosomal protein L18
  misc_feature (37)..(101): Homolog of NCBI NO: 15230011 NR Description: putative 60S ribosomal protein L18; protein id: supported by cDNA: gi_14335089, supported by cDNA: gi_16974508, by cDNA: gi_606969 [Arabidopsis thaliana]
  misc_feature (37)..(101): Homolog of NCBI NO: 34897628 NR Description: cytoplasmic ribosomal protein L18 [Oryza sativa]
  misc_feature (37)..(101): Homolog of NCBI NO: 4506607 NR Description: ribosomal protein L18; 60S ribosomal protein L18 sapiens] >gi|548749|sp|Q07020|RL18_HUMAN 60S ribosomal protein
  misc_feature (37)..(101): Homolog of NCBI NO: 12840700 NR Description: unnamed protein product [Mus musculus]
  misc_feature (37)..(101): Homolog of NCBI NO: 21264500 NR Description: 60S ribosomal protein L18 unnamed protein product [Mus musculus] unnamed protein product [Mus musculus]
  misc_feature (37)..(101): Homolog of NCBI NO: 13592057 NR Description: ribosomal protein L18 [Rattus norvegicus]
  misc_feature (37)..(101): Homolog of NCBI NO: 18204442 NR Description: ribosomal protein L18 [Homo sapiens]
  misc_feature (19)..(19): Xaa is any aa, unknown or other
  misc_feature (30)..(30): Xaa is any aa, unknown or other
  misc_feature (31)..(31): Xaa is any aa, unknown or other
  misc_feature (36)..(36): Xaa is any aa, unknown or other
NPSAPPVLPPPQPPSHGHXYRSRSRRPQQXXQAHGXKSDDVYLKLLVKLYRFLVRRTKSNFNAVILKRLFMSKTNRPPLSMRRLVRFMEGKGDQIAVIVGT

SEQ ID NO: 8613 - protein, 63 aa, Zea mays subsp. mays
  peptide (1)..(63): Ceres Seq. ID no. 2870953
  misc_feature (19)..(36): Homolog of NCBI NO: 34393858 NR Description: putative cytoplasmic ribosomal protein L18 [Oryza
  misc_feature (19)..(36): Homolog of NCBI NO: 15241061 NR Description: 60S ribosomal protein - like; protein id: supported by cDNA: gi_15810152 [Arabidopsis thaliana] putative 60S ribosomal protein [Arabidopsis thaliana]
  misc_feature (19)..(36): Homolog of NCBI NO: 606970 NR Description: cytoplasmic ribosomal protein L18
  misc_feature (19)..(36): Homolog of NCBI NO: 15230011 NR Description: putative 60S ribosomal protein L18; protein id: supported by cDNA: gi_14335089, supported by cDNA: gi_16974508, by cDNA: gi_606969 [Arabidopsis thaliana]
  misc_feature (19)..(36): Homolog of NCBI NO: 34897628 NR Description: cytoplasmic ribosomal protein L18 [Oryza sativa]
  misc_feature (19)..(36): Homolog of NCBI NO: 7440855 NR Description: ribosomal protein L18, cytosolic - Arabidopsis
  misc_feature (18)..(18): Xaa is any aa, unknown or other
  misc_feature (30)..(30): Xaa is any aa, unknown or other
  misc_feature (35)..(35): Xaa is any aa, unknown or other
TLAPRPSCRRRSRHRTAXGIDLVAGGRNKXTKRTXPSPTMSTSSSSSSSTASLCAGQRATSTP

SEQ ID NO: 8614 - DNA, 1198 bp, Zea mays subsp. mays
  misc_feature (1)..(1198): Ceres Seq. ID no. 12407607
  misc_feature: MA Experiment ID: 108504 Result: Up-regulated in Transcription
  misc_feature: MA Experiment 108504 PARAMETER Experiment Name: Zm_Drought_P Parameter: Age (day) Value: 8
  misc_feature: MA Experiment 108504 PARAMETER Experiment Name: Zm_Drought_P Parameter: Organism Value: Zea mays
  misc_feature: MA Experiment 108504 PARAMETER Experiment Name: Zm_Drought_P Parameter: Plant Line Value: 35A19
  misc_feature: MA Experiment 108504 PARAMETER Experiment Name: Zm_Drought_P Parameter: Timepoint (hr) Value: 12
  misc_feature: MA Experiment 108504 PARAMETER Experiment Name: Zm_Drought_P Parameter: Tissue Value: Aerial
  misc_feature: MA Experiment 108504 PARAMETER Experiment Name: Zm_Drought_P Parameter: Treatment Value: Drought vs. No Drought
  misc_feature: MA Experiment ID: 108513 Result: Up-regulated in Transcription
  misc_feature: MA Experiment 108513 PARAMETER Experiment Name: Zm_100uM_ABA_P Parameter: Age (day) Value: 8
  misc_feature: MA Experiment 108513 PARAMETER Experiment Name: Zm_100uM_ABA_P Parameter: Organism Value: Zea mays
  misc_feature: MA Experiment 108513 PARAMETER Experiment Name: Zm_100uM_ABA_P Parameter: Plant Line Value: 35A19
  misc_feature: MA Experiment 108513 PARAMETER Experiment Name: Zm_100uM_ABA_P Parameter: Timepoint (hr) Value: 6
  misc_feature: MA Experiment 108513 PARAMETER Experiment Name: Zm_100uM_ABA_P Parameter: Tissue Value: Aerial
  misc_feature: MA Experiment 108513 PARAMETER Experiment Name: Zm_100uM_ABA_P Parameter: Treatment Value: 100uM ABA vs. No Treatment
  misc_feature: MA Experiment ID: 108540 Result: Up-regulated in Transcription
  misc_feature: MA Experiment 108540 PARAMETER Experiment Name: Zm_20percent_PEG_P Parameter: Age (day) Value: 8
  misc_feature: MA Experiment 108540 PARAMETER Experiment Name: Zm_20percent_PEG_P Parameter: Organism Value: Zea mays
  misc_feature: MA Experiment 108540 PARAMETER Experiment Name: Zm_20percent_PEG_P Parameter: Plant Line Value: 35A19
  misc_feature: MA Experiment 108540 PARAMETER Experiment Name: Zm_20percent_PEG_P Parameter: Timepoint (hr) Value: 6
  misc_feature: MA Experiment 108540 PARAMETER Experiment Name: Zm_20percent_PEG_P Parameter: Tissue Value: Aerial
  misc_feature: MA Experiment 108540 PARAMETER Experiment Name: Zm_20percent_PEG_P Parameter: Treatment Value: 20percent PEG vs. No Treatment
  misc_feature: MA Experiment ID: 108542 Result: Up-regulated in Transcription
  misc_feature: MA Experiment 108542 PARAMETER Experiment Name: Zm_150mM_NaCl_P Parameter: Age (day) Value: 8
  misc_feature: MA Experiment 108542 PARAMETER Experiment Name: Zm_150mM_NaCl_P Parameter: Organism Value: Zea mays
  misc_feature: MA Experiment 108542 PARAMETER Experiment Name: Zm_150mM_NaCl_P Parameter: Plant Line Value: 35A19
  misc_feature: MA Experiment 108542 PARAMETER Experiment Name: Zm_150mM_NaCl_P Parameter: Timepoint (hr) Value: 6
  misc_feature: MA Experiment 108542 PARAMETER Experiment Name: Zm_150mM_NaCl_P Parameter: Tissue Value: Aerial
  misc_feature: MA Experiment 108542 PARAMETER Experiment Name: Zm_150mM_NaCl_P Parameter: Treatment Value: 150mM NaCl vs. No Treatment
  misc_feature: MA Experiment ID: 108543 Result: Up-regulated in Transcription
  misc_feature: MA Experiment ID: 108544 Result: Up-regulated in Transcription
  misc_feature: MA Experiment ID: 108556 Result: Up-regulated in Transcription
  misc_feature: MA Experiment 108556 PARAMETER Experiment Name: Zm_Drought_P Parameter: Age (day) Value: 9
  misc_feature: MA Experiment 108556 PARAMETER Experiment Name: Zm_Drought_P Parameter: Organism Value: Zea mays
  misc_feature: MA Experiment 108556 PARAMETER Experiment Name: Zm_Drought_P Parameter: Plant Line Value: 35A19
  misc_feature: MA Experiment 108556 PARAMETER Experiment Name: Zm_Drought_P Parameter: Timepoint (hr) Value: 24
  misc_feature: MA Experiment 108556 PARAMETER Experiment Name: Zm_Drought_P Parameter: Tissue Value: Aerial
  misc_feature: MA Experiment 108556 PARAMETER Experiment Name: Zm_Drought_P Parameter: Treatment Value: Drought vs. No Drought
  misc_feature: MA Experiment ID: 108597 Result: Up-regulated in Transcription
  misc_feature: MA Experiment 108597 PARAMETER Experiment Name: Zm_100uM_ABA_P Parameter: Age (day) Value: 9
  misc_feature: MA Experiment 108597 PARAMETER Experiment Name: Zm_100uM_ABA_P Parameter: Organism Value: Zea mays
  misc_feature: MA Experiment 108597 PARAMETER Experiment Name: Zm_100uM_ABA_P Parameter: Plant Line Value: 35A19
  misc_feature: MA Experiment 108597 PARAMETER Experiment Name: Zm_100uM_ABA_P Parameter: Timepoint (hr) Value: 24
  misc_feature: MA Experiment 108597 PARAMETER Experiment Name: Zm_100uM_ABA_P Parameter: Tissue Value: Aerial
  misc_feature: MA Experiment 108597 PARAMETER Experiment Name: Zm_100uM_ABA_P Parameter: Treatment Value: 100uM ABA vs. No Treatment
agatccatttcccactcgatcgccaataatggagtttccgcaccaccaccaccaccacggccatcgccgcgacgacgacgaagacgaccgcagaggcccgcctcccccggtctacggcggctacggccagccaccgccacccgacccgtacggccgcgcgcccgtcgaccccgatccgtacggtcgacctccgccccagtccgcgtacggtggggccggggacgcctacggccacagcgggccaaggctacgcgcccccgccggcctacggcgccgggggcgggtacggcaacgtcgtccacgtcgcgcacgaggtcggcgacgagaggccttactacggcggcggcggcggcggtcttggtggcgcctacggaggcggtggctccgagtacggccacgagggccgaccgcaccacggcggcggcggatcccagtacggccacgagacacgcccgcaccacggcggcgggggcggcgccccgcctgtgaggcagcagacgtacaggatctactgcaaggctggggaggaccagtacagcctcgcctcccgcgacggcaaggtctgcctcgtgcgcacggaccgtgatgacgacgcgcagcactggatcaaggacatgaagtacagcaccagggtgaaggatgaggaaggctaccctgccatcgtcctcgtcaacaaagccactggagaggctctcaagcattcccttggccagtcacaccctgttcttctgacccgccataatccagactccctggacgagtctgtcctgtggacagagagcagggacgttggggatgggttccgctgcattaggatggtcaacaacatctacctgaactttgatgctttacatggagacaaggaccatggtggtgtgcgcgacggggacggcccttgtgctgtgggagtggtgcgagggagacaaccagcgctggaagattgttccctggtgaacaaggaaatgtgtgaccgagcccgcaccaaggaggagctcctgccgttataagtgaagtgattggtactgaagtttctggaaataagaggctcttctgagatgcctgtttgtgtgagtatttgcgtttccattccgttttcatgataataaaacgcattgattattaatatatgtaatgtgatgctacactgagtggcagcgttggtatatatttgtaagaattaagaacccattgttgttgg

SEQ ID NO: 8615 - protein, 194 aa, Zea mays subsp. mays
  peptide (1)..(194): Ceres Seq. ID no. 12407608
  misc_feature (29)..(157): Pfam Name: Dehydrin Pfam Description: Dehydrin
  misc_feature (14)..(85): Homolog of NCBI NO: 18404934 NR Description: expressed protein; protein id: At2g39050.1, by cDNA: 39558., supported by cDNA: gi_15724196, supported by gi_20147402 [Arabidopsis thaliana]
  misc_feature (14)..(85): Homolog of NCBI NO: 25408635 NR Description: hypothetical protein At2g39050 [imported] -
  misc_feature (10)..(80): Homolog of NCBI NO: 34894060 NR Description: putative r40c1 protein [Oryza sativa (japonica group)] >gi|10697200|dbj|BAB16331.1| putative r40c1 protein
DPFPTRSPIMEFPHHHHHHGHRRDDDEDDRRGPPPPVYGGYGQPPPPDPYGRAPVDPDPYGRPPPQSAYGGAGDAYGHSGPRLRAPAGLRRRGRVRQRRPRRARGRRREALLRRRRRRSWWRLRRRWLRVRPRGPTAPRRRRIPVRPRDTPAPRRRGRRPACEAADVQDLLQGWGGPVQPRLPRRQGLPRAHGP

SEQ ID NO: 8616 - protein, 185 aa, Zea mays subsp. mays
  peptide (1)..(185): Ceres Seq. ID no. 12407609
  misc_feature (20)..(148): Pfam Name: Dehydrin Pfam Description: Dehydrin
  misc_feature (5)..(76): Homolog of NCBI NO: 18404934 NR Description: expressed protein; protein id: At2g39050.1, by cDNA: 39558., supported by cDNA: gi_15724196, supported by gi_20147402 [Arabidopsis thaliana]
  misc_feature (5)..(76): Homolog of NCBI NO: 25408635 NR Description: hypothetical protein At2g39050 [imported] -
  misc_feature (1)..(71): Homolog of NCBI NO: 34894060 NR Description: putative r40c1 protein [Oryza sativa (japonica group)] >gi|10697200|dbj|BAB16331.1| putative r40c1 protein
MEFPHHHHHHGHRRDDDEDDRRGPPPPVYGGYGQPPPPDPYGRAPVDPDPYGRPPPQSAYGGAGDAYGHSGPRLRAPAGLRRRGRVRQRRPRRARGRRREALLRRRRRRSWWRLRRRWLRVRPRGPTAPRRRRIPVRPRDTPAPRRRGRRPACEAADVQDLLQGWGGPVQPRLPRRQGLPRAHGP

SEQ ID NO: 8617 - protein, 162 aa, Zea mays subsp. mays
  peptide (1)..(162): Ceres Seq. ID no. 12407610
  misc_feature (94)..(162): Pfam Name: Equine herpesvirus glycoprotein gp2 Pfam Description: Equine herpesvirus glycoprotein gp2
  misc_feature (94)..(162): Homolog of NCBI NO: 11278206 NR Description: membrane glycoprotein [imported] - equine
  misc_feature (81)..(162): Homolog of NCBI NO: 17221102 NR Description: glycoprotein gp2 [Equine herpesvirus 1]
  misc_feature (90)..(162): Homolog of NCBI NO: 11360308 NR Description: mucin MUC5B, tracheobronchial [imported] - human
  misc_feature (90)..(162): Homolog of NCBI NO: 23821885 NR Description: Mucin 5B precursor (Mucin 5 subtype B, (High molecular weight salivary mucin MG1) (Sublingual gland
  misc_feature (83)..(162): Homolog of NCBI NO: 17384256 NR Description: mucin 5 [Homo sapiens]
  misc_feature (83)..(162): Homolog of NCBI NO: 17221102 NR Description: glycoprotein gp2 [Equine herpesvirus 1]
  misc_feature (44)..(162): Homolog of NCBI NO: 11278206 NR Description: membrane glycoprotein [imported] - equine
  misc_feature (44)..(162): Homolog of NCBI NO: 17221116 NR Description: glycoprotein gp2 [Equine herpesvirus 1]
  misc_feature (44)..(162): Homolog of NCBI NO: 17221102 NR Description: glycoprotein gp2 [Equine herpesvirus 1]
  misc_feature (44)..(162): Homolog of NCBI NO: 11278205 NR Description: membrane glycoprotein [imported] - equine
RSISHSIANNGVSAPPPPPRPSPRRRRRRPQRPASPGLRRLRPATATRPVRPRARRPRSVRSTSAPVRVRWGRGRLRPQRAKATRPRRPTAPGAGTATSSTSRTRSATRGLTTAAAAAVLVAPTEAVAPSTATRADRTTAAADPSTATRHARTTAAGAAPRL

SEQ ID NO: 8618 - protein, 130 aa, Zea mays subsp. mays
  peptide (1)..(130): Ceres Seq. ID no. 12407611
  misc_feature (1)..(91): Homolog of NCBI NO: 34894060 NR Description: putative r40c1 protein [Oryza sativa (japonica group)] >gi|10697200|dbj|BAB16331.1| putative r40c1 protein
  misc_feature (1)..(91): Homolog of NCBI NO: 18404934 NR Description: expressed protein; protein id: At2g39050.1, by cDNA: 39558., supported by cDNA: gi_15724196, supported by gi_20147402 [Arabidopsis thaliana]
  misc_feature (1)..(91): Homolog of NCBI NO: 25408635 NR Description: hypothetical protein At2g39050 [imported] -
  misc_feature (1)..(91): Homolog of NCBI NO: 7489573 NR Description: r40g3 protein - rice >gi|1658315|emb|CAA70175.1|
  misc_feature (1)..(91): Homolog of NCBI NO: 7489571 NR Description: r40c1 protein - rice >gi|1296955|emb|CAA64683.1|
  misc_feature (1)..(91): Homolog of NCBI NO: 34902150 NR Description: Putative r40c1 protein - rice [Oryza sativa
  misc_feature (1)..(91): Homolog of NCBI NO: 7489571 NR Description: r40c1 protein - rice >gi|1296955|emb|CAA64683.1|
  misc_feature (1)..(91): Homolog of NCBI NO: 34902150 NR Description: Putative r40c1 protein - rice [Oryza sativa
  misc_feature (1)..(91): Homolog of NCBI NO: 34394517 NR Description: r40g2 protein [Oryza sativa (japonica
  misc_feature (1)..(91): Homolog of NCBI NO: 34394518 NR Description: putative r40c2 protein [Oryza sativa (japonica
MKYSTRVKDEEGYPAIVLVNKATGEALKHSLGQSHPVLLTRHNPDSLDESVLWTESRDVGDGFRCIRMVNNIYLNFDALHGDKDHGGVRDGDGPCAVGVVRGRQPALEDCSLVNKEMCDRARTKEELLPL

SEQ ID NO: 8619 - DNA, 1783 bp, Zea mays subsp. mays
  misc_feature (1)..(1783): Ceres Seq. ID no. 12350029
  misc_feature: MA Experiment ID: 108527 Result: Down-regulated in Transcription
  misc_feature: MA Experiment 108527 PARAMETER Experiment Name: Zm_5mM_NO_P Parameter: Age (day) Value: 8
  misc_feature: MA Experiment 108527 PARAMETER Experiment Name: Zm_5mM_NO_P Parameter: Organism Value: Zea mays
  misc_feature: MA Experiment 108527 PARAMETER Experiment Name: Zm_5mM_NO_P Parameter: Plant Line Value: 35A19
  misc_feature: MA Experiment 108527 PARAMETER Experiment Name: Zm_5mM_NO_P Parameter: Timepoint (hr) Value: 6
  misc_feature: MA Experiment 108527 PARAMETER Experiment Name: Zm_5mM_NO_P Parameter: Tissue Value: Aerial
  misc_feature: MA Experiment 108527 PARAMETER Experiment Name: Zm_5mM_NO_P Parameter: Treatment Value: 5mM NO vs. No Treatment
  misc_feature: MA Experiment ID: 20000477 Result: Up-regulated in Transcription
  misc_feature: MA Experiment 20000477 PARAMETER Experiment Name: Zm_5mM_SA_P Parameter: Age (day) Value: 10
  misc_feature: MA Experiment 20000477 PARAMETER Experiment Name: Zm_5mM_SA_P Parameter: Organism Value: Zea mays
  misc_feature: MA Experiment 20000477 PARAMETER Experiment Name: Zm_5mM_SA_P Parameter: Plant Line Value: 35A19
  misc_feature: MA Experiment 20000477 PARAMETER Experiment Name: Zm_5mM_SA_P Parameter: Timepoint (hr) Value: 48
  misc_feature: MA Experiment 20000477 PARAMETER Experiment Name: Zm_5mM_SA_P Parameter: Tissue Value: Aerial
  misc_feature: MA Experiment 20000477 PARAMETER Experiment Name: Zm_5mM_SA_P Parameter: Treatment Value: 5mM SA vs. No Treatment
  misc_feature: MA Experiment ID: 20000478 Result: Up-regulated in Transcription
  misc_feature: MA Experiment 20000478 PARAMETER Experiment Name: Zm_5mM_SA_P Parameter: Age (day) Value: 11
  misc_feature: MA Experiment 20000478 PARAMETER Experiment Name: Zm_5mM_SA_P Parameter: Organism Value: Zea mays
  misc_feature: MA Experiment 20000478 PARAMETER Experiment Name: Zm_5mM_SA_P Parameter: Plant Line Value: 35A19
  misc_feature: MA Experiment 20000478 PARAMETER Experiment Name: Zm_5mM_SA_P Parameter: Timepoint (hr) Value: 72
  misc_feature: MA Experiment 20000478 PARAMETER Experiment Name: Zm_5mM_SA_P Parameter: Tissue Value: Aerial
  misc_feature: MA Experiment 20000478 PARAMETER Experiment Name: Zm_5mM_SA_P Parameter: Treatment Value: 5mM SA vs. No Treatment
  misc_feature: MA Experiment ID: 20000626 Result: Up-regulated in Transcription
  misc_feature: MA Experiment 20000626 PARAMETER Experiment Name: Zm_Herbicide-Treatments_P Parameter: Timepoint (hr) Value: 12
  misc_feature: MA Experiment 20000626 PARAMETER Experiment Name: Zm_Herbicide-Treatments_P Parameter: Tissue Value: Aerial
  misc_feature: MA Experiment 20000626 PARAMETER Experiment Name: Zm_Herbicide-Treatments_P Parameter: Treatment Value: Roundup vs. No Treatment
atgcctcaaggcctccactgtccactcctctcgtacaaccataccagtgctgttcgttgctctgtacgtagctcttctccaactacgtaacgtaactagctagtacgtgtacgtccagcacttggattggatggctcccctgcgactgcgagcgggagcggcggcgccaatggcggcggccgccgccacggtcgtgctggccgccatacttgcgctgttcggctgctgtgccgctgccgcgtccgccgccgccaccgacgtgacggccgcggcagagctggaccgcatcgacaggctgccgggccagcccccggtcaacttctccatgtactccggctacgtcaccgtcgacgccgccgcggggcgggcgctcttctactggctcatggaggcctccggcgtgccggcgggctccgctccgctcgtgctctggctcaacggcgggcccgggtgctcctctcttggctacggcgctatggaggagctcggcgccttccgcgtcaaccccgacggcgccacgctctccttgaatccctacgcctggaacaatgtggcgaatgtgctgttcttggactcgccggccggcgttggctactcctacaccaacaccaccgacgacctgtacgctgctggtgacaacaagacagctcatgactcatatgctttcttgataaattggttggaacggttcccacagtacaagcatcgtgatttctacatcactggagagagctatggaggccactatgtccctcaattgtcttggttagtgtaccaaaacaacaaaggaattaagaatccaaccttaaacttcaaaggcttcatggttggaaatgcggtaattgacgattaccatgactacatgggcacatttgagtattggtggacacatgggcttatctccgatgaaacttatgcaaagttgtgggaggattgtaaaaatgatgtgtctgagaacccctccgaggaatgccaaaagatttatgaggttgctgaggctgagcaagggaatattgatttgtatagcatctacacacctacttgtaagaagacttcattgcaaaagcgcagactaataaggggaagaatgccctggctgccgagaggatacgatccttgcaccgagctgtacatcacgaagtactgcaacttgcccgaggtgcaggacgccttccatgccaatgttactggaataccatacgcctgggtgggctgcagtgacccaatatatgagtactggaaggattcgccgaggtccatgcttccgatctaccgtgaactcatctcggcaggcctaaggatatgggtcttcagcggcgacaccgactccgtcgtgcccctcacggcgacgaggtactccatcgacgcgctgtctctgccaacgatcaccaagtggtacccttggtactacgacgaagaggttggtggatggtgccaggtgtacgagggcctgacgctggtgacggtccgaggcgcggggcacgaggtccccctccaccgtccgccgcagggcctcaagctgttcgagcacttcctgcggggcgagcccatgcccaagcctgtcgagagcgtccagtcgttctagatgagcttgctgccgcgcttggctagttggctttgatgaatagtaaggccggacatgtggcaagccatctccactccacatttcttcaccacgttttcaataactggcgctggccgaaataataagagcagaacgaataaaatgccgctcgctagaatgatctggctgtgcgtgtttgctttcgagttatttttatat

SEQ ID NO: 8620 - protein, 484 aa, Zea mays subsp. mays
  peptide (1)..(484): Ceres Seq. ID no. 12350030
  misc_feature (17)..(477): Homolog of NCBI NO: 34895992 NR Description: putative carboxypeptidase D [Oryza sativa
  misc_feature (24)..(475): Homolog of NCBI NO: 34908012 NR Description: putative carboxypeptidase D [Oryza sativa
  misc_feature (13)..(475): Homolog of NCBI NO: 20455471 NR Description: Serine carboxypeptidase II precursor
  misc_feature (13)..(475): Homolog of NCBI NO: 7428204 NR Description: carboxypeptidase D (EC 3.4.16.6) precursor -
  misc_feature (51)..(475): Homolog of NCBI NO: 7428205 NR Description: carboxypeptidase D (EC 3.4.16.6) - wheat
  misc_feature (32)..(475): Homolog of NCBI NO: 15231911 NR Description: putative serine carboxypeptidase II; protein id: [Arabidopsis thaliana] >gi|6648211|gb|AAF21209.1|AC013483_33
  misc_feature (49)..(475): Homolog of NCBI NO: 15227493 NR Description: putative serine carboxypeptidase II; protein id:
  misc_feature (163)..(484): Homolog of NCBI NO: 2493493 NR Description: Serine carboxypeptidase II-1 precursor (CP-MII.1)
  misc_feature (49)..(476): Homolog of NCBI NO: 13877871 NR Description: putative serine carboxypeptidase II [Arabidopsis
  misc_feature (49)..(476): Homolog of NCBI NO: 15234795 NR Description: SERINE CARBOXYPEPTIDASE II-like protein; protein At4g30610.1, supported by cDNA: gi_13877870 [Arabidopsis
MAPLRLRAGAAAPMAAAAATVVLAAILALFGCCAAAASAAATDVTAAAELDRIDRLPGQPPVNFSMYSGYVTVDAAAGRALFYWLMEASGVPAGSAPLVLWLNGGPGCSSLGYGAMEELGAFRVNPDGATLSLNPYAWNNVANVLFLDSPAGVGYSYTNTTDDLYAAGDNKTAHDSYAFLINWLERFPQYKHRDFYITGESYGGHYVPQLSWLVYQNNKGIKNPTLNFKGFMVGNAVIDDYHDYMGTFEYWWTHGLISDETYAKLWEDCKNDVSENPSEECQKIYEVAEAEQGNIDLYSIYTPTCKKTSLQKRRLIRGRMPWLPRGYDPCTELYITKYCNLPEVQDAFHANVTGIPYAWVGCSDPIYEYWKDSPRSMLPIYRELISAGLRIWVFSGDTDSVVPLTATRYSIDALSLPTITKWYPWYYDEEVGGWCQVYEGLTLVTVRGAGHEVPLHRPPQGLKLFEHFLRGEPMPKPVESVQSF

SEQ ID NO: 8621 - protein, 471 aa, Zea mays subsp. mays
  peptide (1)..(471): Ceres Seq. ID no. 12350031
  misc_feature (4)..(464): Homolog of NCBI NO: 34895992 NR Description: putative carboxypeptidase D [Oryza sativa
  misc_feature (11)..(462): Homolog of NCBI NO: 34908012 NR Description: putative carboxypeptidase D [Oryza sativa
  misc_feature (1)..(462): Homolog of NCBI NO: 20455471 NR Description: Serine carboxypeptidase II precursor
  misc_feature (1)..(462): Homolog of NCBI NO: 7428204 NR Description: carboxypeptidase D (EC 3.4.16.6) precursor -
  misc_feature (38)..(462): Homolog of NCBI NO: 7428205 NR Description: carboxypeptidase D (EC 3.4.16.6) - wheat
  misc_feature (19)..(462): Homolog of NCBI NO: 15231911 NR Description: putative serine carboxypeptidase II; protein id: [Arabidopsis thaliana] >gi|6648211|gb|AAF21209.1|AC013483_33
  misc_feature (36)..(462): Homolog of NCBI NO: 15227493 NR Description: putative serine carboxypeptidase II; protein id:
  misc_feature (150)..(471): Homolog of NCBI NO: 2493493 NR Description: Serine carboxypeptidase II-1 precursor (CP-MII.1)
  misc_feature (36)..(463): Homolog of NCBI NO: 13877871 NR Description: putative serine carboxypeptidase II [Arabidopsis
  misc_feature (36)..(463): Homolog of NCBI NO: 15234795 NR Description: SERINE CARBOXYPEPTIDASE II-like protein; protein At4g30610.1, supported by cDNA: gi_13877870 [Arabidopsis
MAAAAATVVLAAILALFGCCAAAASAAATDVTAAAELDRIDRLPGQPPVNFSMYSGYVTVDAAAGRALFYWLMEASGVPAGSAPLVLWLNGGPGCSSLGYGAMEELGAFRVNPDGATLSLNPYAWNNVANVLFLDSPAGVGYSYTNTTDDLYAAGDNKTAHDSYAFLINWLERFPQYKHRDFYITGESYGGHYVPQLSWLVYQNNKGIKNPTLNFKGFMVGNAVIDDYHDYMGTFEYWWTHGLISDETYAKLWEDCKNDVSENPSEECQKIYEVAEAEQGNIDLYSIYTPTCKKTSLQKRRLIRGRMPWLPRGYDPCTELYITKYCNLPEVQDAFHANVTGIPYAWVGCSDPIYEYWKDSPRSMLPIYRELISAGLRIWVFSGDTDSVVPLTATRYSIDALSLPTITKWYPWYYDEEVGGWCQVYEGLTLVTVRGAGHEVPLHRPPQGLKLFEHFLRGEPMPKPVESVQSF

SEQ ID NO: 8622 - protein, 419 aa, Zea mays subsp. mays
  peptide (1)..(419): Ceres Seq. ID no. 12350032
  misc_feature (1)..(412): Homolog of NCBI NO: 34895992 NR Description: putative carboxypeptidase D [Oryza sativa
  misc_feature (1)..(410): Homolog of NCBI NO: 34908012 NR Description: putative carboxypeptidase D [Oryza sativa
  misc_feature (1)..(410): Homolog of NCBI NO: 20455471 NR Description: Serine carboxypeptidase II precursor
  misc_feature (1)..(410): Homolog of NCBI NO: 7428204 NR Description: carboxypeptidase D (EC 3.4.16.6) precursor -
  misc_feature (1)..(410): Homolog of NCBI NO: 7428205 NR Description: carboxypeptidase D (EC 3.4.16.6) - wheat
  misc_feature (1)..(410): Homolog of NCBI NO: 15231911 NR Description: putative serine carboxypeptidase II; protein id: [Arabidopsis thaliana] >gi|6648211|gb|AAF21209.1|AC013483_33
  misc_feature (1)..(410): Homolog of NCBI NO: 15227493 NR Description: putative serine carboxypeptidase II; protein id:
  misc_feature (98)..(419): Homolog of NCBI NO: 2493493 NR Description: Serine carboxypeptidase II-1 precursor (CP-MII.1)
  misc_feature (1)..(411): Homolog of NCBI NO: 13877871 NR Description: putative serine carboxypeptidase II [Arabidopsis
  misc_feature (1)..(411): Homolog of NCBI NO: 15234795 NR Description: SERINE CARBOXYPEPTIDASE II-like protein; protein At4g30610.1, supported by cDNA: gi_13877870 [Arabidopsis
MYSGYVTVDAAAGRALFYWLMEASGVPAGSAPLVLWLNGGPGCSSLGYGAMEELGAFRVNPDGATLSLNPYAWNNVANVLFLDSPAGVGYSYTNTTDDLYAAGDNKTAHDSYAFLINWLERFPQYKHRDFYITGESYGGHYVPQLSWLVYQNNKGIKNPTLNFKGFMVGNAVIDDYHDYMGTFEYWWTHGLISDETYAKLWEDCKNDVSENPSEECQKIYEVAEAEQGNIDLYSIYTPTCKKTSLQKRRLIRGRMPWLPRGYDPCTELYITKYCNLPEVQDAFHANVTGIPYAWVGCSDPIYEYWKDSPRSMLPIYRELISAGLRIWVFSGDTDSVVPLTATRYSIDALSLPTITKWYPWYYDEEVGGWCQVYEGLTLVTVRGAGHEVPLHRPPQGLKLFEHFLRGEPMPKPVESVQSF

SEQ ID NO: 8623 - DNA, 1246 bp, Zea mays subsp. mays
  misc_feature (1)..(1246): Ceres Seq. ID no. 12343033
  misc_feature: MA Experiment ID: 20000492 Result: Up-regulated in Transcription
  misc_feature: MA Experiment 20000492 PARAMETER Experiment Name: Zm_Hybrid_Seed_Dev_P Parameter: DAP Value: 12
  misc_feature: MA Experiment 20000492 PARAMETER Experiment Name: Zm_Hybrid_Seed_Dev_P Parameter: Organism Value: Zea mays
  misc_feature: MA Experiment 20000492 PARAMETER Experiment Name: Zm_Hybrid_Seed_Dev_P Parameter: Plant Line Value: 35A19
  misc_feature: MA Experiment 20000492 PARAMETER Experiment Name: Zm_Hybrid_Seed_Dev_P Parameter: Tissue Value: Fert Kernel vs. Unfert Floret
  misc_feature: MA Experiment ID: 20000534 Result: Down-regulated in Transcription
  misc_feature: MA Experiment 20000534 PARAMETER Experiment Name: Zm_Hybrid_Pollen_P Parameter: Age (day) Value: 8
  misc_feature: MA Experiment 20000534 PARAMETER Experiment Name: Zm_Hybrid_Pollen_P Parameter: Organism Value: Zea mays
  misc_feature: MA Experiment 20000534 PARAMETER Experiment Name: Zm_Hybrid_Pollen_P Parameter: Plant Line Value: 35A19
  misc_feature: MA Experiment 20000534 PARAMETER Experiment Name: Zm_Hybrid_Pollen_P Parameter: Tissue Value: Pollen vs. Aerial
gttggactctagccatttactgcaagaagccattttctttcttctctagccgccgccgccgccggccggaacctggcgccgagcgcccttctcttcctatccagccgcagctgccagggcgtagtactcctggccggcgtctccctcctctcttcctgcgcattctcctctctggaaaggttttgcaggtttcacacttcttatcatggatgataagaacaaagtcaagaaggaaatagatggcccccttggacccccacctcgcaaggggggacttaaattcgcaccaaaagtacctcagaagaaacctgctaaggttgtcccaaagaaggaaccagttgaagagagaaaggaggatgctttggataaggagttattgatgaaacttaagatgtcgcaaaacaagtatccctcaagaattaagtccgacgaaaagccaagaagtggtacacaggttgcatttggacaaggaaactcttattatgcaagaaattttcccatgcccaaaaaggattcttcagcaggtggagcttcgaagttaccaaaagaatatgcagaaccatgggactatagccatgattatcctgttactctcccactaaggaagccctactctggaaatcctgaaattctggatgaggaagaatttggagaatcttctgccagcaggacccaagatgatgaattatctgcagcagagcagcttggattaatggatatgtcgtcggaatcacagttcctcttcttccagttgccatcctctcttcctttaccgaggcagccacaatcagttgctgaccctaacgaagtccgcgatgagaaacgtgagggcatgaggccatcatcgcacaatggctcgaaactcaaagaggttcctgaaggctatatggggaaaatgctcgtatataagagtggtaaagtgaagatgaagataggagacactctctttgatgtttcatttggctcgaattgcatgttttcccaggaggttgcagcaatcaacatcagagaaaaacattgctgtacggtgggagagatcagcaagcgtgcaatcatcaccccagatattaactacatgttgggttctgttgacaagatggaagaatagtccattggtttctttcgcgcaaaccatatagaccatattatgccattacaagatagttttgctttcttatagagaacgacctgtgatgccctctcagacttcttcaagaaaagatgcctcaaacaaaggaatgtgccg

SEQ ID NO: 8624 - protein, 300 aa, Zea mays subsp. mays
  peptide (1)..(300): Ceres Seq. ID no. 12343034
  misc_feature (183)..(288): Pfam Name: RNA polymerase III RPC4 Pfam Description: RNA polymerase III RPC4
  misc_feature (42)..(299): Homolog of NCBI NO: 21740741 NR Description: OSJNBa0072K14.6 [Oryza sativa (japonica
  misc_feature (17)..(298): Homolog of NCBI NO: 15242400 NR Description: putative protein; protein id: At5g09380.1 thaliana] >gi|9955525|emb|CAC05464.1| putative protein
  misc_feature (115)..(251): Homolog of NCBI NO: 7486060 NR Description: hypothetical protein F24A6.20 - Arabidopsis >gi|4454006|emb|CAA23059.1| hypothetical protein [Arabidopsis >gi|7269368|emb|CAB79427.1| hypothetical protein [Arabidopsis
  misc_feature (115)..(251): Homolog of NCBI NO: 15234965 NR Description: hypothetical protein; protein id: At4g25180.1
  misc_feature (250)..(299): Homolog of NCBI NO: 7486060 NR Description: hypothetical protein F24A6.20 - Arabidopsis >gi|4454006|emb|CAA23059.1| hypothetical protein [Arabidopsis >gi|7269368|emb|CAB79427.1| hypothetical protein [Arabidopsis
  misc_feature (250)..(299): Homolog of NCBI NO: 15234965 NR Description: hypothetical protein; protein id: At4g25180.1
  misc_feature (144)..(292): Homolog of NCBI NO: 34907504 NR Description: B1099D03.22 [Oryza sativa (japonica
  misc_feature (13)..(292): Homolog of NCBI NO: 34874432 NR Description: similar to DNA-directed RNA polymerase III 47 kDa (RNA polymerase C subunit 4) (RPC4) (RPC53) (BN51 protein)
  misc_feature (13)..(292): Homolog of NCBI NO: 12850356 NR Description: unnamed protein product [Mus musculus]
  misc_feature (13)..(292): Homolog of NCBI NO: 31981109 NR Description: polymerase (RNA) III (DNA directed) polypeptide
MDDKNKVKKEIDGPLGPPPRKGGLKFAPKVPQKKPAKVVPKKEPVEERKEDALDKELLMKLKMSQNKYPSRIKSDEKPRSGTQVAFGQGNSYYARNFPMPKKDSSAGGASKLPKEYAEPWDYSHDYPVTLPLRKPYSGNPEILDEEEFGESSASRTQDDELSAAEQLGLMDMSSESQFLFFQLPSSLPLPRQPQSVADPNEVRDEKREGMRPSSHNGSKLKEVPEGYMGKMLVYKSGKVKMKIGDTLFDVSFGSNCMFSQEVAAINIREKHCCTVGEISKRAIITPDINYMLGSVDKMEE

SEQ ID NO: 8625 - protein, 242 aa, Zea mays subsp. mays
  peptide (1)..(242): Ceres Seq. ID no. 12343035
  misc_feature (125)..(230): Pfam Name: RNA polymerase III RPC4 Pfam Description: RNA polymerase III RPC4
  misc_feature (1)..(241): Homolog of NCBI NO: 21740741 NR Description: OSJNBa0072K14.6 [Oryza sativa (japonica
  misc_feature (1)..(240): Homolog of NCBI NO: 15242400 NR Description: putative protein; protein id: At5g09380.1 thaliana] >gi|9955525|emb|CAC05464.1| putative protein
  misc_feature (57)..(193): Homolog of NCBI NO: 7486060 NR Description: hypothetical protein F24A6.20 - Arabidopsis >gi|4454006|emb|CAA23059.1| hypothetical protein [Arabidopsis >gi|7269368|emb|CAB79427.1| hypothetical protein [Arabidopsis
  misc_feature (57)..(193): Homolog of NCBI NO: 15234965 NR Description: hypothetical protein; protein id: At4g25180.1
  misc_feature (192)..(241): Homolog of NCBI NO: 7486060 NR Description: hypothetical protein F24A6.20 - Arabidopsis >gi|4454006|emb|CAA23059.1| hypothetical protein [Arabidopsis >gi|7269368|emb|CAB79427.1| hypothetical protein [Arabidopsis
  misc_feature (192)..(241): Homolog of NCBI NO: 15234965 NR Description: hypothetical protein; protein id: At4g25180.1
  misc_feature (86)..(234): Homolog of NCBI NO: 34907504 NR Description: B1099D03.22 [Oryza sativa (japonica
  misc_feature (1)..(234): Homolog of NCBI NO: 34874432 NR Description: similar to DNA-directed RNA polymerase III 47 kDa (RNA polymerase C subunit 4) (RPC4) (RPC53) (BN51 protein)
  misc_feature (1)..(234): Homolog of NCBI NO: 12850356 NR Description: unnamed protein product [Mus musculus]
  misc_feature (1)..(234): Homolog of NCBI NO: 31981109 NR Description: polymerase (RNA) III (DNA directed) polypeptide
MKLKMSQNKYPSRIKSDEKPRSGTQVAFGQGNSYYARNFPMPKKDSSAGGASKLPKEYAEPWDYSHDYPVTLPLRKPYSGNPEILDEEEFGESSASRTQDDELSAAEQLGLMDMSSESQFLFFQLPSSLPLPRQPQSVADPNEVRDEKREGMRPSSHNGSKLKEVPEGYMGKMLVYKSGKVKMKIGDTLFDVSFGSNCMFSQEVAAINIREKHCCTVGEISKRAIITPDINYMLGSVDKMEE

SEQ ID NO: 8626 - protein, 238 aa, Zea mays subsp. mays
  peptide (1)..(238): Ceres Seq. ID no. 12343036
  misc_feature (121)..(226): Pfam Name: RNA polymerase III RPC4 Pfam Description: RNA polymerase III RPC4
  misc_feature (53)..(189): Homolog of NCBI NO: 7486060 NR Description: hypothetical protein F24A6.20 - Arabidopsis >gi|4454006|emb|CAA23059.1| hypothetical protein [Arabidopsis >gi|7269368|emb|CAB79427.1| hypothetical protein [Arabidopsis
  misc_feature (53)..(189): Homolog of NCBI NO: 15234965 NR Description: hypothetical protein; protein id: At4g25180.1
  misc_feature (188)..(237): Homolog of NCBI NO: 7486060 NR Description: hypothetical protein F24A6.20 - Arabidopsis >gi|4454006|emb|CAA23059.1| hypothetical protein [Arabidopsis >gi|7269368|emb|CAB79427.1| hypothetical protein [Arabidopsis
  misc_feature (188)..(237): Homolog of NCBI NO: 15234965 NR Description: hypothetical protein; protein id: At4g25180.1
  misc_feature (1)..(237): Homolog of NCBI NO: 21740741 NR Description: OSJNBa0072K14.6 [Oryza sativa (japonica
  misc_feature (1)..(236): Homolog of NCBI NO: 15242400 NR Description: putative protein; protein id: At5g09380.1 thaliana] >gi|9955525|emb|CAC05464.1| putative protein
  misc_feature (82)..(230): Homolog of NCBI NO: 34907504 NR Description: B1099D03.22 [Oryza sativa (japonica
  misc_feature (1)..(230): Homolog of NCBI NO: 34874432 NR Description: similar to DNA-directed RNA polymerase III 47 kDa (RNA polymerase C subunit 4) (RPC4) (RPC53) (BN51 protein)
  misc_feature (1)..(230): Homolog of NCBI NO: 12850356 NR Description: unnamed protein product [Mus musculus]
  misc_feature (1)..(230): Homolog of NCBI NO: 31981109 NR Description: polymerase (RNA) III (DNA directed) polypeptide
MSQNKYPSRIKSDEKPRSGTQVAFGQGNSYYARNFPMPKKDSSAGGASKLPKEYAEPWDYSHDYPVTLPLRKPYSGNPEILDEEEFGESSASRTQDDELSAAEQLGLMDMSSESQFLFFQLPSSLPLPRQPQSVADPNEVRDEKREGMRPSSHNGSKLKEVPEGYMGKMLVYKSGKVKMKIGDTLFDVSFGSNCMFSQEVAAINIREKHCCTVGEISKRAIITPDINYMLGSVDKMEE

SEQ ID NO: 8627 - DNA, 1254 bp, Zea mays subsp. mays
  misc_feature (1)..(1254): Ceres Seq. ID no. 12402364
  misc_feature: MA Experiment ID: 108527 Result: Down-regulated in Transcription
  misc_feature: MA Experiment 108527 PARAMETER Experiment Name: Zm_5mM_NO_P Parameter: Age (day) Value: 8
  misc_feature: MA Experiment 108527 PARAMETER Experiment Name: Zm_5mM_NO_P Parameter: Organism Value: Zea mays
  misc_feature: MA Experiment 108527 PARAMETER Experiment Name: Zm_5mM_NO_P Parameter: Plant Line Value: 35A19
  misc_feature: MA Experiment 108527 PARAMETER Experiment Name: Zm_5mM_NO_P Parameter: Timepoint (hr) Value: 6
  misc_feature: MA Experiment 108527 PARAMETER Experiment Name: Zm_5mM_NO_P Parameter: Tissue Value: Aerial
  misc_feature: MA Experiment 108527 PARAMETER Experiment Name: Zm_5mM_NO_P Parameter: Treatment Value: 5mM NO vs. No Treatment
  misc_feature: MA Experiment ID: 108535 Result: Up-regulated in Transcription
  misc_feature: MA Experiment 108535 PARAMETER Experiment Name: Zm_Meristem_P Parameter: Age (day) Value: 8
  misc_feature: MA Experiment 108535 PARAMETER Experiment Name: Zm_Meristem_P Parameter: Organism Value: Zea mays
  misc_feature: MA Experiment 108535 PARAMETER Experiment Name: Zm_Meristem_P Parameter: Plant Line Value: 35A19
  misc_feature: MA Experiment 108535 PARAMETER Experiment Name: Zm_Meristem_P Parameter: Tissue Value: Root Meristem vs. Above Root Meristem
  misc_feature: MA Experiment ID: 108543 Result: Down-regulated in Transcription
gcacgagaccattacctagaacatcctaatcaaaaataacggaacgtcgtccagatctcgatcggccggtggccgccgtggtcagtaaggcaggcatggcatccgaggtagccggcctcgccgtggtctcggccgccgcgtccgtggccctggtctacgctcgtctcgccacctcgcggctggctcccggcaccccccgcctcgcggcgctgctcccggtgctcctactcctcccagtcctccccttcgccttctcctccatccacctccgcaccgtctccgccttcttcctcgtctggctctgcggcttcaagctcctcctcctcgccgcggggcacgacgggccgctccaccccgccctcccgctcgtgcgcttcgtcgcgtgcgccgcgctgcccatcaaggtccgggacgagaacgacaagcagcagcaaactcggataccccgctcctctctcccttcgggattcctgctgtcctacgcggccaaggcggcgctcttctccgcgctcgtctccgtccggtgctacagggcgcggatgcccgcgtacgccgtgcccgtgttcgacggcgcgcacgtgtacctcatgctggagctcttcctcgcgtccgccgcggcgctcgcgcgcgcgctgctgggcgcggagctggagccgcagttcgaccggccgtacctcgcttcctccctgcgcgacttctggggccggcggtggaacctcatggtccccggcgtgctccggccctgcgtgtaccgccccgtgcgcgcccgcttcggcgccgccgcgggcgtgctcgcggcgttcctcgtgtccggggccatgcacgaggtcatgttctactacatcacgctggaggccgggaccggggaggtgaccgcgttcttcgcgctgcacggcgcgtgcgcggtggccgagcggtggatggcgcggcagggcggcatgtggcggccgccgcggcccgtcgcgacggcgctgacgctggcgttcgtgacggggacggggtcgtggctattctttgcgcccgtgatccgaagccggctggacgaggccatcatcgcagagtgcgaggggatgcttgcgttcttggagcgcgctggccggaatctagccgcgatggcacatttcatttgaacctctgtaaggtagagttatttggaaccgtgatactcccaacactgggcttctgaaaatcagtatcccgaacagagcaattgtaattttagtattataattcatagaacttcagatttctggt

SEQ ID NO: 8628 - protein, 344 aa, Zea mays subsp. mays
  peptide (1)..(344): Ceres Seq. ID no. 12402365
  misc_feature (29)..(312): Pfam Name: MBOAT family Pfam Description: MBOAT family
  misc_feature (19)..(344): Homolog of NCBI NO: 28812087 NR Description: putative wax synthase protein [Oryza sativa
  misc_feature (4)..(342): Homolog of NCBI NO: 38345254 NR Description: OSJNBb0011N17.15 [Oryza sativa (japonica
  misc_feature (8)..(339): Homolog of NCBI NO: 38345253 NR Description: OSJNBb0011N17.14 [Oryza sativa (japonica
  misc_feature (8)..(337): Homolog of NCBI NO: 38347115 NR Description: OSJNBa0009K15.12 [Oryza sativa (japonica
  misc_feature (1)..(337): Homolog of NCBI NO: 34911838 NR Description: wax synthase-like protein [Oryza sativa (japonica
  misc_feature (3)..(331): Homolog of NCBI NO: 27728714 NR Description: wax synthase isoform 1 [Vitis vinifera]
  misc_feature (3)..(331): Homolog of NCBI NO: 27728716 NR Description: wax synthase isoform 2 [Vitis vinifera]
  misc_feature (1)..(323): Homolog of NCBI NO: 15240500 NR Description: wax synthase-like protein; protein id:
  misc_feature (4)..(332): Homolog of NCBI NO: 11362836 NR Description: wax synthase [imported] - Simmondsia chinensis
  misc_feature (1)..(332): Homolog of NCBI NO: 15240496 NR Description: putative protein; protein id: At5g55340.1, by cDNA: 115917. [Arabidopsis thaliana] contains similarity to wax synthase~gene_id:MTE17.5 [Arabidopsis
MASEVAGLAVVSAAASVALVYARLATSRLAPGTPRLAALLPVLLLLPVLPFAFSSIHLRTVSAFFLVWLCGFKLLLLAAGHDGPLHPALPLVRFVACAALPIKVRDENDKQQQTRIPRSSLPSGFLLSYAAKAALFSALVSVRCYRARMPAYAVPVFDGAHVYLMLELFLASAAALARALLGAELEPQFDRPYLASSLRDFWGRRWNLMVPGVLRPCVYRPVRARFGAAAGVLAAFLVSGAMHEVMFYYITLEAGTGEVTAFFALHGACAVAERWMARQGGMWRPPRPVATALTLAFVTGTGSWLFFAPVIRSRLDEAIIAECEGMLAFLERAGRNLAAMAHFI

SEQ ID NO: 8629 - protein, 196 aa, Zea mays subsp. mays
  peptide (1)..(196): Ceres Seq. ID no. 12402366
  misc_feature (1)..(164): Pfam Name: MBOAT family Pfam Description: MBOAT family
  misc_feature (1)..(196): Homolog of NCBI NO: 28812087 NR Description: putative wax synthase protein [Oryza sativa
  misc_feature (1)..(194): Homolog of NCBI NO: 38345254 NR Description: OSJNBb0011N17.15 [Oryza sativa (japonica
  misc_feature (1)..(191): Homolog of NCBI NO: 38345253 NR Description: OSJNBb0011N17.14 [Oryza sativa (japonica
  misc_feature (1)..(189): Homolog of NCBI NO: 38347115 NR Description: OSJNBa0009K15.12 [Oryza sativa (japonica
  misc_feature (1)..(189): Homolog of NCBI NO: 34911838 NR Description: wax synthase-like protein [Oryza sativa (japonica
  misc_feature (1)..(183): Homolog of NCBI NO: 27728714 NR Description: wax synthase isoform 1 [Vitis vinifera]
  misc_feature (1)..(183): Homolog of NCBI NO: 27728716 NR Description: wax synthase isoform 2 [Vitis vinifera]
  misc_feature (1)..(175): Homolog of NCBI NO: 15240500 NR Description: wax synthase-like protein; protein id:
  misc_feature (1)..(184): Homolog of NCBI NO: 11362836 NR Description: wax synthase [imported] - Simmondsia chinensis
  misc_feature (1)..(184): Homolog of NCBI NO: 15240496 NR Description: putative protein; protein id: At5g55340.1, by cDNA: 115917. [Arabidopsis thaliana] contains similarity to wax synthase~gene_id:MTE17.5 [Arabidopsis
MPAYAVPVFDGAHVYLMLELFLASAAALARALLGAELEPQFDRPYLASSLRDFWGRRWNLMVPGVLRPCVYRPVRARFGAAAGVLAAFLVSGAMHEVMFYYITLEAGTGEVTAFFALHGACAVAERWMARQGGMWRPPRPVATALTLAFVTGTGSWLFFAPVIRSRLDEAIIAECEGMLAFLERAGRNLAAMAHFI

SEQ ID NO: 8630 - protein, 180 aa, Zea mays subsp. mays
  peptide (1)..(180): Ceres Seq. ID no. 12402367
  misc_feature (1)..(148): Pfam Name: MBOAT family Pfam Description: MBOAT family
  misc_feature (1)..(180): Homolog of NCBI NO: 28812087 NR Description: putative wax synthase protein [Oryza sativa
  misc_feature (1)..(178): Homolog of NCBI NO: 38345254 NR Description: OSJNBb0011N17.15 [Oryza sativa (japonica
  misc_feature (1)..(175): Homolog of NCBI NO: 38345253 NR Description: OSJNBb0011N17.14 [Oryza sativa (japonica
  misc_feature (1)..(173): Homolog of NCBI NO: 38347115 NR Description: OSJNBa0009K15.12 [Oryza sativa (japonica
  misc_feature (1)..(173): Homolog of NCBI NO: 34911838 NR Description: wax synthase-like protein [Oryza sativa (japonica
  misc_feature (1)..(167): Homolog of NCBI NO: 27728714 NR Description: wax synthase isoform 1 [Vitis vinifera]
  misc_feature (1)..(167): Homolog of NCBI NO: 27728716 NR Description: wax synthase isoform 2 [Vitis vinifera]
  misc_feature (1)..(159): Homolog of NCBI NO: 15240500 NR Description: wax synthase-like protein; protein id:
  misc_feature (1)..(168): Homolog of NCBI NO: 11362836 NR Description: wax synthase [imported] - Simmondsia chinensis
  misc_feature (1)..(168): Homolog of NCBI NO: 15240496 NR Description: putative protein; protein id: At5g55340.1, by cDNA: 115917. [Arabidopsis thaliana] contains similarity to wax synthase~gene_id:MTE17.5 [Arabidopsis
MLELFLASAAALARALLGAELEPQFDRPYLASSLRDFWGRRWNLMVPGVLRPCVYRPVRARFGAAAGVLAAFLVSGAMHEVMFYYITLEAGTGEVTAFFALHGACAVAERWMARQGGMWRPPRPVATALTLAFVTGTGSWLFFAPVIRSRLDEAIIAECEGMLAFLERAGRNLAAMAHFI

SEQ ID NO: 8631 - DNA, 1534 bp, Zea mays subsp. mays
  misc_feature (1)..(1534): Ceres Seq. ID no. 12373172
  misc_feature: MA Experiment ID: 108527 Result: Up-regulated in Transcription
  misc_feature: MA Experiment 108527 PARAMETER Experiment Name: Zm_5mM_NO_P Parameter: Age (day) Value: 8
  misc_feature: MA Experiment 108527 PARAMETER Experiment Name: Zm_5mM_NO_P Parameter: Organism Value: Zea mays
  misc_feature: MA Experiment 108527 PARAMETER Experiment Name: Zm_5mM_NO_P Parameter: Plant Line Value: 35A19
  misc_feature: MA Experiment 108527 PARAMETER Experiment Name: Zm_5mM_NO_P Parameter: Timepoint (hr) Value: 6
  misc_feature: MA Experiment 108527 PARAMETER Experiment Name: Zm_5mM_NO_P Parameter: Tissue Value: Aerial
  misc_feature: MA Experiment 108527 PARAMETER Experiment Name: Zm_5mM_NO_P Parameter: Treatment Value: 5mM NO vs. No Treatment
  misc_feature: MA Experiment ID: 108529 Result: Up-regulated in Transcription
  misc_feature: MA Experiment 108529 PARAMETER Experiment Name: Zm_Imbibed_Seeds_P Parameter: Age (day) Value: 5 vs. 2
  misc_feature: MA Experiment 108529 PARAMETER Experiment Name: Zm_Imbibed_Seeds_P Parameter: Organism Value: Zea mays
  misc_feature: MA Experiment 108529 PARAMETER Experiment Name: Zm_Imbibed_Seeds_P Parameter: Plant Line Value: 35A19
  misc_feature: MA Experiment 108529 PARAMETER Experiment Name: Zm_Imbibed_Seeds_P Parameter: Tissue Value: Roots vs. Embryo
  misc_feature: MA Experiment ID: 108534 Result: Up-regulated in Transcription
  misc_feature: MA Experiment 108534 PARAMETER Experiment Name: Zm_4deg_Cold_P Parameter: Age (hr) Value: 8
  misc_feature: MA Experiment 108534 PARAMETER Experiment Name: Zm_4deg_Cold_P Parameter: Organism Value: Zea mays
  misc_feature: MA Experiment 108534 PARAMETER Experiment Name: Zm_4deg_Cold_P Parameter: Plant Line Value: 35A19
  misc_feature: MA Experiment 108534 PARAMETER Experiment Name: Zm_4deg_Cold_P Parameter: Temperature (deg C) Value: 4 vs. 22
  misc_feature: MA Experiment 108534 PARAMETER Experiment Name: Zm_4deg_Cold_P Parameter: Timepoint (hr) Value: 6
  misc_feature: MA Experiment 108534 PARAMETER Experiment Name: Zm_4deg_Cold_P Parameter: Tissue Value: Aerial
  misc_feature: MA Experiment ID: 108535 Result: Down-regulated in Transcription
  misc_feature: MA Experiment 108535 PARAMETER Experiment Name: Zm_Meristem_P Parameter: Age (day) Value: 8
  misc_feature: MA Experiment 108535 PARAMETER Experiment Name: Zm_Meristem_P Parameter: Organism Value: Zea mays
  misc_feature: MA Experiment 108535 PARAMETER Experiment Name: Zm_Meristem_P Parameter: Plant Line Value: 35A19
  misc_feature: MA Experiment 108535 PARAMETER Experiment Name: Zm_Meristem_P Parameter: Tissue Value: Root Meristem vs. Above Root Meristem
  misc_feature: MA Experiment ID: 108543 Result: Up-regulated in Transcription
  misc_feature: MA Experiment ID: 108559 Result: Up-regulated in Transcription
  misc_feature: MA Experiment 108559 PARAMETER Experiment Name: Zm_5mM_NO_P Parameter: Age (day) Value: 8
  misc_feature: MA Experiment 108559 PARAMETER Experiment Name: Zm_5mM_NO_P Parameter: Organism Value: Zea mays
  misc_feature: MA Experiment 108559 PARAMETER Experiment Name: Zm_5mM_NO_P Parameter: Plant Line Value: 35A19
  misc_feature: MA Experiment 108559 PARAMETER Experiment Name: Zm_5mM_NO_P Parameter: Timepoint (hr) Value: 12
  misc_feature: MA Experiment 108559 PARAMETER Experiment Name: Zm_5mM_NO_P Parameter: Tissue Value: Aerial
  misc_feature: MA Experiment 108559 PARAMETER Experiment Name: Zm_5mM_NO_P Parameter: Treatment Value: 5mM NO vs. No Treatment
  misc_feature: MA Experiment ID: 108689 Result: Down-regulated in Transcription
  misc_feature: MA Experiment 108689 PARAMETER Experiment Name: Zm_Drought_Roots_P Parameter: Age (day) Value: 9
  misc_feature: MA Experiment 108689 PARAMETER Experiment Name: Zm_Drought_Roots_P Parameter: Organism Value: Zea mays
  misc_feature: MA Experiment 108689 PARAMETER Experiment Name: Zm_Drought_Roots_P Parameter: Plant Line Value: 35A19
  misc_feature: MA Experiment 108689 PARAMETER Experiment Name: Zm_Drought_Roots_P Parameter: Timepoint (hr) Value: 24
  misc_feature: MA Experiment 108689 PARAMETER Experiment Name: Zm_Drought_Roots_P Parameter: Tissue Value: Roots
  misc_feature: MA Experiment 108689 PARAMETER Experiment Name: Zm_Drought_Roots_P Parameter: Treatment Value: Drought vs. No Drought
  misc_feature: MA Experiment ID: 20000535 Result: Down-regulated in Transcription
  misc_feature: MA Experiment 20000535 PARAMETER Experiment Name: Zm_Hybrid_Seed_Dev_P Parameter: DAP Value: 30 vs. 12
  misc_feature: MA Experiment 20000535 PARAMETER Experiment Name: Zm_Hybrid_Seed_Dev_P Parameter: Organism Value: Zea mays
  misc_feature: MA Experiment 20000535 PARAMETER Experiment Name: Zm_Hybrid_Seed_Dev_P Parameter: Plant Line Value: 35A19
  misc_feature: MA Experiment 20000535 PARAMETER Experiment Name: Zm_Hybrid_Seed_Dev_P Parameter: Tissue Value: Embryo vs. Unfert Floret
  misc_feature: MA Experiment ID: 20000626 Result: Up-regulated in Transcription
  misc_feature: MA Experiment 20000626 PARAMETER Experiment Name: Zm_Herbicide-Treatments_P Parameter: Timepoint (hr) Value: 12
  misc_feature: MA Experiment 20000626 PARAMETER Experiment Name: Zm_Herbicide-Treatments_P Parameter: Tissue Value: Aerial
  misc_feature: MA Experiment 20000626 PARAMETER Experiment Name: Zm_Herbicide-Treatments_P Parameter: Treatment Value: Roundup vs. No Treatment
  misc_feature: MA Experiment ID: 20001614 Result: Up-regulated in Transcription
  misc_feature: MA Experiment 20001614 PARAMETER Experiment Name: Zm_50ppm_KNO3_L-to-H_P Parameter: Age (day) Value: 21
  misc_feature: MA Experiment 20001614 PARAMETER Experiment Name: Zm_50ppm_KNO3_L-to-H_P Parameter: Organism Value: Zea mays
  misc_feature: MA Experiment 20001614 PARAMETER Experiment Name: Zm_50ppm_KNO3_L-to-H_P Parameter: Plant Line Value: 35A19
  misc_feature: MA Experiment 20001614 PARAMETER Experiment Name: Zm_50ppm_KNO3_L-to-H_P Parameter: Timepoint (hr) Value: 48
  misc_feature: MA Experiment 20001614 PARAMETER Experiment Name: Zm_50ppm_KNO3_L-to-H_P Parameter: Tissue Value: Roots
  misc_feature: MA Experiment 20001614 PARAMETER Experiment Name: Zm_50ppm_KNO3_L-to-H_P Parameter: Treatment Value: 50ppm KNO3 vs. 50ppm KCl
tcgtattacgtactcctgcatagcgatagcatagcttagcttgcttccccaatgccaatgtcatcgacagcacaaatggcttccctcgccgttctcatcatttccctcgtctttgcggcgcttgcctccgacgccgccgcaggcgtccgcgtcgagctcacgcgcgtccacgccgaccccagcgtgaccgcgtcccagttcgtccgcggcgccctgcgccgcgacatgcaccggcacaacgccaggaagctagccctagccgcgtcgtctggcgccacggtgtccgcgccgacccagaactcgcccaccgccggggagtacctgatggcgctggccatcggcacgccgccgctgccgtaccaggccatcgccgacacgggcagcgacctcatctggacgcagtgcgcgccctgcacctcccagtgcttccgccagccgacgccgctgtacaacccgtccagctccaccacgttcgccgtgctcccgtgcaacagctcgctgagcgtatgcgcggcggcgctggccgggaccgggacggccccgccgccggggtgcgcgtgcacgtacaacgtcacgtacggcagcgggtggacgagtgtctttcaggggtccgagaccttcacgttcgggtccacgccggccggtcagtcccgcgtccctggcatcgccttcggctgcagcaccgccagcagcggcttcaacgcctcgtccgcgtccggcctcgtcgggctgggcagggggaggctgtcgctcgtctcccagctcggcgtccccaagttctcctactgcctcacgccgtaccaggacaccaacagcacgagcacgctcctcctcgggccgtcggcgtcgctcaacggcaccgccggcgtcagctccacgcctttcgtcgccagcccttccactgcgcccatgaacaccttctactatctcaacctgaccggcatatccctcggcacgacggcactgtccatcccgcccgacgccttcttgctcaacgcggacggcaccgggcgggctcatcatcgactctggcaccaccatcacattactgggcaacacggcgtaccagcaggtccgggcagcggtcgtctccctggtgacgctgcccaccacagacgggtcggcagccacggggctcgacctgtgcttcatgctgccctcctcaacgtcggcgccgccggccatgccgagcatgacgctccacttcaacggcgcggacatggtgctcccggcggacagctacatgatgtcggacgactccggcttgtggtgcctggccatgcagaaccagaccgacggcgaggtaaacattctcggcaactaccagcagcaaaacatgcacatcctctacgacattgggcaggagacattgtcgtttgctccggccaaatgcagcgcgctctgatcagagctttacagaactgaaaatatgtgcgcgcaattgcataaggatcgtgatttttttaactatatattatgtaaaaatgtcgtgttgcttgggttgggttgtaaagcaggagatatttttccttcc

SEQ ID NO: 8632 - protein, 457 aa, Zea mays subsp. mays
  peptide (1)..(457): Ceres Seq. ID no. 12373173
  misc_feature (50)..(320): Pfam Name: Eukaryotic aspartyl protease Pfam Description: Eukaryotic aspartyl protease
  misc_feature (7)..(320): Homolog of NCBI NO: 34898762 NR Description: OJ1131_E05.5 [Oryza sativa (japonica
  misc_feature (31)..(320): Homolog of NCBI NO: 38344829 NR Description: OSJNBa0064H22.10 [Oryza sativa (japonica
  misc_feature (30)..(320): Homolog of NCBI NO: 30678047 NR Description: chloroplast nucleoid DNA binding protein -related
  misc_feature (92)..(320): Homolog of NCBI NO: 20197342 NR Description: putative chloroplast nucleoid DNA binding protein
  misc_feature (13)..(309): Homolog of NCBI NO: 38344830 NR Description: OSJNBa0064H22.11 [Oryza sativa (japonica
  misc_feature (7)..(302): Homolog of NCBI NO: 15242803 NR Description: putative protein; protein id: At5g33340.1
  misc_feature (50)..(309): Homolog of NCBI NO: 37536476 NR Description: putative nucleoid DNA binding protein [Oryza
  misc_feature (50)..(309): Homolog of NCBI NO: 37536468 NR Description: putative nucleoid DNA binding protein [Oryza
  misc_feature (26)..(320): Homolog of NCBI NO: 15223368 NR Description: chloroplast nucleoid DNA binding protein, protein id: At1g01300.1, supported by cDNA: 7567. [Arabidopsis
  misc_feature (26)..(320): Homolog of NCBI NO: 21594980 NR Description: chloroplast nucleoid DNA binding protein,
MPMSSTAQMASLAVLIISLVFAALASDAAAGVRVELTRVHADPSVTASQFVRGALRRDMHRHNARKLALAASSGATVSAPTQNSPTAGEYLMALAIGTPPLPYQAIADTGSDLIWTQCAPCTSQCFRQPTPLYNPSSSTTFAVLPCNSSLSVCAAALAGTGTAPPPGCACTYNVTYGSGWTSVFQGSETFTFGSTPAGQSRVPGIAFGCSTASSGFNASSASGLVGLGRGRLSLVSQLGVPKFSYCLTPYQDTNSTSTLLLGPSASLNGTAGVSSTPFVASPSTAPMNTFYYLNLTGISLGTTALSIPPDAFLLNADGTGRAHHRLWHHHHITGQHGVPAGPGSGRLPGDAAHHRRVGSHGARPVLHAALLNVGAAGHAEHDAPLQRRGHGAPGGQLHDVGRLRLVVPGHAEPDRRRGKHSRQLPAAKHAHPLRHWAGDIVVCSGQMQRALIRALQN

SEQ ID NO: 8633 - protein, 455 aa, Zea mays subsp. mays
  peptide (1)..(455): Ceres Seq. ID no. 12373174
  misc_feature (48)..(318): Pfam Name: Eukaryotic aspartyl protease Pfam Description: Eukaryotic aspartyl protease
  misc_feature (5)..(318): Homolog of NCBI NO: 34898762 NR Description: OJ1131_E05.5 [Oryza sativa (japonica
  misc_feature (29)..(318): Homolog of NCBI NO: 38344829 NR Description: OSJNBa0064H22.10 [Oryza sativa (japonica
  misc_feature (28)..(318): Homolog of NCBI NO: 30678047 NR Description: chloroplast nucleoid DNA binding protein -related
  misc_feature (90)..(318): Homolog of NCBI NO: 20197342 NR Description: putative chloroplast nucleoid DNA binding protein
  misc_feature (11)..(307): Homolog of NCBI NO: 38344830 NR Description: OSJNBa0064H22.11 [Oryza sativa (japonica
  misc_feature (5)..(300): Homolog of NCBI NO: 15242803 NR Description: putative protein; protein id: At5g33340.1
  misc_feature (48)..(307): Homolog of NCBI NO: 37536476 NR Description: putative nucleoid DNA binding protein [Oryza
  misc_feature (48)..(307): Homolog of NCBI NO: 37536468 NR Description: putative nucleoid DNA binding protein [Oryza
  misc_feature (24)..(318): Homolog of NCBI NO: 15223368 NR Description: chloroplast nucleoid DNA binding protein, protein id: At1g01300.1, supported by cDNA: 7567. [Arabidopsis
  misc_feature (24)..(318): Homolog of NCBI NO: 21594980 NR Description: chloroplast nucleoid DNA binding protein,
MSSTAQMASLAVLIISLVFAALASDAAAGVRVELTRVHADPSVTASQFVRGALRRDMHRHNARKLALAASSGATVSAPTQNSPTAGEYLMALAIGTPPLPYQAIADTGSDLIWTQCAPCTSQCFRQPTPLYNPSSSTTFAVLPCNSSLSVCAAALAGTGTAPPPGCACTYNVTYGSGWTSVFQGSETFTFGSTPAGQSRVPGIAFGCSTASSGFNASSASGLVGLGRGRLSLVSQLGVPKFSYCLTPYQDTNSTSTLLLGPSASLNGTAGVSSTPFVASPSTAPMNTFYYLNLTGISLGTTALSIPPDAFLLNADGTGRAHHRLWHHHHITGQHGVPAGPGSGRLPGDAAHHRRVGSHGARPVLHAALLNVGAAGHAEHDAPLQRRGHGAPGGQLHDVGRLRLVVPGHAEPDRRRGKHSRQLPAAKHAHPLRHWAGDIVVCSGQMQRALIRALQN

SEQ ID NO: 8634 - protein, 449 aa, Zea mays subsp. mays
  peptide (1)..(449): Ceres Seq. ID no. 12373175
  misc_feature (42)..(312): Pfam Name: Eukaryotic aspartyl protease Pfam Description: Eukaryotic aspartyl protease
  misc_feature (1)..(312): Homolog of NCBI NO: 34898762 NR Description: OJ1131_E05.5 [Oryza sativa (japonica
  misc_feature (23)..(312): Homolog of NCBI NO: 38344829 NR Description: OSJNBa0064H22.10 [Oryza sativa (japonica
  misc_feature (22)..(312): Homolog of NCBI NO: 30678047 NR Description: chloroplast nucleoid DNA binding protein -related
  misc_feature (84)..(312): Homolog of NCBI NO: 20197342 NR Description: putative chloroplast nucleoid DNA binding protein
  misc_feature (5)..(301): Homolog of NCBI NO: 38344830 NR Description: OSJNBa0064H22.11 [Oryza sativa (japonica
  misc_feature (1)..(294): Homolog of NCBI NO: 15242803 NR Description: putative protein; protein id: At5g33340.1
  misc_feature (42)..(301): Homolog of NCBI NO: 37536476 NR Description: putative nucleoid DNA binding protein [Oryza
  misc_feature (42)..(301): Homolog of NCBI NO: 37536468 NR Description: putative nucleoid DNA binding protein [Oryza
  misc_feature (18)..(312): Homolog of NCBI NO: 15223368 NR Description: chloroplast nucleoid DNA binding protein, protein id: At1g01300.1, supported by cDNA: 7567. [Arabidopsis
  misc_feature (18)..(312): Homolog of NCBI NO: 21594980 NR Description: chloroplast nucleoid DNA binding protein,
MASLAVLIISLVFAALASDAAAGVRVELTRVHADPSVTASQFVRGALRRDMHRHNARKLALAASSGATVSAPTQNSPTAGEYLMALAIGTPPLPYQAIADTGSDLIWTQCAPCTSQCFRQPTPLYNPSSSTTFAVLPCNSSLSVCAAALAGTGTAPPPGCACTYNVTYGSGWTSVFQGSETFTFGSTPAGQSRVPGIAFGCSTASSGFNASSASGLVGLGRGRLSLVSQLGVPKFSYCLTPYQDTNSTSTLLLGPSASLNGTAGVSSTPFVASPSTAPMNTFYYLNLTGISLGTTALSIPPDAFLLNADGTGRAHHRLWHHHHITGQHGVPAGPGSGRLPGDAAHHRRVGSHGARPVLHAALLNVGAAGHAEHDAPLQRRGHGAPGGQLHDVGRLRLVVPGHAEPDRRRGKHSRQLPAAKHAHPLRHWAGDIVVCSGQMQRALIRALQN

SEQ ID NO: 8635 - DNA, 1582 bp, Zea mays subsp. mays
  misc_feature (1)..(1582): Ceres Seq. ID no. 13577851
  misc_feature: MA Experiment ID: 108536 Result: Up-regulated in Transcription
  misc_feature: MA Experiment 108536 PARAMETER Experiment Name: Zm_Meristem_P Parameter: Age (day) Value: 8
  misc_feature: MA Experiment 108536 PARAMETER Experiment Name: Zm_Meristem_P Parameter: Organism Value: Zea mays
  misc_feature: MA Experiment 108536 PARAMETER Experiment Name: Zm_Meristem_P Parameter: Plant Line Value: 35A19
  misc_feature: MA Experiment 108536 PARAMETER Experiment Name: Zm_Meristem_P Parameter: Tissue Value: Shoot Meristem vs. Above Shoot Meristem
  misc_feature: MA Experiment ID: 108556 Result: Down-regulated in Transcription
  misc_feature: MA Experiment 108556 PARAMETER Experiment Name: Zm_Drought_P Parameter: Age (day) Value: 9
  misc_feature: MA Experiment 108556 PARAMETER Experiment Name: Zm_Drought_P Parameter: Organism Value: Zea mays
  misc_feature: MA Experiment 108556 PARAMETER Experiment Name: Zm_Drought_P Parameter: Plant Line Value: 35A19
  misc_feature: MA Experiment 108556 PARAMETER Experiment Name: Zm_Drought_P Parameter: Timepoint (hr) Value: 24
  misc_feature: MA Experiment 108556 PARAMETER Experiment Name: Zm_Drought_P Parameter: Tissue Value: Aerial
  misc_feature: MA Experiment 108556 PARAMETER Experiment Name: Zm_Drought_P Parameter: Treatment Value: Drought vs. No Drought
  misc_feature: MA Experiment ID: 20000535 Result: Up-regulated in Transcription
  misc_feature: MA Experiment 20000535 PARAMETER Experiment Name: Zm_Hybrid_Seed_Dev_P Parameter: DAP Value: 30 vs. 12
  misc_feature: MA Experiment 20000535 PARAMETER Experiment Name: Zm_Hybrid_Seed_Dev_P Parameter: Organism Value: Zea mays
  misc_feature: MA Experiment 20000535 PARAMETER Experiment Name: Zm_Hybrid_Seed_Dev_P Parameter: Plant Line Value: 35A19
  misc_feature: MA Experiment 20000535 PARAMETER Experiment Name: Zm_Hybrid_Seed_Dev_P Parameter: Tissue Value: Embryo vs. Unfert Floret
gaccagaggcggagagcactatagtcacgagctccacagtccaagctcgcactcgcaagtgctagcatctctcgggaatggcggagtcgcgtggtttcgtgatgacggctgtgatggtggtggtggtggccatggtatcagtggcgccgcgcggnnggnaggcgaagacgancgattgagccgtgctcggggtccgactcttgcccggcgctgctgggctacacgctctacgccgacatgaaggtgtccgaggtggccgcgctcttctccgtcgacccggcggcgttgctggccgccaacgcgctcgacttcggcgccccagggtgcggcgcacgcatcctgcccatgggcctcttcgtncgcgtncccacccgctgctcctgcgccgacggntccgcaagtccgtctccgtccgctacgccgcgcgcncggccganacgctcgccaccgtctccgangtcgtcttcgcngggctcgcctcctccgaccagatccgcaacgagaacggcctcacctccgacgaccccgacgcgccgctcgacgccggccagaagctcgccatcccgctgccatgcgtctgcttcaactcgtccgacaacaacctccccgcggtgtacctctcctacgtcgtgcaggtcggggacaccgtgcccgccatcgctgcaagctacgagaccaccgtcacggatgtcatgaatgtcaatgccatggggagtcccgtcgccgcgccaggcgacattctcgccatcccattgccagcatgtgcatctgcatttccaaaatctgcatcagaccacggactgattgtagcgaatggaacttacgcgcttaccgctagcaactgtgtgcagtgtagctgtggacctggcagcctcaatctatattgcacgccaacttcactgtcgggaacctgtcctagtatgcaatgtcctaacagcaacgtgatgcttggcaatgtgagcacccatccaaccggcgctggatgcaacgtctctgcttgcagctacggaggttttgttaatggaactataacagcttcgctaaccggaggtctccaagccagatgcccaggaccacgccagtttcccgcactgacggaaccacctaccacggtgagccacgactcgacgtaccttcctccgttatcagcgcctgggccagcggaagctggtggcgtcatgcctgagccaggctcgccagggccaggcgcctcggtgcaagcagggcccttcacgctcccgaaagtgtctaaggccaatggccccgctggcagcgtttcagcagctccgttggtgggtaaaccacttcaaatcctacccgtcctgntctcctgcctagccttctacttgcagctctgagtgaacccacatcgcgatgagntctttagcatagtatgcttttgaagcaccaagggacatcattgctcgatcactccctctgagttgttgttctagctttgtttcgcgaaatctccccggcaaaactgcgcgcctaaacggcatatctgatgatgtgttcgctgcttttgtacaaaaagacaatggccctgtgtaaagcagtaaagtggtagctattgttctcc

SEQ ID NO: 8636 - protein, 221 aa, Zea mays subsp. mays
  peptide (1)..(221): Ceres Seq. ID no. 13577852
  misc_feature (1)..(221): Homolog of NCBI NO: 18395044 NR Description: expressed protein [Arabidopsis thaliana]
  misc_feature (1)..(198): Homolog of NCBI NO: 30699276 NR Description: expressed protein [Arabidopsis thaliana]
  misc_feature (1)..(113): Homolog of NCBI NO: 30687570 NR Description: expressed protein [Arabidopsis thaliana]
  misc_feature (1)..(198): Homolog of NCBI NO: 25406518 NR Description: unknown protein T5M16.22 [imported] - Arabidopsis
  misc_feature (1)..(126): Homolog of NCBI NO: 28207683 NR Description: Erwinia induced protein 1 [Solanum tuberosum]
  misc_feature (1)..(125): Homolog of NCBI NO: 22758281 NR Description: Unknown protein [Oryza sativa (japonica
  misc_feature (1)..(116): Homolog of NCBI NO: 18398317 NR Description: delta-8 sphingolipid desaturase [Arabidopsis
  misc_feature (1)..(116): Homolog of NCBI NO: 21593990 NR Description: unknown [Arabidopsis thaliana]
  misc_feature (212)..(212): Xaa is any aa, unknown or other
MNVNAMGSPVAAPGDILAIPLPACASAFPKSASDHGLIVANGTYALTASNCVQCSCGPGSLNLYCTPTSLSGTCPSMQCPNSNVMLGNVSTHPTGAGCNVSACSYGGFVNGTITASLTGGLQARCPGPRQFPALTEPPTTVSHDSTYLPPLSAPGPAEAGGVMPEPGSPGPGASVQAGPFTLPKVSKANGPAGSVSAAPLVGKPLQILPVLXSCLAFYLQL

SEQ ID NO: 8637 - protein, 216 aa, Zea mays subsp. mays
  peptide (1)..(216): Ceres Seq. ID no. 13577853
  misc_feature (1)..(216): Homolog of NCBI NO: 18395044 NR Description: expressed protein [Arabidopsis thaliana]
  misc_feature (1)..(193): Homolog of NCBI NO: 30699276 NR Description: expressed protein [Arabidopsis thaliana]
  misc_feature (1)..(108): Homolog of NCBI NO: 30687570 NR Description: expressed protein [Arabidopsis thaliana]
  misc_feature (1)..(193): Homolog of NCBI NO: 25406518 NR Description: unknown protein T5M16.22 [imported] - Arabidopsis
  misc_feature (1)..(121): Homolog of NCBI NO: 28207683 NR Description: Erwinia induced protein 1 [Solanum tuberosum]
  misc_feature (1)..(120): Homolog of NCBI NO: 22758281 NR Description: Unknown protein [Oryza sativa (japonica
  misc_feature (1)..(111): Homolog of NCBI NO: 18398317 NR Description: delta-8 sphingolipid desaturase [Arabidopsis
  misc_feature (1)..(111): Homolog of NCBI NO: 21593990 NR Description: unknown [Arabidopsis thaliana]
  misc_feature (207)..(207): Xaa is any aa, unknown or other
MGSPVAAPGDILAIPLPACASAFPKSASDHGLIVANGTYALTASNCVQCSCGPGSLNLYCTPTSLSGTCPSMQCPNSNVMLGNVSTHPTGAGCNVSACSYGGFVNGTITASLTGGLQARCPGPRQFPALTEPPTTVSHDSTYLPPLSAPGPAEAGGVMPEPGSPGPGASVQAGPFTLPKVSKANGPAGSVSAAPLVGKPLQILPVLXSCLAFYLQL

SEQ ID NO: 8638 - protein, 152 aa, Zea mays subsp. mays
  peptide (1)..(152): Ceres Seq. ID no. 13577854
  misc_feature (47)..(149): Pfam Name: Mucin-like glycoprotein Pfam Description: Mucin-like glycoprotein
  misc_feature (1)..(79): Homolog of NCBI NO: 18395044 NR Description: expressed protein [Arabidopsis thaliana]
  misc_feature (1)..(52): Homolog of NCBI NO: 30699276 NR Description: expressed protein [Arabidopsis thaliana]
  misc_feature (1)..(79): Homolog of NCBI NO: 30687570 NR Description: expressed protein [Arabidopsis thaliana]
  misc_feature (1)..(52): Homolog of NCBI NO: 25406518 NR Description: unknown protein T5M16.22 [imported] - Arabidopsis
  misc_feature (47)..(152): Homolog of NCBI NO: 8650496 NR Description: 163R* [porcine adenovirus 3]
  misc_feature (15)..(152): Homolog of NCBI NO: 15233976 NR Description: leucine-rich repeat extensin family [Arabidopsis
  misc_feature (53)..(152): Homolog of NCBI NO: 33866833 NR Description: conserved hypothetical protein [Synechococcus sp.
  misc_feature (53)..(152): Homolog of NCBI NO: 9630030 NR Description: unknown [Orgyia pseudotsugata multicapsid
  misc_feature (44)..(152): Homolog of NCBI NO: 9630030 NR Description: unknown [Orgyia pseudotsugata multicapsid
  misc_feature (48)..(152): Homolog of NCBI NO: 32699068 NR Description: hypothetical protein FLJ35107 [Homo sapiens]
  misc_feature (41)..(41): Xaa is any aa, unknown or other
  misc_feature (43)..(43): Xaa is any aa, unknown or other
  misc_feature (52)..(52): Xaa is any aa, unknown or other
  misc_feature (64)..(64): Xaa is any aa, unknown or other
  misc_feature (67)..(67): Xaa is any aa, unknown or other
  misc_feature (74)..(74): Xaa is any aa, unknown or other
  misc_feature (78)..(78): Xaa is any aa, unknown or other
MKVSEVAALFSVDPAALLAANALDFGAPGCGARILPMGLFXRXPTRCSCADXSASPSPSATPRXRPXRSPPSPXSSSXGSPPPTRSATRTASPPTTPTRRSTPARSSPSRCHASASTRPTTTSPRCTSPTSCRSGTPCPPSLQATRPPSRMS

SEQ ID NO: 8639 - DNA, 1422 bp, Zea mays subsp. mays
  misc_feature (1)..(1422): Ceres Seq. ID no. 12351428
  misc_feature: MA Experiment ID: 108535 Result: Up-regulated in Transcription
  misc_feature: MA Experiment 108535 PARAMETER Experiment Name: Zm_Meristem_P Parameter: Age (day) Value: 8
  misc_feature: MA Experiment 108535 PARAMETER Experiment Name: Zm_Meristem_P Parameter: Organism Value: Zea mays
  misc_feature: MA Experiment 108535 PARAMETER Experiment Name: Zm_Meristem_P Parameter: Plant Line Value: 35A19
  misc_feature: MA Experiment 108535 PARAMETER Experiment Name: Zm_Meristem_P Parameter: Tissue Value: Root Meristem vs. Above Root Meristem
  misc_feature: MA Experiment ID: 20000477 Result: Down-regulated in Transcription
  misc_feature: MA Experiment 20000477 PARAMETER Experiment Name: Zm_5mM_SA_P Parameter: Age (day) Value: 10
  misc_feature: MA Experiment 20000477 PARAMETER Experiment Name: Zm_5mM_SA_P Parameter: Organism Value: Zea mays
  misc_feature: MA Experiment 20000477 PARAMETER Experiment Name: Zm_5mM_SA_P Parameter: Plant Line Value: 35A19
  misc_feature: MA Experiment 20000477 PARAMETER Experiment Name: Zm_5mM_SA_P Parameter: Timepoint (hr) Value: 48
  misc_feature: MA Experiment 20000477 PARAMETER Experiment Name: Zm_5mM_SA_P Parameter: Tissue Value: Aerial
  misc_feature: MA Experiment 20000477 PARAMETER Experiment Name: Zm_5mM_SA_P Parameter: Treatment Value: 5mM SA vs. No Treatment
  misc_feature: MA Experiment ID: 20000478 Result: Down-regulated in Transcription
  misc_feature: MA Experiment 20000478 PARAMETER Experiment Name: Zm_5mM_SA_P Parameter: Age (day) Value: 11
  misc_feature: MA Experiment 20000478 PARAMETER Experiment Name: Zm_5mM_SA_P Parameter: Organism Value: Zea mays
  misc_feature: MA Experiment 20000478 PARAMETER Experiment Name: Zm_5mM_SA_P Parameter: Plant Line Value: 35A19
  misc_feature: MA Experiment 20000478 PARAMETER Experiment Name: Zm_5mM_SA_P Parameter: Timepoint (hr) Value: 72
  misc_feature: MA Experiment 20000478 PARAMETER Experiment Name: Zm_5mM_SA_P Parameter: Tissue Value: Aerial
  misc_feature: MA Experiment 20000478 PARAMETER Experiment Name: Zm_5mM_SA_P Parameter: Treatment Value: 5mM SA vs. No Treatment
  misc_feature: MA Experiment ID: 20000479 Result: Down-regulated in Transcription
  misc_feature: MA Experiment 20000479 PARAMETER Experiment Name: Zm_Drought_P Parameter: Age (day) Value: 10
  misc_feature: MA Experiment 20000479 PARAMETER Experiment Name: Zm_Drought_P Parameter: Organism Value: Zea mays
  misc_feature: MA Experiment 20000479 PARAMETER Experiment Name: Zm_Drought_P Parameter: Plant Line Value: 35A19
  misc_feature: MA Experiment 20000479 PARAMETER Experiment Name: Zm_Drought_P Parameter: Timepoint (hr) Value: 48
  misc_feature: MA Experiment 20000479 PARAMETER Experiment Name: Zm_Drought_P Parameter: Tissue Value: Aerial
  misc_feature: MA Experiment 20000479 PARAMETER Experiment Name: Zm_Drought_P Parameter: Treatment Value: Drought vs. No Drought
  misc_feature: MA Experiment ID: 20000480 Result: Down-regulated in Transcription
  misc_feature: MA Experiment 20000480 PARAMETER Experiment Name: Zm_Drought_P Parameter: Age (day) Value: 11
  misc_feature: MA Experiment 20000480 PARAMETER Experiment Name: Zm_Drought_P Parameter: Organism Value: Zea mays
  misc_feature: MA Experiment 20000480 PARAMETER Experiment Name: Zm_Drought_P Parameter: Plant Line Value: 35A19
  misc_feature: MA Experiment 20000480 PARAMETER Experiment Name: Zm_Drought_P Parameter: Timepoint (hr) Value: 72
  misc_feature: MA Experiment 20000480 PARAMETER Experiment Name: Zm_Drought_P Parameter: Tissue Value: Aerial
  misc_feature: MA Experiment 20000480 PARAMETER Experiment Name: Zm_Drought_P Parameter: Treatment Value: Drought vs. No Drought
acgttctctgcacgttcatgttcgtcgtcacctccggattccccgaaatagacaaattcgcccacaccacaccctccgccgctgcacgcctccacgcctcgcccacccataggccatagccggtagatactttcatcaaagatagcacacaggattcgccccgccggttcgcgtgaaaaggagccgacgaatccacctacccgcattcgggctccagcgccaccccgtgccatcgggctgcgtccgctaacgaccgcccgttcgcgcagggcccagggtgtgggagggagcaatggtcgctgggatggaggcggaggaaggggtgatggcgacggacttcttctggtcgtacacggacgagccgcacgcgtcgcgccgccgggagatcctggccaagtacccgcagatcaaggagctcttcggcccggatccgtgggccttcctcaagattggtttggtcgtgtcgcttcagctatggactgctacattcctccgtgacgccagctggctgaagctactgacggtgtcctacttcttcgggtcgtttctaaaccacaacctgttcctggccatccacgagctgagccacaaccttgccttcgcgaccccatccctgaaccgctggctgggcatcttcgctgaacctccccatcggtgtgcccatgtccatcacgttccagaagtaccacctggagcaccaccggttccagggcgtggacggcgtggacatggacatcccgagccaggcggaggcgcgcgccgtgaggagcgccgccggcaagtccgcgtgggtcgtgctccagctcttcttctacgctctgcggccgctgttcctgaagccgaagcctccgggcctgtgggagctgaccaacctggcggcccaggtcggcctcgacgccgggctcgtgtacctgtgcggctggaggtcgctggcctaccttgtcctctccacgttcgtcggcggcggccatgcaccccatggcgggccacttcatctcggagcactacgtgttcagccccgagcaggagacctactcgtactacgggcccctgaacctggtggcgtggcacgtggggtaccacaacgagcaccacgacttccccaggatcccgggcacccggctgcacagggtgaaggagatggcgccggagtactacgacggcctcgagtcgtacaggtcctggagccaggtcatttacatgtacatcatggaccggacggtcggcccgttcagccggatgaagaggaaggcgcagaagaaagactcgtagtcgccgtgtgctcaatttgttttttttttggtcgcgtgtgatgtgaactcatgtttggtgtaagcatttcgattcgtcggaacagcttgtttgtgatatcaatggctcgttttttcgtgctggatccaccgtgcccagcacgagctgtcg

SEQ ID NO: 8640 - protein, 253 aa, Zea mays subsp. mays
  peptide (1)..(253): Ceres Seq. ID no. 12351429
  misc_feature (6)..(119): Homolog of NCBI NO: 20147520 NR Description: putative sphingolipid delta 4 desaturase DES-1
  misc_feature (6)..(119): Homolog of NCBI NO: 15234510 NR Description: putative fatty acid desaturase; protein id: supported by cDNA: gi_6752877 [Arabidopsis thaliana]
  misc_feature (11)..(119): Homolog of NCBI NO: 17136246 NR Description: infertile crescent CG9078-PA [Drosophila
  misc_feature (11)..(119): Homolog of NCBI NO: 4505193 NR Description: sphingolipid delta 4 desaturase; membrane fatty (lipid) desaturase; dihydroceramide desaturase [Homo sapiens] sphingolipid delta 4 desaturase; [Homo sapiens]
  misc_feature (11)..(119): Homolog of NCBI NO: 34304727 NR Description: fatty acid desaturase [Microtus fortis]
  misc_feature (11)..(119): Homolog of NCBI NO: 38174707 NR Description: Unknown (protein for MGC:75791) [Silurana
  misc_feature (11)..(116): Homolog of NCBI NO: 16758022 NR Description: degenerative spermatocyte homolog [Rattus
  misc_feature (11)..(116): Homolog of NCBI NO: 6681175 NR Description: degenerative spermatocyte homolog (Drosophila) musculus] >gi|2225941|emb|CAA69714.1| Mdes protein [Mus musculus] unnamed protein product [Mus musculus] protein product [Mus
  misc_feature (11)..(116): Homolog of NCBI NO: 20147516 NR Description: sphingolipid delta 4 desaturase protein DES1 [Mus
  misc_feature (14)..(119): Homolog of NCBI NO: 18583655 NR Description: similar to sphingolipid delta 4 desaturase/C-4
MVAGMEAEEGVMATDFFWSYTDEPHASRRREILAKYPQIKELFGPDPWAFLKIGLVVSLQLWTATFLRDASWLKLLTVSYFFGSFLNHNLFLAIHELSHNLAFATPSLNRWLGIFAEPPHRCAHVHHVPEVPPGAPPVPGRGRRGHGHPEPGGGARREERRRQVRVGRAPALLLRSAAAVPEAEASGPVGADQPGGPGRPRRRARVPVRLEVAGLPCPLHVRRRRPCTPWRATSSRSTTCSAPSRRPTRTTGP

SEQ ID NO: 8641 - protein, 249 aa, Zea mays subsp. mays
  peptide (1)..(249): Ceres Seq. ID no. 12351430
  misc_feature (2)..(115): Homolog of NCBI NO: 20147520 NR Description: putative sphingolipid delta 4 desaturase DES-1
  misc_feature (2)..(115): Homolog of NCBI NO: 15234510 NR Description: putative fatty acid desaturase; protein id: supported by cDNA: gi_6752877 [Arabidopsis thaliana]
  misc_feature (7)..(115): Homolog of NCBI NO: 17136246 NR Description: infertile crescent CG9078-PA [Drosophila
  misc_feature (7)..(115): Homolog of NCBI NO: 4505193 NR Description: sphingolipid delta 4 desaturase; membrane fatty (lipid) desaturase; dihydroceramide desaturase [Homo sapiens] sphingolipid delta 4 desaturase; [Homo sapiens]
  misc_feature (7)..(115): Homolog of NCBI NO: 34304727 NR Description: fatty acid desaturase [Microtus fortis]
  misc_feature (7)..(115): Homolog of NCBI NO: 38174707 NR Description: Unknown (protein for MGC:75791) [Silurana
  misc_feature (7)..(112): Homolog of NCBI NO: 16758022 NR Description: degenerative spermatocyte homolog [Rattus
  misc_feature (7)..(112): Homolog of NCBI NO: 6681175 NR Description: degenerative spermatocyte homolog (Drosophila) musculus] >gi|2225941|emb|CAA69714.1| Mdes protein [Mus musculus] unnamed protein product [Mus musculus] protein product [Mus
  misc_feature (7)..(112): Homolog of NCBI NO: 20147516 NR Description: sphingolipid delta 4 desaturase protein DES1 [Mus
  misc_feature (10)..(115): Homolog of NCBI NO: 18583655 NR Description: similar to sphingolipid delta 4 desaturase/C-4
MEAEEGVMATDFFWSYTDEPHASRRREILAKYPQIKELFGPDPWAFLKIGLVVSLQLWTATFLRDASWLKLLTVSYFFGSFLNHNLFLAIHELSHNLAFATPSLNRWLGIFAEPPHRCAHVHHVPEVPPGAPPVPGRGRRGHGHPEPGGGARREERRRQVRVGRAPALLLRSAAAVPEAEASGPVGADQPGGPGRPRRRARVPVRLEVAGLPCPLHVRRRRPCTPWRATSSRSTTCSAPSRRPTRTTGP

SEQ ID NO: 8642 - protein, 242 aa, Zea mays subsp. mays
  peptide (1)..(242): Ceres Seq. ID no. 12351431
  misc_feature (1)..(108): Homolog of NCBI NO: 4505193 NR Description: sphingolipid delta 4 desaturase; membrane fatty (lipid) desaturase; dihydroceramide desaturase [Homo sapiens] sphingolipid delta 4 desaturase; [Homo sapiens]
  misc_feature (1)..(108): Homolog of NCBI NO: 34304727 NR Description: fatty acid desaturase [Microtus fortis]
  misc_feature (1)..(108): Homolog of NCBI NO: 38174707 NR Description: Unknown (protein for MGC:75791) [Silurana
  misc_feature (1)..(105): Homolog of NCBI NO: 16758022 NR Description: degenerative spermatocyte homolog [Rattus
  misc_feature (1)..(105): Homolog of NCBI NO: 6681175 NR Description: degenerative spermatocyte homolog (Drosophila) musculus] >gi|2225941|emb|CAA69714.1| Mdes protein [Mus musculus] unnamed protein product [Mus musculus] protein product [Mus
  misc_feature (1)..(105): Homolog of NCBI NO: 20147516 NR Description: sphingolipid delta 4 desaturase protein DES1 [Mus
  misc_feature (3)..(108): Homolog of NCBI NO: 18583655 NR Description: similar to sphingolipid delta 4 desaturase/C-4
  misc_feature (1)..(108): Homolog of NCBI NO: 20147520 NR Description: putative sphingolipid delta 4 desaturase DES-1
  misc_feature (1)..(108): Homolog of NCBI NO: 15234510 NR Description: putative fatty acid desaturase; protein id: supported by cDNA: gi_6752877 [Arabidopsis thaliana]
  misc_feature (1)..(108): Homolog of NCBI NO: 17136246 NR Description: infertile crescent CG9078-PA [Drosophila
MATDFFWSYTDEPHASRRREILAKYPQIKELFGPDPWAFLKIGLVVSLQLWTATFLRDASWLKLLTVSYFFGSFLNHNLFLAIHELSHNLAFATPSLNRWLGIFAEPPHRCAHVHHVPEVPPGAPPVPGRGRRGHGHPEPGGGARREERRRQVRVGRAPALLLRSAAAVPEAEASGPVGADQPGGPGRPRRRARVPVRLEVAGLPCPLHVRRRRPCTPWRATSSRSTTCSAPSRRPTRTTGP

SEQ ID NO: 8643 - DNA, 1162 bp, Zea mays subsp. mays
  misc_feature (1)..(1162): Ceres Seq. ID no. 12344858
  misc_feature: MA Experiment ID: 108535 Result: Up-regulated in Transcription
  misc_feature: MA Experiment 108535 PARAMETER Experiment Name: Zm_Meristem_P Parameter: Age (day) Value: 8
  misc_feature: MA Experiment 108535 PARAMETER Experiment Name: Zm_Meristem_P Parameter: Organism Value: Zea mays
  misc_feature: MA Experiment 108535 PARAMETER Experiment Name: Zm_Meristem_P Parameter: Plant Line Value: 35A19
  misc_feature: MA Experiment 108535 PARAMETER Experiment Name: Zm_Meristem_P Parameter: Tissue Value: Root Meristem vs. Above Root Meristem
  misc_feature: MA Experiment ID: 108544 Result: Down-regulated in Transcription
  misc_feature: MA Experiment ID: 108556 Result: Down-regulated in Transcription
  misc_feature: MA Experiment 108556 PARAMETER Experiment Name: Zm_Drought_P Parameter: Age (day) Value: 9
  misc_feature: MA Experiment 108556 PARAMETER Experiment Name: Zm_Drought_P Parameter: Organism Value: Zea mays
  misc_feature: MA Experiment 108556 PARAMETER Experiment Name: Zm_Drought_P Parameter: Plant Line Value: 35A19
  misc_feature: MA Experiment 108556 PARAMETER Experiment Name: Zm_Drought_P Parameter: Timepoint (hr) Value: 24
  misc_feature: MA Experiment 108556 PARAMETER Experiment Name: Zm_Drought_P Parameter: Tissue Value: Aerial
  misc_feature: MA Experiment 108556 PARAMETER Experiment Name: Zm_Drought_P Parameter: Treatment Value: Drought vs. No Drought
  misc_feature: MA Experiment ID: 20000477 Result: Down-regulated in Transcription
  misc_feature: MA Experiment 20000477 PARAMETER Experiment Name: Zm_5mM_SA_P Parameter: Age (day) Value: 10
  misc_feature: MA Experiment 20000477 PARAMETER Experiment Name: Zm_5mM_SA_P Parameter: Organism Value: Zea mays
  misc_feature: MA Experiment 20000477 PARAMETER Experiment Name: Zm_5mM_SA_P Parameter: Plant Line Value: 35A19
  misc_feature: MA Experiment 20000477 PARAMETER Experiment Name: Zm_5mM_SA_P Parameter: Timepoint (hr) Value: 48
  misc_feature: MA Experiment 20000477 PARAMETER Experiment Name: Zm_5mM_SA_P Parameter: Tissue Value: Aerial
  misc_feature: MA Experiment 20000477 PARAMETER Experiment Name: Zm_5mM_SA_P Parameter: Treatment Value: 5mM SA vs. No Treatment
  misc_feature: MA Experiment ID: 20000478 Result: Down-regulated in Transcription
  misc_feature: MA Experiment 20000478 PARAMETER Experiment Name: Zm_5mM_SA_P Parameter: Age (day) Value: 11
  misc_feature: MA Experiment 20000478 PARAMETER Experiment Name: Zm_5mM_SA_P Parameter: Organism Value: Zea mays
  misc_feature: MA Experiment 20000478 PARAMETER Experiment Name: Zm_5mM_SA_P Parameter: Plant Line Value: 35A19
  misc_feature: MA Experiment 20000478 PARAMETER Experiment Name: Zm_5mM_SA_P Parameter: Timepoint (hr) Value: 72
  misc_feature: MA Experiment 20000478 PARAMETER Experiment Name: Zm_5mM_SA_P Parameter: Tissue Value: Aerial
  misc_feature: MA Experiment 20000478 PARAMETER Experiment Name: Zm_5mM_SA_P Parameter: Treatment Value: 5mM SA vs. No Treatment
  misc_feature: MA Experiment ID: 20000479 Result: Down-regulated in Transcription
  misc_feature: MA Experiment 20000479 PARAMETER Experiment Name: Zm_Drought_P Parameter: Age (day) Value: 10
  misc_feature: MA Experiment 20000479 PARAMETER Experiment Name: Zm_Drought_P Parameter: Organism Value: Zea mays
  misc_feature: MA Experiment 20000479 PARAMETER Experiment Name: Zm_Drought_P Parameter: Plant Line Value: 35A19
  misc_feature: MA Experiment 20000479 PARAMETER Experiment Name: Zm_Drought_P Parameter: Timepoint (hr) Value: 48
  misc_feature: MA Experiment 20000479 PARAMETER Experiment Name: Zm_Drought_P Parameter: Tissue Value: Aerial
  misc_feature: MA Experiment 20000479 PARAMETER Experiment Name: Zm_Drought_P Parameter: Treatment Value: Drought vs. No Drought
  misc_feature: MA Experiment ID: 20000492 Result: Up-regulated in Transcription
  misc_feature: MA Experiment 20000492 PARAMETER Experiment Name: Zm_Hybrid_Seed_Dev_P Parameter: DAP Value: 12
  misc_feature: MA Experiment 20000492 PARAMETER Experiment Name: Zm_Hybrid_Seed_Dev_P Parameter: Organism Value: Zea mays
  misc_feature: MA Experiment 20000492 PARAMETER Experiment Name: Zm_Hybrid_Seed_Dev_P Parameter: Plant Line Value: 35A19
  misc_feature: MA Experiment 20000492 PARAMETER Experiment Name: Zm_Hybrid_Seed_Dev_P Parameter: Tissue Value: Fert Kernel vs. Unfert Floret
  misc_feature: MA Experiment ID: 20000632 Result: Down-regulated in Transcription
  misc_feature: MA Experiment 20000632 PARAMETER Experiment Name: Zm_Herbicide-Treatments_P Parameter: Timepoint (hr) Value: 4
  misc_feature: MA Experiment 20000632 PARAMETER Experiment Name: Zm_Herbicide-Treatments_P Parameter: Tissue Value: Aerial
  misc_feature: MA Experiment 20000632 PARAMETER Experiment Name: Zm_Herbicide-Treatments_P Parameter: Treatment Value: Glean vs. No Treatment
aacccgccagaggcccgatcgtcccacactcccaccacgcgacaggaacacaaaaaccctagcacaagcccacacgacgccacccggccccggacggccggccccccccgtcccacgttcccaccgggctccgagcacaaaaccctaaccttctcgctattaaagtcggcgtccagtccgtcggctgctgctacgccaccgaatccgcatctcctcgccggtcgcgcacgggcaaagcagcgatggcagcagcgacggcagttggcggacacgacagggtggaggctgcggcgtcgtccgcgggggctgtgctggccgtcgccgttgcctcgcagaggttgataggcctgctcgctcttgcggttcaaactgtaaattgtgtagcagaaatatataatgaagaccagcaggaaatatacaagttattatatggaagaatcaaatctgaaaatgtccctgaaattaaggctgggtcagatgatgatgatgacgatgaagacgatgaagatgaagatgaagatgaagatgatgatgatgatgatgatgatgatgatgatgatgagggtggtgacgacgacgatgaagacgatgatgatgaagaggggggtgatgaagatgatgatcctgaggctaatggtgaaggggggagtgatgatgacgacgatgataacgatggtgatgatgatggtaacgatgatgacgacgatgaagatgatgacgaagatgaagatgaagaggatgacgacgatgaggaagaacagccaccttccaagaagaagaagtgatttgctctttcatggattcacctcagcttctccatgctgttagttgtgttgtttagatcatggaacagctttgggacaaatgttgcttgtcatggtattatagtgtaggaaaccttgacatctgatgttaaatcgttatcctactttctcctctgcatgtagtcttaattgtgtgttttagatttttactttattggagctgtgattgtgtcatgccattcagttttattctgctgaggccagtgtcatgccattcaatttatttcttttactgaggcctgagcactcaggcctggattgtatgtgatgctatgtctgttactgagaaggttgagccaggccagaactgtatttgatgagttgcagattcttgagct

SEQ ID NO: 8644 - protein, 180 aa, Zea mays subsp. mays
  peptide (1)..(180): Ceres Seq. ID no. 12344859
  misc_feature (51)..(179): Pfam Name: Mpp10 protein Pfam Description: Mpp10 protein
  misc_feature (51)..(179): Pfam Name: Mpp10 protein Pfam Description: Mpp10 protein
  misc_feature (79)..(179): Homolog of NCBI NO: 35210494 NR Description: aspartic acid-rich protein aspolin2 [Theragra
  misc_feature (79)..(179): Homolog of NCBI NO: 23481405 NR Description: hypothetical protein [Plasmodium yoelii yoelii]
  misc_feature (76)..(172): Homolog of NCBI NO: 35210492 NR Description: aspartic acid-rich protein aspolin1 [Theragra
  misc_feature (76)..(172): Homolog of NCBI NO: 35210494 NR Description: aspartic acid-rich protein aspolin2 [Theragra
  misc_feature (69)..(172): Homolog of NCBI NO: 33284873 NR Description: SI:bZ1G18.2 (novel protein similar to human
  misc_feature (79)..(179): Homolog of NCBI NO: 23481405 NR Description: hypothetical protein [Plasmodium yoelii yoelii]
  misc_feature (76)..(172): Homolog of NCBI NO: 35210494 NR Description: aspartic acid-rich protein aspolin2 [Theragra
  misc_feature (79)..(172): Homolog of NCBI NO: 35210492 NR Description: aspartic acid-rich protein aspolin1 [Theragra
  misc_feature (79)..(172): Homolog of NCBI NO: 35210492 NR Description: aspartic acid-rich protein aspolin1 [Theragra
  misc_feature (79)..(172): Homolog of NCBI NO: 35210492 NR Description: aspartic acid-rich protein aspolin1 [Theragra
  misc_feature (79)..(172): Homolog of NCBI NO: 35210492 NR Description: aspartic acid-rich protein aspolin1 [Theragra
  misc_feature (79)..(172): Homolog of NCBI NO: 35210492 NR Description: aspartic acid-rich protein aspolin1 [Theragra
  misc_feature (69)..(172): Homolog of NCBI NO: 33284873 NR Description: SI:bZ1G18.2 (novel protein similar to human
  misc_feature (76)..(172): Homolog of NCBI NO: 35210492 NR Description: aspartic acid-rich protein aspolin1 [Theragra
  misc_feature (79)..(179): Homolog of NCBI NO: 35210494 NR Description: aspartic acid-rich protein aspolin2 [Theragra
  misc_feature (79)..(172): Homolog of NCBI NO: 35210492 NR Description: aspartic acid-rich protein aspolin1 [Theragra
  misc_feature (79)..(172): Homolog of NCBI NO: 35210492 NR Description: aspartic acid-rich protein aspolin1 [Theragra
  misc_feature (79)..(172): Homolog of NCBI NO: 35210492 NR Description: aspartic acid-rich protein aspolin1 [Theragra
  misc_feature (79)..(172): Homolog of NCBI NO: 35210492 NR Description: aspartic acid-rich protein aspolin1 [Theragra
  misc_feature (79)..(172): Homolog of NCBI NO: 35210492 NR Description: aspartic acid-rich protein aspolin1 [Theragra
MAAATAVGGHDRVEAAASSAGAVLAVAVASQRLIGLLALAVQTVNCVAEIYNEDQQEIYKLLYGRIKSENVPEIKAGSDDDDDDEDDEDEDEDEDDDDDDDDDDDDEGGDDDDEDDDDEEGGDEDDDPEANGEGGSDDDDDDNDGDDDGNDDDDDEDDDEDEDEEDDDDEEEQPPSKKKK

SEQ ID NO: 8645 - protein, 143 aa, Zea mays subsp. mays
  peptide (1)..(143): Ceres Seq. ID no. 12344860
MKTSRKYTSYYMEESNLKMSLKLRLGQMMMMTMKTMKMKMKMKMMMMMMMMMMMMRVVTTTMKTMMMKRGVMKMMILRLMVKGGVMMTTMITMVMMMVTMMTTMKMMTKMKMKRMTTMRKNSHLPRRRSDLLFHGFTSASPCC

SEQ ID NO: 8646 - protein, 132 aa, Zea mays subsp. mays
  peptide (1)..(132): Ceres Seq. ID no. 12344861
MEESNLKMSLKLRLGQMMMMTMKTMKMKMKMKMMMMMMMMMMMMRVVTTTMKTMMMKRGVMKMMILRLMVKGGVMMTTMITMVMMMVTMMTTMKMMTKMKMKRMTTMRKNSHLPRRRSDLLFHGFTSASPCC

SEQ ID NO: 8647 - DNA, 1703 bp, Zea mays subsp. mays
  misc_feature (1)..(1703): Ceres Seq. ID no. 12347254
  misc_feature: MA Experiment ID: 108527 Result: Up-regulated in Transcription
  misc_feature: MA Experiment 108527 PARAMETER Experiment Name: Zm_5mM_NO_P Parameter: Age (day) Value: 8
  misc_feature: MA Experiment 108527 PARAMETER Experiment Name: Zm_5mM_NO_P Parameter: Organism Value: Zea mays
  misc_feature: MA Experiment 108527 PARAMETER Experiment Name: Zm_5mM_NO_P Parameter: Plant Line Value: 35A19
  misc_feature: MA Experiment 108527 PARAMETER Experiment Name: Zm_5mM_NO_P Parameter: Timepoint (hr) Value: 6
  misc_feature: MA Experiment 108527 PARAMETER Experiment Name: Zm_5mM_NO_P Parameter: Tissue Value: Aerial
  misc_feature: MA Experiment 108527 PARAMETER Experiment Name: Zm_5mM_NO_P Parameter: Treatment Value: 5mM NO vs. No Treatment
aaaggttgtggggtgataaactcgtggactgatgcaaccaggacatgctattttgaatagtgattctcttttgtctgagtcggactgctgatgagcttactgaatctacctcttgtacttgtctatgtgtgcagcggctgagaaagcaagagtaaagagcaatgggctcaccaaagaggctttggtgccaaaggatgccaatggcaatgccatctcagcgcaaactttcaccttccgtgagcttgctaccgccaccaggaacttcaggcccgagtgcttcctgggagagggaggttttggacgtgtttacaagggccgccttgagagcacaggccaggttgttgctataaagcagcttaacagggatgggcttcaaggaaacagagaatttctagtagaagttctcatgctcagcttactacatcatcaaaacctggttaatttgattggttattgtgctgatggagaccagagacttcttgtttatgaatatatgccttctggatcacttgaagatcatttgcacgatctacctcttgataaagaggccttggactggaacaccaggatgaaaattgcagcaggtgctgccaaaggactggagtaccttcatgacaaagctaatccaccagttatttatagggatttcaagtcatcgaacattctgttggatgaaagtttccacccgaagctgtctgattttggacttgctaagttgggtccagttggcgacaaatcacatgtctcaacacgtgtaatgggtacatatggttattgtgcaccagaatatgctatgacagggcagctgacagtgaagtctgacgtgtatagttttggggttgtcttgctagagttgattactggccgtagggctattgacagcaccagaccacatggagaacaaaatcttgtctcatgggcacgtcctctgtttaacgacagaagaaagctccctaagatggctgacccgaggctggaagggcgataccccatgcgtgggctttaccaagcccttgcagtggcttcgatgtgcattcagtcggaggctgcttcacgcccactgattgcagatgtcgtgactgctctgtcctacttggcatcccagccatatgatcccaacgcagctcttgcttcaaggaagccaggcggcgatcagcgaagcaagcctggcgagaacggcagggcagtttccaggaatgatgaaactggaagctccggccacaaaacacctgccaaggaccgagaggactcacctagggacctcccagcgatcctgaacaaggaccttgaccgggagcgcatggtggccgaggcgaagatgtggggcgaccgggagcgcatggtggccgaggctaagatgtggggcgaccgagagcgcatggtggctgaggcgaagatgtggggtgaaaattggcgtgacaagcggcgtgcagagattgggcaggggagcctggattcggttactgggaacagctagggggcaattaagcgaacagaaacgtgacatccacccatgcatttcgtttgtttatttccaggtccattttcgttctggcggcggtcggcaggccccagggttgtacatttctaggtcagggaagagtgggaaagcggcagcgttgtactggacagtgaatgcatgtggttgtacatgtaaattctcagaaaagttttgtgagaatgaaaggacatatttgagttcc

SEQ ID NO: 8648 - protein, 450 aa, Zea mays subsp. mays
  peptide (1)..(450): Ceres Seq. ID no. 12347255
  misc_feature (8)..(265): Homolog of NCBI NO: 21740745 NR Description: OSJNBa0072K14.10 [Oryza sativa (japonica
  misc_feature (266)..(449): Homolog of NCBI NO: 21740745 NR Description: OSJNBa0072K14.10 [Oryza sativa (japonica
  misc_feature (3)..(405): Homolog of NCBI NO: 15240038 NR Description: protein kinase-like; protein id: At5g13160.1, by cDNA: gi_11559837, supported by cDNA: gi_13937146, supported
  misc_feature (415)..(445): Homolog of NCBI NO: 15240038 NR Description: protein kinase-like; protein id: At5g13160.1, by cDNA: gi_11559837, supported by cDNA: gi_13937146, supported
  misc_feature (17)..(414): Homolog of NCBI NO: 15238886 NR Description: protein kinase -like protein; protein id:
  misc_feature (415)..(445): Homolog of NCBI NO: 15238886 NR Description: protein kinase -like protein; protein id:
  misc_feature (5)..(445): Homolog of NCBI NO: 34907210 NR Description: putative serine/threonine kinase PBS1 protein
  misc_feature (17)..(333): Homolog of NCBI NO: 34394036 NR Description: putative protein serine/threonine kinase BNK1
  misc_feature (3)..(347): Homolog of NCBI NO: 11259782 NR Description: protein kinase-like - Arabidopsis thaliana
  misc_feature (3)..(347): Homolog of NCBI NO: 30679773 NR Description: protein kinase family [Arabidopsis thaliana]
MCAAAEKARVKSNGLTKEALVPKDANGNAISAQTFTFRELATATRNFRPECFLGEGGFGRVYKGRLESTGQVVAIKQLNRDGLQGNREFLVEVLMLSLLHHQNLVNLIGYCADGDQRLLVYEYMPSGSLEDHLHDLPLDKEALDWNTRMKIAAGAAKGLEYLHDKANPPVIYRDFKSSNILLDESFHPKLSDFGLAKLGPVGDKSHVSTRVMGTYGYCAPEYAMTGQLTVKSDVYSFGVVLLELITGRRAIDSTRPHGEQNLVSWARPLFNDRRKLPKMADPRLEGRYPMRGLYQALAVASMCIQSEAASRPLIADVVTALSYLASQPYDPNAALASRKPGGDQRSKPGENGRAVSRNDETGSSGHKTPAKDREDSPRDLPAILNKDLDRERMVAEAKMWGDRERMVAEAKMWGDRERMVAEAKMWGENWRDKRRAEIGQGSLDSVTGNS

SEQ ID NO: 8649 - protein, 356 aa, Zea mays subsp. mays; identical to SEQ ID NO: 3196
  peptide (1)..(356): Ceres Seq. ID no. 12347256
  misc_feature (1)..(171): Homolog of NCBI NO: 21740745 NR Description: OSJNBa0072K14.10 [Oryza sativa (japonica
  misc_feature (172)..(355): Homolog of NCBI NO: 21740745 NR Description: OSJNBa0072K14.10 [Oryza sativa (japonica
  misc_feature (1)..(311): Homolog of NCBI NO: 15240038 NR Description: protein kinase-like; protein id: At5g13160.1, by cDNA: gi_11559837, supported by cDNA: gi_13937146, supported
  misc_feature (321)..(351): Homolog of NCBI NO: 15240038 NR Description: protein kinase-like; protein id: At5g13160.1, by cDNA: gi_11559837, supported by cDNA: gi_13937146, supported
  misc_feature (1)..(320): Homolog of NCBI NO: 15238886 NR Description: protein kinase -like protein; protein id:
  misc_feature (321)..(351): Homolog of NCBI NO: 15238886 NR Description: protein kinase -like protein; protein id:
  misc_feature (1)..(351): Homolog of NCBI NO: 34907210 NR Description: putative serine/threonine kinase PBS1 protein
  misc_feature (1)..(239): Homolog of NCBI NO: 34394036 NR Description: putative protein serine/threonine kinase BNK1
  misc_feature (1)..(253): Homolog of NCBI NO: 11259782 NR Description: protein kinase-like - Arabidopsis thaliana
  misc_feature (1)..(253): Homolog of NCBI NO: 30679773 NR Description: protein kinase family [Arabidopsis thaliana]

SEQ ID NO: 8650 - protein, 327 aa, Zea mays subsp. mays
  peptide (1)..(327): Ceres Seq. ID no. 12347257
  misc_feature (1)..(142): Homolog of NCBI NO: 21740745 NR Description: OSJNBa0072K14.10 [Oryza sativa (japonica
  misc_feature (143)..(326): Homolog of NCBI NO: 21740745 NR Description: OSJNBa0072K14.10 [Oryza sativa (japonica
  misc_feature (1)..(282): Homolog of NCBI NO: 15240038 NR Description: protein kinase-like; protein id: At5g13160.1, by cDNA: gi_11559837, supported by cDNA: gi_13937146, supported
  misc_feature (292)..(322): Homolog of NCBI NO: 15240038 NR Description: protein kinase-like; protein id: At5g13160.1, by cDNA: gi_11559837, supported by cDNA: gi_13937146, supported
  misc_feature (1)..(291): Homolog of NCBI NO: 15238886 NR Description: protein kinase -like protein; protein id:
  misc_feature (292)..(322): Homolog of NCBI NO: 15238886 NR Description: protein kinase -like protein; protein id:
  misc_feature (1)..(322): Homolog of NCBI NO: 34907210 NR Description: putative serine/threonine kinase PBS1 protein
  misc_feature (1)..(210): Homolog of NCBI NO: 34394036 NR Description: putative protein serine/threonine kinase BNK1
  misc_feature (1)..(224): Homolog of NCBI NO: 11259782 NR Description: protein kinase-like - Arabidopsis thaliana
  misc_feature (1)..(224): Homolog of NCBI NO: 30679773 NR Description: protein kinase family [Arabidopsis thaliana]
MPSGSLEDHLHDLPLDKEALDWNTRMKIAAGAAKGLEYLHDKANPPVIYRDFKSSNILLDESFHPKLSDFGLAKLGPVGDKSHVSTRVMGTYGYCAPEYAMTGQLTVKSDVYSFGVVLLELITGRRAIDSTRPHGEQNLVSWARPLFNDRRKLPKMADPRLEGRYPMRGLYQALAVASMCIQSEAASRPLIADVVTALSYLASQPYDPNAALASRKPGGDQRSKPGENGRAVSRNDETGSSGHKTPAKDREDSPRDLPAILNKDLDRERMVAEAKMWGDRERMVAEAKMWGDRERMVAEAKMWGENWRDKRRAEIGQGSLDSVTGNS

SEQ ID NO: 8651 - DNA, 1345 bp, Zea mays subsp. mays
  misc_feature (1)..(1345): Ceres Seq. ID no. 12344822
  misc_feature: MA Experiment ID: 108522 Result: Down-regulated in Transcription
  misc_feature: MA Experiment 108522 PARAMETER Experiment Name: Zm_42deg_Heat_P Parameter: Age (day) Value: 8
  misc_feature: MA Experiment 108522 PARAMETER Experiment Name: Zm_42deg_Heat_P Parameter: Organism Value: Zea mays
  misc_feature: MA Experiment 108522 PARAMETER Experiment Name: Zm_42deg_Heat_P Parameter: Plant Line Value: 35A19
  misc_feature: MA Experiment 108522 PARAMETER Experiment Name: Zm_42deg_Heat_P Parameter: Temperature (deg C) Value: 42 vs. 22
  misc_feature: MA Experiment 108522 PARAMETER Experiment Name: Zm_42deg_Heat_P Parameter: Timepoint (hr) Value: 1
  misc_feature: MA Experiment 108522 PARAMETER Experiment Name: Zm_42deg_Heat_P Parameter: Tissue Value: Aerial
  misc_feature: MA Experiment ID: 108528 Result: Up-regulated in Transcription
  misc_feature: MA Experiment 108528 PARAMETER Experiment Name: Zm_Imbibed_Seeds_P Parameter: Age (day) Value: 5 vs. 2
  misc_feature: MA Experiment 108528 PARAMETER Experiment Name: Zm_Imbibed_Seeds_P Parameter: Organism Value: Zea mays
  misc_feature: MA Experiment 108528 PARAMETER Experiment Name: Zm_Imbibed_Seeds_P Parameter: Plant Line Value: 35A19
  misc_feature: MA Experiment 108528 PARAMETER Experiment Name: Zm_Imbibed_Seeds_P Parameter: Tissue Value: Aerial vs. Embryo
  misc_feature: MA Experiment ID: 108536 Result: Down-regulated in Transcription
  misc_feature: MA Experiment 108536 PARAMETER Experiment Name: Zm_Meristem_P Parameter: Age (day) Value: 8
  misc_feature: MA Experiment 108536 PARAMETER Experiment Name: Zm_Meristem_P Parameter: Organism Value: Zea mays
  misc_feature: MA Experiment 108536 PARAMETER Experiment Name: Zm_Meristem_P Parameter: Plant Line Value: 35A19
  misc_feature: MA Experiment 108536 PARAMETER Experiment Name: Zm_Meristem_P Parameter: Tissue Value: Shoot Meristem vs. Above Shoot Meristem
  misc_feature: MA Experiment ID: 108543 Result: Up-regulated in Transcription
  misc_feature: MA Experiment ID: 108545 Result: Up-regulated in Transcription
  misc_feature: MA Experiment 108545 PARAMETER Experiment Name: Zm_Imbibed_Seeds_P Parameter: Age (day) Value: 3 vs. 2
  misc_feature: MA Experiment 108545 PARAMETER Experiment Name: Zm_Imbibed_Seeds_P Parameter: Organism Value: Zea mays
  misc_feature: MA Experiment 108545 PARAMETER Experiment Name: Zm_Imbibed_Seeds_P Parameter: Plant Line Value: 35A19
  misc_feature: MA Experiment 108545 PARAMETER Experiment Name: Zm_Imbibed_Seeds_P Parameter: Tissue Value: Aerial vs. Embryo
  misc_feature: MA Experiment ID: 108546 Result: Down-regulated in Transcription
  misc_feature: MA Experiment 108546 PARAMETER Experiment Name: Zm_Imbibed_Seeds_P Parameter: Age (day) Value: 3 vs. 2
  misc_feature: MA Experiment 108546 PARAMETER Experiment Name: Zm_Imbibed_Seeds_P Parameter: Organism Value: Zea mays
  misc_feature: MA Experiment 108546 PARAMETER Experiment Name: Zm_Imbibed_Seeds_P Parameter: Plant Line Value: 35A19
  misc_feature: MA Experiment 108546 PARAMETER Experiment Name: Zm_Imbibed_Seeds_P Parameter: Tissue Value: Roots vs. Embryo
  misc_feature: MA Experiment ID: 108547 Result: Up-regulated in Transcription
  misc_feature: MA Experiment 108547 PARAMETER Experiment Name: Zm_Imbibed_Seeds_P Parameter: Age (day) Value: 4 vs. 2
  misc_feature: MA Experiment 108547 PARAMETER Experiment Name: Zm_Imbibed_Seeds_P Parameter: Organism Value: Zea mays
  misc_feature: MA Experiment 108547 PARAMETER Experiment Name: Zm_Imbibed_Seeds_P Parameter: Plant Line Value: 35A19
  misc_feature: MA Experiment 108547 PARAMETER Experiment Name: Zm_Imbibed_Seeds_P Parameter: Tissue Value: Aerial vs. Embryo
  misc_feature: MA Experiment ID: 108556 Result: Down-regulated in Transcription
  misc_feature: MA Experiment 108556 PARAMETER Experiment Name: Zm_Drought_P Parameter: Age (day) Value: 9
  misc_feature: MA Experiment 108556 PARAMETER Experiment Name: Zm_Drought_P Parameter: Organism Value: Zea mays
  misc_feature: MA Experiment 108556 PARAMETER Experiment Name: Zm_Drought_P Parameter: Plant Line Value: 35A19
  misc_feature: MA Experiment 108556 PARAMETER Experiment Name: Zm_Drought_P Parameter: Timepoint (hr) Value: 24
  misc_feature: MA Experiment 108556 PARAMETER Experiment Name: Zm_Drought_P Parameter: Tissue Value: Aerial
  misc_feature: MA Experiment 108556 PARAMETER Experiment Name: Zm_Drought_P Parameter: Treatment Value: Drought vs. No Drought
attcacaattccacatgccgctgctcaccagcacgcactgtggccgatgcgccatcgatctcatttcatgcatgccgaattatttccccccggcccctgcacaagtctagagtctagagtctagacactagactgtcttgttcagttctgacttattatctgatcatgatccgttgttattaggtgtgtgtgtgatcatgagtggatagtaagagatgataagcggcaacctcaccaatgaagacctgggggccgggcgcaccaaggccgaggggccgacgaccgcggccggggccgtcgtcgcaaagagtcccgtgctgccgagctcccggcactggccgccgtcgacggagtccaggatcgtgcgcgtgtcgcgggtcttcggcggcaaggaccggcacagcaaggtgaggacggtcaaggggctgcgcgaccggcgcgtgcggctgtccgtgccgacggcgatacagctctacgacctccaggaccggctgggcctcagccagccgagcaaggtggtggactggctgctcgacgccgcgcagcacgagatcgacaagctgcctccgcttcagttcccaccgcaggcagcgcaggacctcgtcgcccatctgccgccgccatccatggtggcgcccttcgcagccgaccgggccgaggccgacggcgacaaacgccactgccacgccggcgtcaaagggctcatgggcctcaacaattccatccgcctcgtcaacgccaccatgccgctggctcacggcttgtactacacgcccggcgagtcttggaccggtaccaatgccgatgatgccgccgcccatgatcatcagacggtggctcacggccactcgcccttctcatctctgctgtctcttgctgctccggggcctcagctcgtcttctactcgtcggaaggcggcggattcaccatgaaagaagaagccaccggttatcagttcccagtacaaaatagcctcgaccactcgcaaggccagctctcactgagctcagctagaagcttccttcgccccggcaaccagggatgattaggtcactgatctctactgctccaagaaggtacgtagaagaataaagcttggtgtagtagtaatcaagtactcatttgaaggttccgtaacggttgtaactgcagttttgagatgctattgtttggtatgatcgagtagagggtctctagcatgcataattgaggttatttttgcaggacatgcaatgcaattcgttgcttcttttttatacaaggaagcaacgacaggtcatatgggtgtgtgtgtttgtttgtattgtaataacaattttaataatccattcttgattttgtgtc

SEQ ID NO: 8652 - protein, 276 aa, Zea mays subsp. mays
  peptide (1)..(276): Ceres Seq. ID no. 12344823
  misc_feature (45)..(163): Pfam Name: TCP family transcription factor Pfam Description: TCP family transcription factor
  misc_feature (1)..(163): Homolog of NCBI NO: 34909780 NR Description: P0512C01.32 [Oryza sativa (japonica
  misc_feature (37)..(122): Homolog of NCBI NO: 15239489 NR Description: DNA binding protein - like; protein id: [Arabidopsis thaliana] >gi|10177320|dbj|BAB10646.1|
  misc_feature (1)..(124): Homolog of NCBI NO: 18396089 NR Description: expressed protein; protein id: At3g02150.1, by cDNA: 15552. [Arabidopsis thaliana]
  misc_feature (1)..(124): Homolog of NCBI NO: 30678498 NR Description: TCP family transcription factor TFPD [Arabidopsis >gi|6041802|gb|AAF02122.1|AC009755_15 unknown protein thaliana] >gi|6513919|gb|AAF14823.1|AC011664_5 unknown protein
  misc_feature (31)..(123): Homolog of NCBI NO: 15241512 NR Description: putative helix-loop-helix DNA binding protein;
  misc_feature (41)..(226): Homolog of NCBI NO: 33146716 NR Description: putative transcription factor PCF6 [Oryza sativa
  misc_feature (39)..(119): Homolog of NCBI NO: 18397402 NR Description: expressed protein; protein id: At1g30210.1, by cDNA: gi_14334669, supported by cDNA: gi_16323136 [Arabidopsis
  misc_feature (47)..(119): Homolog of NCBI NO: 25369264 NR Description: probable basic helix-loop-helix DNA binding
  misc_feature (47)..(119): Homolog of NCBI NO: 7486304 NR Description: hypothetical protein F28J12.50 - Arabidopsis
  misc_feature (47)..(119): Homolog of NCBI NO: 18415079 NR Description: teosinte branched1 - like protein; protein id: supported by cDNA: gi_14194128, supported by cDNA: gi_14194170 thaliana] >gi|14194129|gb|AAK56259.1|AF367270_1
MISGNLTNEDLGAGRTKAEGPTTAAGAVVAKSPVLPSSRHWPPSTESRIVRVSRVFGGKDRHSKVRTVKGLRDRRVRLSVPTAIQLYDLQDRLGLSQPSKVVDWLLDAAQHEIDKLPPLQFPPQAAQDLVAHLPPPSMVAPFAADRAEADGDKRHCHAGVKGLMGLNNSIRLVNATMPLAHGLYYTPGESWTGTNADDAAAHDHQTVAHGHSPFSSLLSLAAPGPQLVFYSSEGGGFTMKEEATGYQFPVQNSLDHSQGQLSLSSARSFLRPGNQG

SEQ ID NO: 8653 - protein, 139 aa, Zea mays subsp. mays
  peptide (1)..(139): Ceres Seq. ID no. 12344824
  misc_feature (1)..(26): Homolog of NCBI NO: 34909780 NR Description: P0512C01.32 [Oryza sativa (japonica
  misc_feature (1)..(89): Homolog of NCBI NO: 33146716 NR Description: putative transcription factor PCF6 [Oryza sativa
  misc_feature (1)..(11): Homolog of NCBI NO: 21624267 NR Description: transcription factor PCF8 [Oryza sativa (japonica
  misc_feature (1)..(11): Homolog of NCBI NO: 20975253 NR Description: transcription factor PCF5 [Oryza sativa (japonica
  misc_feature (1)..(38): Homolog of NCBI NO: 20269127 NR Description: TCP1 protein [Lupinus albus]
MVAPFAADRAEADGDKRHCHAGVKGLMGLNNSIRLVNATMPLAHGLYYTPGESWTGTNADDAAAHDHQTVAHGHSPFSSLLSLAAPGPQLVFYSSEGGGFTMKEEATGYQFPVQNSLDHSQGQLSLSSARSFLRPGNQG

SEQ ID NO: 8654 - DNA, 1354 bp, Zea mays subsp. mays
  misc_feature (1)..(1354): Ceres Seq. ID no. 12408354
  misc_feature: MA Experiment ID: 108522 Result: Down-regulated in Transcription
  misc_feature: MA Experiment 108522 PARAMETER Experiment Name: Zm_42deg_Heat_P Parameter: Age (day) Value: 8
  misc_feature: MA Experiment 108522 PARAMETER Experiment Name: Zm_42deg_Heat_P Parameter: Organism Value: Zea mays
  misc_feature: MA Experiment 108522 PARAMETER Experiment Name: Zm_42deg_Heat_P Parameter: Plant Line Value: 35A19
  misc_feature: MA Experiment 108522 PARAMETER Experiment Name: Zm_42deg_Heat_P Parameter: Temperature (deg C) Value: 42 vs. 22
  misc_feature: MA Experiment 108522 PARAMETER Experiment Name: Zm_42deg_Heat_P Parameter: Timepoint (hr) Value: 1
  misc_feature: MA Experiment 108522 PARAMETER Experiment Name: Zm_42deg_Heat_P Parameter: Tissue Value: Aerial
  misc_feature: MA Experiment ID: 108535 Result: Up-regulated in Transcription
  misc_feature: MA Experiment 108535 PARAMETER Experiment Name: Zm_Meristem_P Parameter: Age (day) Value: 8
  misc_feature: MA Experiment 108535 PARAMETER Experiment Name: Zm_Meristem_P Parameter: Organism Value: Zea mays
  misc_feature: MA Experiment 108535 PARAMETER Experiment Name: Zm_Meristem_P Parameter: Plant Line Value: 35A19
  misc_feature: MA Experiment 108535 PARAMETER Experiment Name: Zm_Meristem_P Parameter: Tissue Value: Root Meristem vs. Above Root Meristem
  misc_feature: MA Experiment ID: 20000487 Result: Up-regulated in Transcription
  misc_feature: MA Experiment 20000487 PARAMETER Experiment Name: Zm_50mM_NH4NO3_L_to_H_P Parameter: Organism Value: Zea mays
  misc_feature: MA Experiment 20000487 PARAMETER Experiment Name: Zm_50mM_NH4NO3_L_to_H_P Parameter: Timepoint (hr) Value: 4
  misc_feature: MA Experiment 20000487 PARAMETER Experiment Name: Zm_50mM_NH4NO3_L_to_H_P Parameter: Tissue Value: Leaves
  misc_feature: MA Experiment 20000487 PARAMETER Experiment Name: Zm_50mM_NH4NO3_L_to_H_P Parameter: Treatment Value: 50mM NH4NO3 vs. 100mM Mannitol
  misc_feature: MA Experiment ID: 20001612 Result: Up-regulated in Transcription
  misc_feature: MA Experiment 20001612 PARAMETER Experiment Name: Zm_50ppm_KNO3_L-to-H_P Parameter: Age (day) Value: 19
  misc_feature: MA Experiment 20001612 PARAMETER Experiment Name: Zm_50ppm_KNO3_L-to-H_P Parameter: Organism Value: Zea mays
  misc_feature: MA Experiment 20001612 PARAMETER Experiment Name: Zm_50ppm_KNO3_L-to-H_P Parameter: Plant Line Value: 35A19
  misc_feature: MA Experiment 20001612 PARAMETER Experiment Name: Zm_50ppm_KNO3_L-to-H_P Parameter: Timepoint (hr) Value: 8
  misc_feature: MA Experiment 20001612 PARAMETER Experiment Name: Zm_50ppm_KNO3_L-to-H_P Parameter: Tissue Value: Roots
  misc_feature: MA Experiment 20001612 PARAMETER Experiment Name: Zm_50ppm_KNO3_L-to-H_P Parameter: Treatment Value: 50ppm KNO3 vs. 50ppm KCl
aaacccgtgtccccctcgtttccgctcttctgctcctcgcgccgccgcagcgacccgacgacaggtaatggcttccgccgcggtgctccggaacgccggatctcgccgcctcttctcctaccccaccctccgtgctgctgcaatctcgggacccgccgtgctaccagatgcgcccgtggcggcgtcggtggcggcccagccgcccccgctggcctggacactctgggcgatgtccatggccaccttcacacgcacgaagccccatgtgaacgtcggcaccattgggcacgtcgaacacggcaaaaccagtctcactgccgctattaccaagggaatatcaactacaaggaattctgcttgcagatgatgctatggtgcctatctcctctcctttgactcctccactaggtgacagtgaagaaactgacaaaaagggggctgtggtaaaacgcctaaaggtccaagccataaaaaaagatatcaaacagagtcccaagaaggtgaatctagtagcaaagctggttcgaggtatgcgtgtagaagatgccctactgcagctgcaagtgactgttaaaagggctgccaaaaccgtttaccaggtgatccattctgctcgggccaatgcatctcacaaccatggattggatcctgataagctcattgttgaggaggcctttgtgggaaagggacttttcctgaagagagtgtcttaccatgccagagggaggtccggcattatggtgcgaccaaggtgcagactgacagtggtggttagagaagctacagctgaggaggaggcaaagatcgccaaactcagggtgagcaactacaagaagctgaccaggaaggagcagcagcttatgcctcacaggctcatcgaggttagcccgaggtggattcgcaagaggaaagcggaggctggtgctacggcgtagtactttatgtatgcagaacctgcattcactgctttgcacatccgaggagcgaacatgccttccctggcacaaatacttgatcctctctcggtgtcgattcacgcaaacgggttacaaagccaggcttgttcgttttgctctcaatccatgtggattggatgtgtttaaatcgcaaacaagtcaaaatcttttataagtttttctaatctcatcaaatccacgtgggatagagaataatcgaacaagaccataggtggattcaactatttggtaatcttggtcgtttggagtctaggaagagaggaaattgctatgtatttcagcgatgtgcattgtagccaactaaaatctcgccaaagcattggatgtgcatgagacacgtaccattgcttctacaatttcatgcaactattggtttc

SEQ ID NO: 8655 - protein, 187 aa, Zea mays subsp. mays
  peptide (1)..(187): Ceres Seq. ID no. 12408355
  misc_feature (32)..(136): Pfam Name: Ribosomal protein L22p/L17e Pfam Description: Ribosomal protein L22p/L17e
  misc_feature (1)..(187): Homolog of NCBI NO: 34912678 NR Description: P0686E09.8 [Oryza sativa (japonica
  misc_feature (3)..(178): Homolog of NCBI NO: 22330190 NR Description: chloroplast 50S ribosomal protein L22, putative;
  misc_feature (3)..(178): Homolog of NCBI NO: 25405544 NR Description: hypothetical protein F19K6.5 [imported] - thaliana >gi|12323131|gb|AAG51551.1|AC037424_16 chloroplast 50S
  misc_feature (3)..(178): Homolog of NCBI NO: 7485901 NR Description: hypothetical protein F20O9.30 - Arabidopsis
  misc_feature (3)..(178): Homolog of NCBI NO: 18417177 NR Description: Expressed protein; protein id: At4g28360.1, by cDNA: 18360. [Arabidopsis thaliana]
  misc_feature (3)..(178): Homolog of NCBI NO: 25407603 NR Description: copper-binding protein-like [imported] -
  misc_feature (21)..(143): Homolog of NCBI NO: 15965114 NR Description: PROBABLE 50S RIBOSOMAL PROTEIN L22 [Sinorhizobium >gi|15074294|emb|CAC45940.1| PROBABLE 50S RIBOSOMAL PROTEIN L22
  misc_feature (3)..(140): Homolog of NCBI NO: 23010684 NR Description: hypothetical protein [Magnetospirillum
  misc_feature (28)..(134): Homolog of NCBI NO: 30248423 NR Description: Ribosomal protein L22p / L17e [Nitrosomonas ATCC 19718] >gi|30138309|emb|CAD84317.1| Ribosomal protein L22p /
  misc_feature (28)..(136): Homolog of NCBI NO: 30018385 NR Description: LSU ribosomal protein L22P [Bacillus cereus ATCC >gi|29893925|gb|AAP07217.1| LSU ribosomal protein L22P [Bacillus
MVPISSPLTPPLGDSEETDKKGAVVKRLKVQAIKKDIKQSPKKVNLVAKLVRGMRVEDALLQLQVTVKRAAKTVYQVIHSARANASHNHGLDPDKLIVEEAFVGKGLFLKRVSYHARGRSGIMVRPRCRLTVVVREATAEEEAKIAKLRVSNYKKLTRKEQQLMPHRLIEVSPRWIRKRKAEAGATA

SEQ ID NO: 8656 - protein, 134 aa, Zea mays subsp. mays
  peptide (1)..(134): Ceres Seq. ID no. 12408356
  misc_feature (1)..(83): Pfam Name: Ribosomal protein L22p/L17e Pfam Description: Ribosomal protein L22p/L17e
  misc_feature (1)..(134): Homolog of NCBI NO: 34912678 NR Description: P0686E09.8 [Oryza sativa (japonica
  misc_feature (1)..(125): Homolog of NCBI NO: 22330190 NR Description: chloroplast 50S ribosomal protein L22, putative;
  misc_feature (1)..(125): Homolog of NCBI NO: 25405544 NR Description: hypothetical protein F19K6.5 [imported] - thaliana >gi|12323131|gb|AAG51551.1|AC037424_16 chloroplast 50S
  misc_feature (1)..(125): Homolog of NCBI NO: 7485901 NR Description: hypothetical protein F20O9.30 - Arabidopsis
  misc_feature (1)..(125): Homolog of NCBI NO: 18417177 NR Description: Expressed protein; protein id: At4g28360.1, by cDNA: 18360. [Arabidopsis thaliana]
  misc_feature (1)..(125): Homolog of NCBI NO: 25407603 NR Description: copper-binding protein-like [imported] -
  misc_feature (1)..(90): Homolog of NCBI NO: 15965114 NR Description: PROBABLE 50S RIBOSOMAL PROTEIN L22 [Sinorhizobium >gi|15074294|emb|CAC45940.1| PROBABLE 50S RIBOSOMAL PROTEIN L22
  misc_feature (1)..(87): Homolog of NCBI NO: 23010684 NR Description: hypothetical protein [Magnetospirillum
  misc_feature (1)..(81): Homolog of NCBI NO: 30248423 NR Description: Ribosomal protein L22p / L17e [Nitrosomonas ATCC 19718] >gi|30138309|emb|CAD84317.1| Ribosomal protein L22p /
  misc_feature (1)..(83): Homolog of NCBI NO: 30018385 NR Description: LSU ribosomal protein L22P [Bacillus cereus ATCC >gi|29893925|gb|AAP07217.1| LSU ribosomal protein L22P [Bacillus
MRVEDALLQLQVTVKRAAKTVYQVIHSARANASHNHGLDPDKLIVEEAFVGKGLFLKRVSYHARGRSGIMVRPRCRLTVVVREATAEEEAKIAKLRVSNYKKLTRKEQQLMPHRLIEVSPRWIRKRKAEAGATA

SEQ ID NO: 8657 - protein, 131 aa, Zea mays subsp. mays
  peptide (1)..(131): Ceres Seq. ID no. 12408357
KPVSPSFPLFCSSRRRSDPTTGNGFRRGAPERRISPPLLLPHPPCCCNLGTRRATRCARGGVGGGPAAPAGLDTLGDVHGHLHTHEAPCERRHHWARRTRQNQSHCRYYQGNINYKEFCLQMMLWCLSPLL

SEQ ID NO: 8658 - DNA, 1755 bp, Zea mays subsp. mays
  misc_feature (1)..(1755): Ceres Seq. ID no. 12344379
  misc_feature: MA Experiment ID: 108523 Result: Down-regulated in Transcription
  misc_feature: MA Experiment 108523 PARAMETER Experiment Name: Zm_42deg_Heat_P Parameter: Age (day) Value: 8
  misc_feature: MA Experiment 108523 PARAMETER Experiment Name: Zm_42deg_Heat_P Parameter: Organism Value: Zea mays
  misc_feature: MA Experiment 108523 PARAMETER Experiment Name: Zm_42deg_Heat_P Parameter: Plant Line Value: 35A19
  misc_feature: MA Experiment 108523 PARAMETER Experiment Name: Zm_42deg_Heat_P Parameter: Temperature (deg C) Value: 42 vs. 22
  misc_feature: MA Experiment 108523 PARAMETER Experiment Name: Zm_42deg_Heat_P Parameter: Timepoint (hr) Value: 6
  misc_feature: MA Experiment 108523 PARAMETER Experiment Name: Zm_42deg_Heat_P Parameter: Tissue Value: Aerial
  misc_feature: MA Experiment ID: 108527 Result: Down-regulated in Transcription
  misc_feature: MA Experiment 108527 PARAMETER Experiment Name: Zm_5mM_NO_P Parameter: Age (day) Value: 8
  misc_feature: MA Experiment 108527 PARAMETER Experiment Name: Zm_5mM_NO_P Parameter: Organism Value: Zea mays
  misc_feature: MA Experiment 108527 PARAMETER Experiment Name: Zm_5mM_NO_P Parameter: Plant Line Value: 35A19
  misc_feature: MA Experiment 108527 PARAMETER Experiment Name: Zm_5mM_NO_P Parameter: Timepoint (hr) Value: 6
  misc_feature: MA Experiment 108527 PARAMETER Experiment Name: Zm_5mM_NO_P Parameter: Tissue Value: Aerial
  misc_feature: MA Experiment 108527 PARAMETER Experiment Name: Zm_5mM_NO_P Parameter: Treatment Value: 5mM NO vs. No Treatment
  misc_feature: MA Experiment ID: 108689 Result: Up-regulated in Transcription
  misc_feature: MA Experiment 108689 PARAMETER Experiment Name: Zm_Drought_Roots_P Parameter: Age (day) Value: 9
  misc_feature: MA Experiment 108689 PARAMETER Experiment Name: Zm_Drought_Roots_P Parameter: Organism Value: Zea mays
  misc_feature: MA Experiment 108689 PARAMETER Experiment Name: Zm_Drought_Roots_P Parameter: Plant Line Value: 35A19
  misc_feature: MA Experiment 108689 PARAMETER Experiment Name: Zm_Drought_Roots_P Parameter: Timepoint (hr) Value: 24
  misc_feature: MA Experiment 108689 PARAMETER Experiment Name: Zm_Drought_Roots_P Parameter: Tissue Value: Roots
  misc_feature: MA Experiment 108689 PARAMETER Experiment Name: Zm_Drought_Roots_P Parameter: Treatment Value: Drought vs. No Drought
  misc_feature: MA Experiment ID: 20000492 Result: Down-regulated in Transcription
  misc_feature: MA Experiment 20000492 PARAMETER Experiment Name: Zm_Hybrid_Seed_Dev_P Parameter: DAP Value: 12
  misc_feature: MA Experiment 20000492 PARAMETER Experiment Name: Zm_Hybrid_Seed_Dev_P Parameter: Organism Value: Zea mays
  misc_feature: MA Experiment 20000492 PARAMETER Experiment Name: Zm_Hybrid_Seed_Dev_P Parameter: Plant Line Value: 35A19
  misc_feature: MA Experiment 20000492 PARAMETER Experiment Name: Zm_Hybrid_Seed_Dev_P Parameter: Tissue Value: Fert Kernel vs. Unfert Floret
  misc_feature: MA Experiment ID: 20000535 Result: Down-regulated in Transcription
  misc_feature: MA Experiment 20000535 PARAMETER Experiment Name: Zm_Hybrid_Seed_Dev_P Parameter: DAP Value: 30 vs. 12
  misc_feature: MA Experiment 20000535 PARAMETER Experiment Name: Zm_Hybrid_Seed_Dev_P Parameter: Organism Value: Zea mays
  misc_feature: MA Experiment 20000535 PARAMETER Experiment Name: Zm_Hybrid_Seed_Dev_P Parameter: Plant Line Value: 35A19
  misc_feature: MA Experiment 20000535 PARAMETER Experiment Name: Zm_Hybrid_Seed_Dev_P Parameter: Tissue Value: Embryo vs. Unfert Floret
aaaccgaagcagcgacagagctcttccctcccacacgctcggcgctctgtccgccagaaatctcgtcgctggtagaagagaatcgtgccatttgtcatgtcaggaggatcttcaccatcatcaaggcgaaacagctttaattctttgtctaaggacctagaccttccttcagagcaaggttgtctctccattgttgtacttggggcttctggtgaccttgctaagaagaaaacattcccagccctctaccacctctttgagcagggattcatacaatctggagaagtccatatatttggttatgctagatcaaatctttctgatgatgggttaagagaacgcattcgtgggtatctcaaaggagccccagaagatctttcagaatttttgcaactaataaaatatgtcagtggttcctatgatactggagaaggatttgagaaactgaacagggcaatatcagagtatgaggtgtcaaagagttcaggaagctatcgcaggctcttttatttggcattgcctccatctgtctacccttcagtgtgcaaaatgatcagaacatattgcatgaatccatcttctcaccctggatggaccagagtcattgttgagaagccctttggaaaggacttggattccgctgaagaattaagtgcccaacttggggagctattcgaggaacaccaactatacaggatagaccattacctgggaaaagagttggtccaaaacttgcttgttcttcgttttgccaaccgattattcttgcctctttggaaccgcgacaatattgataatatacagattgtattcagggaagactttggtactgaagggcgtggaggatattttgaccaatatggaatcattcgtgatatcattcagaatcatttactgcaggttttctgtttggttgcaatggaaaagcctgtctcccttaagcctgagcacatcagagatgagaaagtcaaggttctgcaatctgtgaaccctattaagcctgaagaggtagtccttgggcaatacgatggctacaaggatgaccctacagtgccagatgactcgaataccccaacttttgcatctgttgttcttcgggtacacaatgaaagatgggaaggtgttcctttcattcttaaagctggtaaagcattgagttcaaagaaagcagaagttcgggtgcaattcaaggatgtccctggtgacatttttagaagcaagaagcaaggaagaaatgagtttgttatacgcctccaaccatcagaagccatgtacatgaaactaactgttaagaagcctgggttagaaatggctactgaacaaagtgaacttgatctgtcatatgggatgcggtaccaaaatgtcaaaattcctgaggcatatgaacgccttatcttggatacaataagaggtgatcagcagcactttgttcgcagagatgagctacaggctgcttggaagatcttcactcctttgctgcatgacattgacgacggcaagctgaaggccctcccgtatgaacctggcagccggggacccaaggaagccgacgaattgagcgcgagagttggatacgtgcagacccacggttacatatgggtaccgccgacccttgcatagaagagaatacgaattgtttgtacctaggaagatccgagtgtcctacaataaagctgtgcgtatatgctcattttcgctatatcgcctgccgttgtaataatgttgtgctggatatgaaataaaattgcgtgttcc

SEQ ID NO: 8659 - protein, 507 aa, Zea mays subsp. mays
  peptide (1)..(507): Ceres Seq. ID no. 12344380
  misc_feature (214)..(498): Pfam Name: Glucose-6-phosphate dehydrogenase, C-terminal domain Pfam Description: Glucose-6-phosphate dehydrogenase, C-terminal
  misc_feature (1)..(507): Homolog of NCBI NO: 19071787 NR Description: glucose-6-phosphate dehydrogenase [Oryza sativa]
  misc_feature (1)..(507): Homolog of NCBI NO: 8918502 NR Description: glucose-6-phosphate dehydrogenase [Triticum
  misc_feature (1)..(507): Homolog of NCBI NO: 8918504 NR Description: glucose-6-phosphate dehydrogenase [Triticum
  misc_feature (1)..(507): Homolog of NCBI NO: 8918506 NR Description: glucose-6-phosphate dehydrogenase [Triticum
  misc_feature (10)..(506): Homolog of NCBI NO: 585165 NR Description: Glucose-6-phosphate 1-dehydrogenase, cytoplasmic
  misc_feature (15)..(506): Homolog of NCBI NO: 3021508 NR Description: glucose-6-phosphate dehydrogenase [Nicotiana
  misc_feature (8)..(506): Homolog of NCBI NO: 3021510 NR Description: glucose-6-phosphate dehydrogenase [Nicotiana
  misc_feature (1)..(506): Homolog of NCBI NO: 15237485 NR Description: glucose-6-phosphate dehydrogenase; protein id:
  misc_feature (1)..(506): Homolog of NCBI NO: 25283727 NR Description: glucose-6-phosphate 1-dehydrogenase (EC 1.1.1.49)
  misc_feature (10)..(501): Homolog of NCBI NO: 31205007 NR Description: ENSANGP00000018551 [Anopheles gambiae]
MSGGSSPSSRRNSFNSLSKDLDLPSEQGCLSIVVLGASGDLAKKKTFPALYHLFEQGFIQSGEVHIFGYARSNLSDDGLRERIRGYLKGAPEDLSEFLQLIKYVSGSYDTGEGFEKLNRAISEYEVSKSSGSYRRLFYLALPPSVYPSVCKMIRTYCMNPSSHPGWTRVIVEKPFGKDLDSAEELSAQLGELFEEHQLYRIDHYLGKELVQNLLVLRFANRLFLPLWNRDNIDNIQIVFREDFGTEGRGGYFDQYGIIRDIIQNHLLQVFCLVAMEKPVSLKPEHIRDEKVKVLQSVNPIKPEEVVLGQYDGYKDDPTVPDDSNTPTFASVVLRVHNERWEGVPFILKAGKALSSKKAEVRVQFKDVPGDIFRSKKQGRNEFVIRLQPSEAMYMKLTVKKPGLEMATEQSELDLSYGMRYQNVKIPEAYERLILDTIRGDQQHFVRRDELQAAWKIFTPLLHDIDDGKLKALPYEPGSRGPKEADELSARVGYVQTHGYIWVPPTLA

SEQ ID NO: 8660 - protein, 356 aa, Zea mays subsp. mays
  peptide (1)..(356): Ceres Seq. ID no. 12344381
  misc_feature (63)..(347): Pfam Name: Glucose-6-phosphate dehydrogenase, C-terminal domain Pfam Description: Glucose-6-phosphate dehydrogenase, C-terminal
  misc_feature (1)..(356): Homolog of NCBI NO: 19071787 NR Description: glucose-6-phosphate dehydrogenase [Oryza sativa]
  misc_feature (1)..(356): Homolog of NCBI NO: 8918502 NR Description: glucose-6-phosphate dehydrogenase [Triticum
  misc_feature (1)..(356): Homolog of NCBI NO: 8918504 NR Description: glucose-6-phosphate dehydrogenase [Triticum
  misc_feature (1)..(356): Homolog of NCBI NO: 8918506 NR Description: glucose-6-phosphate dehydrogenase [Triticum
  misc_feature (1)..(355): Homolog of NCBI NO: 585165 NR Description: Glucose-6-phosphate 1-dehydrogenase, cytoplasmic
  misc_feature (1)..(355): Homolog of NCBI NO: 3021508 NR Description: glucose-6-phosphate dehydrogenase [Nicotiana
  misc_feature (1)..(355): Homolog of NCBI NO: 3021510 NR Description: glucose-6-phosphate dehydrogenase [Nicotiana
  misc_feature (1)..(355): Homolog of NCBI NO: 15237485 NR Description: glucose-6-phosphate dehydrogenase; protein id:
  misc_feature (1)..(355): Homolog of NCBI NO: 25283727 NR Description: glucose-6-phosphate 1-dehydrogenase (EC 1.1.1.49)
  misc_feature (1)..(350): Homolog of NCBI NO: 31205007 NR Description: ENSANGP00000018551 [Anopheles gambiae]
MIRTYCMNPSSHPGWTRVIVEKPFGKDLDSAEELSAQLGELFEEHQLYRIDHYLGKELVQNLLVLRFANRLFLPLWNRDNIDNIQIVFREDFGTEGRGGYFDQYGIIRDIIQNHLLQVFCLVAMEKPVSLKPEHIRDEKVKVLQSVNPIKPEEVVLGQYDGYKDDPTVPDDSNTPTFASVVLRVHNERWEGVPFILKAGKALSSKKAEVRVQFKDVPGDIFRSKKQGRNEFVIRLQPSEAMYMKLTVKKPGLEMATEQSELDLSYGMRYQNVKIPEAYERLILDTIRGDQQHFVRRDELQAAWKIFTPLLHDIDDGKLKALPYEPGSRGPKEADELSARVGYVQTHGYIWVPPTLA

SEQ ID NO: 8661 - protein, 350 aa, Zea mays subsp. mays
  peptide (1)..(350): Ceres Seq. ID no. 12344382
  misc_feature (57)..(341): Pfam Name: Glucose-6-phosphate dehydrogenase, C-terminal domain Pfam Description: Glucose-6-phosphate dehydrogenase, C-terminal
  misc_feature (1)..(350): Homolog of NCBI NO: 19071787 NR Description: glucose-6-phosphate dehydrogenase [Oryza sativa]
  misc_feature (1)..(350): Homolog of NCBI NO: 8918502 NR Description: glucose-6-phosphate dehydrogenase [Triticum
  misc_feature (1)..(350): Homolog of NCBI NO: 8918504 NR Description: glucose-6-phosphate dehydrogenase [Triticum
  misc_feature (1)..(350): Homolog of NCBI NO: 8918506 NR Description: glucose-6-phosphate dehydrogenase [Triticum
  misc_feature (1)..(349): Homolog of NCBI NO: 585165 NR Description: Glucose-6-phosphate 1-dehydrogenase, cytoplasmic
  misc_feature (1)..(349): Homolog of NCBI NO: 3021508 NR Description: glucose-6-phosphate dehydrogenase [Nicotiana
  misc_feature (1)..(349): Homolog of NCBI NO: 3021510 NR Description: glucose-6-phosphate dehydrogenase [Nicotiana
  misc_feature (1)..(349): Homolog of NCBI NO: 15237485 NR Description: glucose-6-phosphate dehydrogenase; protein id:
  misc_feature (1)..(349): Homolog of NCBI NO: 25283727 NR Description: glucose-6-phosphate 1-dehydrogenase (EC 1.1.1.49)
  misc_feature (1)..(344): Homolog of NCBI NO: 31205007 NR Description: ENSANGP00000018551 [Anopheles gambiae]
MNPSSHPGWTRVIVEKPFGKDLDSAEELSAQLGELFEEHQLYRIDHYLGKELVQNLLVLRFANRLFLPLWNRDNIDNIQIVFREDFGTEGRGGYFDQYGIIRDIIQNHLLQVFCLVAMEKPVSLKPEHIRDEKVKVLQSVNPIKPEEVVLGQYDGYKDDPTVPDDSNTPTFASVVLRVHNERWEGVPFILKAGKALSSKKAEVRVQFKDVPGDIFRSKKQGRNEFVIRLQPSEAMYMKLTVKKPGLEMATEQSELDLSYGMRYQNVKIPEAYERLILDTIRGDQQHFVRRDELQAAWKIFTPLLHDIDDGKLKALPYEPGSRGPKEADELSARVGYVQTHGYIWVPPTLA

SEQ ID NO: 8662 - DNA, 1429 bp, Zea mays subsp. mays
  misc_feature (1)..(1429): Ceres Seq. ID no. 12407159
  misc_feature: MA Experiment ID: 108523 Result: Down-regulated in Transcription
  misc_feature: MA Experiment 108523 PARAMETER Experiment Name: Zm_42deg_Heat_P Parameter: Age (day) Value: 8
  misc_feature: MA Experiment 108523 PARAMETER Experiment Name: Zm_42deg_Heat_P Parameter: Organism Value: Zea mays
  misc_feature: MA Experiment 108523 PARAMETER Experiment Name: Zm_42deg_Heat_P Parameter: Plant Line Value: 35A19
  misc_feature: MA Experiment 108523 PARAMETER Experiment Name: Zm_42deg_Heat_P Parameter: Temperature (deg C) Value: 42 vs. 22
  misc_feature: MA Experiment 108523 PARAMETER Experiment Name: Zm_42deg_Heat_P Parameter: Timepoint (hr) Value: 6
  misc_feature: MA Experiment 108523 PARAMETER Experiment Name: Zm_42deg_Heat_P Parameter: Tissue Value: Aerial
  misc_feature: MA Experiment ID: 108527 Result: Down-regulated in Transcription
  misc_feature: MA Experiment 108527 PARAMETER Experiment Name: Zm_5mM_NO_P Parameter: Age (day) Value: 8
  misc_feature: MA Experiment 108527 PARAMETER Experiment Name: Zm_5mM_NO_P Parameter: Organism Value: Zea mays
  misc_feature: MA Experiment 108527 PARAMETER Experiment Name: Zm_5mM_NO_P Parameter: Plant Line Value: 35A19
  misc_feature: MA Experiment 108527 PARAMETER Experiment Name: Zm_5mM_NO_P Parameter: Timepoint (hr) Value: 6
  misc_feature: MA Experiment 108527 PARAMETER Experiment Name: Zm_5mM_NO_P Parameter: Tissue Value: Aerial
  misc_feature: MA Experiment 108527 PARAMETER Experiment Name: Zm_5mM_NO_P Parameter: Treatment Value: 5mM NO vs. No Treatment
  misc_feature: MA Experiment ID: 108543 Result: Up-regulated in Transcription
  misc_feature: MA Experiment ID: 108544 Result: Up-regulated in Transcription
  misc_feature: MA Experiment ID: 108547 Result: Up-regulated in Transcription
  misc_feature: MA Experiment 108547 PARAMETER Experiment Name: Zm_Imbibed_Seeds_P Parameter: Age (day) Value: 4 vs. 2
  misc_feature: MA Experiment 108547 PARAMETER Experiment Name: Zm_Imbibed_Seeds_P Parameter: Organism Value: Zea mays
  misc_feature: MA Experiment 108547 PARAMETER Experiment Name: Zm_Imbibed_Seeds_P Parameter: Plant Line Value: 35A19
  misc_feature: MA Experiment 108547 PARAMETER Experiment Name: Zm_Imbibed_Seeds_P Parameter: Tissue Value: Aerial vs. Embryo
  misc_feature: MA Experiment ID: 20000626 Result: Down-regulated in Transcription
  misc_feature: MA Experiment 20000626 PARAMETER Experiment Name: Zm_Herbicide-Treatments_P Parameter: Timepoint (hr) Value: 12
  misc_feature: MA Experiment 20000626 PARAMETER Experiment Name: Zm_Herbicide-Treatments_P Parameter: Tissue Value: Aerial
  misc_feature: MA Experiment 20000626 PARAMETER Experiment Name: Zm_Herbicide-Treatments_P Parameter: Treatment Value: Roundup vs. No Treatment
  misc_feature: MA Experiment ID: 20000627 Result: Down-regulated in Transcription
  misc_feature: MA Experiment 20000627 PARAMETER Experiment Name: Zm_Herbicide-Treatments_P Parameter: Timepoint (hr) Value: 12
  misc_feature: MA Experiment 20000627 PARAMETER Experiment Name: Zm_Herbicide-Treatments_P Parameter: Tissue Value: Aerial
  misc_feature: MA Experiment 20000627 PARAMETER Experiment Name: Zm_Herbicide-Treatments_P Parameter: Treatment Value: Finale vs. No Treatment
aaaaatttttccttaaaactgcctcctcagttagaaaaagccacgcaactttgcaagtcacgacctcatggaagaggtgagccaccccgtgacggattgacaccaagtcagtctcactcaagtaaagtggacgccaagtcagtcacactcacaccaccgtagcacacaccagtacaccacacactcgcctttccgatcccatccctctccagccaccttcctccgctcgccgtgcttctgcttcctccgccaccaccgccggcatggctgcgcgctgcccctacttcgccgtcgaggagtcctcccgcggcatccgctcgggggagtccccggccgcggcgctccgccggatcctcgcgacgcctggtgcgcaccaggcgccctgctgctacgacgcgctcggcgcgcgcctcgtcgagcgcgcggggtttccgatcgggttcatgggcggtttctgtgtttctgccgcgcgacttggcttgcctgatgttggcctcatttcctatggagaaatggtagatcaagggcgtctcatcaatgaagctgtttcaatcccagtgattggtgatggagacaatggttacggaaactctatgaatatcaagagaaccataaaaggatatatcaatgctggttttgctggaattatgcttgaggatcaggtggcacctaaagcatgtggacatactgaaggaaggaaagtcatatcaagggaggaagctgtcatgcacataaaagctgctgtagatgctaggaaagagagtggctctgacattgttattgtagcaaggacagattctcgccaagctatttctcatgatgaagcattatggagggtgaaagcatttgctgatgctggagcagatgttctatttattgatgcccttgcttcagtagaagagatgaaagcattttgtgcggttgcaccagaagttccaaagatggcaaacatgttagaaggtggtggtaaaactcccatattgagccctgctgaacttgaggaaattggtttcaggcttgtagtatatcctttatccttagttggggtatcaatgcgtgcaatgcaggatgctctagttgcgataaaagacggcggtgtacctccacctagcgtcctgccatcttttcaggagatcaaggatacattgggtttcaaccgctattataaagaagagaaacaataccaagtggacaagtgaaggaagcagctgaagtctgatcctgtggattcagtcggatcgtggccatggcttaatttccaccggacatgctgggcttccaccggacatgatgcagaccaatcgtatttatgttgagttgtaatcgaacgctgcgtagcgcagtatcccgaagaacatatatatggggtcttctcttccgtttctgctctgctgtggtttcaataatcccgaaactgtgattccagttt

SEQ ID NO: 8663 - protein, 311 aa, Zea mays subsp. mays
  peptide (1)..(311): Ceres Seq. ID no. 12407160
  misc_feature (24)..(204): Pfam Name: Isocitrate lyase family Pfam Description: Isocitrate lyase family
  misc_feature (10)..(307): Homolog of NCBI NO: 25408843 NR Description: probable carboxyphosphonoenolpyruvate mutase - Arabidopsis thaliana >gi|3763927|gb|AAC64307.1| putative
  misc_feature (22)..(310): Homolog of NCBI NO: 23043034 NR Description: hypothetical protein [Trichodesmium erythraeum
  misc_feature (40)..(301): Homolog of NCBI NO: 40747280 NR Description: hypothetical protein AN9369.2 [Aspergillus
  misc_feature (1)..(307): Homolog of NCBI NO: 38347227 NR Description: OSJNBa0044M19.9 [Oryza sativa (japonica
  misc_feature (10)..(311): Homolog of NCBI NO: 30689278 NR Description: carboxyphosphonoenolpyruvate mutase -related thaliana] >gi|26450281|dbj|BAC42257.1| putative mutase [Arabidopsis thaliana] >gi|28827730|gb|AAO50709.1|
  misc_feature (10)..(311): Homolog of NCBI NO: 30689282 NR Description: carboxyphosphonoenolpyruvate mutase -related
  misc_feature (1)..(309): Homolog of NCBI NO: 32490267 NR Description: OSJNBb0116K07.9 [Oryza sativa (japonica
  misc_feature (12)..(308): Homolog of NCBI NO: 40739091 NR Description: hypothetical protein AN6882.2 [Aspergillus
  misc_feature (22)..(308): Homolog of NCBI NO: 17229355 NR Description: carboxyphosphonoenolpyruvate phosphonomutase sp. PCC 7120] >gi|25324632|pir||AI2038
  misc_feature (16)..(259): Homolog of NCBI NO: 33599708 NR Description: carboxyvinyl-carboxyphosphonate phosphorylmutase
MAARCPYFAVEESSRGIRSGESPAAALRRILATPGAHQAPCCYDALGARLVERAGFPIGFMGGFCVSAARLGLPDVGLISYGEMVDQGRLINEAVSIPVIGDGDNGYGNSMNIKRTIKGYINAGFAGIMLEDQVAPKACGHTEGRKVISREEAVMHIKAAVDARKESGSDIVIVARTDSRQAISHDEALWRVKAFADAGADVLFIDALASVEEMKAFCAVAPEVPKMANMLEGGGKTPILSPAELEEIGFRLVVYPLSLVGVSMRAMQDALVAIKDGGVPPPSVLPSFQEIKDTLGFNRYYKEEKQYQVDK

SEQ ID NO: 8664 - protein, 251 aa, Zea mays subsp. mays
  peptide (1)..(251): Ceres Seq. ID no. 12407161
  misc_feature (1)..(144): Pfam Name: Isocitrate lyase family Pfam Description: Isocitrate lyase family
  misc_feature (1)..(247): Homolog of NCBI NO: 38347227 NR Description: OSJNBa0044M19.9 [Oryza sativa (japonica
  misc_feature (1)..(249): Homolog of NCBI NO: 32490267 NR Description: OSJNBb0116K07.9 [Oryza sativa (japonica
  misc_feature (1)..(251): Homolog of NCBI NO: 30689278 NR Description: carboxyphosphonoenolpyruvate mutase -related thaliana] >gi|26450281|dbj|BAC42257.1| putative mutase [Arabidopsis thaliana] >gi|28827730|gb|AAO50709.1|
  misc_feature (1)..(251): Homolog of NCBI NO: 30689282 NR Description: carboxyphosphonoenolpyruvate mutase -related
  misc_feature (1)..(247): Homolog of NCBI NO: 25408843 NR Description: probable carboxyphosphonoenolpyruvate mutase - Arabidopsis thaliana >gi|3763927|gb|AAC64307.1| putative
  misc_feature (1)..(250): Homolog of NCBI NO: 23043034 NR Description: hypothetical protein [Trichodesmium erythraeum
  misc_feature (1)..(241): Homolog of NCBI NO: 40747280 NR Description: hypothetical protein AN9369.2 [Aspergillus
  misc_feature (1)..(248): Homolog of NCBI NO: 40739091 NR Description: hypothetical protein AN6882.2 [Aspergillus
  misc_feature (1)..(248): Homolog of NCBI NO: 17229355 NR Description: carboxyphosphonoenolpyruvate phosphonomutase sp. PCC 7120] >gi|25324632|pir||AI2038
  misc_feature (1)..(199): Homolog of NCBI NO: 33599708 NR Description: carboxyvinyl-carboxyphosphonate phosphorylmutase
MGGFCVSAARLGLPDVGLISYGEMVDQGRLINEAVSIPVIGDGDNGYGNSMNIKRTIKGYINAGFAGIMLEDQVAPKACGHTEGRKVISREEAVMHIKAAVDARKESGSDIVIVARTDSRQAISHDEALWRVKAFADAGADVLFIDALASVEEMKAFCAVAPEVPKMANMLEGGGKTPILSPAELEEIGFRLVVYPLSLVGVSMRAMQDALVAIKDGGVPPPSVLPSFQEIKDTLGFNRYYKEEKQYQVDK

SEQ ID NO: 8665 - protein, 228 aa, Zea mays subsp. mays
  peptide (1)..(228): Ceres Seq. ID no. 12407162
  misc_feature (1)..(121): Pfam Name: Isocitrate lyase family Pfam Description: Isocitrate lyase family
  misc_feature (1)..(224): Homolog of NCBI NO: 38347227 NR Description: OSJNBa0044M19.9 [Oryza sativa (japonica
  misc_feature (1)..(226): Homolog of NCBI NO: 32490267 NR Description: OSJNBb0116K07.9 [Oryza sativa (japonica
  misc_feature (1)..(228): Homolog of NCBI NO: 30689278 NR Description: carboxyphosphonoenolpyruvate mutase -related thaliana] >gi|26450281|dbj|BAC42257.1| putative mutase [Arabidopsis thaliana] >gi|28827730|gb|AAO50709.1|
  misc_feature (1)..(228): Homolog of NCBI NO: 30689282 NR Description: carboxyphosphonoenolpyruvate mutase -related
  misc_feature (1)..(224): Homolog of NCBI NO: 25408843 NR Description: probable carboxyphosphonoenolpyruvate mutase - Arabidopsis thaliana >gi|3763927|gb|AAC64307.1| putative
  misc_feature (1)..(227): Homolog of NCBI NO: 23043034 NR Description: hypothetical protein [Trichodesmium erythraeum
  misc_feature (1)..(218): Homolog of NCBI NO: 40747280 NR Description: hypothetical protein AN9369.2 [Aspergillus
  misc_feature (1)..(225): Homolog of NCBI NO: 40739091 NR Description: hypothetical protein AN6882.2 [Aspergillus
  misc_feature (1)..(225): Homolog of NCBI NO: 17229355 NR Description: carboxyphosphonoenolpyruvate phosphonomutase sp. PCC 7120] >gi|25324632|pir||AI2038
  misc_feature (1)..(176): Homolog of NCBI NO: 33599708 NR Description: carboxyvinyl-carboxyphosphonate phosphorylmutase
MVDQGRLINEAVSIPVIGDGDNGYGNSMNIKRTIKGYINAGFAGIMLEDQVAPKACGHTEGRKVISREEAVMHIKAAVDARKESGSDIVIVARTDSRQAISHDEALWRVKAFADAGADVLFIDALASVEEMKAFCAVAPEVPKMANMLEGGGKTPILSPAELEEIGFRLVVYPLSLVGVSMRAMQDALVAIKDGGVPPPSVLPSFQEIKDTLGFNRYYKEEKQYQVDK

SEQ ID NO: 8666 - DNA, 970 bp, Zea mays subsp. mays
  misc_feature (1)..(970): Ceres Seq. ID no. 12391403
  misc_feature: MA Experiment ID: 108528 Result: Up-regulated in Transcription
  misc_feature: MA Experiment 108528 PARAMETER Experiment Name: Zm_Imbibed_Seeds_P Parameter: Age (day) Value: 5 vs. 2
  misc_feature: MA Experiment 108528 PARAMETER Experiment Name: Zm_Imbibed_Seeds_P Parameter: Organism Value: Zea mays
  misc_feature: MA Experiment 108528 PARAMETER Experiment Name: Zm_Imbibed_Seeds_P Parameter: Plant Line Value: 35A19
  misc_feature: MA Experiment 108528 PARAMETER Experiment Name: Zm_Imbibed_Seeds_P Parameter: Tissue Value: Aerial vs. Embryo
  misc_feature: MA Experiment ID: 108530 Result: Up-regulated in Transcription
  misc_feature: MA Experiment 108530 PARAMETER Experiment Name: Zm_Imbibed_Seeds_P Parameter: Age (day) Value: 6 vs. 2
  misc_feature: MA Experiment 108530 PARAMETER Experiment Name: Zm_Imbibed_Seeds_P Parameter: Organism Value: Zea mays
  misc_feature: MA Experiment 108530 PARAMETER Experiment Name: Zm_Imbibed_Seeds_P Parameter: Plant Line Value: 35A19
  misc_feature: MA Experiment 108530 PARAMETER Experiment Name: Zm_Imbibed_Seeds_P Parameter: Tissue Value: Aerial vs. Embryo
  misc_feature: MA Experiment ID: 108543 Result: Down-regulated in Transcription
  misc_feature: MA Experiment ID: 108545 Result: Up-regulated in Transcription
  misc_feature: MA Experiment 108545 PARAMETER Experiment Name: Zm_Imbibed_Seeds_P Parameter: Age (day) Value: 3 vs. 2
  misc_feature: MA Experiment 108545 PARAMETER Experiment Name: Zm_Imbibed_Seeds_P Parameter: Organism Value: Zea mays
  misc_feature: MA Experiment 108545 PARAMETER Experiment Name: Zm_Imbibed_Seeds_P Parameter: Plant Line Value: 35A19
  misc_feature: MA Experiment 108545 PARAMETER Experiment Name: Zm_Imbibed_Seeds_P Parameter: Tissue Value: Aerial vs. Embryo
  misc_feature: MA Experiment ID: 108547 Result: Up-regulated in Transcription
  misc_feature: MA Experiment 108547 PARAMETER Experiment Name: Zm_Imbibed_Seeds_P Parameter: Age (day) Value: 4 vs. 2
  misc_feature: MA Experiment 108547 PARAMETER Experiment Name: Zm_Imbibed_Seeds_P Parameter: Organism Value: Zea mays
  misc_feature: MA Experiment 108547 PARAMETER Experiment Name: Zm_Imbibed_Seeds_P Parameter: Plant Line Value: 35A19
  misc_feature: MA Experiment 108547 PARAMETER Experiment Name: Zm_Imbibed_Seeds_P Parameter: Tissue Value: Aerial vs. Embryo
gtcgaaaccacagccacacaggcagccggtgctgggcctcggcactcggcagccatggttcgccttgcgaagttctatctcgtctgctacaactccctccaatcgctcggatggttcgtcgccctcctccgcctcgtgccctgcctcgtccctcccttccctgtccactccgcgtacgtggtcgccggcgacctcatctgtttcctgcagacatgtgcgatccttgaaacggtccacgctgccatcggattggtgccgaccgcgccacttcttgctttcttgcaatggggagggaggatccacttcatcctggctgttgtccggcaaattcgcgaggttcagagcagtccatctgtgttcataacatttatagcttggagcatatctgaggtcatccgttactctcactatgctctgagtaccttaaaagtttgtccagcatggctgacttatctcaggtacactgcttttatcccgctgtatccaatcggggttggtccaggagaaatgtggacaatgtaccaagccctcccatttgtgaagaagagggacctttactcaggtttcttcgagaagttctccatgagctaccgttcctttctagtgggtgtgctggtgctctacccgttcctgtggctgaagctgtaccagcacgtgttcaagcagcgcaagtccaagctggggaaggggagcaggaagaaacgggcctgagaaaatctggctctgctcagctcagctcagctcagctgccacttgttgctgtcatgtgaaacgctaacgggtcattgtggatttttgttttggaagaaaatctttgagttgttgtctgatgcgacggtgaaggttttgctgaatcgggcagtaattggattacgctttgggttctctgtttgtttcaattgctctgcgttttatgtctgtattaacatacatcaagcatatataatagtcatgttgctgctgcgagtct

SEQ ID NO: 8667 - protein, 236 aa, Zea mays subsp. mays
  peptide (1)..(236): Ceres Seq. ID no. 12391404
  misc_feature (70)..(229): Pfam Name: Protein tyrosine phosphatase-like protein, PTPLA Pfam Description: Protein tyrosine phosphatase-like protein, PTPLA
  misc_feature (19)..(232): Homolog of NCBI NO: 26453242 NR Description: unknown protein [Arabidopsis thaliana]
  misc_feature (3)..(228): Homolog of NCBI NO: 27882121 NR Description: Similar to RIKEN cDNA 6330408J20 gene [Danio
  misc_feature (11)..(235): Homolog of NCBI NO: 34869216 NR Description: similar to protein tyrosine phosphatase-like
  misc_feature (11)..(235): Homolog of NCBI NO: 20892371 NR Description: similar to protein tyrosine phosphatase-like PTPLB [Mus musculus] >gi|12857727|dbj|BAB31092.1| unnamed protein [Mus musculus] >gi|20070640|gb|AAH27289.1| RIKEN cDNA 6330408J20
  misc_feature (11)..(235): Homolog of NCBI NO: 12963741 NR Description: protein tyrosine phosphatase-like protein PTPLB
  misc_feature (92)..(235): Homolog of NCBI NO: 37550654 NR Description: similar to protein tyrosine phosphatase-like
  misc_feature (11)..(78): Homolog of NCBI NO: 37550654 NR Description: similar to protein tyrosine phosphatase-like
  misc_feature (22)..(227): Homolog of NCBI NO: 6851207 NR Description: protein tyrosine phosphatase-like protein PTPLA
  misc_feature (11)..(227): Homolog of NCBI NO: 7305421 NR Description: protein tyrosine phosphatase-like (proline of catalytic arginine), member a [Mus musculus]
  misc_feature (11)..(227): Homolog of NCBI NO: 12845340 NR Description: unnamed protein product [Mus musculus]
VETTATQAAGAGPRHSAAMVRLAKFYLVCYNSLQSLGWFVALLRLVPCLVPPFPVHSAYVVAGDLICFLQTCAILETVHAAIGLVPTAPLLAFLQWGGRIHFILAVVRQIREVQSSPSVFITFIAWSISEVIRYSHYALSTLKVCPAWLTYLRYTAFIPLYPIGVGPGEMWTMYQALPFVKKRDLYSGFFEKFSMSYRSFLVGVLVLYPFLWLKLYQHVFKQRKSKLGKGSRKKRA

SEQ ID NO: 8668 - protein, 218 aa, Zea mays subsp. mays
  peptide (1)..(218): Ceres Seq. ID no. 12391405
  misc_feature (52)..(211): Pfam Name: Protein tyrosine phosphatase-like protein, PTPLA Pfam Description: Protein tyrosine phosphatase-like protein, PTPLA
  misc_feature (1)..(214): Homolog of NCBI NO: 26453242 NR Description: unknown protein [Arabidopsis thaliana]
  misc_feature (1)..(210): Homolog of NCBI NO: 27882121 NR Description: Similar to RIKEN cDNA 6330408J20 gene [Danio
  misc_feature (1)..(217): Homolog of NCBI NO: 34869216 NR Description: similar to protein tyrosine phosphatase-like
  misc_feature (1)..(217): Homolog of NCBI NO: 20892371 NR Description: similar to protein tyrosine phosphatase-like PTPLB [Mus musculus] >gi|12857727|dbj|BAB31092.1| unnamed protein [Mus musculus] >gi|20070640|gb|AAH27289.1| RIKEN cDNA 6330408J20
  misc_feature (1)..(217): Homolog of NCBI NO: 12963741 NR Description: protein tyrosine phosphatase-like protein PTPLB
  misc_feature (74)..(217): Homolog of NCBI NO: 37550654 NR Description: similar to protein tyrosine phosphatase-like
  misc_feature (1)..(60): Homolog of NCBI NO: 37550654 NR Description: similar to protein tyrosine phosphatase-like
  misc_feature (4)..(209): Homolog of NCBI NO: 6851207 NR Description: protein tyrosine phosphatase-like protein PTPLA
  misc_feature (1)..(209): Homolog of NCBI NO: 7305421 NR Description: protein tyrosine phosphatase-like (proline of catalytic arginine), member a [Mus musculus]
  misc_feature (1)..(209): Homolog of NCBI NO: 12845340 NR Description: unnamed protein product [Mus musculus]
MVRLAKFYLVCYNSLQSLGWFVALLRLVPCLVPPFPVHSAYVVAGDLICFLQTCAILETVHAAIGLVPTAPLLAFLQWGGRIHFILAVVRQIREVQSSPSVFITFIAWSISEVIRYSHYALSTLKVCPAWLTYLRYTAFIPLYPIGVGPGEMWTMYQALPFVKKRDLYSGFFEKFSMSYRSFLVGVLVLYPFLWLKLYQHVFKQRKSKLGKGSRKKRA

SEQ ID NO: 8669 - protein, 120 aa, Zea mays subsp. mays
  peptide (1)..(120): Ceres Seq. ID no. 12391406
SKPQPHRQPVLGLGTRQPWFALRSSISSATTPSNRSDGSSPSSASCPASSLPSLSTPRTWSPATSSVSCRHVRSLKRSTLPSDWCRPRHFLLSCNGEGGSTSSWLLSGKFARFRAVHLCS

SEQ ID NO: 8670 - DNA, 1659 bp, Zea mays subsp. mays
  misc_feature (1)..(1659): Ceres Seq. ID no. 12412308
  misc_feature: MA Experiment ID: 108504 Result: Down-regulated in Transcription
  misc_feature: MA Experiment 108504 PARAMETER Experiment Name: Zm_Drought_P Parameter: Age (day) Value: 8
  misc_feature: MA Experiment 108504 PARAMETER Experiment Name: Zm_Drought_P Parameter: Organism Value: Zea mays
  misc_feature: MA Experiment 108504 PARAMETER Experiment Name: Zm_Drought_P Parameter: Plant Line Value: 35A19
  misc_feature: MA Experiment 108504 PARAMETER Experiment Name: Zm_Drought_P Parameter: Timepoint (hr) Value: 12
  misc_feature: MA Experiment 108504 PARAMETER Experiment Name: Zm_Drought_P Parameter: Tissue Value: Aerial
  misc_feature: MA Experiment 108504 PARAMETER Experiment Name: Zm_Drought_P Parameter: Treatment Value: Drought vs. No Drought
  misc_feature: MA Experiment ID: 108522 Result: Down-regulated in Transcription
  misc_feature: MA Experiment 108522 PARAMETER Experiment Name: Zm_42deg_Heat_P Parameter: Age (day) Value: 8
  misc_feature: MA Experiment 108522 PARAMETER Experiment Name: Zm_42deg_Heat_P Parameter: Organism Value: Zea mays
  misc_feature: MA Experiment 108522 PARAMETER Experiment Name: Zm_42deg_Heat_P Parameter: Plant Line Value: 35A19
  misc_feature: MA Experiment 108522 PARAMETER Experiment Name: Zm_42deg_Heat_P Parameter: Temperature (deg C) Value: 42 vs. 22
  misc_feature: MA Experiment 108522 PARAMETER Experiment Name: Zm_42deg_Heat_P Parameter: Timepoint (hr) Value: 1
  misc_feature: MA Experiment 108522 PARAMETER Experiment Name: Zm_42deg_Heat_P Parameter: Tissue Value: Aerial
  misc_feature: MA Experiment ID: 108523 Result: Down-regulated in Transcription
  misc_feature: MA Experiment 108523 PARAMETER Experiment Name: Zm_42deg_Heat_P Parameter: Age (day) Value: 8
  misc_feature: MA Experiment 108523 PARAMETER Experiment Name: Zm_42deg_Heat_P Parameter: Organism Value: Zea mays
  misc_feature: MA Experiment 108523 PARAMETER Experiment Name: Zm_42deg_Heat_P Parameter: Plant Line Value: 35A19
  misc_feature: MA Experiment 108523 PARAMETER Experiment Name: Zm_42deg_Heat_P Parameter: Temperature (deg C) Value: 42 vs. 22
  misc_feature: MA Experiment 108523 PARAMETER Experiment Name: Zm_42deg_Heat_P Parameter: Timepoint (hr) Value: 6
  misc_feature: MA Experiment 108523 PARAMETER Experiment Name: Zm_42deg_Heat_P Parameter: Tissue Value: Aerial
  misc_feature: MA Experiment ID: 108529 Result: Down-regulated in Transcription
  misc_feature: MA Experiment 108529 PARAMETER Experiment Name: Zm_Imbibed_Seeds_P Parameter: Age (day) Value: 5 vs. 2
  misc_feature: MA Experiment 108529 PARAMETER Experiment Name: Zm_Imbibed_Seeds_P Parameter: Organism Value: Zea mays
  misc_feature: MA Experiment 108529 PARAMETER Experiment Name: Zm_Imbibed_Seeds_P Parameter: Plant Line Value: 35A19
  misc_feature: MA Experiment 108529 PARAMETER Experiment Name: Zm_Imbibed_Seeds_P Parameter: Tissue Value: Roots vs. Embryo
  misc_feature: MA Experiment ID: 108535 Result: Up-regulated in Transcription
  misc_feature: MA Experiment 108535 PARAMETER Experiment Name: Zm_Meristem_P Parameter: Age (day) Value: 8
  misc_feature: MA Experiment 108535 PARAMETER Experiment Name: Zm_Meristem_P Parameter: Organism Value: Zea mays
  misc_feature: MA Experiment 108535 PARAMETER Experiment Name: Zm_Meristem_P Parameter: Plant Line Value: 35A19
  misc_feature: MA Experiment 108535 PARAMETER Experiment Name: Zm_Meristem_P Parameter: Tissue Value: Root Meristem vs. Above Root Meristem
  misc_feature: MA Experiment ID: 108546 Result: Down-regulated in Transcription
  misc_feature: MA Experiment 108546 PARAMETER Experiment Name: Zm_Imbibed_Seeds_P Parameter: Age (day) Value: 3 vs. 2
  misc_feature: MA Experiment 108546 PARAMETER Experiment Name: Zm_Imbibed_Seeds_P Parameter: Organism Value: Zea mays
  misc_feature: MA Experiment 108546 PARAMETER Experiment Name: Zm_Imbibed_Seeds_P Parameter: Plant Line Value: 35A19
  misc_feature: MA Experiment 108546 PARAMETER Experiment Name: Zm_Imbibed_Seeds_P Parameter: Tissue Value: Roots vs. Embryo
  misc_feature: MA Experiment ID: 108597 Result: Down-regulated in Transcription
  misc_feature: MA Experiment 108597 PARAMETER Experiment Name: Zm_100uM_ABA_P Parameter: Age (day) Value: 9
  misc_feature: MA Experiment 108597 PARAMETER Experiment Name: Zm_100uM_ABA_P Parameter: Organism Value: Zea mays
  misc_feature: MA Experiment 108597 PARAMETER Experiment Name: Zm_100uM_ABA_P Parameter: Plant Line Value: 35A19
  misc_feature: MA Experiment 108597 PARAMETER Experiment Name: Zm_100uM_ABA_P Parameter: Timepoint (hr) Value: 24
  misc_feature: MA Experiment 108597 PARAMETER Experiment Name: Zm_100uM_ABA_P Parameter: Tissue Value: Aerial
  misc_feature: MA Experiment 108597 PARAMETER Experiment Name: Zm_100uM_ABA_P Parameter: Treatment Value: 100uM ABA vs. No Treatment
  misc_feature: MA Experiment ID: 20000478 Result: Down-regulated in Transcription
  misc_feature: MA Experiment 20000478 PARAMETER Experiment Name: Zm_5mM_SA_P Parameter: Age (day) Value: 11
  misc_feature: MA Experiment 20000478 PARAMETER Experiment Name: Zm_5mM_SA_P Parameter: Organism Value: Zea mays
  misc_feature: MA Experiment 20000478 PARAMETER Experiment Name: Zm_5mM_SA_P Parameter: Plant Line Value: 35A19
  misc_feature: MA Experiment 20000478 PARAMETER Experiment Name: Zm_5mM_SA_P Parameter: Timepoint (hr) Value: 72
  misc_feature: MA Experiment 20000478 PARAMETER Experiment Name: Zm_5mM_SA_P Parameter: Tissue Value: Aerial
  misc_feature: MA Experiment 20000478 PARAMETER Experiment Name: Zm_5mM_SA_P Parameter: Treatment Value: 5mM SA vs. No Treatment
  misc_feature: MA Experiment ID: 20000535 Result: Up-regulated in Transcription
  misc_feature: MA Experiment 20000535 PARAMETER Experiment Name: Zm_Hybrid_Seed_Dev_P Parameter: DAP Value: 30 vs. 12
  misc_feature: MA Experiment 20000535 PARAMETER Experiment Name: Zm_Hybrid_Seed_Dev_P Parameter: Organism Value: Zea mays
  misc_feature: MA Experiment 20000535 PARAMETER Experiment Name: Zm_Hybrid_Seed_Dev_P Parameter: Plant Line Value: 35A19
  misc_feature: MA Experiment 20000535 PARAMETER Experiment Name: Zm_Hybrid_Seed_Dev_P Parameter: Tissue Value: Embryo vs. Unfert Floret
  misc_feature: MA Experiment ID: 20000626 Result: Down-regulated in Transcription
  misc_feature: MA Experiment 20000626 PARAMETER Experiment Name: Zm_Herbicide-Treatments_P Parameter: Timepoint (hr) Value: 12
  misc_feature: MA Experiment 20000626 PARAMETER Experiment Name: Zm_Herbicide-Treatments_P Parameter: Tissue Value: Aerial
  misc_feature: MA Experiment 20000626 PARAMETER Experiment Name: Zm_Herbicide-Treatments_P Parameter: Treatment Value: Roundup vs. No Treatment
atttccgttggttcttgacctcagctcgctcctctcactcacctctatatatgccccgccctcttgcccgtgttggtggtaccccgcgtcgccctccgtcgtctcagcgtatgttgtgcatgtgaagagagagaggaagagggtgacgagcgagaaaaaagctagtagagtgatagcttgacaagacgcattgaagcgaaggccacgcataccaaagcaacctcaccatcgctcgcaagctactcgatcaaggacattattgtcgcaacgagctagcaagaataatccgcgttagtttcgcgaaggtggtacatatggctcgcatcctcgtgctggctctgctcaccatcgcgagcctcctcctgccgccggtcgtcgcgagccagcaggcggcggccaagtgcgagtacagaaagcactccggccaccggtacaggcacccggtgggcgtgcggaagatcgtggtggacgcgggcggcgccggcgacttcgtctccatccagcgcgccgtcgactccgtgccggagggcaacaccgtgcgcgtcatcgtgcagatcaacgccggcacgtacatagagaaggtggtagtgccggcgtcgaagccgtacgtcacgttccagggcgccgggcgcgacgtgacggtggtggagtggcacgaccgggccagcgaccgcggccccgacgggcagccgctccgcacctacaacaccgcctcagtaaccatcctagctaactatttcaacgctaagaacatcagcttcaagaacacagctccggcgccgatgcccggcacgcaaggagggcaggcggtggcgttccgcatctccggcgacaaggccttcttcttcggctgcgggttctacggcgcgcaggacacgctgtgcgacgacgccggccggcactacttccgcgactgctacatcgagggctccatcgacttcgtcttcggcaacgcccgctccctctacaaggactgcgagctgcactcgacggcgcagcggttcggctcggtggcggcgcacgggctgcgcgacccgtgcgagcgcaccggcttcgccttcgtcaactgccgggtgaccggcacggggcggctctacgtggggcgggccatggggcagtactcgcgcaatcgtctacgcctacacctacttcgacagcgtcatcgcgccaggcggctgggatgactgggaccacaccagcaacaagagcatgacggcgttcttcgggatgtacaggaactggggccccggcgtcgacgccgtgcacggcgtctcctgggcgcgagagctcgactacttcgccgcccgccctttcctcggcaagagcttcgtcaacggataccactggctcacacctgatgtctgaaaaacacacaaacacacgcgcgagagtcaggagacacatcgattacagcaaaccagattaatttattcgtacagcataaagacagaataagacaccatttacaagccactgaatatgtatagtgatccactggcgcagaagtcagattcaagattcatttcgtctataaaaaatagtttccaaaacttcgtcatgtgcagtgtaaactagacagtgagcagtgagtctgttatgtctctgcataggagaccttggatgtgcaattcaagttgttccattatgtttgaatctgcg

SEQ ID NO: 8671 - protein, 289 aa, Zea mays subsp. mays
  peptide (1)..(289): Ceres Seq. ID no. 12412309
  misc_feature (49)..(271): Pfam Name: Pectinesterase Pfam Description: Pectinesterase
  misc_feature (5)..(271): Homolog of NCBI NO: 38345478 NR Description: OSJNBa0010H02.16 [Oryza sativa (japonica
  misc_feature (34)..(271): Homolog of NCBI NO: 15238111 NR Description: pectinesterase family; protein id: At5g47500.1, by cDNA: gi_20856814 [Arabidopsis thaliana] AT5g47500/MNJ7_9 [Arabidopsis thaliana]
  misc_feature (34)..(271): Homolog of NCBI NO: 9758778 NR Description: pectin methylesterase-like [Arabidopsis thaliana]
  misc_feature (49)..(271): Homolog of NCBI NO: 34909402 NR Description: putative pectin methylesterase [Oryza sativa
  misc_feature (57)..(271): Homolog of NCBI NO: 15241163 NR Description: pectinesterase family; protein id: At5g19730.1, by cDNA: gi_17529289, supported by cDNA: gi_20465498 [Arabidopsis >gi|17529290|gb|AAL38872.1| putative pectin methylesterase
  misc_feature (47)..(271): Homolog of NCBI NO: 15240544 NR Description: pectinesterase family; protein id: At5g55590.1 thaliana] >gi|9758593|dbj|BAB09226.1| contains similarity to
  misc_feature (39)..(270): Homolog of NCBI NO: 15228023 NR Description: pectinesterase family; protein id: At2g36710.1
  misc_feature (39)..(270): Homolog of NCBI NO: 27754550 NR Description: putative pectinesterase family protein
  misc_feature (38)..(271): Homolog of NCBI NO: 15228022 NR Description: pectinesterase family; protein id: At2g36700.1
  misc_feature (49)..(271): Homolog of NCBI NO: 15226598 NR Description: pectinesterase family; protein id: At2g21610.1
MARILVLALLTIASLLLPPVVASQQAAAKCEYRKHSGHRYRHPVGVRKIVVDAGGAGDFVSIQRAVDSVPEGNTVRVIVQINAGTYIEKVVVPASKPYVTFQGAGRDVTVVEWHDRASDRGPDGQPLRTYNTASVTILANYFNAKNISFKNTAPAPMPGTQGGQAVAFRISGDKAFFFGCGFYGAQDTLCDDAGRHYFRDCYIEGSIDFVFGNARSLYKDCELHSTAQRFGSVAAHGLRDPCERTGFAFVNCRVTGTGRLYVGRAMGQYSRNRLRLHLLRQRHRARRLG

SEQ ID NO: 8672 - DNA, 1215 bp, Zea mays subsp. mays
  misc_feature (1)..(1215): Ceres Seq. ID no. 13665996
  misc_feature: MA Experiment ID: 108515 Result: Down-regulated in Transcription
  misc_feature: MA Experiment 108515 PARAMETER Experiment Name: Zm_2mM_SA_P Parameter: Age (day) Value: 8
  misc_feature: MA Experiment 108515 PARAMETER Experiment Name: Zm_2mM_SA_P Parameter: Organism Value: Zea mays
  misc_feature: MA Experiment 108515 PARAMETER Experiment Name: Zm_2mM_SA_P Parameter: Plant Line Value: 35A19
  misc_feature: MA Experiment 108515 PARAMETER Experiment Name: Zm_2mM_SA_P Parameter: Timepoint (hr) Value: 12
  misc_feature: MA Experiment 108515 PARAMETER Experiment Name: Zm_2mM_SA_P Parameter: Tissue Value: Aerial
  misc_feature: MA Experiment 108515 PARAMETER Experiment Name: Zm_2mM_SA_P Parameter: Treatment Value: 2mM SA vs. No Treatment
accggccaccgcgaatccagagccccacgccccgtccgaaccccagagcagagcaaagcctcctcgacctccctgtccccagccttccccgatggcccgcacgaagcagacggcgcgcaagtcgacgggcgggccatcggggagggctggtcagggattcaaacagaggcttctcagcatatgggggttctacaagcatcatcaatgggctggaatggtgctcctgtacttgctgccactcctgttgtcaagaaagtcatgaggctggatgttccagtagacaagtatcctaactacaactttgttggtcgtttattggggccgcgaggtaactccctgaaaagggttgaagcttcaacccaatgtagagtttacattcgaggacggggttctgtgaaagactctgttaaggaagacaagctgagggataaacctgggtatgaacaccttaatgaacaactgcatgtgcttgtggaagcagagtttccagcagatatggttgatgtgcgtcttaatcaagctgtgtccatcctagaggatcttcttaaaccaattgacgagtccatggactactacaagaagcagcagctgagggagctggcgattctaaatggcacactgagagaggaaagcccaagccctcacctcagccctagtgtgtcccccttcaactccaccgggatgaagcgcgcaaaaacagggcggtaatctctgttccgaaagccttcatccccccaaatcaatcatggttcaatgcccaattattacacaagctactgctggagatgattggtgatgcatatgctgggatcatcagtgatggcctatgcctgtcatgatctgtgcgctttatcgacaagcacacaaacatgcctgtgctgtgcttggacgaatggtctccgggcttgttgtttgactctactattatttattctttgtgcttctgactgcctaagtattattaacattattggtttgggaaagtgttaacaaggcccggttggccagtcgctgtagaaagcttggggagaggaggggggggtgtcaatgtgacggacaataataaggtttcgttggtgtacctgagatagttgtaatatgtcatgtgctgatgcttttgtgtggtgctagtacaagacaaccagacagctatagttgaggcaatgattattttgcgttcataaaatgcatgtcggtgtgctttcttcatggttc

SEQ ID NO: 8673 - protein, 235 aa, Zea mays subsp. mays
  peptide (1)..(235): Ceres Seq. ID no. 13665997
  misc_feature (88)..(142): Pfam Name: KH domain Pfam Description: KH domain
  misc_feature (33)..(235): Homolog of NCBI NO: 34907446 NR Description: P0434C04.5 [Oryza sativa (japonica
  misc_feature (33)..(233): Homolog of NCBI NO: 16930473 NR Description: At1g09660/F21M12_5 [Arabidopsis thaliana]
  misc_feature (33)..(233): Homolog of NCBI NO: 22329449 NR Description: KH domain quaking protein, putative [Arabidopsis >gi|26452384|dbj|BAC43277.1| putative elongation factor
  misc_feature (39)..(235): Homolog of NCBI NO: 12322716 NR Description: unknown protein; 28504-31237 [Arabidopsis
  misc_feature (39)..(235): Homolog of NCBI NO: 30680583 NR Description: KH domain protein [Arabidopsis thaliana]
  misc_feature (39)..(235): Homolog of NCBI NO: 40645104 NR Description: hypothetical protein [Nicotiana tabacum]
  misc_feature (39)..(234): Homolog of NCBI NO: 15224909 NR Description: KH domain protein [Arabidopsis thaliana]
  misc_feature (43)..(232): Homolog of NCBI NO: 34900448 NR Description: contains EST C27129(C51039)~similar to
  misc_feature (33)..(233): Homolog of NCBI NO: 15236738 NR Description: KH domain protein [Arabidopsis thaliana]
  misc_feature (33)..(233): Homolog of NCBI NO: 20268733 NR Description: unknown protein [Arabidopsis thaliana]
TGHRESRAPRPVRTPEQSKASSTSLSPAFPDGPHEADGAQVDGRAIGEGWSGIQTEASQHMGVLQASSMGWNGAPVLAATPVVKKVMRLDVPVDKYPNYNFVGRLLGPRGNSLKRVEASTQCRVYIRGRGSVKDSVKEDKLRDKPGYEHLNEQLHVLVEAEFPADMVDVRLNQAVSILEDLLKPIDESMDYYKKQQLRELAILNGTLREESPSPHLSPSVSPFNSTGMKRAKTGR

SEQ ID NO: 8674 - protein, 175 aa, Zea mays subsp. mays
  peptide (1)..(175): Ceres Seq. ID no. 13665998
  misc_feature (28)..(82): Pfam Name: KH domain Pfam Description: KH domain
  misc_feature (1)..(175): Homolog of NCBI NO: 34907446 NR Description: P0434C04.5 [Oryza sativa (japonica
  misc_feature (1)..(173): Homolog of NCBI NO: 16930473 NR Description: At1g09660/F21M12_5 [Arabidopsis thaliana]
  misc_feature (1)..(173): Homolog of NCBI NO: 22329449 NR Description: KH domain quaking protein, putative [Arabidopsis >gi|26452384|dbj|BAC43277.1| putative elongation factor
  misc_feature (1)..(175): Homolog of NCBI NO: 12322716 NR Description: unknown protein; 28504-31237 [Arabidopsis
  misc_feature (1)..(175): Homolog of NCBI NO: 30680583 NR Description: KH domain protein [Arabidopsis thaliana]
  misc_feature (1)..(175): Homolog of NCBI NO: 40645104 NR Description: hypothetical protein [Nicotiana tabacum]
  misc_feature (1)..(174): Homolog of NCBI NO: 15224909 NR Description: KH domain protein [Arabidopsis thaliana]
  misc_feature (1)..(172): Homolog of NCBI NO: 34900448 NR Description: contains EST C27129(C51039)~similar to
  misc_feature (1)..(173): Homolog of NCBI NO: 15236738 NR Description: KH domain protein [Arabidopsis thaliana]
  misc_feature (1)..(173): Homolog of NCBI NO: 20268733 NR Description: unknown protein [Arabidopsis thaliana]
MGVLQASSMGWNGAPVLAATPVVKKVMRLDVPVDKYPNYNFVGRLLGPRGNSLKRVEASTQCRVYIRGRGSVKDSVKEDKLRDKPGYEHLNEQLHVLVEAEFPADMVDVRLNQAVSILEDLLKPIDESMDYYKKQQLRELAILNGTLREESPSPHLSPSVSPFNSTGMKRAKTGR

SEQ ID NO: 8675 - protein, 167 aa, Zea mays subsp. mays
  peptide (1)..(167): Ceres Seq. ID no. 13665999
  misc_feature (20)..(74): Pfam Name: KH domain Pfam Description: KH domain
  misc_feature (1)..(167): Homolog of NCBI NO: 34907446 NR Description: P0434C04.5 [Oryza sativa (japonica
  misc_feature (1)..(165): Homolog of NCBI NO: 16930473 NR Description: At1g09660/F21M12_5 [Arabidopsis thaliana]
  misc_feature (1)..(165): Homolog of NCBI NO: 22329449 NR Description: KH domain quaking protein, putative [Arabidopsis >gi|26452384|dbj|BAC43277.1| putative elongation factor
  misc_feature (1)..(167): Homolog of NCBI NO: 12322716 NR Description: unknown protein; 28504-31237 [Arabidopsis
  misc_feature (1)..(167): Homolog of NCBI NO: 30680583 NR Description: KH domain protein [Arabidopsis thaliana]
  misc_feature (1)..(167): Homolog of NCBI NO: 40645104 NR Description: hypothetical protein [Nicotiana tabacum]
  misc_feature (1)..(166): Homolog of NCBI NO: 15224909 NR Description: KH domain protein [Arabidopsis thaliana]
  misc_feature (1)..(164): Homolog of NCBI NO: 34900448 NR Description: contains EST C27129(C51039)~similar to
  misc_feature (1)..(165): Homolog of NCBI NO: 15236738 NR Description: KH domain protein [Arabidopsis thaliana]
  misc_feature (1)..(165): Homolog of NCBI NO: 20268733 NR Description: unknown protein [Arabidopsis thaliana]
MGWNGAPVLAATPVVKKVMRLDVPVDKYPNYNFVGRLLGPRGNSLKRVEASTQCRVYIRGRGSVKDSVKEDKLRDKPGYEHLNEQLHVLVEAEFPADMVDVRLNQAVSILEDLLKPIDESMDYYKKQQLRELAILNGTLREESPSPHLSPSVSPFNSTGMKRAKTGR

SEQ ID NO: 8676 - DNA, 1312 bp, Zea mays subsp. mays
  misc_feature (1)..(1312): Ceres Seq. ID no. 12408327
  misc_feature: MA Experiment ID: 108535 Result: Up-regulated in Transcription
  misc_feature: MA Experiment 108535 PARAMETER Experiment Name: Zm_Meristem_P Parameter: Age (day) Value: 8
  misc_feature: MA Experiment 108535 PARAMETER Experiment Name: Zm_Meristem_P Parameter: Organism Value: Zea mays
  misc_feature: MA Experiment 108535 PARAMETER Experiment Name: Zm_Meristem_P Parameter: Plant Line Value: 35A19
  misc_feature: MA Experiment 108535 PARAMETER Experiment Name: Zm_Meristem_P Parameter: Tissue Value: Root Meristem vs. Above Root Meristem
actctactcccggtaccggaggccggagctatccaattcccttcccacccagaccgcgatccctaaccctacccaatgtcctcgccgccgccggcttcgcccatggccgccgagaatgaggcctgcgactgggcggagatgccgtcggacgcgctcgcggccgtgttcgcgaagctggacgtggccgagatcctgtccggcgccgggctggtctgccgcgcgtggcaccgtctcgcggcctcggaccctacgctgtggcgccgcgtcgacatgtgctaccagggggaccagctgcagaccgaggaggtcgaggccatggcgcgcgccgcggtcgaccgctctgcgggcaccatggaggcgttctgtgccgagaccttcgtcaacgacgacctggctccgctacatctctcagagggccccctcattgaagagcctccatctctgcctgtgccattacgtcactaatcaaggttttgcagaggcagttaattgcttccctcagctcaaggagctagacattacattctgctcattgtatggcatcgtgtgtgagactgctgggagagcctgcccgcagcttaaatgcttcaggttgaatgagcgctggtctattcttcaaagcgagtttgcaccctacgagggcatggatgatgacacggaagcattagggatcgctagcaccatgcctgggctccaagaacttcagttgatcggtaacaacctgaccaatgacggactcgtggcaatccttgaccgttgccctcgccttgaatcccttgacattcgccaatgctacaacatacagatggacgacgcactgagatcgaaatgcgctaggatacgagatctgaagcttcctcacgactccatctccgacttcaagtatcgggcttacatcgtcagcagcatagccaactcgggctctgattttgaggttgatatgtatgatgatctgctggatgtggtcactgaagatgatgatgctgatttcgatgacatggatgatttcgatgatacagtctcagatggaggcatgtacgatgatgacttggatatctgaaattaggaatcggttcaaacagcttttccgtggaccatgtaagtgctgttagctggaatggtttcccgtcccttttctttgagattcgggtagctatgatggaatctccctgatgttcatacttctgcgcctctccatttgttaagaagctggagtagctgaactggttctaatcgatgtacaactgttgtttttttattctgaacctttgttaattggtattttaataataacctagggcaaaaaatgtgt

SEQ ID NO: 8677 - protein, 352 aa, Zea mays subsp. mays
  peptide (1)..(352): Ceres Seq. ID no. 12408328
  misc_feature (132)..(343): Homolog of NCBI NO: 40253673 NR Description: putative N7 protein [Oryza sativa (japonica
  misc_feature (137)..(351): Homolog of NCBI NO: 40253669 NR Description: F-box protein-like [Oryza sativa (japonica
  misc_feature (131)..(351): Homolog of NCBI NO: 38637156 NR Description: F-box protein family-like [Oryza sativa (japonica
  misc_feature (128)..(292): Homolog of NCBI NO: 18412953 NR Description: F-box protein family, AtFBL9/AtFBL23; protein id: [Arabidopsis thaliana] >gi|25407343|pir||B85069 hypothetical
  misc_feature (128)..(295): Homolog of NCBI NO: 18412951 NR Description: F-box protein family, AtFBL22; protein id:
  misc_feature (128)..(337): Homolog of NCBI NO: 18412947 NR Description: F-box protein family, AtFBL20; protein id: supported by cDNA: 38347. [Arabidopsis thaliana]
  misc_feature (128)..(337): Homolog of NCBI NO: 21593361 NR Description: F-box protein family, AtFBL20 [Arabidopsis
  misc_feature (132)..(295): Homolog of NCBI NO: 25376524 NR Description: N7-like protein [imported] - Arabidopsis thaliana
  misc_feature (131)..(338): Homolog of NCBI NO: 38637159 NR Description: F-box protein family-like [Oryza sativa (japonica
  misc_feature (220)..(329): Homolog of NCBI NO: 40253668 NR Description: glutamic acid-rich protein precursor-like protein
LYSRYRRPELSNSLPTQTAIPNPTQCPRRRRLRPWPPRMRPATGRRCRRTRSRPCSRSWTWPRSCPAPGWSAARGTVSRPRTLRCGAASTCATRGTSCRPRRSRPWRAPRSTALRAPWRRSVPRPSSTTTWLRYISQRAPSLKSLHLCLCHYVTNQGFAEAVNCFPQLKELDITFCSLYGIVCETAGRACPQLKCFRLNERWSILQSEFAPYEGMDDDTEALGIASTMPGLQELQLIGNNLTNDGLVAILDRCPRLESLDIRQCYNIQMDDALRSKCARIRDLKLPHDSISDFKYRAYIVSSIANSGSDFEVDMYDDLLDVVTEDDDADFDDMDDFDDTVSDGGMYDDDLDI

SEQ ID NO: 8678 - protein, 314 aa, Zea mays subsp. mays
  peptide (1)..(314): Ceres Seq. ID no. 12408329
  misc_feature (94)..(305): Homolog of NCBI NO: 40253673 NR Description: putative N7 protein [Oryza sativa (japonica
  misc_feature (99)..(313): Homolog of NCBI NO: 40253669 NR Description: F-box protein-like [Oryza sativa (japonica
  misc_feature (93)..(313): Homolog of NCBI NO: 38637156 NR Description: F-box protein family-like [Oryza sativa (japonica
  misc_feature (90)..(254): Homolog of NCBI NO: 18412953 NR Description: F-box protein family, AtFBL9/AtFBL23; protein id: [Arabidopsis thaliana] >gi|25407343|pir||B85069 hypothetical
  misc_feature (90)..(257): Homolog of NCBI NO: 18412951 NR Description: F-box protein family, AtFBL22; protein id:
  misc_feature (90)..(299): Homolog of NCBI NO: 18412947 NR Description: F-box protein family, AtFBL20; protein id: supported by cDNA: 38347. [Arabidopsis thaliana]
  misc_feature (90)..(299): Homolog of NCBI NO: 21593361 NR Description: F-box protein family, AtFBL20 [Arabidopsis
  misc_feature (94)..(257): Homolog of NCBI NO: 25376524 NR Description: N7-like protein [imported] - Arabidopsis thaliana
  misc_feature (93)..(300): Homolog of NCBI NO: 38637159 NR Description: F-box protein family-like [Oryza sativa (japonica
  misc_feature (182)..(291): Homolog of NCBI NO: 40253668 NR Description: glutamic acid-rich protein precursor-like protein
MRPATGRRCRRTRSRPCSRSWTWPRSCPAPGWSAARGTVSRPRTLRCGAASTCATRGTSCRPRRSRPWRAPRSTALRAPWRRSVPRPSSTTTWLRYISQRAPSLKSLHLCLCHYVTNQGFAEAVNCFPQLKELDITFCSLYGIVCETAGRACPQLKCFRLNERWSILQSEFAPYEGMDDDTEALGIASTMPGLQELQLIGNNLTNDGLVAILDRCPRLESLDIRQCYNIQMDDALRSKCARIRDLKLPHDSISDFKYRAYIVSSIANSGSDFEVDMYDDLLDVVTEDDDADFDDMDDFDDTVSDGGMYDDDLDI

SEQ ID NO: 8679 - DNA, 1287 bp, Zea mays subsp. mays
  misc_feature (1)..(1287): Ceres Seq. ID no. 12408316
  misc_feature: MA Experiment ID: 108544 Result: Down-regulated in Transcription
  misc_feature: MA Experiment ID: 108545 Result: Up-regulated in Transcription
  misc_feature: MA Experiment 108545 PARAMETER Experiment Name: Zm_Imbibed_Seeds_P Parameter: Age (day) Value: 3 vs. 2
  misc_feature: MA Experiment 108545 PARAMETER Experiment Name: Zm_Imbibed_Seeds_P Parameter: Organism Value: Zea mays
  misc_feature: MA Experiment 108545 PARAMETER Experiment Name: Zm_Imbibed_Seeds_P Parameter: Plant Line Value: 35A19
  misc_feature: MA Experiment 108545 PARAMETER Experiment Name: Zm_Imbibed_Seeds_P Parameter: Tissue Value: Aerial vs. Embryo
  misc_feature: MA Experiment ID: 20000478 Result: Down-regulated in Transcription
  misc_feature: MA Experiment 20000478 PARAMETER Experiment Name: Zm_5mM_SA_P Parameter: Age (day) Value: 11
  misc_feature: MA Experiment 20000478 PARAMETER Experiment Name: Zm_5mM_SA_P Parameter: Organism Value: Zea mays
  misc_feature: MA Experiment 20000478 PARAMETER Experiment Name: Zm_5mM_SA_P Parameter: Plant Line Value: 35A19
  misc_feature: MA Experiment 20000478 PARAMETER Experiment Name: Zm_5mM_SA_P Parameter: Timepoint (hr) Value: 72
  misc_feature: MA Experiment 20000478 PARAMETER Experiment Name: Zm_5mM_SA_P Parameter: Tissue Value: Aerial
  misc_feature: MA Experiment 20000478 PARAMETER Experiment Name: Zm_5mM_SA_P Parameter: Treatment Value: 5mM SA vs. No Treatment
  misc_feature: MA Experiment ID: 20000480 Result: Down-regulated in Transcription
  misc_feature: MA Experiment 20000480 PARAMETER Experiment Name: Zm_Drought_P Parameter: Age (day) Value: 11
  misc_feature: MA Experiment 20000480 PARAMETER Experiment Name: Zm_Drought_P Parameter: Organism Value: Zea mays
  misc_feature: MA Experiment 20000480 PARAMETER Experiment Name: Zm_Drought_P Parameter: Plant Line Value: 35A19
  misc_feature: MA Experiment 20000480 PARAMETER Experiment Name: Zm_Drought_P Parameter: Timepoint (hr) Value: 72
  misc_feature: MA Experiment 20000480 PARAMETER Experiment Name: Zm_Drought_P Parameter: Tissue Value: Aerial
  misc_feature: MA Experiment 20000480 PARAMETER Experiment Name: Zm_Drought_P Parameter: Treatment Value: Drought vs. No Drought
aagcgacgcgaagcaccgaggagaggcggcgagagttcttggtcggctagatggaaaaggcgggccagaagcggcggccgctgacggtgatggcatcctcatcgtcgcaggtggcagcagcgcggggcatgggcatgaccaacccactggcggagtggaccgaccgcgtcaggtcgctggaggccggcgtgctggcgtggctagcgaagcagcccacccacgtcgaggccgccgtggtcacggcggtcggcgccgtgcagggcgccgcgctcgggcgggctcatgggcacgcttgcgcccgacggcggggcccgcgctccctgtgccgccgccgccgccggggaccgacccaaaggtcttggcctccttcaagcaagcgcaggctttagcgggtggacccctggtgcaagcacgaaactttgcggtcatgactggtgcgaatgctggcatatcttgtgtcatgagaaggataagaggagtggaggatgtccagggcagcatggcagcagcttttggttctggggctctattctccatcgtgagtggaatggggaccccaaatccagtagctaatgcaattacaactggtgttggttttgctgtatttcaaggtggttttttcatgatctctcaaaaattttcacagccacagagtggagatacatactattctcgtggaagaagcatgctgcaaaagttaggccttcagaactatgagaagaacttcaagaagggtctcctaactgatcaaaccttgccccttcttacggacagtgctctcagagatgtgaagatcccgcctggccccaggctcctcatacttgatcacattaaaagagatccagagttgacaaaagcaaattaagtgatcggcactgcggcactgcctcacggtgccagttcttttccccctcgagttgcagaaattggaccaggagaaccgtttaatttagctattcagtgacgacctctttggagcagtatttggttgtgcttactagtatatgttttctagtcatcattcacgcttttttttgagccgaagtgtttgcaaatcactctgatcttggaatgacagaattttgtattctcaaaggtttatgctgatcaatccagattttactactagtttagggatgtcaaacgaagggaaactgcaattcgcacattttatttggcttctggatggtagtttggttctgatctgtaacgtttagccctttgctaagctgtgtcctgcataaggctttgcggcctgattaatataagcacacatgttggaatttc

SEQ ID NO: 8680 - protein, 287 aa, Zea mays subsp. mays
  peptide (1)..(287): Ceres Seq. ID no. 12408317
  misc_feature (111)..(213): Pfam Name: Tim17/Tim22/Tim23 family Pfam Description: Tim17/Tim22/Tim23 family
  misc_feature (32)..(279): Homolog of NCBI NO: 32487911 NR Description: OJ000315_02.15 [Oryza sativa (japonica
  misc_feature (111)..(283): Homolog of NCBI NO: 15238598 NR Description: putative protein; protein id: At5g24650.1, by cDNA: 5684., supported by cDNA: gi_17979478 [Arabidopsis >gi|10177865|dbj|BAB11217.1|
  misc_feature (111)..(283): Homolog of NCBI NO: 21593899 NR Description: unknown [Arabidopsis thaliana]
  misc_feature (111)..(283): Homolog of NCBI NO: 15229167 NR Description: putative protein; protein id: At3g49560.1, by cDNA: 15698., supported by cDNA: gi_13430557 [Arabidopsis
SDAKHRGEAARVLGRLDGKGGPEAAAADGDGILIVAGGSSAGHGHDQPTGGVDRPRQVAGGRRAGVASEAAHPRRGRRGHGGRRRAGRRARAGSWARLRPTAGPALPVPPPPPGTDPKVLASFKQAQALAGGPLVQARNFAVMTGANAGISCVMRRIRGVEDVQGSMAAAFGSGALFSIVSGMGTPNPVANAITTGVGFAVFQGGFFMISQKFSQPQSGDTYYSRGRSMLQKLGLQNYEKNFKKGLLTDQTLPLLTDSALRDVKIPPGPRLLILDHIKRDPELTKAN

SEQ ID NO: 8681 - protein, 145 aa, Zea mays subsp. mays
  peptide (1)..(145): Ceres Seq. ID no. 12408318
  misc_feature (1)..(71): Pfam Name: Tim17/Tim22/Tim23 family Pfam Description: Tim17/Tim22/Tim23 family
  misc_feature (1)..(141): Homolog of NCBI NO: 15238598 NR Description: putative protein; protein id: At5g24650.1, by cDNA: 5684., supported by cDNA: gi_17979478 [Arabidopsis >gi|10177865|dbj|BAB11217.1|
  misc_feature (1)..(141): Homolog of NCBI NO: 21593899 NR Description: unknown [Arabidopsis thaliana]
  misc_feature (1)..(137): Homolog of NCBI NO: 32487911 NR Description: OJ000315_02.15 [Oryza sativa (japonica
  misc_feature (1)..(141): Homolog of NCBI NO: 15229167 NR Description: putative protein; protein id: At3g49560.1, by cDNA: 15698., supported by cDNA: gi_13430557 [Arabidopsis
MTGANAGISCVMRRIRGVEDVQGSMAAAFGSGALFSIVSGMGTPNPVANAITTGVGFAVFQGGFFMISQKFSQPQSGDTYYSRGRSMLQKLGLQNYEKNFKKGLLTDQTLPLLTDSALRDVKIPPGPRLLILDHIKRDPELTKAN

SEQ ID NO: 8682 - DNA, 1540 bp, Zea mays subsp. mays
  misc_feature (1)..(1540): Ceres Seq. ID no. 12408314
  misc_feature: MA Experiment ID: 108529 Result: Up-regulated in Transcription
  misc_feature: MA Experiment 108529 PARAMETER Experiment Name: Zm_Imbibed_Seeds_P Parameter: Age (day) Value: 5 vs. 2
  misc_feature: MA Experiment 108529 PARAMETER Experiment Name: Zm_Imbibed_Seeds_P Parameter: Organism Value: Zea mays
  misc_feature: MA Experiment 108529 PARAMETER Experiment Name: Zm_Imbibed_Seeds_P Parameter: Plant Line Value: 35A19
  misc_feature: MA Experiment 108529 PARAMETER Experiment Name: Zm_Imbibed_Seeds_P Parameter: Tissue Value: Roots vs. Embryo
  misc_feature: MA Experiment ID: 108535 Result: Down-regulated in Transcription
  misc_feature: MA Experiment 108535 PARAMETER Experiment Name: Zm_Meristem_P Parameter: Age (day) Value: 8
  misc_feature: MA Experiment 108535 PARAMETER Experiment Name: Zm_Meristem_P Parameter: Organism Value: Zea mays
  misc_feature: MA Experiment 108535 PARAMETER Experiment Name: Zm_Meristem_P Parameter: Plant Line Value: 35A19
  misc_feature: MA Experiment 108535 PARAMETER Experiment Name: Zm_Meristem_P Parameter: Tissue Value: Root Meristem vs. Above Root Meristem
  misc_feature: MA Experiment ID: 108543 Result: Up-regulated in Transcription
  misc_feature: MA Experiment ID: 108544 Result: Down-regulated in Transcription
  misc_feature: MA Experiment ID: 108546 Result: Up-regulated in Transcription
  misc_feature: MA Experiment 108546 PARAMETER Experiment Name: Zm_Imbibed_Seeds_P Parameter: Age (day) Value: 3 vs. 2
  misc_feature: MA Experiment 108546 PARAMETER Experiment Name: Zm_Imbibed_Seeds_P Parameter: Organism Value: Zea mays
  misc_feature: MA Experiment 108546 PARAMETER Experiment Name: Zm_Imbibed_Seeds_P Parameter: Plant Line Value: 35A19
  misc_feature: MA Experiment 108546 PARAMETER Experiment Name: Zm_Imbibed_Seeds_P Parameter: Tissue Value: Roots vs. Embryo
  misc_feature: MA Experiment ID: 108687 Result: Down-regulated in Transcription
  misc_feature: MA Experiment 108687 PARAMETER Experiment Name: Zm_Embryos-Flowers__P Parameter: Tissue Value: Embryo vs. Aerial+
  misc_feature: MA Experiment ID: 20000108 Result: Down-regulated in Transcription
  misc_feature: MA Experiment 20000108 PARAMETER Experiment Name: Zm_Root-Tips_P Parameter: Age (day) Value: 12
  misc_feature: MA Experiment 20000108 PARAMETER Experiment Name: Zm_Root-Tips_P Parameter: Organism Value: Zea mays
  misc_feature: MA Experiment 20000108 PARAMETER Experiment Name: Zm_Root-Tips_P Parameter: Tissue Value: Root tips vs. Root mid region    35
  misc_feature: MA Experiment 20000108 PARAMETER Experiment Name: Zm_Root-Tips_P Parameter: Tissue Value: Root tips vs. Root mid region   Sequence Listing-Misc Features (4)
  misc_feature: MA Experiment ID: 20000477 Result: Down-regulated in Transcription
  misc_feature: MA Experiment 20000477 PARAMETER Experiment Name: Zm_5mM_SA_P Parameter: Age (day) Value: 10
  misc_feature: MA Experiment 20000477 PARAMETER Experiment Name: Zm_5mM_SA_P Parameter: Organism Value: Zea mays
  misc_feature: MA Experiment 20000477 PARAMETER Experiment Name: Zm_5mM_SA_P Parameter: Plant Line Value: 35A19
  misc_feature: MA Experiment 20000477 PARAMETER Experiment Name: Zm_5mM_SA_P Parameter: Timepoint (hr) Value: 48
  misc_feature: MA Experiment 20000477 PARAMETER Experiment Name: Zm_5mM_SA_P Parameter: Tissue Value: Aerial
  misc_feature: MA Experiment 20000477 PARAMETER Experiment Name: Zm_5mM_SA_P Parameter: Treatment Value: 5mM SA vs. No Treatment
  misc_feature: MA Experiment ID: 20000478 Result: Down-regulated in Transcription
  misc_feature: MA Experiment 20000478 PARAMETER Experiment Name: Zm_5mM_SA_P Parameter: Age (day) Value: 11
  misc_feature: MA Experiment 20000478 PARAMETER Experiment Name: Zm_5mM_SA_P Parameter: Organism Value: Zea mays
  misc_feature: MA Experiment 20000478 PARAMETER Experiment Name: Zm_5mM_SA_P Parameter: Plant Line Value: 35A19
  misc_feature: MA Experiment 20000478 PARAMETER Experiment Name: Zm_5mM_SA_P Parameter: Timepoint (hr) Value: 72
  misc_feature: MA Experiment 20000478 PARAMETER Experiment Name: Zm_5mM_SA_P Parameter: Tissue Value: Aerial
  misc_feature: MA Experiment 20000478 PARAMETER Experiment Name: Zm_5mM_SA_P Parameter: Treatment Value: 5mM SA vs. No Treatment
  misc_feature: MA Experiment ID: 20000479 Result: Down-regulated in Transcription
  misc_feature: MA Experiment 20000479 PARAMETER Experiment Name: Zm_Drought_P Parameter: Age (day) Value: 10
  misc_feature: MA Experiment 20000479 PARAMETER Experiment Name: Zm_Drought_P Parameter: Organism Value: Zea mays
  misc_feature: MA Experiment 20000479 PARAMETER Experiment Name: Zm_Drought_P Parameter: Plant Line Value: 35A19
  misc_feature: MA Experiment 20000479 PARAMETER Experiment Name: Zm_Drought_P Parameter: Timepoint (hr) Value: 48
  misc_feature: MA Experiment 20000479 PARAMETER Experiment Name: Zm_Drought_P Parameter: Tissue Value: Aerial
  misc_feature: MA Experiment 20000479 PARAMETER Experiment Name: Zm_Drought_P Parameter: Treatment Value: Drought vs. No Drought
  misc_feature: MA Experiment ID: 20000480 Result: Down-regulated in Transcription
  misc_feature: MA Experiment 20000480 PARAMETER Experiment Name: Zm_Drought_P Parameter: Age (day) Value: 11
  misc_feature: MA Experiment 20000480 PARAMETER Experiment Name: Zm_Drought_P Parameter: Organism Value: Zea mays
  misc_feature: MA Experiment 20000480 PARAMETER Experiment Name: Zm_Drought_P Parameter: Plant Line Value: 35A19
  misc_feature: MA Experiment 20000480 PARAMETER Experiment Name: Zm_Drought_P Parameter: Timepoint (hr) Value: 72
  misc_feature: MA Experiment 20000480 PARAMETER Experiment Name: Zm_Drought_P Parameter: Tissue Value: Aerial
  misc_feature: MA Experiment 20000480 PARAMETER Experiment Name: Zm_Drought_P Parameter: Treatment Value: Drought vs. No Drought
  misc_feature: MA Experiment ID: 20000535 Result: Up-regulated in Transcription
  misc_feature: MA Experiment 20000535 PARAMETER Experiment Name: Zm_Hybrid_Seed_Dev_P Parameter: DAP Value: 30 vs. 12
  misc_feature: MA Experiment 20000535 PARAMETER Experiment Name: Zm_Hybrid_Seed_Dev_P Parameter: Organism Value: Zea mays
  misc_feature: MA Experiment 20000535 PARAMETER Experiment Name: Zm_Hybrid_Seed_Dev_P Parameter: Plant Line Value: 35A19
  misc_feature: MA Experiment 20000535 PARAMETER Experiment Name: Zm_Hybrid_Seed_Dev_P Parameter: Tissue Value: Embryo vs. Unfert Floret
gaaagcaggatgttcctacctttaaccaagtggaccaagatctctatcatcgactccctgcccccctcctcctcttctatataaaccatacactgaaacgacgtctaattgtgctgtgatccaggcagcagtgagctcagtacacagctaggcacagcgacggggtccggtccagggccatggctaaggaaagcaagctaacggccggagtggccgccgcgctgaccgtcgtcgctgcttgcgcgctatgcctgctgctgccggcgacggcccgcgcgcagctccgggtgggattctacgacaccagctgccccaacgccgaggccctcgtccgccaggccgtcgcggccgccttcgccaaggacgccggcatcgccgccggcctcatccgcctccacttccacgactgctttgtcaggggctgtgatggatccgtcctcctcaccgtgaatcctggcggcgggcagactgagcgtgacgccctcccaaacaacccgagcctccgcggcttcgacgtgatcgacgccgccaagaccgccgttgagcagagctgcccgcgcacagtctcgtgcgccgacatcgtcgccttcgccgcccgcgacagcatcagtctcaccgggagcgtctcgtaccaggtccccgcgggccggcgcgacggccgcgtgtccaacgcgacggagaccgtcgacctacccccgcccacctccacggcgcaaagcctgaccgacttgttcaaggccaaggagcttagcgtggaggacatggtcgtcctctccggcgctcacaccgtcggccgctccttctgcgcctccttcttcaagcgcgtctggaacacaagcacgaaccccgctaccgcaatcgtggacgcggggctgagcccgtcgtacgcgcagctactacgcgcgctgtgcccgtcaaacacgacgcagacgacgccgatcacgacggccatggacccgggaacgcccaacgtgctggacaacaactactacaagcttcctgcctcgcggcatggggctcttcttctccgacaacccgctgcgcgtgaacccgcagatggccgcgctggtgagcagcttcgcgtccaacgagacgctgtggaaggagaaattcgcggcggccatggtaaagatgggacgcatccaggtgcagacagggacgtgcggagaggtccgtctcaactgcggcgtcgtcaacccgagttcgtactcgtcgtcgtcggcggtggagctgggttcgagcgcgccagcagccgtcggtgaagagggctacgccgcgagctagtagctcgcataccagtcttcggccgccgtcgttgtcgagatcaatgattttttttctctctctcgcatgcatccctcttctgcttttattttgtcgcgtggactgtggtttttgttgtgtcgatgatctttgttgtgtgccagtgccactaaacgtacgcatgccggccggcgaactcttaacttcggtggcgggtaataataagcatatgtatgagtaagatgagattgtgtcaatttagggtgtggatgctttc

SEQ ID NO: 8683 - protein, 360 aa, Zea mays subsp. mays
  peptide (1)..(360): Ceres Seq. ID no. 12408315
  misc_feature (51)..(291): Pfam Name: Peroxidase Pfam Description: Peroxidase
  misc_feature (27)..(291): Homolog of NCBI NO: 12056448 NR Description: peroxidase [Zea mays]
  misc_feature (9)..(273): Homolog of NCBI NO: 34894758 NR Description: putative peroxidase [Oryza sativa (japonica >gi|13366000|dbj|BAB39277.1| putative peroxidase [Oryza sativa
  misc_feature (29)..(273): Homolog of NCBI NO: 34894752 NR Description: putative peroxidase [Oryza sativa (japonica >gi|13365997|dbj|BAB39274.1| putative peroxidase [Oryza sativa
  misc_feature (1)..(273): Homolog of NCBI NO: 34894760 NR Description: putative peroxidase [Oryza sativa (japonica >gi|13366001|dbj|BAB39278.1| putative peroxidase [Oryza sativa
  misc_feature (10)..(273): Homolog of NCBI NO: 34894748 NR Description: putative peroxidase [Oryza sativa (japonica >gi|22535694|dbj|BAC10867.1| putative peroxidase [Oryza sativa
  misc_feature (26)..(271): Homolog of NCBI NO: 12056452 NR Description: peroxidase [Zea mays]
  misc_feature (18)..(291): Homolog of NCBI NO: 4760700 NR Description: peroxidase 1 [Scutellaria baicalensis]
  misc_feature (1)..(272): Homolog of NCBI NO: 12056450 NR Description: peroxidase [Zea mays]
  misc_feature (1)..(279): Homolog of NCBI NO: 478409 NR Description: peroxidase (EC 1.11.1.7), cationic - adzuki bean
  misc_feature (28)..(294): Homolog of NCBI NO: 27261088 NR Description: putative peroxidase [Oryza sativa (japonica
MAKESKLTAGVAAALTVVAACALCLLLPATARAQLRVGFYDTSCPNAEALVRQAVAAAFAKDAGIAAGLIRLHFHDCFVRGCDGSVLLTVNPGGGQTERDALPNNPSLRGFDVIDAAKTAVEQSCPRTVSCADIVAFAARDSISLTGSVSYQVPAGRRDGRVSNATETVDLPPPTSTAQSLTDLFKAKELSVEDMVVLSGAHTVGRSFCASFFKRVWNTSTNPATAIVDAGLSPSYAQLLRALCPSNTTQTTPITTAMDPGTPNVLDNNYYKLPASRHGALLLRQPAAREPADGRAGEQLRVQRDAVEGEIRGGHGKDGTHPGADRDVRRGPSQLRRRQPEFVLVVVGGGAGFERASSRR

SEQ ID NO: 8684 - DNA, 1301 bp, Zea mays subsp. mays
  misc_feature (1)..(1301): Ceres Seq. ID no. 12401930
  misc_feature: MA Experiment ID: 108544 Result: Down-regulated in Transcription
ctacaacgcaccctacggtggctacccaccgcagggaccgtcaagaggtggcatgggctgggaccagaggccgggcccaccaacccatccttcgtaccagggtggtggttctgactactacaagcagggatctcagccatatgatagccagccacccagctaccctcctgggccagggaattacaacagttatgggcaatcccagggccctaactatggccaacctcagtatccgcaacatgcacctcaacagaactacagccatggctatggtgatcctagatacaatgccccccctccgaaccagcagtactatggtcagccaccgatggccccgcagcaaggctatcctcaacagccagatccctatgctaggcctccatacagtggacctggtcaatggacccccaggggtgctcccgccgcagatggctcctaccaggcgccaccttcatcttatgggccaccgtctcagcaacctcctgcttatgggcaaacatatggtgcagcaacgggacctgatgggtatggtcaacagggttacccacagcagggtggccaggtaccagcttcatatggtcagagtgcaccagcagctccaggatatcctcagcaaggcacgcagcaaggtggctatgcacagtacccgcagacccaaccagcatatggtgatcaagcagctcaagccaatgcgaactatgggtaccagggagctccagcagatcccaactacggaagtgcgtacccacagcagccagggtatggtcctcctggtcaggcaactggtcaggctggttatgcatcctctgcgccagcggccagccagcctgtgtatggccaggctggatatacccagccacctacaaatcctccaagttatgatcagtctgcagcaccagcggcgactcagagcggttatgctgcgccccctgcaaatccacaacagcctgctgcagcaaaaggggtctcgccacagcctgctgctgctgctgctgctggatatggtgctagcgggcagtggacggcatgagcctcgtcttccgaacttcgatgacagcaaggtcaggttggatatccgcttttggcgcgtgtttgaatgtttgcatcttttggatgtctgtggacgcatcatgtagggcttgaccccgttatcgaaagagattgtaaccccttgagttgtgatactggacatcttctgtagtatctacgagtagttgcttaatgtgacttttaaacattctattcagtttggatgttccttgtcttgctacttcacagcttgccaagccagtaatctttgg

SEQ ID NO: 8685 - protein, 377 aa, Zea mays subsp. mays
  peptide (1)..(377): Ceres Seq. ID no. 12401931
TTHPTVATHRRDRQEVAWAGTRGRAHQPILRTRVVVLTTTSRDLSHMIASHPATLLGQGITTVMGNPRALTMANLSIRNMHLNRTTAMAMVILDTMPPLRTSSTMVSHRWPRSKAILNSQIPMLGLHTVDLVNGPPGVLPPQMAPTRRHLHLMGHRLSNLLLMGKHMVQQRDLMGMVNRVTHSRVARYQLHMVRVHQQLQDILSKARSKVAMHSTRRPNQHMVIKQLKPMRTMGTRELQQIPTTEVRTHSSQGMVLLVRQLVRLVMHPLRQRPASLCMARLDIPSHLQILQVMISLQHQRRLRAVMLRPLQIHNSLLQQKGSRHSLLLLLLLDMVLAGSGRHEPRLPNFDDSKVRLDIRFWRVFECLHLLDVCGRIM

SEQ ID NO: 8686 - protein, 342 aa, Zea mays subsp. mays
  peptide (1)..(342): Ceres Seq. ID no. 12401932
  misc_feature (6)..(342): Pfam Name: High molecular weight glutenin subunit Pfam Description: High molecular weight glutenin subunit
  misc_feature (6)..(342): Homolog of NCBI NO: 14329761 NR Description: high molecular weight glutenin subunit x
  misc_feature (6)..(342): Homolog of NCBI NO: 14329731 NR Description: high molecular weight glutenin subunit x [Secale
  misc_feature (34)..(338): Homolog of NCBI NO: 542527 NR Description: collagen - silkworm >gi|457769|emb|CAA83002.1|
  misc_feature (7)..(342): Homolog of NCBI NO: 542527 NR Description: collagen - silkworm >gi|457769|emb|CAA83002.1|
  misc_feature (7)..(342): Homolog of NCBI NO: 14329757 NR Description: high molecular weight glutenin subunit x [Secale
  misc_feature (7)..(339): Homolog of NCBI NO: 6684162 NR Description: glutenin, high molecular weight subunit type x
  misc_feature (11)..(342): Homolog of NCBI NO: 14329729 NR Description: high molecular weight glutenin subunit x [Secale >gi|14329749|emb|CAC40679.1| high molecular weight glutenin
  misc_feature (11)..(342): Homolog of NCBI NO: 14329739 NR Description: high molecular weight glutenin subunit x [Secale
  misc_feature (11)..(342): Homolog of NCBI NO: 14329751 NR Description: high molecular weight glutenin subunit x [Secale
  misc_feature (6)..(342): Homolog of NCBI NO: 14329757 NR Description: high molecular weight glutenin subunit x [Secale
YNAPYGGYPPQGPSRGGMGWDQRPGPPTHPSYQGGGSDYYKQGSQPYDSQPPSYPPGPGNYNSYGQSQGPNYGQPQYPQHAPQQNYSHGYGDPRYNAPPPNQQYYGQPPMAPQQGYPQQPDPYARPPYSGPGQWTPRGAPAADGSYQAPPSSYGPPSQQPPAYGQTYGAATGPDGYGQQGYPQQGGQVPASYGQSAPAAPGYPQQGTQQGGYAQYPQTQPAYGDQAAQANANYGYQGAPADPNYGSAYPQQPGYGPPGQATGQAGYASSAPAASQPVYGQAGYTQPPTNPPSYDQSAAPAATQSGYAAPPANPQQPAAAKGVSPQPAAAAAAGYGASGQWTA

SEQ ID NO: 8687 - protein, 331 aa, Zea mays subsp. mays
  peptide (1)..(331): Ceres Seq. ID no. 12401933
MIASHPATLLGQGITTVMGNPRALTMANLSIRNMHLNRTTAMAMVILDTMPPLRTSSTMVSHRWPRSKAILNSQIPMLGLHTVDLVNGPPGVLPPQMAPTRRHLHLMGHRLSNLLLMGKHMVQQRDLMGMVNRVTHSRVARYQLHMVRVHQQLQDILSKARSKVAMHSTRRPNQHMVIKQLKPMRTMGTRELQQIPTTEVRTHSSQGMVLLVRQLVRLVMHPLRQRPASLCMARLDIPSHLQILQVMISLQHQRRLRAVMLRPLQIHNSLLQQKGSRHSLLLLLLLDMVLAGSGRHEPRLPNFDDSKVRLDIRFWRVFECLHLLDVCGRIM

SEQ ID NO: 8688 - DNA, 918 bp, Zea mays subsp. mays
  misc_feature (1)..(918): Ceres Seq. ID no. 12346185
  misc_feature: MA Experiment ID: 108529 Result: Up-regulated in Transcription
  misc_feature: MA Experiment 108529 PARAMETER Experiment Name: Zm_Imbibed_Seeds_P Parameter: Age (day) Value: 5 vs. 2
  misc_feature: MA Experiment 108529 PARAMETER Experiment Name: Zm_Imbibed_Seeds_P Parameter: Organism Value: Zea mays
  misc_feature: MA Experiment 108529 PARAMETER Experiment Name: Zm_Imbibed_Seeds_P Parameter: Plant Line Value: 35A19
  misc_feature: MA Experiment 108529 PARAMETER Experiment Name: Zm_Imbibed_Seeds_P Parameter: Tissue Value: Roots vs. Embryo
  misc_feature: MA Experiment ID: 108535 Result: Down-regulated in Transcription
  misc_feature: MA Experiment 108535 PARAMETER Experiment Name: Zm_Meristem_P Parameter: Age (day) Value: 8
  misc_feature: MA Experiment 108535 PARAMETER Experiment Name: Zm_Meristem_P Parameter: Organism Value: Zea mays
  misc_feature: MA Experiment 108535 PARAMETER Experiment Name: Zm_Meristem_P Parameter: Plant Line Value: 35A19
  misc_feature: MA Experiment 108535 PARAMETER Experiment Name: Zm_Meristem_P Parameter: Tissue Value: Root Meristem vs. Above Root Meristem
  misc_feature: MA Experiment ID: 108687 Result: Up-regulated in Transcription
  misc_feature: MA Experiment 108687 PARAMETER Experiment Name: Zm_Embryos-Flowers__P Parameter: Tissue Value: Embryo vs. Aerial+
  misc_feature: MA Experiment ID: 20000626 Result: Down-regulated in Transcription
  misc_feature: MA Experiment 20000626 PARAMETER Experiment Name: Zm_Herbicide-Treatments_P Parameter: Timepoint (hr) Value: 12
  misc_feature: MA Experiment 20000626 PARAMETER Experiment Name: Zm_Herbicide-Treatments_P Parameter: Tissue Value: Aerial
  misc_feature: MA Experiment 20000626 PARAMETER Experiment Name: Zm_Herbicide-Treatments_P Parameter: Treatment Value: Roundup vs. No Treatment
cgggtgcctcgcttcgctttgcgcgcgattcgatccaggctttggttggaggcatggcctcgtcgcccgcgagcagctacgactgctccttcaaggtcctgcttatcggggattcggccgtcggcaagagcagcctcctcgtcagcttcgtctccgccgctcacatcgacgacgacatcgcgccaaccataggggtggattttaaaatcaaatttctcagtgtgggtgggaagaaactaaaactgacaatatgggacactgccggtcaagagaggttcaggacaattaccagctcttactacaggggtgctcatgggattattttagtttatgacgttacaaagagggagagtttcacaaatttggctgatgtgtggaccaaggaaatagagttacactcaacaaataaggaatgcatcaaaatgcttgttggaaataaagtggacaaggatgaggacagaatggtgacaaaagaagaaggtcttgaatttgcacaagaacgtggatgtctctttgtcgagagtagtgctaaaacaagagaaaacgtggaaaaatgttttgaagagcttgcattaaagattctccaggttcccagtctcttggaggaaggttcttcggttgttaagaggaacactctgactctgaaacaaaagcaggagaatgcaaaccgaagtggaggatgctgtcagtaggtcggccagttcttgttgcaagccactcgaggtatcatatatttaggtccttgtaagttgtattgggatgtagatgagttgtatctaaatgcacagcggcagagccaatgcaagtgatgggagaactaaccacttgaggttttggtgtgaattgatctgtacagaagaaaagccttctcttgtttttcctgtttcttgatgtggtaatttgtgcaagtgatgggag

SEQ ID NO: 8689 - protein, 229 aa, Zea mays subsp. mays
  peptide (1)..(229): Ceres Seq. ID no. 12346186
  misc_feature (31)..(195): Pfam Name: Ras family Pfam Description: Ras family
  misc_feature (18)..(229): Homolog of NCBI NO: 15451614 NR Description: Putative GTP-binding protein [Oryza sativa]
  misc_feature (17)..(229): Homolog of NCBI NO: 37534998 NR Description: putative GTP-binding protein [Oryza sativa
  misc_feature (20)..(228): Homolog of NCBI NO: 1370172 NR Description: RAB1X [Lotus japonicus]
  misc_feature (19)..(228): Homolog of NCBI NO: 18414255 NR Description: putative protein; protein id: At5g03530.1,
  misc_feature (19)..(228): Homolog of NCBI NO: 1370174 NR Description: RAB1Y [Lotus japonicus]
  misc_feature (19)..(228): Homolog of NCBI NO: 15218575 NR Description: GTP-binding protein(RAB1Y), putative; protein id: supported by cDNA: 2898., supported by cDNA: gi_17104730, by cDNA: gi_2231311 [Arabidopsis thaliana]
  misc_feature (19)..(228): Homolog of NCBI NO: 15232785 NR Description: GTP-binding protein, putative; protein id:
  misc_feature (87)..(228): Homolog of NCBI NO: 25294118 NR Description: protein F9C16.3 [imported] - Arabidopsis thaliana
  misc_feature (19)..(86): Homolog of NCBI NO: 25294118 NR Description: protein F9C16.3 [imported] - Arabidopsis thaliana
  misc_feature (29)..(227): Homolog of NCBI NO: 40807131 NR Description: Unknown (protein for MGC:77145) [Danio rerio]
GASLRFARDSIQALVGGMASSPASSYDCSFKVLLIGDSAVGKSSLLVSFVSAAHIDDDIAPTIGVDFKIKFLSVGGKKLKLTIWDTAGQERFRTITSSYYRGAHGIILVYDVTKRESFTNLADVWTKEIELHSTNKECIKMLVGNKVDKDEDRMVTKEEGLEFAQERGCLFVESSAKTRENVEKCFEELALKILQVPSLLEEGSSVVKRNTLTLKQKQENANRSGGCCQ

SEQ ID NO: 8690 - protein, 212 aa, Zea mays subsp. mays
  peptide (1)..(212): Ceres Seq. ID no. 12346187
  misc_feature (14)..(178): Pfam Name: Ras family Pfam Description: Ras family
  misc_feature (1)..(212): Homolog of NCBI NO: 15451614 NR Description: Putative GTP-binding protein [Oryza sativa]
  misc_feature (1)..(212): Homolog of NCBI NO: 37534998 NR Description: putative GTP-binding protein [Oryza sativa
  misc_feature (3)..(211): Homolog of NCBI NO: 1370172 NR Description: RAB1X [Lotus japonicus]
  misc_feature (2)..(211): Homolog of NCBI NO: 18414255 NR Description: putative protein; protein id: At5g03530.1,
  misc_feature (2)..(211): Homolog of NCBI NO: 1370174 NR Description: RAB1Y [Lotus japonicus]
  misc_feature (2)..(211): Homolog of NCBI NO: 15218575 NR Description: GTP-binding protein(RAB1Y), putative; protein id: supported by cDNA: 2898., supported by cDNA: gi_17104730, by cDNA: gi_2231311 [Arabidopsis thaliana]
  misc_feature (2)..(211): Homolog of NCBI NO: 15232785 NR Description: GTP-binding protein, putative; protein id:
  misc_feature (70)..(211): Homolog of NCBI NO: 25294118 NR Description: protein F9C16.3 [imported] - Arabidopsis thaliana
  misc_feature (2)..(69): Homolog of NCBI NO: 25294118 NR Description: protein F9C16.3 [imported] - Arabidopsis thaliana
  misc_feature (12)..(210): Homolog of NCBI NO: 40807131 NR Description: Unknown (protein for MGC:77145) [Danio rerio]
MASSPASSYDCSFKVLLIGDSAVGKSSLLVSFVSAAHIDDDIAPTIGVDFKIKFLSVGGKKLKLTIWDTAGQERFRTITSSYYRGAHGIILVYDVTKRESFTNLADVWTKEIELHSTNKECIKMLVGNKVDKDEDRMVTKEEGLEFAQERGCLFVESSAKTRENVEKCFEELALKILQVPSLLEEGSSVVKRNTLTLKQKQENANRSGGCCQ

SEQ ID NO: 8691 - DNA, 1317 bp, Zea mays subsp. mays
  misc_feature (1)..(1317): Ceres Seq. ID no. 12360003
  misc_feature: MA Experiment ID: 108545 Result: Down-regulated in Transcription
  misc_feature: MA Experiment 108545 PARAMETER Experiment Name: Zm_Imbibed_Seeds_P Parameter: Age (day) Value: 3 vs. 2
  misc_feature: MA Experiment 108545 PARAMETER Experiment Name: Zm_Imbibed_Seeds_P Parameter: Organism Value: Zea mays
  misc_feature: MA Experiment 108545 PARAMETER Experiment Name: Zm_Imbibed_Seeds_P Parameter: Plant Line Value: 35A19
  misc_feature: MA Experiment 108545 PARAMETER Experiment Name: Zm_Imbibed_Seeds_P Parameter: Tissue Value: Aerial vs. Embryo
  misc_feature: MA Experiment ID: 108547 Result: Down-regulated in Transcription
  misc_feature: MA Experiment 108547 PARAMETER Experiment Name: Zm_Imbibed_Seeds_P Parameter: Age (day) Value: 4 vs. 2
  misc_feature: MA Experiment 108547 PARAMETER Experiment Name: Zm_Imbibed_Seeds_P Parameter: Organism Value: Zea mays
  misc_feature: MA Experiment 108547 PARAMETER Experiment Name: Zm_Imbibed_Seeds_P Parameter: Plant Line Value: 35A19
  misc_feature: MA Experiment 108547 PARAMETER Experiment Name: Zm_Imbibed_Seeds_P Parameter: Tissue Value: Aerial vs. Embryo
attcagcccatcgctagctctcgcgtctcgcctgtctcctctagtagcacaagaccacgagggattaagcgatgacaacctctaagctcgctgtcctcactctgtttgccctgctcggctccgtgtcatgccagtccggtggctactacttctacccaaccccgcagcaaccatctccaacacccagccctccttctagtccgcaactcatggtcggatactacaaggacaagtgtgccgcttacgtggatgttgaagctattgtcaagaagcacgtcaaggccaccgatgctggcatgcaggccgggcttgtccgtctcttattccacgactgcttcgtccgtggatgcgacggctccgtcctcctcgacacgttcagcaacgacaccagcctgaccccagagaagttcggcgtgcccaacttccccagcctgcggggcttcgaggtgatcgacgcggccaaggccgagatcgaggcggcgtgccccggcacggtctcgtgcgcggacatcgtcgcgttcgccgcccgcgacgcgtcctacttcctcagcggcggcggcatcagcttcgccatgcccgcggggcgctacgacgggaacgtctccctcgccagcgagaccctccccaacctgccctcgccgttcaccggcttcgaccagctcgtcaaggtgttcgccgacaaagggctcgacgccttcgacatgatcacgctctccggcgcgcacagcatcggccgctcccactgctcctccttcaccagggaccgcctgccgcccagcaacaccaccgacatagatccagcgttcgccgccacgctgcaggctagctgcgcttcgcccaacggcaccgacaacacggtcatgcaggacttcaagacccccgacgtcctggacaaccagtactacaagaacgtgctggcccacaaggttctcttcacgtcggacgccgcgctcaccaccaacttcacgtccaacaacctggtgcgcgcctacgcggacttcgtgccctatctgtggcagcagaagttcgccaaagccatggtgaagatggccggcgtcgagatcaaaaccgccgccaacggagagatcaggaagacatgccgcaaggtcaacagcaggtcctgatcagatggcgtaccggcgggcttccaatttcctaagttttgcctttacatacattcccctgatctcccctaatatctgcctttatgctgtatacattctttgtttcgttttccagctgtatgcctgcttttatgctgtataatttaaatttgattgaatattacatcttttgaaatccaagcaaattttcatc

SEQ ID NO: 8692 - protein, 350 aa, Zea mays subsp. mays
  peptide (1)..(350): Ceres Seq. ID no. 12360004
  misc_feature (67)..(299): Pfam Name: Peroxidase Pfam Description: Peroxidase
  misc_feature (15)..(347): Homolog of NCBI NO: 27261088 NR Description: putative peroxidase [Oryza sativa (japonica
  misc_feature (1)..(347): Homolog of NCBI NO: 27261087 NR Description: putative peroxidase [Oryza sativa (japonica
  misc_feature (1)..(347): Homolog of NCBI NO: 27261097 NR Description: putative peroxidase [Oryza sativa (japonica
  misc_feature (45)..(347): Homolog of NCBI NO: 27261094 NR Description: putative peroxidase [Oryza sativa (japonica
  misc_feature (37)..(347): Homolog of NCBI NO: 34896266 NR Description: putative peroxidase [Oryza sativa]
  misc_feature (37)..(347): Homolog of NCBI NO: 34896268 NR Description: putative peroxidase [Oryza sativa]
  misc_feature (46)..(347): Homolog of NCBI NO: 12039346 NR Description: putative peroxidase [Oryza sativa]
  misc_feature (30)..(347): Homolog of NCBI NO: 34896944 NR Description: putative peroxidase [Oryza sativa]
  misc_feature (46)..(347): Homolog of NCBI NO: 12039335 NR Description: putative peroxidase [Oryza sativa]
  misc_feature (46)..(347): Homolog of NCBI NO: 12039354 NR Description: putative peroxidase [Oryza sativa]
MTTSKLAVLTLFALLGSVSCQSGGYYFYPTPQQPSPTPSPPSSPQLMVGYYKDKCAAYVDVEAIVKKHVKATDAGMQAGLVRLLFHDCFVRGCDGSVLLDTFSNDTSLTPEKFGVPNFPSLRGFEVIDAAKAEIEAACPGTVSCADIVAFAARDASYFLSGGGISFAMPAGRYDGNVSLASETLPNLPSPFTGFDQLVKVFADKGLDAFDMITLSGAHSIGRSHCSSFTRDRLPPSNTTDIDPAFAATLQASCASPNGTDNTVMQDFKTPDVLDNQYYKNVLAHKVLFTSDAALTTNFTSNNLVRAYADFVPYLWQQKFAKAMVKMAGVEIKTAANGEIRKTCRKVNSRS

SEQ ID NO: 8693 - protein, 304 aa, Zea mays subsp. mays
  peptide (1)..(304): Ceres Seq. ID no. 12360005
  misc_feature (21)..(253): Pfam Name: Peroxidase Pfam Description: Peroxidase
  misc_feature (1)..(301): Homolog of NCBI NO: 27261088 NR Description: putative peroxidase [Oryza sativa (japonica
  misc_feature (1)..(301): Homolog of NCBI NO: 27261087 NR Description: putative peroxidase [Oryza sativa (japonica
  misc_feature (1)..(301): Homolog of NCBI NO: 27261097 NR Description: putative peroxidase [Oryza sativa (japonica
  misc_feature (1)..(301): Homolog of NCBI NO: 27261094 NR Description: putative peroxidase [Oryza sativa (japonica
  misc_feature (1)..(301): Homolog of NCBI NO: 34896266 NR Description: putative peroxidase [Oryza sativa]
  misc_feature (1)..(301): Homolog of NCBI NO: 34896268 NR Description: putative peroxidase [Oryza sativa]
  misc_feature (1)..(301): Homolog of NCBI NO: 12039346 NR Description: putative peroxidase [Oryza sativa]
  misc_feature (1)..(301): Homolog of NCBI NO: 34896944 NR Description: putative peroxidase [Oryza sativa]
  misc_feature (1)..(301): Homolog of NCBI NO: 12039335 NR Description: putative peroxidase [Oryza sativa]
  misc_feature (1)..(301): Homolog of NCBI NO: 12039354 NR Description: putative peroxidase [Oryza sativa]
MVGYYKDKCAAYVDVEAIVKKHVKATDAGMQAGLVRLLFHDCFVRGCDGSVLLDTFSNDTSLTPEKFGVPNFPSLRGFEVIDAAKAEIEAACPGTVSCADIVAFAARDASYFLSGGGISFAMPAGRYDGNVSLASETLPNLPSPFTGFDQLVKVFADKGLDAFDMITLSGAHSIGRSHCSSFTRDRLPPSNTTDIDPAFAATLQASCASPNGTDNTVMQDFKTPDVLDNQYYKNVLAHKVLFTSDAALTTNFTSNNLVRAYADFVPYLWQQKFAKAMVKMAGVEIKTAANGEIRKTCRKVNSRS

SEQ ID NO: 8694 - protein, 275 aa, Zea mays subsp. mays
  peptide (1)..(275): Ceres Seq. ID no. 12360006
  misc_feature (1)..(224): Pfam Name: Peroxidase Pfam Description: Peroxidase
  misc_feature (1)..(272): Homolog of NCBI NO: 27261088 NR Description: putative peroxidase [Oryza sativa (japonica
  misc_feature (1)..(272): Homolog of NCBI NO: 27261087 NR Description: putative peroxidase [Oryza sativa (japonica
  misc_feature (1)..(272): Homolog of NCBI NO: 27261097 NR Description: putative peroxidase [Oryza sativa (japonica
  misc_feature (1)..(272): Homolog of NCBI NO: 27261094 NR Description: putative peroxidase [Oryza sativa (japonica
  misc_feature (1)..(272): Homolog of NCBI NO: 34896266 NR Description: putative peroxidase [Oryza sativa]
  misc_feature (1)..(272): Homolog of NCBI NO: 34896268 NR Description: putative peroxidase [Oryza sativa]
  misc_feature (1)..(272): Homolog of NCBI NO: 12039346 NR Description: putative peroxidase [Oryza sativa]
  misc_feature (1)..(272): Homolog of NCBI NO: 34896944 NR Description: putative peroxidase [Oryza sativa]
  misc_feature (1)..(272): Homolog of NCBI NO: 12039335 NR Description: putative peroxidase [Oryza sativa]
  misc_feature (1)..(272): Homolog of NCBI NO: 12039354 NR Description: putative peroxidase [Oryza sativa]
MQAGLVRLLFHDCFVRGCDGSVLLDTFSNDTSLTPEKFGVPNFPSLRGFEVIDAAKAEIEAACPGTVSCADIVAFAARDASYFLSGGGISFAMPAGRYDGNVSLASETLPNLPSPFTGFDQLVKVFADKGLDAFDMITLSGAHSIGRSHCSSFTRDRLPPSNTTDIDPAFAATLQASCASPNGTDNTVMQDFKTPDVLDNQYYKNVLAHKVLFTSDAALTTNFTSNNLVRAYADFVPYLWQQKFAKAMVKMAGVEIKTAANGEIRKTCRKVNSRS

SEQ ID NO: 8695 - DNA, 850 bp, Zea mays subsp. mays
  misc_feature (1)..(850): Ceres Seq. ID no. 12423783
  misc_feature: MA Experiment ID: 20000480 Result: Up-regulated in Transcription
  misc_feature: MA Experiment 20000480 PARAMETER Experiment Name: Zm_Drought_P Parameter: Age (day) Value: 11
  misc_feature: MA Experiment 20000480 PARAMETER Experiment Name: Zm_Drought_P Parameter: Organism Value: Zea mays
  misc_feature: MA Experiment 20000480 PARAMETER Experiment Name: Zm_Drought_P Parameter: Plant Line Value: 35A19
  misc_feature: MA Experiment 20000480 PARAMETER Experiment Name: Zm_Drought_P Parameter: Timepoint (hr) Value: 72
  misc_feature: MA Experiment 20000480 PARAMETER Experiment Name: Zm_Drought_P Parameter: Tissue Value: Aerial
  misc_feature: MA Experiment 20000480 PARAMETER Experiment Name: Zm_Drought_P Parameter: Treatment Value: Drought vs. No Drought
ctatgaaagtctgaaaatagctagtggattgagcggagcgtgcctctgcggtccgataggcgggttcgcatccggccatccgatactctgccagtgcggccgcgcggcggcggagcaaccacgcgcgcagaccgccgtcgccacctcctccctccctccgctccccggcgtgcgtccgatccaccaggaatcgaaggctcccacacgcccccacgcgatgctgcgcaacttcccgcaggcccggaggctcctcaggcggatggggttcgagaaggaggacgcctacttctggaagcagatgggcaaggccatgctctgcacgtacacgctcttcggcgtcgtctggctctggaacgagacgtcgccgctcgggtggtggacgctcaagccgcgccccaaggaagaaagagagatggcacacctctacgagcgcaggaagttcccgtaccctggcgatgatgaggcggtcgaggagtttgtaaagagcggaggtgctcttggaaccacaattggacccaggggattcgctgacgccaatatggattctgaaaacatgcagaagcagctgcagtctaagaagttcgagcaggaagcacagaaactgtggattcggatgaggaatgaggtcgtacaggagctccaggagaaggggtttgatatcgagtgaatttgaaacctgcagtatggtcggcgctgaggatgttaaaacttaaaaccacttgccatctaaattggagaactgtataacttaggaataaaagagtttgtagctatctttttaactaactatctggtgctgcattcttggtgctgctagattgtaccgaaaataaattttgatgtcttgtgg

SEQ ID NO: 8696 - protein, 221 aa, Zea mays subsp. mays
  peptide (1)..(221): Ceres Seq. ID no. 12423784
  misc_feature (73)..(221): Homolog of NCBI NO: 14587335 NR Description: P0460H02.16 [Oryza sativa (japonica
  misc_feature (80)..(221): Homolog of NCBI NO: 21592650 NR Description: unknown [Arabidopsis thaliana]
  misc_feature (80)..(221): Homolog of NCBI NO: 15237778 NR Description: putative protein; protein id: At5g58920.1, by cDNA: 3086. [Arabidopsis thaliana] unknown protein [Arabidopsis thaliana]
YESLKIASGLSGACLCGPIGGFASGHPILCQCGRAAAEQPRAQTAVATSSLPPLPGVRPIHQESKAPTRPHAMLRNFPQARRLLRRMGFEKEDAYFWKQMGKAMLCTYTLFGVVWLWNETSPLGWWTLKPRPKEEREMAHLYERRKFPYPGDDEAVEEFVKSGGALGTTIGPRGFADANMDSENMQKQLQSKKFEQEAQKLWIRMRNEVVQELQEKGFDIE

SEQ ID NO: 8697 - protein, 149 aa, Zea mays subsp. mays
  peptide (1)..(149): Ceres Seq. ID no. 12423785
  misc_feature (1)..(149): Homolog of NCBI NO: 14587335 NR Description: P0460H02.16 [Oryza sativa (japonica
  misc_feature (8)..(149): Homolog of NCBI NO: 21592650 NR Description: unknown [Arabidopsis thaliana]
  misc_feature (8)..(149): Homolog of NCBI NO: 15237778 NR Description: putative protein; protein id: At5g58920.1, by cDNA: 3086. [Arabidopsis thaliana] unknown protein [Arabidopsis thaliana]
MLRNFPQARRLLRRMGFEKEDAYFWKQMGKAMLCTYTLFGVVWLWNETSPLGWWTLKPRPKEEREMAHLYERRKFPYPGDDEAVEEFVKSGGALGTTIGPRGFADANMDSENMQKQLQSKKFEQEAQKLWIRMRNEVVQELQEKGFDIE

SEQ ID NO: 8698 - protein, 135 aa, Zea mays subsp. mays
  peptide (1)..(135): Ceres Seq. ID no. 12423786
  misc_feature (1)..(135): Homolog of NCBI NO: 14587335 NR Description: P0460H02.16 [Oryza sativa (japonica
  misc_feature (1)..(135): Homolog of NCBI NO: 21592650 NR Description: unknown [Arabidopsis thaliana]
  misc_feature (1)..(135): Homolog of NCBI NO: 15237778 NR Description: putative protein; protein id: At5g58920.1, by cDNA: 3086. [Arabidopsis thaliana] unknown protein [Arabidopsis thaliana]
MGFEKEDAYFWKQMGKAMLCTYTLFGVVWLWNETSPLGWWTLKPRPKEEREMAHLYERRKFPYPGDDEAVEEFVKSGGALGTTIGPRGFADANMDSENMQKQLQSKKFEQEAQKLWIRMRNEVVQELQEKGFDIE

SEQ ID NO: 8699 - DNA, 1606 bp, Zea mays subsp. mays
  misc_feature (1)..(1606): Ceres Seq. ID no. 12350293
  misc_feature: MA Experiment ID: 108535 Result: Up-regulated in Transcription
  misc_feature: MA Experiment 108535 PARAMETER Experiment Name: Zm_Meristem_P Parameter: Age (day) Value: 8
  misc_feature: MA Experiment 108535 PARAMETER Experiment Name: Zm_Meristem_P Parameter: Organism Value: Zea mays
  misc_feature: MA Experiment 108535 PARAMETER Experiment Name: Zm_Meristem_P Parameter: Plant Line Value: 35A19
  misc_feature: MA Experiment 108535 PARAMETER Experiment Name: Zm_Meristem_P Parameter: Tissue Value: Root Meristem vs. Above Root Meristem
  misc_feature: MA Experiment ID: 108536 Result: Up-regulated in Transcription
  misc_feature: MA Experiment 108536 PARAMETER Experiment Name: Zm_Meristem_P Parameter: Age (day) Value: 8
  misc_feature: MA Experiment 108536 PARAMETER Experiment Name: Zm_Meristem_P Parameter: Organism Value: Zea mays
  misc_feature: MA Experiment 108536 PARAMETER Experiment Name: Zm_Meristem_P Parameter: Plant Line Value: 35A19
  misc_feature: MA Experiment 108536 PARAMETER Experiment Name: Zm_Meristem_P Parameter: Tissue Value: Shoot Meristem vs. Above Shoot Meristem
  misc_feature: MA Experiment ID: 108543 Result: Down-regulated in Transcription
  misc_feature: MA Experiment ID: 108544 Result: Down-regulated in Transcription
  misc_feature: MA Experiment ID: 108556 Result: Down-regulated in Transcription
  misc_feature: MA Experiment 108556 PARAMETER Experiment Name: Zm_Drought_P Parameter: Age (day) Value: 9
  misc_feature: MA Experiment 108556 PARAMETER Experiment Name: Zm_Drought_P Parameter: Organism Value: Zea mays
  misc_feature: MA Experiment 108556 PARAMETER Experiment Name: Zm_Drought_P Parameter: Plant Line Value: 35A19
  misc_feature: MA Experiment 108556 PARAMETER Experiment Name: Zm_Drought_P Parameter: Timepoint (hr) Value: 24
  misc_feature: MA Experiment 108556 PARAMETER Experiment Name: Zm_Drought_P Parameter: Tissue Value: Aerial
  misc_feature: MA Experiment 108556 PARAMETER Experiment Name: Zm_Drought_P Parameter: Treatment Value: Drought vs. No Drought
  misc_feature: MA Experiment ID: 20000478 Result: Down-regulated in Transcription
  misc_feature: MA Experiment 20000478 PARAMETER Experiment Name: Zm_5mM_SA_P Parameter: Age (day) Value: 11
  misc_feature: MA Experiment 20000478 PARAMETER Experiment Name: Zm_5mM_SA_P Parameter: Organism Value: Zea mays
  misc_feature: MA Experiment 20000478 PARAMETER Experiment Name: Zm_5mM_SA_P Parameter: Plant Line Value: 35A19
  misc_feature: MA Experiment 20000478 PARAMETER Experiment Name: Zm_5mM_SA_P Parameter: Timepoint (hr) Value: 72
  misc_feature: MA Experiment 20000478 PARAMETER Experiment Name: Zm_5mM_SA_P Parameter: Tissue Value: Aerial
  misc_feature: MA Experiment 20000478 PARAMETER Experiment Name: Zm_5mM_SA_P Parameter: Treatment Value: 5mM SA vs. No Treatment
  misc_feature: MA Experiment ID: 20000535 Result: Up-regulated in Transcription
  misc_feature: MA Experiment 20000535 PARAMETER Experiment Name: Zm_Hybrid_Seed_Dev_P Parameter: DAP Value: 30 vs. 12
  misc_feature: MA Experiment 20000535 PARAMETER Experiment Name: Zm_Hybrid_Seed_Dev_P Parameter: Organism Value: Zea mays
  misc_feature: MA Experiment 20000535 PARAMETER Experiment Name: Zm_Hybrid_Seed_Dev_P Parameter: Plant Line Value: 35A19
  misc_feature: MA Experiment 20000535 PARAMETER Experiment Name: Zm_Hybrid_Seed_Dev_P Parameter: Tissue Value: Embryo vs. Unfert Floret
gattcattccccctctcccctctccaagacccaaaaccctaacccctacgacccccgtgaccgccgccgccgtcgatgcctgcgctctccgacgtcgcgcttcaggctgccatcgccggcaacctccgcctcctgaagctggtggcgagcaagatgaatctgcgcgaagcgaaggacgccgctgggcggaacgcgctccacctggccgcggagatgggccgtcttgaggtttgcaggttcctggtggaggaatcgggcttcgaggtgaacttcgcctgcgccgaaggcgggtcgccggtccactgcgccgcggccgggggcagcgagagcgtcttgggctaccttctcgaccacggtggcgaccctgtgatgccggactccatgggctccactccactgcatgatgcggcagaggaagggcattgtgcggctgtgaggatgctgctgtccaagggtgtcgatgtggatccacacggctgtcgtgggacgccgctgcacttggcctgctccaatgaccgggatcaggttgttaggatcctgctggaacatggcgcagatcccaacaaagtttcggtcatgtcctcccaccactcatgatggcatactgtggcggttctttgagatgcatgaagctactgattgaggctggtgcggatgtgaacttgattgctccttctggagtaattttggctcaggcagtttgtgatgggtcaactgagattgtcaagtttttgctagaggttggagctgatcctaacattcctgatgaggatgggaaaatcccgatcatgtacccagcatttaatgggcatcgggatcttgttgaaattctatttcctaagacaagaccagtttcatctttgccagactggagcgttgatgggattattagaagtatgaaagatctgtttttcaagcctcaggatgcagctgtggtggaaaaaaagatagctgatgcgaagtcacaagggaaggaagctttcgcaaggggagagtaccctgcagcagtatacttctataccatggtactagagaacgaccttgatgctactgcgtttgccaaccggagcctgtgctggttgcggctgagggagggggccaaggctctgttagatgctcaacagtgcaaaatgatacggcctcgttggtcgaaggcatggtatcgcgagggcgcggctctcagcttgctgaaggactaccaaggggcagtcaacgcgttcacggaagcattgaaactggatcctgcaagtttagagatcaagaaagccttaagggaggccaccgattccctggcgaacgttggccgctccggagaacagaacccatgagctgctgctgcatccatgtgctttatctcacgttaagaatcctctaacactatgtggctcagcctcatattatatgttgatatatgtcgccttaacgcactgctggagatactagtttcgatctcagcctatatgttttgctccttcgggatgcagcctaagatacatgtggcaaccaagtgaggttgggcagggtagcatatctatggactggttgaactattatatgtatctggatatctaagtgcacctgttgctcctagtaaagttgcagttct

SEQ ID NO: 8700 - protein, 244 aa, Zea mays subsp. mays
  peptide (1)..(244): Ceres Seq. ID no. 12350294
  misc_feature (152)..(185): Pfam Name: TPR Domain Pfam Description: TPR Domain
  misc_feature (1)..(233): Homolog of NCBI NO: 27542766 NR Description: ankyrin-like protein-like protein [Sorghum
  misc_feature (1)..(227): Homolog of NCBI NO: 27542768 NR Description: ankyrin-like protein-like protein [Sorghum
  misc_feature (9)..(241): Homolog of NCBI NO: 34896852 NR Description: putative ankyrin [Oryza sativa]
  misc_feature (103)..(241): Homolog of NCBI NO: 15229331 NR Description: ankyrin-like protein; protein id: At3g04710.1, by cDNA: 104284. [Arabidopsis thaliana]
  misc_feature (1)..(103): Homolog of NCBI NO: 15229331 NR Description: ankyrin-like protein; protein id: At3g04710.1, by cDNA: 104284. [Arabidopsis thaliana]
  misc_feature (115)..(226): Homolog of NCBI NO: 13435243 NR Description: putative gag-pol polyprotein [Oryza sativa]
  misc_feature (8)..(110): Homolog of NCBI NO: 13435243 NR Description: putative gag-pol polyprotein [Oryza sativa]
  misc_feature (1)..(243): Homolog of NCBI NO: 24745936 NR Description: ankyrin-like protein [Solanum tuberosum]
  misc_feature (8)..(233): Homolog of NCBI NO: 38637543 NR Description: ankyrin-like protein [Oryza sativa (japonica
  misc_feature (8)..(233): Homolog of NCBI NO: 13435247 NR Description: putative ankyrin [Oryza sativa]
MMAYCGGSLRCMKLLIEAGADVNLIAPSGVILAQAVCDGSTEIVKFLLEVGADPNIPDEDGKIPIMYPAFNGHRDLVEILFPKTRPVSSLPDWSVDGIIRSMKDLFFKPQDAAVVEKKIADAKSQGKEAFARGEYPAAVYFYTMVLENDLDATAFANRSLCWLRLREGAKALLDAQQCKMIRPRWSKAWYREGAALSLLKDYQGAVNAFTEALKLDPASLEIKKALREATDSLANVGRSGEQNP

SEQ ID NO: 8701 - protein, 243 aa, Zea mays subsp. mays
  peptide (1)..(243): Ceres Seq. ID no. 12350295
  misc_feature (151)..(184): Pfam Name: TPR Domain Pfam Description: TPR Domain
  misc_feature (1)..(232): Homolog of NCBI NO: 27542766 NR Description: ankyrin-like protein-like protein [Sorghum
  misc_feature (1)..(226): Homolog of NCBI NO: 27542768 NR Description: ankyrin-like protein-like protein [Sorghum
  misc_feature (8)..(240): Homolog of NCBI NO: 34896852 NR Description: putative ankyrin [Oryza sativa]
  misc_feature (102)..(240): Homolog of NCBI NO: 15229331 NR Description: ankyrin-like protein; protein id: At3g04710.1, by cDNA: 104284. [Arabidopsis thaliana]
  misc_feature (1)..(102): Homolog of NCBI NO: 15229331 NR Description: ankyrin-like protein; protein id: At3g04710.1, by cDNA: 104284. [Arabidopsis thaliana]
  misc_feature (114)..(225): Homolog of NCBI NO: 13435243 NR Description: putative gag-pol polyprotein [Oryza sativa]
  misc_feature (7)..(109): Homolog of NCBI NO: 13435243 NR Description: putative gag-pol polyprotein [Oryza sativa]
  misc_feature (1)..(242): Homolog of NCBI NO: 24745936 NR Description: ankyrin-like protein [Solanum tuberosum]
  misc_feature (7)..(232): Homolog of NCBI NO: 38637543 NR Description: ankyrin-like protein [Oryza sativa (japonica
  misc_feature (7)..(232): Homolog of NCBI NO: 13435247 NR Description: putative ankyrin [Oryza sativa]
MAYCGGSLRCMKLLIEAGADVNLIAPSGVILAQAVCDGSTEIVKFLLEVGADPNIPDEDGKIPIMYPAFNGHRDLVEILFPKTRPVSSLPDWSVDGIIRSMKDLFFKPQDAAVVEKKIADAKSQGKEAFARGEYPAAVYFYTMVLENDLDATAFANRSLCWLRLREGAKALLDAQQCKMIRPRWSKAWYREGAALSLLKDYQGAVNAFTEALKLDPASLEIKKALREATDSLANVGRSGEQNP

SEQ ID NO: 8702 - protein, 233 aa, Zea mays subsp. mays
  peptide (1)..(233): Ceres Seq. ID no. 12350296
  misc_feature (141)..(174): Pfam Name: TPR Domain Pfam Description: TPR Domain
  misc_feature (1)..(222): Homolog of NCBI NO: 27542766 NR Description: ankyrin-like protein-like protein [Sorghum
  misc_feature (1)..(216): Homolog of NCBI NO: 27542768 NR Description: ankyrin-like protein-like protein [Sorghum
  misc_feature (1)..(230): Homolog of NCBI NO: 34896852 NR Description: putative ankyrin [Oryza sativa]
  misc_feature (92)..(230): Homolog of NCBI NO: 15229331 NR Description: ankyrin-like protein; protein id: At3g04710.1, by cDNA: 104284. [Arabidopsis thaliana]
  misc_feature (1)..(92): Homolog of NCBI NO: 15229331 NR Description: ankyrin-like protein; protein id: At3g04710.1, by cDNA: 104284. [Arabidopsis thaliana]
  misc_feature (104)..(215): Homolog of NCBI NO: 13435243 NR Description: putative gag-pol polyprotein [Oryza sativa]
  misc_feature (1)..(99): Homolog of NCBI NO: 13435243 NR Description: putative gag-pol polyprotein [Oryza sativa]
  misc_feature (1)..(232): Homolog of NCBI NO: 24745936 NR Description: ankyrin-like protein [Solanum tuberosum]
  misc_feature (1)..(222): Homolog of NCBI NO: 38637543 NR Description: ankyrin-like protein [Oryza sativa (japonica
  misc_feature (1)..(222): Homolog of NCBI NO: 13435247 NR Description: putative ankyrin [Oryza sativa]
MKLLIEAGADVNLIAPSGVILAQAVCDGSTEIVKFLLEVGADPNIPDEDGKIPIMYPAFNGHRDLVEILFPKTRPVSSLPDWSVDGIIRSMKDLFFKPQDAAVVEKKIADAKSQGKEAFARGEYPAAVYFYTMVLENDLDATAFANRSLCWLRLREGAKALLDAQQCKMIRPRWSKAWYREGAALSLLKDYQGAVNAFTEALKLDPASLEIKKALREATDSLANVGRSGEQNP

SEQ ID NO: 8703 - DNA, 775 bp, Zea mays subsp. mays; identical to SEQ ID NO: 2416
  misc_feature (1)..(775): Ceres Seq. ID no. 12544805
  misc_feature: MA Experiment ID: 108522 Result: Down-regulated in Transcription
  misc_feature: MA Experiment 108522 PARAMETER Experiment Name: Zm_42deg_Heat_P Parameter: Age (day) Value: 8
  misc_feature: MA Experiment 108522 PARAMETER Experiment Name: Zm_42deg_Heat_P Parameter: Organism Value: Zea mays
  misc_feature: MA Experiment 108522 PARAMETER Experiment Name: Zm_42deg_Heat_P Parameter: Plant Line Value: 35A19
  misc_feature: MA Experiment 108522 PARAMETER Experiment Name: Zm_42deg_Heat_P Parameter: Temperature (deg C) Value: 42 vs. 22
  misc_feature: MA Experiment 108522 PARAMETER Experiment Name: Zm_42deg_Heat_P Parameter: Timepoint (hr) Value: 1
  misc_feature: MA Experiment 108522 PARAMETER Experiment Name: Zm_42deg_Heat_P Parameter: Tissue Value: Aerial
  misc_feature: MA Experiment ID: 108535 Result: Up-regulated in Transcription
  misc_feature: MA Experiment 108535 PARAMETER Experiment Name: Zm_Meristem_P Parameter: Age (day) Value: 8
  misc_feature: MA Experiment 108535 PARAMETER Experiment Name: Zm_Meristem_P Parameter: Organism Value: Zea mays
  misc_feature: MA Experiment 108535 PARAMETER Experiment Name: Zm_Meristem_P Parameter: Plant Line Value: 35A19
  misc_feature: MA Experiment 108535 PARAMETER Experiment Name: Zm_Meristem_P Parameter: Tissue Value: Root Meristem vs. Above Root Meristem
  misc_feature: MA Experiment ID: 108544 Result: Down-regulated in Transcription
  misc_feature: MA Experiment ID: 108556 Result: Down-regulated in Transcription
  misc_feature: MA Experiment 108556 PARAMETER Experiment Name: Zm_Drought_P Parameter: Age (day) Value: 9
  misc_feature: MA Experiment 108556 PARAMETER Experiment Name: Zm_Drought_P Parameter: Organism Value: Zea mays
  misc_feature: MA Experiment 108556 PARAMETER Experiment Name: Zm_Drought_P Parameter: Plant Line Value: 35A19
  misc_feature: MA Experiment 108556 PARAMETER Experiment Name: Zm_Drought_P Parameter: Timepoint (hr) Value: 24
  misc_feature: MA Experiment 108556 PARAMETER Experiment Name: Zm_Drought_P Parameter: Tissue Value: Aerial
  misc_feature: MA Experiment 108556 PARAMETER Experiment Name: Zm_Drought_P Parameter: Treatment Value: Drought vs. No Drought
  misc_feature: MA Experiment ID: 20000478 Result: Down-regulated in Transcription
  misc_feature: MA Experiment 20000478 PARAMETER Experiment Name: Zm_5mM_SA_P Parameter: Age (day) Value: 11
  misc_feature: MA Experiment 20000478 PARAMETER Experiment Name: Zm_5mM_SA_P Parameter: Organism Value: Zea mays
  misc_feature: MA Experiment 20000478 PARAMETER Experiment Name: Zm_5mM_SA_P Parameter: Plant Line Value: 35A19
  misc_feature: MA Experiment 20000478 PARAMETER Experiment Name: Zm_5mM_SA_P Parameter: Timepoint (hr) Value: 72
  misc_feature: MA Experiment 20000478 PARAMETER Experiment Name: Zm_5mM_SA_P Parameter: Tissue Value: Aerial
  misc_feature: MA Experiment 20000478 PARAMETER Experiment Name: Zm_5mM_SA_P Parameter: Treatment Value: 5mM SA vs. No Treatment
  misc_feature: MA Experiment ID: 20000479 Result: Down-regulated in Transcription
  misc_feature: MA Experiment 20000479 PARAMETER Experiment Name: Zm_Drought_P Parameter: Age (day) Value: 10
  misc_feature: MA Experiment 20000479 PARAMETER Experiment Name: Zm_Drought_P Parameter: Organism Value: Zea mays
  misc_feature: MA Experiment 20000479 PARAMETER Experiment Name: Zm_Drought_P Parameter: Plant Line Value: 35A19
  misc_feature: MA Experiment 20000479 PARAMETER Experiment Name: Zm_Drought_P Parameter: Timepoint (hr) Value: 48
  misc_feature: MA Experiment 20000479 PARAMETER Experiment Name: Zm_Drought_P Parameter: Tissue Value: Aerial
  misc_feature: MA Experiment 20000479 PARAMETER Experiment Name: Zm_Drought_P Parameter: Treatment Value: Drought vs. No Drought
  misc_feature: MA Experiment ID: 20000488 Result: Up-regulated in Transcription
  misc_feature: MA Experiment 20000488 PARAMETER Experiment Name: Zm_50mM_NH4NO3_L_to_H_P Parameter: Organism Value: Zea mays
  misc_feature: MA Experiment 20000488 PARAMETER Experiment Name: Zm_50mM_NH4NO3_L_to_H_P Parameter: Timepoint (hr) Value: 8
  misc_feature: MA Experiment 20000488 PARAMETER Experiment Name: Zm_50mM_NH4NO3_L_to_H_P Parameter: Tissue Value: Leaves
  misc_feature: MA Experiment 20000488 PARAMETER Experiment Name: Zm_50mM_NH4NO3_L_to_H_P Parameter: Treatment Value: 50mM NH4NO3 vs. 100mM Mannitol
  misc_feature: MA Experiment ID: 20001612 Result: Up-regulated in Transcription
  misc_feature: MA Experiment 20001612 PARAMETER Experiment Name: Zm_50ppm_KNO3_L-to-H_P Parameter: Age (day) Value: 19
  misc_feature: MA Experiment 20001612 PARAMETER Experiment Name: Zm_50ppm_KNO3_L-to-H_P Parameter: Organism Value: Zea mays
  misc_feature: MA Experiment 20001612 PARAMETER Experiment Name: Zm_50ppm_KNO3_L-to-H_P Parameter: Plant Line Value: 35A19
  misc_feature: MA Experiment 20001612 PARAMETER Experiment Name: Zm_50ppm_KNO3_L-to-H_P Parameter: Timepoint (hr) Value: 8
  misc_feature: MA Experiment 20001612 PARAMETER Experiment Name: Zm_50ppm_KNO3_L-to-H_P Parameter: Tissue Value: Roots
  misc_feature: MA Experiment 20001612 PARAMETER Experiment Name: Zm_50ppm_KNO3_L-to-H_P Parameter: Treatment Value: 50ppm KNO3 vs. 50ppm KCl

SEQ ID NO: 8704 - protein, 164 aa, Zea mays subsp. mays; identical to SEQ ID NO: 2417
  peptide (1)..(164): Ceres Seq. ID no. 12544806
  misc_feature (2)..(100): Pfam Name: Ribosomal protein L21e Pfam Description: Ribosomal protein L21e
  misc_feature (1)..(155): Homolog of NCBI NO: 6319668 NR Description: Homology to rat L21; Rpl21ap [Saccharomyces
  misc_feature (1)..(164): Homolog of NCBI NO: 37535194 NR Description: 60S ribosomal protein L21 [Oryza sativa (japonica group)] >gi|13489167|gb|AAK27801.1| 60S ribosomal protein L21
  misc_feature (1)..(164): Homolog of NCBI NO: 11276828 NR Description: ribosomal protein L21 [imported] - rice
  misc_feature (1)..(164): Homolog of NCBI NO: 18406015 NR Description: 60S ribosomal protein L21, putative; protein id: supported by cDNA: 28545., supported by cDNA: gi_15292812, by cDNA: gi_20258868 [Arabidopsis thaliana]
  misc_feature (1)..(164): Homolog of NCBI NO: 18391042 NR Description: putative 60S ribosomal protein L21; protein id: supported by cDNA: gi_13877928, supported by cDNA: gi_16323461 thaliana] >gi|18391054|ref|NP_563849.1| putative 60S come from
  misc_feature (1)..(157): Homolog of NCBI NO: 15213768 NR Description: ribosomal protein L21 [Spodoptera frugiperda]
  misc_feature (1)..(155): Homolog of NCBI NO: 6094029 NR Description: 60S RIBOSOMAL PROTEIN L21
  misc_feature (1)..(157): Homolog of NCBI NO: 38048363 NR Description: similar to Drosophila melanogaster CG12775
  misc_feature (1)..(157): Homolog of NCBI NO: 20129705 NR Description: CG12775-PA [Drosophila melanogaster]
  misc_feature (1)..(155): Homolog of NCBI NO: 40741182 NR Description: hypothetical protein AN4802.2 [Aspergillus

SEQ ID NO: 8705 - protein, 141 aa, Zea mays subsp. mays; identical to SEQ ID NO: 2418
  peptide (1)..(141): Ceres Seq. ID no. 12544807

SEQ ID NO: 8706 - protein, 113 aa, Zea mays subsp. mays; identical to SEQ ID NO: 2419
  peptide (1)..(113): Ceres Seq. ID no. 12544808
  misc_feature (1)..(113): Homolog of NCBI NO: 37535194 NR Description: 60S ribosomal protein L21 [Oryza sativa (japonica group)] >gi|13489167|gb|AAK27801.1| 60S ribosomal protein L21
  misc_feature (1)..(113): Homolog of NCBI NO: 11276828 NR Description: ribosomal protein L21 [imported] - rice
  misc_feature (1)..(113): Homolog of NCBI NO: 18406015 NR Description: 60S ribosomal protein L21, putative; protein id: supported by cDNA: 28545., supported by cDNA: gi_15292812, by cDNA: gi_20258868 [Arabidopsis thaliana]
  misc_feature (1)..(113): Homolog of NCBI NO: 18391042 NR Description: putative 60S ribosomal protein L21; protein id: supported by cDNA: gi_13877928, supported by cDNA: gi_16323461 thaliana] >gi|18391054|ref|NP_563849.1| putative 60S come from
  misc_feature (1)..(106): Homolog of NCBI NO: 15213768 NR Description: ribosomal protein L21 [Spodoptera frugiperda]
  misc_feature (1)..(104): Homolog of NCBI NO: 6094029 NR Description: 60S RIBOSOMAL PROTEIN L21
  misc_feature (1)..(106): Homolog of NCBI NO: 38048363 NR Description: similar to Drosophila melanogaster CG12775
  misc_feature (1)..(106): Homolog of NCBI NO: 20129705 NR Description: CG12775-PA [Drosophila melanogaster]
  misc_feature (1)..(104): Homolog of NCBI NO: 40741182 NR Description: hypothetical protein AN4802.2 [Aspergillus
  misc_feature (1)..(104): Homolog of NCBI NO: 6319668 NR Description: Homology to rat L21; Rpl21ap [Saccharomyces

SEQ ID NO: 8707 - DNA, 739 bp, Zea mays subsp. mays
  misc_feature (1)..(739): Ceres Seq. ID no. 12352966
  misc_feature: MA Experiment ID: 108504 Result: Down-regulated in Transcription
  misc_feature: MA Experiment 108504 PARAMETER Experiment Name: Zm_Drought_P Parameter: Age (day) Value: 8
  misc_feature: MA Experiment 108504 PARAMETER Experiment Name: Zm_Drought_P Parameter: Organism Value: Zea mays
  misc_feature: MA Experiment 108504 PARAMETER Experiment Name: Zm_Drought_P Parameter: Plant Line Value: 35A19
  misc_feature: MA Experiment 108504 PARAMETER Experiment Name: Zm_Drought_P Parameter: Timepoint (hr) Value: 12
  misc_feature: MA Experiment 108504 PARAMETER Experiment Name: Zm_Drought_P Parameter: Tissue Value: Aerial
  misc_feature: MA Experiment 108504 PARAMETER Experiment Name: Zm_Drought_P Parameter: Treatment Value: Drought vs. No Drought
  misc_feature: MA Experiment ID: 108515 Result: Down-regulated in Transcription
  misc_feature: MA Experiment 108515 PARAMETER Experiment Name: Zm_2mM_SA_P Parameter: Age (day) Value: 8
  misc_feature: MA Experiment 108515 PARAMETER Experiment Name: Zm_2mM_SA_P Parameter: Organism Value: Zea mays
  misc_feature: MA Experiment 108515 PARAMETER Experiment Name: Zm_2mM_SA_P Parameter: Plant Line Value: 35A19
  misc_feature: MA Experiment 108515 PARAMETER Experiment Name: Zm_2mM_SA_P Parameter: Timepoint (hr) Value: 12
  misc_feature: MA Experiment 108515 PARAMETER Experiment Name: Zm_2mM_SA_P Parameter: Tissue Value: Aerial
  misc_feature: MA Experiment 108515 PARAMETER Experiment Name: Zm_2mM_SA_P Parameter: Treatment Value: 2mM SA vs. No Treatment
  misc_feature: MA Experiment ID: 108522 Result: Down-regulated in Transcription
  misc_feature: MA Experiment 108522 PARAMETER Experiment Name: Zm_42deg_Heat_P Parameter: Age (day) Value: 8
  misc_feature: MA Experiment 108522 PARAMETER Experiment Name: Zm_42deg_Heat_P Parameter: Organism Value: Zea mays
  misc_feature: MA Experiment 108522 PARAMETER Experiment Name: Zm_42deg_Heat_P Parameter: Plant Line Value: 35A19
  misc_feature: MA Experiment 108522 PARAMETER Experiment Name: Zm_42deg_Heat_P Parameter: Temperature (deg C) Value: 42 vs. 22
  misc_feature: MA Experiment 108522 PARAMETER Experiment Name: Zm_42deg_Heat_P Parameter: Timepoint (hr) Value: 1
  misc_feature: MA Experiment 108522 PARAMETER Experiment Name: Zm_42deg_Heat_P Parameter: Tissue Value: Aerial
  misc_feature: MA Experiment ID: 108523 Result: Down-regulated in Transcription
  misc_feature: MA Experiment 108523 PARAMETER Experiment Name: Zm_42deg_Heat_P Parameter: Age (day) Value: 8
  misc_feature: MA Experiment 108523 PARAMETER Experiment Name: Zm_42deg_Heat_P Parameter: Organism Value: Zea mays
  misc_feature: MA Experiment 108523 PARAMETER Experiment Name: Zm_42deg_Heat_P Parameter: Plant Line Value: 35A19
  misc_feature: MA Experiment 108523 PARAMETER Experiment Name: Zm_42deg_Heat_P Parameter: Temperature (deg C) Value: 42 vs. 22
  misc_feature: MA Experiment 108523 PARAMETER Experiment Name: Zm_42deg_Heat_P Parameter: Timepoint (hr) Value: 6
  misc_feature: MA Experiment 108523 PARAMETER Experiment Name: Zm_42deg_Heat_P Parameter: Tissue Value: Aerial
  misc_feature: MA Experiment ID: 108535 Result: Up-regulated in Transcription
  misc_feature: MA Experiment 108535 PARAMETER Experiment Name: Zm_Meristem_P Parameter: Age (day) Value: 8
  misc_feature: MA Experiment 108535 PARAMETER Experiment Name: Zm_Meristem_P Parameter: Organism Value: Zea mays
  misc_feature: MA Experiment 108535 PARAMETER Experiment Name: Zm_Meristem_P Parameter: Plant Line Value: 35A19
  misc_feature: MA Experiment 108535 PARAMETER Experiment Name: Zm_Meristem_P Parameter: Tissue Value: Root Meristem vs. Above Root Meristem
  misc_feature: MA Experiment ID: 108540 Result: Down-regulated in Transcription
  misc_feature: MA Experiment 108540 PARAMETER Experiment Name: Zm_20percent_PEG_P Parameter: Age (day) Value: 8
  misc_feature: MA Experiment 108540 PARAMETER Experiment Name: Zm_20percent_PEG_P Parameter: Organism Value: Zea mays
  misc_feature: MA Experiment 108540 PARAMETER Experiment Name: Zm_20percent_PEG_P Parameter: Plant Line Value: 35A19
  misc_feature: MA Experiment 108540 PARAMETER Experiment Name: Zm_20percent_PEG_P Parameter: Timepoint (hr) Value: 6
  misc_feature: MA Experiment 108540 PARAMETER Experiment Name: Zm_20percent_PEG_P Parameter: Tissue Value: Aerial
  misc_feature: MA Experiment 108540 PARAMETER Experiment Name: Zm_20percent_PEG_P Parameter: Treatment Value: 20percent PEG vs. No Treatment
  misc_feature: MA Experiment ID: 108542 Result: Down-regulated in Transcription
  misc_feature: MA Experiment 108542 PARAMETER Experiment Name: Zm_150mM_NaCl_P Parameter: Age (day) Value: 8
  misc_feature: MA Experiment 108542 PARAMETER Experiment Name: Zm_150mM_NaCl_P Parameter: Organism Value: Zea mays
  misc_feature: MA Experiment 108542 PARAMETER Experiment Name: Zm_150mM_NaCl_P Parameter: Plant Line Value: 35A19
  misc_feature: MA Experiment 108542 PARAMETER Experiment Name: Zm_150mM_NaCl_P Parameter: Timepoint (hr) Value: 6
  misc_feature: MA Experiment 108542 PARAMETER Experiment Name: Zm_150mM_NaCl_P Parameter: Tissue Value: Aerial
  misc_feature: MA Experiment 108542 PARAMETER Experiment Name: Zm_150mM_NaCl_P Parameter: Treatment Value: 150mM NaCl vs. No Treatment
  misc_feature: MA Experiment ID: 108543 Result: Up-regulated in Transcription
  misc_feature: MA Experiment ID: 108544 Result: Down-regulated in Transcription
  misc_feature: MA Experiment ID: 108556 Result: Down-regulated in Transcription
  misc_feature: MA Experiment 108556 PARAMETER Experiment Name: Zm_Drought_P Parameter: Age (day) Value: 9
  misc_feature: MA Experiment 108556 PARAMETER Experiment Name: Zm_Drought_P Parameter: Organism Value: Zea mays
  misc_feature: MA Experiment 108556 PARAMETER Experiment Name: Zm_Drought_P Parameter: Plant Line Value: 35A19
  misc_feature: MA Experiment 108556 PARAMETER Experiment Name: Zm_Drought_P Parameter: Timepoint (hr) Value: 24
  misc_feature: MA Experiment 108556 PARAMETER Experiment Name: Zm_Drought_P Parameter: Tissue Value: Aerial
  misc_feature: MA Experiment 108556 PARAMETER Experiment Name: Zm_Drought_P Parameter: Treatment Value: Drought vs. No Drought
  misc_feature: MA Experiment ID: 108597 Result: Down-regulated in Transcription
  misc_feature: MA Experiment 108597 PARAMETER Experiment Name: Zm_100uM_ABA_P Parameter: Age (day) Value: 9
  misc_feature: MA Experiment 108597 PARAMETER Experiment Name: Zm_100uM_ABA_P Parameter: Organism Value: Zea mays
  misc_feature: MA Experiment 108597 PARAMETER Experiment Name: Zm_100uM_ABA_P Parameter: Plant Line Value: 35A19
  misc_feature: MA Experiment 108597 PARAMETER Experiment Name: Zm_100uM_ABA_P Parameter: Timepoint (hr) Value: 24
  misc_feature: MA Experiment 108597 PARAMETER Experiment Name: Zm_100uM_ABA_P Parameter: Tissue Value: Aerial
  misc_feature: MA Experiment 108597 PARAMETER Experiment Name: Zm_100uM_ABA_P Parameter: Treatment Value: 100uM ABA vs. No Treatment
  misc_feature: MA Experiment ID: 108687 Result: Down-regulated in Transcription
  misc_feature: MA Experiment 108687 PARAMETER Experiment Name: Zm_Embryos-Flowers__P Parameter: Tissue Value: Embryo vs. Aerial+
  misc_feature: MA Experiment ID: 20000477 Result: Down-regulated in Transcription
  misc_feature: MA Experiment 20000477 PARAMETER Experiment Name: Zm_5mM_SA_P Parameter: Age (day) Value: 10
  misc_feature: MA Experiment 20000477 PARAMETER Experiment Name: Zm_5mM_SA_P Parameter: Organism Value: Zea mays
  misc_feature: MA Experiment 20000477 PARAMETER Experiment Name: Zm_5mM_SA_P Parameter: Plant Line Value: 35A19
  misc_feature: MA Experiment 20000477 PARAMETER Experiment Name: Zm_5mM_SA_P Parameter: Timepoint (hr) Value: 48
  misc_feature: MA Experiment 20000477 PARAMETER Experiment Name: Zm_5mM_SA_P Parameter: Tissue Value: Aerial
  misc_feature: MA Experiment 20000477 PARAMETER Experiment Name: Zm_5mM_SA_P Parameter: Treatment Value: 5mM SA vs. No Treatment
  misc_feature: MA Experiment ID: 20000478 Result: Down-regulated in Transcription
  misc_feature: MA Experiment 20000478 PARAMETER Experiment Name: Zm_5mM_SA_P Parameter: Age (day) Value: 11
  misc_feature: MA Experiment 20000478 PARAMETER Experiment Name: Zm_5mM_SA_P Parameter: Organism Value: Zea mays
  misc_feature: MA Experiment 20000478 PARAMETER Experiment Name: Zm_5mM_SA_P Parameter: Plant Line Value: 35A19
  misc_feature: MA Experiment 20000478 PARAMETER Experiment Name: Zm_5mM_SA_P Parameter: Timepoint (hr) Value: 72
  misc_feature: MA Experiment 20000478 PARAMETER Experiment Name: Zm_5mM_SA_P Parameter: Tissue Value: Aerial
  misc_feature: MA Experiment 20000478 PARAMETER Experiment Name: Zm_5mM_SA_P Parameter: Treatment Value: 5mM SA vs. No Treatment
  misc_feature: MA Experiment ID: 20000533 Result: Down-regulated in Transcription
  misc_feature: MA Experiment 20000533 PARAMETER Experiment Name: Zm_0.001percent_MeJA_P Parameter: Age (day) Value: 11
  misc_feature: MA Experiment 20000533 PARAMETER Experiment Name: Zm_0.001percent_MeJA_P Parameter: Organism Value: Zea mays
  misc_feature: MA Experiment 20000533 PARAMETER Experiment Name: Zm_0.001percent_MeJA_P Parameter: Plant Line Value: 35A19
  misc_feature: MA Experiment 20000533 PARAMETER Experiment Name: Zm_0.001percent_MeJA_P Parameter: Timepoint (hr) Value: 72
  misc_feature: MA Experiment 20000533 PARAMETER Experiment Name: Zm_0.001percent_MeJA_P Parameter: Tissue Value: Aerial
  misc_feature: MA Experiment 20000533 PARAMETER Experiment Name: Zm_0.001percent_MeJA_P Parameter: Treatment Value: 0.001percent MeJA vs. No Treatment
  misc_feature: MA Experiment ID: 20000626 Result: Down-regulated in Transcription
  misc_feature: MA Experiment 20000626 PARAMETER Experiment Name: Zm_Herbicide-Treatments_P Parameter: Timepoint (hr) Value: 12
  misc_feature: MA Experiment 20000626 PARAMETER Experiment Name: Zm_Herbicide-Treatments_P Parameter: Tissue Value: Aerial
  misc_feature: MA Experiment 20000626 PARAMETER Experiment Name: Zm_Herbicide-Treatments_P Parameter: Treatment Value: Roundup vs. No Treatment
  misc_feature: MA Experiment ID: 20000627 Result: Down-regulated in Transcription
  misc_feature: MA Experiment 20000627 PARAMETER Experiment Name: Zm_Herbicide-Treatments_P Parameter: Timepoint (hr) Value: 12
  misc_feature: MA Experiment 20000627 PARAMETER Experiment Name: Zm_Herbicide-Treatments_P Parameter: Tissue Value: Aerial
  misc_feature: MA Experiment 20000627 PARAMETER Experiment Name: Zm_Herbicide-Treatments_P Parameter: Treatment Value: Finale vs. No Treatment
  misc_feature: MA Experiment ID: 20000629 Result: Down-regulated in Transcription
  misc_feature: MA Experiment 20000629 PARAMETER Experiment Name: Zm_Herbicide-Treatments_P Parameter: Timepoint (hr) Value: 12
  misc_feature: MA Experiment 20000629 PARAMETER Experiment Name: Zm_Herbicide-Treatments_P Parameter: Tissue Value: Aerial
  misc_feature: MA Experiment 20000629 PARAMETER Experiment Name: Zm_Herbicide-Treatments_P Parameter: Treatment Value: Trimec vs. No Treatment
  misc_feature: MA Experiment ID: 20000632 Result: Down-regulated in Transcription
  misc_feature: MA Experiment 20000632 PARAMETER Experiment Name: Zm_Herbicide-Treatments_P Parameter: Timepoint (hr) Value: 4
  misc_feature: MA Experiment 20000632 PARAMETER Experiment Name: Zm_Herbicide-Treatments_P Parameter: Tissue Value: Aerial
  misc_feature: MA Experiment 20000632 PARAMETER Experiment Name: Zm_Herbicide-Treatments_P Parameter: Treatment Value: Glean vs. No Treatment
  misc_feature: MA Experiment ID: 20000633 Result: Down-regulated in Transcription
  misc_feature: MA Experiment 20000633 PARAMETER Experiment Name: Zm_Herbicide-Treatments_P Parameter: Timepoint (hr) Value: 4
  misc_feature: MA Experiment 20000633 PARAMETER Experiment Name: Zm_Herbicide-Treatments_P Parameter: Tissue Value: Aerial
  misc_feature: MA Experiment 20000633 PARAMETER Experiment Name: Zm_Herbicide-Treatments_P Parameter: Treatment Value: Trimec vs. No Treatment
aatcactgccaaatcccccagaaaatcaactcctccccaattccacgctgccaccaactcgccgtcctccgcgccaagcaccaaagctccgatggcccgcacgaagcagacggcgcgcaagtcgacgggcggcaaggcgccccgcaagcagctggcgaccaaggcggcgcgcaagtctgcgccggccaccggcggcgtgaagaagccccaccgcttccgccccggcaccgtcgcgctccgggagatccgcaagtaccagaagagcacggagctgctcatccgcaagttgcccttccagcgcctcgtccgtgagatcgcgcaggacttcaagaccgatctccgcttccagtcctccgccgtcgccgcgctgcaggaggccgccgaggcctaccttgtggggctctttgaggacactaacctctgtgccatccacgccaagcgcgtcaccatcatgcccaaggacatccagctcgcgcgccgtatcaggggcgagagggcctgagcgaggctggctcctctcaccgcaggcggcgtcgttgttgcttcgggcctgcttgtaggacttgtgcttctcttggtttcctttctggtggcagtggcatcttggtaccattgtgcttgttcttagaatcttagggatagagagttgttcagttgctgggtaacctgattgtttatcttgcattcctgcctctgtaatggttgtctgctgtcttaatggaaatgatatttgctttct

SEQ ID NO: 8708 - protein, 166 aa, Zea mays subsp. mays
  peptide (1)..(166): Ceres Seq. ID no. 12352967
  misc_feature (47)..(165): Pfam Name: Core histone H2A/H2B/H3/H4 Pfam Description: Core histone H2A/H2B/H3/H4
  misc_feature (31)..(166): Homolog of NCBI NO: 15232146 NR Description: histone H3, putative; protein id: At3g27360.1, by cDNA: gi_14335141, supported by cDNA: gi_18655352 [Arabidopsis >gi|15238433|ref|NP_201339.1| histone H3 (sp|P05203); id:
  misc_feature (31)..(166): Homolog of NCBI NO: 122087 NR Description: Histone H3 >gi|81849|pir||S04520 histone H3
  misc_feature (31)..(166): Homolog of NCBI NO: 1362108 NR Description: histone H3 homolog - common tobacco
  misc_feature (31)..(166): Homolog of NCBI NO: 166384 NR Description: histone H3 (H3-1.1)
  misc_feature (32)..(166): Homolog of NCBI NO: 70753 NR Description: histone H3 - garden pea (tentative sequence)
  misc_feature (32)..(166): Homolog of NCBI NO: 122083 NR Description: Histone H3 >gi|70751|pir||HSEAH3 histone H3 -
  misc_feature (20)..(166): Homolog of NCBI NO: 34876364 NR Description: similar to CG31613-PA [Rattus norvegicus]
  misc_feature (31)..(166): Homolog of NCBI NO: 122070 NR Description: Histone H3 >gi|82483|pir||A25564 histone H3 - >gi|169793|gb|AAA33907.1| histone 3 >gi|940018|gb|AAA74190.1|
  misc_feature (31)..(166): Homolog of NCBI NO: 37546835 NR Description: similar to histone protein Hist2h3c1 [Homo
  misc_feature (31)..(166): Homolog of NCBI NO: 34876396 NR Description: similar to H3 histone family, member I [Rattus
ITAKSPRKSTPPQFHAATNSPSSAPSTKAPMARTKQTARKSTGGKAPRKQLATKAARKSAPATGGVKKPHRFRPGTVALREIRKYQKSTELLIRKLPFQRLVREIAQDFKTDLRFQSSAVAALQEAAEAYLVGLFEDTNLCAIHAKRVTIMPKDIQLARRIRGERA

SEQ ID NO: 8709 - protein, 136 aa, Zea mays subsp. mays
  peptide (1)..(136): Ceres Seq. ID no. 12352968
  misc_feature (17)..(135): Pfam Name: Core histone H2A/H2B/H3/H4 Pfam Description: Core histone H2A/H2B/H3/H4
  misc_feature (1)..(136): Homolog of NCBI NO: 15232146 NR Description: histone H3, putative; protein id: At3g27360.1, by cDNA: gi_14335141, supported by cDNA: gi_18655352 [Arabidopsis >gi|15238433|ref|NP_201339.1| histone H3 (sp|P05203); id:
  misc_feature (1)..(136): Homolog of NCBI NO: 122087 NR Description: Histone H3 >gi|81849|pir||S04520 histone H3
  misc_feature (1)..(136): Homolog of NCBI NO: 1362108 NR Description: histone H3 homolog - common tobacco
  misc_feature (1)..(136): Homolog of NCBI NO: 166384 NR Description: histone H3 (H3-1.1)
  misc_feature (2)..(136): Homolog of NCBI NO: 70753 NR Description: histone H3 - garden pea (tentative sequence)
  misc_feature (2)..(136): Homolog of NCBI NO: 122083 NR Description: Histone H3 >gi|70751|pir||HSEAH3 histone H3 -
  misc_feature (1)..(136): Homolog of NCBI NO: 34876364 NR Description: similar to CG31613-PA [Rattus norvegicus]
  misc_feature (1)..(136): Homolog of NCBI NO: 122070 NR Description: Histone H3 >gi|82483|pir||A25564 histone H3 - >gi|169793|gb|AAA33907.1| histone 3 >gi|940018|gb|AAA74190.1|
  misc_feature (1)..(136): Homolog of NCBI NO: 37546835 NR Description: similar to histone protein Hist2h3c1 [Homo
  misc_feature (1)..(136): Homolog of NCBI NO: 34876396 NR Description: similar to H3 histone family, member I [Rattus
MARTKQTARKSTGGKAPRKQLATKAARKSAPATGGVKKPHRFRPGTVALREIRKYQKSTELLIRKLPFQRLVREIAQDFKTDLRFQSSAVAALQEAAEAYLVGLFEDTNLCAIHAKRVTIMPKDIQLARRIRGERA

SEQ ID NO: 8710 - protein, 103 aa, Zea mays subsp. mays
  peptide (1)..(103): Ceres Seq. ID no. 12352969
NHCQIPQKINSSPIPRCHQLAVLRAKHQSSDGPHEADGAQVDGRQGAPQAAGDQGGAQVCAGHRRREEAPPLPPRHRRAPGDPQVPEEHGAAHPQVALPAPRP

SEQ ID NO: 8711 - DNA, 1396 bp, Zea mays subsp. mays
  misc_feature (1)..(1396): Ceres Seq. ID no. 12407155
  misc_feature: MA Experiment ID: 108504 Result: Up-regulated in Transcription
  misc_feature: MA Experiment 108504 PARAMETER Experiment Name: Zm_Drought_P Parameter: Age (day) Value: 8
  misc_feature: MA Experiment 108504 PARAMETER Experiment Name: Zm_Drought_P Parameter: Organism Value: Zea mays
  misc_feature: MA Experiment 108504 PARAMETER Experiment Name: Zm_Drought_P Parameter: Plant Line Value: 35A19
  misc_feature: MA Experiment 108504 PARAMETER Experiment Name: Zm_Drought_P Parameter: Timepoint (hr) Value: 12
  misc_feature: MA Experiment 108504 PARAMETER Experiment Name: Zm_Drought_P Parameter: Tissue Value: Aerial
  misc_feature: MA Experiment 108504 PARAMETER Experiment Name: Zm_Drought_P Parameter: Treatment Value: Drought vs. No Drought
  misc_feature: MA Experiment ID: 108515 Result: Up-regulated in Transcription
  misc_feature: MA Experiment 108515 PARAMETER Experiment Name: Zm_2mM_SA_P Parameter: Age (day) Value: 8
  misc_feature: MA Experiment 108515 PARAMETER Experiment Name: Zm_2mM_SA_P Parameter: Organism Value: Zea mays
  misc_feature: MA Experiment 108515 PARAMETER Experiment Name: Zm_2mM_SA_P Parameter: Plant Line Value: 35A19
  misc_feature: MA Experiment 108515 PARAMETER Experiment Name: Zm_2mM_SA_P Parameter: Timepoint (hr) Value: 12
  misc_feature: MA Experiment 108515 PARAMETER Experiment Name: Zm_2mM_SA_P Parameter: Tissue Value: Aerial
  misc_feature: MA Experiment 108515 PARAMETER Experiment Name: Zm_2mM_SA_P Parameter: Treatment Value: 2mM SA vs. No Treatment
  misc_feature: MA Experiment ID: 108527 Result: Up-regulated in Transcription
  misc_feature: MA Experiment 108527 PARAMETER Experiment Name: Zm_5mM_NO_P Parameter: Age (day) Value: 8
  misc_feature: MA Experiment 108527 PARAMETER Experiment Name: Zm_5mM_NO_P Parameter: Organism Value: Zea mays
  misc_feature: MA Experiment 108527 PARAMETER Experiment Name: Zm_5mM_NO_P Parameter: Plant Line Value: 35A19
  misc_feature: MA Experiment 108527 PARAMETER Experiment Name: Zm_5mM_NO_P Parameter: Timepoint (hr) Value: 6
  misc_feature: MA Experiment 108527 PARAMETER Experiment Name: Zm_5mM_NO_P Parameter: Tissue Value: Aerial
  misc_feature: MA Experiment 108527 PARAMETER Experiment Name: Zm_5mM_NO_P Parameter: Treatment Value: 5mM NO vs. No Treatment
  misc_feature: MA Experiment ID: 108528 Result: Down-regulated in Transcription
  misc_feature: MA Experiment 108528 PARAMETER Experiment Name: Zm_Imbibed_Seeds_P Parameter: Age (day) Value: 5 vs. 2
  misc_feature: MA Experiment 108528 PARAMETER Experiment Name: Zm_Imbibed_Seeds_P Parameter: Organism Value: Zea mays
  misc_feature: MA Experiment 108528 PARAMETER Experiment Name: Zm_Imbibed_Seeds_P Parameter: Plant Line Value: 35A19
  misc_feature: MA Experiment 108528 PARAMETER Experiment Name: Zm_Imbibed_Seeds_P Parameter: Tissue Value: Aerial vs. Embryo
  misc_feature: MA Experiment ID: 108530 Result: Down-regulated in Transcription
  misc_feature: MA Experiment 108530 PARAMETER Experiment Name: Zm_Imbibed_Seeds_P Parameter: Age (day) Value: 6 vs. 2
  misc_feature: MA Experiment 108530 PARAMETER Experiment Name: Zm_Imbibed_Seeds_P Parameter: Organism Value: Zea mays
  misc_feature: MA Experiment 108530 PARAMETER Experiment Name: Zm_Imbibed_Seeds_P Parameter: Plant Line Value: 35A19
  misc_feature: MA Experiment 108530 PARAMETER Experiment Name: Zm_Imbibed_Seeds_P Parameter: Tissue Value: Aerial vs. Embryo
  misc_feature: MA Experiment ID: 108542 Result: Up-regulated in Transcription
  misc_feature: MA Experiment 108542 PARAMETER Experiment Name: Zm_150mM_NaCl_P Parameter: Age (day) Value: 8
  misc_feature: MA Experiment 108542 PARAMETER Experiment Name: Zm_150mM_NaCl_P Parameter: Organism Value: Zea mays
  misc_feature: MA Experiment 108542 PARAMETER Experiment Name: Zm_150mM_NaCl_P Parameter: Plant Line Value: 35A19
  misc_feature: MA Experiment 108542 PARAMETER Experiment Name: Zm_150mM_NaCl_P Parameter: Timepoint (hr) Value: 6
  misc_feature: MA Experiment 108542 PARAMETER Experiment Name: Zm_150mM_NaCl_P Parameter: Tissue Value: Aerial
  misc_feature: MA Experiment 108542 PARAMETER Experiment Name: Zm_150mM_NaCl_P Parameter: Treatment Value: 150mM NaCl vs. No Treatment
  misc_feature: MA Experiment ID: 108543 Result: Up-regulated in Transcription
  misc_feature: MA Experiment ID: 108544 Result: Down-regulated in Transcription
  misc_feature: MA Experiment ID: 108545 Result: Down-regulated in Transcription
  misc_feature: MA Experiment 108545 PARAMETER Experiment Name: Zm_Imbibed_Seeds_P Parameter: Age (day) Value: 3 vs. 2
  misc_feature: MA Experiment 108545 PARAMETER Experiment Name: Zm_Imbibed_Seeds_P Parameter: Organism Value: Zea mays
  misc_feature: MA Experiment 108545 PARAMETER Experiment Name: Zm_Imbibed_Seeds_P Parameter: Plant Line Value: 35A19
  misc_feature: MA Experiment 108545 PARAMETER Experiment Name: Zm_Imbibed_Seeds_P Parameter: Tissue Value: Aerial vs. Embryo
  misc_feature: MA Experiment ID: 108556 Result: Up-regulated in Transcription
  misc_feature: MA Experiment 108556 PARAMETER Experiment Name: Zm_Drought_P Parameter: Age (day) Value: 9
  misc_feature: MA Experiment 108556 PARAMETER Experiment Name: Zm_Drought_P Parameter: Organism Value: Zea mays
  misc_feature: MA Experiment 108556 PARAMETER Experiment Name: Zm_Drought_P Parameter: Plant Line Value: 35A19
  misc_feature: MA Experiment 108556 PARAMETER Experiment Name: Zm_Drought_P Parameter: Timepoint (hr) Value: 24
  misc_feature: MA Experiment 108556 PARAMETER Experiment Name: Zm_Drought_P Parameter: Tissue Value: Aerial
  misc_feature: MA Experiment 108556 PARAMETER Experiment Name: Zm_Drought_P Parameter: Treatment Value: Drought vs. No Drought
  misc_feature: MA Experiment ID: 108559 Result: Up-regulated in Transcription
  misc_feature: MA Experiment 108559 PARAMETER Experiment Name: Zm_5mM_NO_P Parameter: Age (day) Value: 8
  misc_feature: MA Experiment 108559 PARAMETER Experiment Name: Zm_5mM_NO_P Parameter: Organism Value: Zea mays
  misc_feature: MA Experiment 108559 PARAMETER Experiment Name: Zm_5mM_NO_P Parameter: Plant Line Value: 35A19
  misc_feature: MA Experiment 108559 PARAMETER Experiment Name: Zm_5mM_NO_P Parameter: Timepoint (hr) Value: 12
  misc_feature: MA Experiment 108559 PARAMETER Experiment Name: Zm_5mM_NO_P Parameter: Tissue Value: Aerial
  misc_feature: MA Experiment 108559 PARAMETER Experiment Name: Zm_5mM_NO_P Parameter: Treatment Value: 5mM NO vs. No Treatment
  misc_feature: MA Experiment ID: 108688 Result: Down-regulated in Transcription
  misc_feature: MA Experiment 108688 PARAMETER Experiment Name: Zm_Embryos-Flowers__P Parameter: Tissue Value: Immature Flowers vs. Aerial+
  misc_feature: MA Experiment ID: 20000477 Result: Up-regulated in Transcription
  misc_feature: MA Experiment 20000477 PARAMETER Experiment Name: Zm_5mM_SA_P Parameter: Age (day) Value: 10
  misc_feature: MA Experiment 20000477 PARAMETER Experiment Name: Zm_5mM_SA_P Parameter: Organism Value: Zea mays
  misc_feature: MA Experiment 20000477 PARAMETER Experiment Name: Zm_5mM_SA_P Parameter: Plant Line Value: 35A19
  misc_feature: MA Experiment 20000477 PARAMETER Experiment Name: Zm_5mM_SA_P Parameter: Timepoint (hr) Value: 48
  misc_feature: MA Experiment 20000477 PARAMETER Experiment Name: Zm_5mM_SA_P Parameter: Tissue Value: Aerial
  misc_feature: MA Experiment 20000477 PARAMETER Experiment Name: Zm_5mM_SA_P Parameter: Treatment Value: 5mM SA vs. No Treatment
  misc_feature: MA Experiment ID: 20000478 Result: Up-regulated in Transcription
  misc_feature: MA Experiment 20000478 PARAMETER Experiment Name: Zm_5mM_SA_P Parameter: Age (day) Value: 11
  misc_feature: MA Experiment 20000478 PARAMETER Experiment Name: Zm_5mM_SA_P Parameter: Organism Value: Zea mays
  misc_feature: MA Experiment 20000478 PARAMETER Experiment Name: Zm_5mM_SA_P Parameter: Plant Line Value: 35A19
  misc_feature: MA Experiment 20000478 PARAMETER Experiment Name: Zm_5mM_SA_P Parameter: Timepoint (hr) Value: 72
  misc_feature: MA Experiment 20000478 PARAMETER Experiment Name: Zm_5mM_SA_P Parameter: Tissue Value: Aerial
  misc_feature: MA Experiment 20000478 PARAMETER Experiment Name: Zm_5mM_SA_P Parameter: Treatment Value: 5mM SA vs. No Treatment
agtcacaactcacaatcacccagcgacagacaacaactacccagtccgtcgtcccggcttccgtgcgggccggggtttcccacgagcgcgcacggcacggcgccgccagcaaggtcacgagtcgggtggaggcatcggacatggccaccacgacggtgacgacgactgcggaggcggcgagcgcgcccgggaagcggcgcggcggggggtgntgcgccctcgcggcggcggcggcgagcgtcgtgcccgtgaaggcggcgggtgagcaggggcagcagccgctgccgctgccgcggctggnncggttcnaggagctnccggactacctgcgcgacaacgagttcatccacgcgcactaccgctgcgagtggtccgtccgcgacgcgnngcgcagcgccctcgcctggcacaacgagacgctcaacgtctggagccatctcggaggcttcttcctgttcctgtacctcgccgtcgccgagccaacggggacggtggccggcggcgccggcgccggagccgccccgggtatcgtgacgttcgtgctcgcgtcggccaacacctcctggtcttcgtgggaggccagcagtaactcgagcttgacggccagcaagggtttgatggccgtgttcgggagcagcgacggcgacgcccacgcggtgccgaggtggccgcggacggtgttcctggcgggcgcgatggcgtgcctggcggtgagcgcggcggcgcacctgctggcgtgccactcgcgccgcttcacgcgcctcttctggcagctcgactacgcggggatcgcggtgatgatcgtcgcctccttcttccctcccgtctactacgccttcctcggccgcgcccgcacgcagctcgtctacctgtccgccgtcaccctgctgggcctgctggtggtggcgctgctcctggcgcccgcgcgctcgtcgccgcgcctgcgccacctccgcgccggcctcttcgtgtccatggccttctccggggtgctgccggcgctgcacgcgctgtggctcaactgggtacaccgcgagtgccacctcgcgctggcgctcgagctcctcatgggcctcgtgtacgccgccggcgccgggttctacgtcacccgcgtgccggagcgctggagccccggcaggttcgactgcgtcggccacagccaccagatcttccacgtgctcgtgctcgtcggcgcgctcacgcactacgccgccaccgccatcctcatcgactggcgagaggcgatggccgtcgctgccggcggggcatcggtgctctcgtgatccgtgactgcaaagcagcgcagtgtatatgtaggtgaagggggtactatcgattcgttcattctttgtacgcgacgtcgatttatttacctcaatcgaaatatttgttcggc

SEQ ID NO: 8712 - protein, 426 aa, Zea mays subsp. mays
  peptide (1)..(426): Ceres Seq. ID no. 12407156
  misc_feature (134)..(405): Pfam Name: Uncharacterised protein family (Hly-III / UPF0073) Pfam Description: Uncharacterised protein family (Hly-III /
  misc_feature (88)..(414): Homolog of NCBI NO: 18377749 NR Description: unknown protein [Arabidopsis thaliana]
  misc_feature (88)..(414): Homolog of NCBI NO: 30688829 NR Description: expressed protein [Arabidopsis thaliana]
  misc_feature (90)..(414): Homolog of NCBI NO: 13272399 NR Description: hypothetical protein [Arabidopsis thaliana]
  misc_feature (90)..(414): Homolog of NCBI NO: 18400468 NR Description: expressed protein; protein id: At2g24150.1, by cDNA: gi_13877832 [Arabidopsis thaliana] unknown protein [Arabidopsis thaliana]
  misc_feature (221)..(414): Homolog of NCBI NO: 25407688 NR Description: hypothetical protein AT4g30850 [imported] - thaliana >gi|2980781|emb|CAA18208.1| putative protein thaliana] >gi|7269986|emb|CAB79803.1| putative protein
  misc_feature (88)..(169): Homolog of NCBI NO: 25407688 NR Description: hypothetical protein AT4g30850 [imported] - thaliana >gi|2980781|emb|CAA18208.1| putative protein thaliana] >gi|7269986|emb|CAB79803.1| putative protein
  misc_feature (238)..(414): Homolog of NCBI NO: 25309925 NR Description: hypothetical protein At2g24150 [imported] -
  misc_feature (90)..(157): Homolog of NCBI NO: 25309925 NR Description: hypothetical protein At2g24150 [imported] -
  misc_feature (204)..(413): Homolog of NCBI NO: 15241302 NR Description: putative protein; protein id: At5g20270.1, by cDNA: 24749., supported by cDNA: gi_15982833 [Arabidopsis >gi|15982834|gb|AAL09764.1| AT5g20270/F5O24_160 [Arabidopsis
  misc_feature (91)..(158): Homolog of NCBI NO: 15241302 NR Description: putative protein; protein id: At5g20270.1, by cDNA: 24749., supported by cDNA: gi_15982833 [Arabidopsis >gi|15982834|gb|AAL09764.1| AT5g20270/F5O24_160 [Arabidopsis
  misc_feature (70)..(70): Xaa is any aa, unknown or other
  misc_feature (100)..(100): Xaa is any aa, unknown or other
  misc_feature (103)..(103): Xaa is any aa, unknown or other
  misc_feature (105)..(105): Xaa is any aa, unknown or other
  misc_feature (129)..(129): Xaa is any aa, unknown or other
SQLTITQRQTTTTQSVVPASVRAGVSHERARHGAASKVTSRVEASDMATTTVTTTAEAASAPGKRRGGGXCALAAAAASVVPVKAAGEQGQQPLPLPRLXRFXEXPDYLRDNEFIHAHYRCEWSVRDAXRSALAWHNETLNVWSHLGGFFLFLYLAVAEPTGTVAGGAGAGAAPGIVTFVLASANTSWSSWEASSNSSLTASKGLMAVFGSSDGDAHAVPRWPRTVFLAGAMACLAVSAAAHLLACHSRRFTRLFWQLDYAGIAVMIVASFFPPVYYAFLGRARTQLVYLSAVTLLGLLVVALLLAPARSSPRLRHLRAGLFVSMAFSGVLPALHALWLNWVHRECHLALALELLMGLVYAAGAGFYVTRVPERWSPGRFDCVGHSHQIFHVLVLVGALTHYAATAILIDWREAMAVAAGGASVLS

SEQ ID NO: 8713 - protein, 380 aa, Zea mays subsp. mays
  peptide (1)..(380): Ceres Seq. ID no. 12407157
  misc_feature (88)..(359): Pfam Name: Uncharacterised protein family (Hly-III / UPF0073) Pfam Description: Uncharacterised protein family (Hly-III /
  misc_feature (42)..(368): Homolog of NCBI NO: 18377749 NR Description: unknown protein [Arabidopsis thaliana]
  misc_feature (42)..(368): Homolog of NCBI NO: 30688829 NR Description: expressed protein [Arabidopsis thaliana]
  misc_feature (44)..(368): Homolog of NCBI NO: 13272399 NR Description: hypothetical protein [Arabidopsis thaliana]
  misc_feature (44)..(368): Homolog of NCBI NO: 18400468 NR Description: expressed protein; protein id: At2g24150.1, by cDNA: gi_13877832 [Arabidopsis thaliana] unknown protein [Arabidopsis thaliana]
  misc_feature (175)..(368): Homolog of NCBI NO: 25407688 NR Description: hypothetical protein AT4g30850 [imported] - thaliana >gi|2980781|emb|CAA18208.1| putative protein thaliana] >gi|7269986|emb|CAB79803.1| putative protein
  misc_feature (42)..(123): Homolog of NCBI NO: 25407688 NR Description: hypothetical protein AT4g30850 [imported] - thaliana >gi|2980781|emb|CAA18208.1| putative protein thaliana] >gi|7269986|emb|CAB79803.1| putative protein
  misc_feature (192)..(368): Homolog of NCBI NO: 25309925 NR Description: hypothetical protein At2g24150 [imported] -
  misc_feature (44)..(111): Homolog of NCBI NO: 25309925 NR Description: hypothetical protein At2g24150 [imported] -
  misc_feature (158)..(367): Homolog of NCBI NO: 15241302 NR Description: putative protein; protein id: At5g20270.1, by cDNA: 24749., supported by cDNA: gi_15982833 [Arabidopsis >gi|15982834|gb|AAL09764.1| AT5g20270/F5O24_160 [Arabidopsis
  misc_feature (45)..(112): Homolog of NCBI NO: 15241302 NR Description: putative protein; protein id: At5g20270.1, by cDNA: 24749., supported by cDNA: gi_15982833 [Arabidopsis >gi|15982834|gb|AAL09764.1| AT5g20270/F5O24_160 [Arabidopsis
  misc_feature (24)..(24): Xaa is any aa, unknown or other
  misc_feature (54)..(54): Xaa is any aa, unknown or other
  misc_feature (57)..(57): Xaa is any aa, unknown or other
  misc_feature (59)..(59): Xaa is any aa, unknown or other
  misc_feature (83)..(83): Xaa is any aa, unknown or other
MATTTVTTTAEAASAPGKRRGGGXCALAAAAASVVPVKAAGEQGQQPLPLPRLXRFXEXPDYLRDNEFIHAHYRCEWSVRDAXRSALAWHNETLNVWSHLGGFFLFLYLAVAEPTGTVAGGAGAGAAPGIVTFVLASANTSWSSWEASSNSSLTASKGLMAVFGSSDGDAHAVPRWPRTVFLAGAMACLAVSAAAHLLACHSRRFTRLFWQLDYAGIAVMIVASFFPPVYYAFLGRARTQLVYLSAVTLLGLLVVALLLAPARSSPRLRHLRAGLFVSMAFSGVLPALHALWLNWVHRECHLALALELLMGLVYAAGAGFYVTRVPERWSPGRFDCVGHSHQIFHVLVLVGALTHYAATAILIDWREAMAVAAGGASVLS

SEQ ID NO: 8714 - protein, 221 aa, Zea mays subsp. mays
  peptide (1)..(221): Ceres Seq. ID no. 12407158
  misc_feature (1)..(200): Pfam Name: Uncharacterised protein family (Hly-III / UPF0073) Pfam Description: Uncharacterised protein family (Hly-III /
  misc_feature (1)..(209): Homolog of NCBI NO: 18377749 NR Description: unknown protein [Arabidopsis thaliana]
  misc_feature (1)..(209): Homolog of NCBI NO: 30688829 NR Description: expressed protein [Arabidopsis thaliana]
  misc_feature (1)..(209): Homolog of NCBI NO: 13272399 NR Description: hypothetical protein [Arabidopsis thaliana]
  misc_feature (1)..(209): Homolog of NCBI NO: 18400468 NR Description: expressed protein; protein id: At2g24150.1, by cDNA: gi_13877832 [Arabidopsis thaliana] unknown protein [Arabidopsis thaliana]
  misc_feature (16)..(209): Homolog of NCBI NO: 25407688 NR Description: hypothetical protein AT4g30850 [imported] - thaliana >gi|2980781|emb|CAA18208.1| putative protein thaliana] >gi|7269986|emb|CAB79803.1| putative protein
  misc_feature (33)..(209): Homolog of NCBI NO: 25309925 NR Description: hypothetical protein At2g24150 [imported] -
  misc_feature (1)..(208): Homolog of NCBI NO: 15241302 NR Description: putative protein; protein id: At5g20270.1, by cDNA: 24749., supported by cDNA: gi_15982833 [Arabidopsis >gi|15982834|gb|AAL09764.1| AT5g20270/F5O24_160 [Arabidopsis
  misc_feature (14)..(208): Homolog of NCBI NO: 15235657 NR Description: expressed protein; protein id: At4g37680.1, by cDNA: 262351., supported by cDNA: gi_13430521, supported by
  misc_feature (14)..(199): Homolog of NCBI NO: 15233813 NR Description: putative protein; protein id: At4g38320.1
  misc_feature (14)..(159): Homolog of NCBI NO: 20330770 NR Description: Hypothetical protein [Oryza sativa (japonica
MAVFGSSDGDAHAVPRWPRTVFLAGAMACLAVSAAAHLLACHSRRFTRLFWQLDYAGIAVMIVASFFPPVYYAFLGRARTQLVYLSAVTLLGLLVVALLLAPARSSPRLRHLRAGLFVSMAFSGVLPALHALWLNWVHRECHLALALELLMGLVYAAGAGFYVTRVPERWSPGRFDCVGHSHQIFHVLVLVGALTHYAATAILIDWREAMAVAAGGASVLS

SEQ ID NO: 8715 - DNA, 1452 bp, Zea mays subsp. mays
  misc_feature (1)..(1452): Ceres Seq. ID no. 12405369
  misc_feature: MA Experiment ID: 20000477 Result: Down-regulated in Transcription
  misc_feature: MA Experiment 20000477 PARAMETER Experiment Name: Zm_5mM_SA_P Parameter: Age (day) Value: 10
  misc_feature: MA Experiment 20000477 PARAMETER Experiment Name: Zm_5mM_SA_P Parameter: Organism Value: Zea mays
  misc_feature: MA Experiment 20000477 PARAMETER Experiment Name: Zm_5mM_SA_P Parameter: Plant Line Value: 35A19
  misc_feature: MA Experiment 20000477 PARAMETER Experiment Name: Zm_5mM_SA_P Parameter: Timepoint (hr) Value: 48
  misc_feature: MA Experiment 20000477 PARAMETER Experiment Name: Zm_5mM_SA_P Parameter: Tissue Value: Aerial
  misc_feature: MA Experiment 20000477 PARAMETER Experiment Name: Zm_5mM_SA_P Parameter: Treatment Value: 5mM SA vs. No Treatment
gttctacgcccatttggcgagcaacgacatgagccccgcgccgaggaacagggcgacgtacgccgccagctggagcttggcgttcgtctgcagcctcgggttgctgaagtccgcggcgaggagatcgaccagggacatgtacaccaggatccctgcggcggccgcgttgaagacgccctccacgaccagggcggtggcgccgtgcctgctgtagccggaagcgatggcgatgcccagcgcgatgcccgcgggagcggtgagcgagaagaaggccgccatgaccacggccgccctcgccttgaactctgcctggataggtatcgacggattgtgctcagggaaaaggacaggttgtttgtttgttttttcttcatggcatggcgtgtgttcttgtcgaggaggtgccccaagtgggcgttcggaatgctgggaaggtgctcacctgagagatcaccctgtgcctgatggacacggcgacggcggaggcatcctgaggcgaggcaccggnngtggccgtgccctccgtgggcgtgcgtgtgcgcgtgcacgtggcccgcgggctcggcggcggcgccctcntcgtccgcgggcgccgcgcggccctggcctccgtcgacggcgtcgtcgtcgacggggcgcgccttgcggatgtgcgcgcgctggtagtagcccgcggcggcggagtcgaccatcatggtggccatggcagagcacatggcgacgagtcccgcgtaggggaacccgccggccctggcgccgccgccgcaggggggcgcgagcgcgtcgaaggccgcgggcaggatgtgcaccatgccggtggcgaggatgacccccgcggcgaacgccttgacggcgaagaagacgtccccgtcggggcgcagcgccgaggcggagcggcccagcagcgggaccagcacccccgccgcgcccgacgccaggatggacgccaccgcgacgagcttcagccgcagcgccccgcgcgcgtcctcctccttgatcgccgccgcctcgccgccgccacaatcgcaccccacgcccgccgctgccgccgcgccgaccccgggcgtcacctgaacgaggagcagtagcacagcgagccacgccggcagagacgggggaagaggaacccgaactcgcgtggcgtccatggcgtgcgcgcacgtgcgcctggcgtgggagagagggccggtgcggtgagtgacggagggagggagtcggcgccgcgcgcgcgctgagctatataaagctccgcggccgcgagtgtggtgacatggtgagctcacactccggcaacgccgctttgaagcgtggtgggccctgagcagtgtgcaccgtccgatctgggtgtgtgggcacgctctccaactggcagcaagtgttggtgttgccgtggaccttttgtcgtgattgtttggaaaaaacggatcaggtttgccaaaaaaaaaaaaaaaa

SEQ ID NO: 8716 - protein, 201 aa, Zea mays subsp. mays
  peptide (1)..(201): Ceres Seq. ID no. 12405370
  misc_feature (58)..(201): Homolog of NCBI NO: 23103422 NR Description: hypothetical protein [Azotobacter vinelandii]
  misc_feature (91)..(201): Homolog of NCBI NO: 29247944 NR Description: GLP_26_54603_52153 [Giardia lamblia ATCC 50803]
  misc_feature (136)..(201): Homolog of NCBI NO: 11095327 NR Description: unknown [Paracoccus pantotrophus]
  misc_feature (103)..(201): Homolog of NCBI NO: 25143299 NR Description: pre-mRNA splicing SR protein related RSR-1 (68.2
  misc_feature (100)..(201): Homolog of NCBI NO: 39592411 NR Description: Hypothetical protein CBG07956 [Caenorhabditis
  misc_feature (113)..(201): Homolog of NCBI NO: 34905768 NR Description: P0401G10.10 [Oryza sativa (japonica
  misc_feature (101)..(201): Homolog of NCBI NO: 5821145 NR Description: RNA binding protein [Homo sapiens]
  misc_feature (101)..(201): Homolog of NCBI NO: 5821143 NR Description: RNA binding protein [Homo sapiens]
  misc_feature (101)..(201): Homolog of NCBI NO: 6649242 NR Description: splicing coactivator subunit SRm300 [Homo sapiens]
  misc_feature (101)..(201): Homolog of NCBI NO: 19923466 NR Description: splicing coactivator subunit SRm300; RNA binding
  misc_feature (95)..(95): Xaa is any aa, unknown or other
  misc_feature (96)..(96): Xaa is any aa, unknown or other
  misc_feature (119)..(119): Xaa is any aa, unknown or other
MAMPSAMPAGAVSEKKAAMTTAALALNSAWIGIDGLCSGKRTGCLFVFSSWHGVCSCRGGAPSGRSECWEGAHLRDHPVPDGHGDGGGILRRGTXXGRALRGRACARARGPRARRRRPXRPRAPRGPGLRRRRRRRRGAPCGCARAGSSPRRRSRPSWWPWQSTWRRVPRRGTRRPWRRRRRGARARRRPRAGCAPCRWRG

SEQ ID NO: 8717 - protein, 199 aa, Zea mays subsp. mays
  peptide (1)..(199): Ceres Seq. ID no. 12405371
  misc_feature (56)..(199): Homolog of NCBI NO: 23103422 NR Description: hypothetical protein [Azotobacter vinelandii]
  misc_feature (89)..(199): Homolog of NCBI NO: 29247944 NR Description: GLP_26_54603_52153 [Giardia lamblia ATCC 50803]
  misc_feature (134)..(199): Homolog of NCBI NO: 11095327 NR Description: unknown [Paracoccus pantotrophus]
  misc_feature (101)..(199): Homolog of NCBI NO: 25143299 NR Description: pre-mRNA splicing SR protein related RSR-1 (68.2
  misc_feature (98)..(199): Homolog of NCBI NO: 39592411 NR Description: Hypothetical protein CBG07956 [Caenorhabditis
  misc_feature (111)..(199): Homolog of NCBI NO: 34905768 NR Description: P0401G10.10 [Oryza sativa (japonica
  misc_feature (99)..(199): Homolog of NCBI NO: 5821145 NR Description: RNA binding protein [Homo sapiens]
  misc_feature (99)..(199): Homolog of NCBI NO: 5821143 NR Description: RNA binding protein [Homo sapiens]
  misc_feature (99)..(199): Homolog of NCBI NO: 6649242 NR Description: splicing coactivator subunit SRm300 [Homo sapiens]
  misc_feature (99)..(199): Homolog of NCBI NO: 19923466 NR Description: splicing coactivator subunit SRm300; RNA binding
  misc_feature (93)..(93): Xaa is any aa, unknown or other
  misc_feature (94)..(94): Xaa is any aa, unknown or other
  misc_feature (117)..(117): Xaa is any aa, unknown or other
MPSAMPAGAVSEKKAAMTTAALALNSAWIGIDGLCSGKRTGCLFVFSSWHGVCSCRGGAPSGRSECWEGAHLRDHPVPDGHGDGGGILRRGTXXGRALRGRACARARGPRARRRRPXRPRAPRGPGLRRRRRRRRGAPCGCARAGSSPRRRSRPSWWPWQSTWRRVPRRGTRRPWRRRRRGARARRRPRAGCAPCRWRG

SEQ ID NO: 8718 - protein, 195 aa, Zea mays subsp. mays
  peptide (1)..(195): Ceres Seq. ID no. 12405372
  misc_feature (52)..(195): Homolog of NCBI NO: 23103422 NR Description: hypothetical protein [Azotobacter vinelandii]
  misc_feature (85)..(195): Homolog of NCBI NO: 29247944 NR Description: GLP_26_54603_52153 [Giardia lamblia ATCC 50803]
  misc_feature (130)..(195): Homolog of NCBI NO: 11095327 NR Description: unknown [Paracoccus pantotrophus]
  misc_feature (97)..(195): Homolog of NCBI NO: 25143299 NR Description: pre-mRNA splicing SR protein related RSR-1 (68.2
  misc_feature (94)..(195): Homolog of NCBI NO: 39592411 NR Description: Hypothetical protein CBG07956 [Caenorhabditis
  misc_feature (107)..(195): Homolog of NCBI NO: 34905768 NR Description: P0401G10.10 [Oryza sativa (japonica
  misc_feature (95)..(195): Homolog of NCBI NO: 5821145 NR Description: RNA binding protein [Homo sapiens]
  misc_feature (95)..(195): Homolog of NCBI NO: 5821143 NR Description: RNA binding protein [Homo sapiens]
  misc_feature (95)..(195): Homolog of NCBI NO: 6649242 NR Description: splicing coactivator subunit SRm300 [Homo sapiens]
  misc_feature (95)..(195): Homolog of NCBI NO: 19923466 NR Description: splicing coactivator subunit SRm300; RNA binding
  misc_feature (89)..(89): Xaa is any aa, unknown or other
  misc_feature (90)..(90): Xaa is any aa, unknown or other
  misc_feature (113)..(113): Xaa is any aa, unknown or other
MPAGAVSEKKAAMTTAALALNSAWIGIDGLCSGKRTGCLFVFSSWHGVCSCRGGAPSGRSECWEGAHLRDHPVPDGHGDGGGILRRGTXXGRALRGRACARARGPRARRRRPXRPRAPRGPGLRRRRRRRRGAPCGCARAGSSPRRRSRPSWWPWQSTWRRVPRRGTRRPWRRRRRGARARRRPRAGCAPCRWRG

SEQ ID NO: 8719 - DNA, 1488 bp, Zea mays subsp. mays
  misc_feature (1)..(1488): Ceres Seq. ID no. 12349268
  misc_feature: MA Experiment ID: 108523 Result: Down-regulated in Transcription
  misc_feature: MA Experiment 108523 PARAMETER Experiment Name: Zm_42deg_Heat_P Parameter: Age (day) Value: 8
  misc_feature: MA Experiment 108523 PARAMETER Experiment Name: Zm_42deg_Heat_P Parameter: Organism Value: Zea mays
  misc_feature: MA Experiment 108523 PARAMETER Experiment Name: Zm_42deg_Heat_P Parameter: Plant Line Value: 35A19
  misc_feature: MA Experiment 108523 PARAMETER Experiment Name: Zm_42deg_Heat_P Parameter: Temperature (deg C) Value: 42 vs. 22
  misc_feature: MA Experiment 108523 PARAMETER Experiment Name: Zm_42deg_Heat_P Parameter: Timepoint (hr) Value: 6
  misc_feature: MA Experiment 108523 PARAMETER Experiment Name: Zm_42deg_Heat_P Parameter: Tissue Value: Aerial
  misc_feature: MA Experiment ID: 108528 Result: Up-regulated in Transcription
  misc_feature: MA Experiment 108528 PARAMETER Experiment Name: Zm_Imbibed_Seeds_P Parameter: Age (day) Value: 5 vs. 2
  misc_feature: MA Experiment 108528 PARAMETER Experiment Name: Zm_Imbibed_Seeds_P Parameter: Organism Value: Zea mays
  misc_feature: MA Experiment 108528 PARAMETER Experiment Name: Zm_Imbibed_Seeds_P Parameter: Plant Line Value: 35A19
  misc_feature: MA Experiment 108528 PARAMETER Experiment Name: Zm_Imbibed_Seeds_P Parameter: Tissue Value: Aerial vs. Embryo
  misc_feature: MA Experiment ID: 108530 Result: Up-regulated in Transcription
  misc_feature: MA Experiment 108530 PARAMETER Experiment Name: Zm_Imbibed_Seeds_P Parameter: Age (day) Value: 6 vs. 2
  misc_feature: MA Experiment 108530 PARAMETER Experiment Name: Zm_Imbibed_Seeds_P Parameter: Organism Value: Zea mays
  misc_feature: MA Experiment 108530 PARAMETER Experiment Name: Zm_Imbibed_Seeds_P Parameter: Plant Line Value: 35A19
  misc_feature: MA Experiment 108530 PARAMETER Experiment Name: Zm_Imbibed_Seeds_P Parameter: Tissue Value: Aerial vs. Embryo
  misc_feature: MA Experiment ID: 108536 Result: Down-regulated in Transcription
  misc_feature: MA Experiment 108536 PARAMETER Experiment Name: Zm_Meristem_P Parameter: Age (day) Value: 8
  misc_feature: MA Experiment 108536 PARAMETER Experiment Name: Zm_Meristem_P Parameter: Organism Value: Zea mays
  misc_feature: MA Experiment 108536 PARAMETER Experiment Name: Zm_Meristem_P Parameter: Plant Line Value: 35A19
  misc_feature: MA Experiment 108536 PARAMETER Experiment Name: Zm_Meristem_P Parameter: Tissue Value: Shoot Meristem vs. Above Shoot Meristem
  misc_feature: MA Experiment ID: 108545 Result: Up-regulated in Transcription
  misc_feature: MA Experiment 108545 PARAMETER Experiment Name: Zm_Imbibed_Seeds_P Parameter: Age (day) Value: 3 vs. 2
  misc_feature: MA Experiment 108545 PARAMETER Experiment Name: Zm_Imbibed_Seeds_P Parameter: Organism Value: Zea mays
  misc_feature: MA Experiment 108545 PARAMETER Experiment Name: Zm_Imbibed_Seeds_P Parameter: Plant Line Value: 35A19
  misc_feature: MA Experiment 108545 PARAMETER Experiment Name: Zm_Imbibed_Seeds_P Parameter: Tissue Value: Aerial vs. Embryo
  misc_feature: MA Experiment ID: 108547 Result: Up-regulated in Transcription
  misc_feature: MA Experiment 108547 PARAMETER Experiment Name: Zm_Imbibed_Seeds_P Parameter: Age (day) Value: 4 vs. 2
  misc_feature: MA Experiment 108547 PARAMETER Experiment Name: Zm_Imbibed_Seeds_P Parameter: Organism Value: Zea mays
  misc_feature: MA Experiment 108547 PARAMETER Experiment Name: Zm_Imbibed_Seeds_P Parameter: Plant Line Value: 35A19
  misc_feature: MA Experiment 108547 PARAMETER Experiment Name: Zm_Imbibed_Seeds_P Parameter: Tissue Value: Aerial vs. Embryo
  misc_feature: MA Experiment ID: 108556 Result: Down-regulated in Transcription
  misc_feature: MA Experiment 108556 PARAMETER Experiment Name: Zm_Drought_P Parameter: Age (day) Value: 9
  misc_feature: MA Experiment 108556 PARAMETER Experiment Name: Zm_Drought_P Parameter: Organism Value: Zea mays
  misc_feature: MA Experiment 108556 PARAMETER Experiment Name: Zm_Drought_P Parameter: Plant Line Value: 35A19
  misc_feature: MA Experiment 108556 PARAMETER Experiment Name: Zm_Drought_P Parameter: Timepoint (hr) Value: 24
  misc_feature: MA Experiment 108556 PARAMETER Experiment Name: Zm_Drought_P Parameter: Tissue Value: Aerial
  misc_feature: MA Experiment 108556 PARAMETER Experiment Name: Zm_Drought_P Parameter: Treatment Value: Drought vs. No Drought
  misc_feature: MA Experiment ID: 108559 Result: Down-regulated in Transcription
  misc_feature: MA Experiment 108559 PARAMETER Experiment Name: Zm_5mM_NO_P Parameter: Age (day) Value: 8
  misc_feature: MA Experiment 108559 PARAMETER Experiment Name: Zm_5mM_NO_P Parameter: Organism Value: Zea mays
  misc_feature: MA Experiment 108559 PARAMETER Experiment Name: Zm_5mM_NO_P Parameter: Plant Line Value: 35A19
  misc_feature: MA Experiment 108559 PARAMETER Experiment Name: Zm_5mM_NO_P Parameter: Timepoint (hr) Value: 12
  misc_feature: MA Experiment 108559 PARAMETER Experiment Name: Zm_5mM_NO_P Parameter: Tissue Value: Aerial
  misc_feature: MA Experiment 108559 PARAMETER Experiment Name: Zm_5mM_NO_P Parameter: Treatment Value: 5mM NO vs. No Treatment
  misc_feature: MA Experiment ID: 108687 Result: Down-regulated in Transcription
  misc_feature: MA Experiment 108687 PARAMETER Experiment Name: Zm_Embryos-Flowers__P Parameter: Tissue Value: Embryo vs. Aerial+
  misc_feature: MA Experiment ID: 108688 Result: Down-regulated in Transcription
  misc_feature: MA Experiment 108688 PARAMETER Experiment Name: Zm_Embryos-Flowers__P Parameter: Tissue Value: Immature Flowers vs. Aerial+
  misc_feature: MA Experiment ID: 108689 Result: Down-regulated in Transcription
  misc_feature: MA Experiment 108689 PARAMETER Experiment Name: Zm_Drought_Roots_P Parameter: Age (day) Value: 9
  misc_feature: MA Experiment 108689 PARAMETER Experiment Name: Zm_Drought_Roots_P Parameter: Organism Value: Zea mays
  misc_feature: MA Experiment 108689 PARAMETER Experiment Name: Zm_Drought_Roots_P Parameter: Plant Line Value: 35A19
  misc_feature: MA Experiment 108689 PARAMETER Experiment Name: Zm_Drought_Roots_P Parameter: Timepoint (hr) Value: 24
  misc_feature: MA Experiment 108689 PARAMETER Experiment Name: Zm_Drought_Roots_P Parameter: Tissue Value: Roots
  misc_feature: MA Experiment 108689 PARAMETER Experiment Name: Zm_Drought_Roots_P Parameter: Treatment Value: Drought vs. No Drought
  misc_feature: MA Experiment ID: 20000479 Result: Down-regulated in Transcription
  misc_feature: MA Experiment 20000479 PARAMETER Experiment Name: Zm_Drought_P Parameter: Age (day) Value: 10
  misc_feature: MA Experiment 20000479 PARAMETER Experiment Name: Zm_Drought_P Parameter: Organism Value: Zea mays
  misc_feature: MA Experiment 20000479 PARAMETER Experiment Name: Zm_Drought_P Parameter: Plant Line Value: 35A19
  misc_feature: MA Experiment 20000479 PARAMETER Experiment Name: Zm_Drought_P Parameter: Timepoint (hr) Value: 48
  misc_feature: MA Experiment 20000479 PARAMETER Experiment Name: Zm_Drought_P Parameter: Tissue Value: Aerial
  misc_feature: MA Experiment 20000479 PARAMETER Experiment Name: Zm_Drought_P Parameter: Treatment Value: Drought vs. No Drought
  misc_feature: MA Experiment ID: 20000480 Result: Down-regulated in Transcription
  misc_feature: MA Experiment 20000480 PARAMETER Experiment Name: Zm_Drought_P Parameter: Age (day) Value: 11
  misc_feature: MA Experiment 20000480 PARAMETER Experiment Name: Zm_Drought_P Parameter: Organism Value: Zea mays
  misc_feature: MA Experiment 20000480 PARAMETER Experiment Name: Zm_Drought_P Parameter: Plant Line Value: 35A19
  misc_feature: MA Experiment 20000480 PARAMETER Experiment Name: Zm_Drought_P Parameter: Timepoint (hr) Value: 72
  misc_feature: MA Experiment 20000480 PARAMETER Experiment Name: Zm_Drought_P Parameter: Tissue Value: Aerial
  misc_feature: MA Experiment 20000480 PARAMETER Experiment Name: Zm_Drought_P Parameter: Treatment Value: Drought vs. No Drought
  misc_feature: MA Experiment ID: 20001608 Result: Up-regulated in Transcription
  misc_feature: MA Experiment 20001608 PARAMETER Experiment Name: Zm_50ppm_KNO3_L-to-H_P Parameter: Age (day) Value: 21
  misc_feature: MA Experiment 20001608 PARAMETER Experiment Name: Zm_50ppm_KNO3_L-to-H_P Parameter: Organism Value: Zea mays
  misc_feature: MA Experiment 20001608 PARAMETER Experiment Name: Zm_50ppm_KNO3_L-to-H_P Parameter: Plant Line Value: 35A19
  misc_feature: MA Experiment 20001608 PARAMETER Experiment Name: Zm_50ppm_KNO3_L-to-H_P Parameter: Timepoint (hr) Value: 48
  misc_feature: MA Experiment 20001608 PARAMETER Experiment Name: Zm_50ppm_KNO3_L-to-H_P Parameter: Tissue Value: Shoots
  misc_feature: MA Experiment 20001608 PARAMETER Experiment Name: Zm_50ppm_KNO3_L-to-H_P Parameter: Treatment Value: 50ppm KNO3 vs. 50ppm KCl
aagatcaagccaccaccaccgccagcaagagcagagaggcgagaccgcgagagtgtacgtgccaccagcagcagcagcaatggccgccgccgccaccacctcctcatcctcccacctgctcctcctctcccgccagcaggcggcctccctacgatgccgcctctccttcctcggccagcccagaaggcccggcagggtcacggcccaggcgccggccgctaaggacgtgcggtgcatggcggccgtggacactgcggcgtccgcggcggcggcggagacgagccccaagtcgagcagcagctacgagatcgtgacgctcacgacgtggctgctgcagcaggagcggaccggcgcgatcgacaacgagatgaccatcgtgctggccagcatatccacggcgtgcaagcagatcgccgcgctggtgcagcgcgcgcccatctccaacctcacgggcgttcagggcgccgtcaacgtgcagggcgaggaccagaagaagctcgatgtcgtctccaacgaggtgttctccaactgcctcaagtcgagcgggcgcaccggcgtgatcgcctcggaggaggaggacgtgcccgtagcggtggagcagagctactccggcaactacatcgtcgtgttcgaccctctcgacggctcctccaacatcgacgccgccgtctccactggctccatcttcggcatctacaaccccaacgacgagtgcctcgccgacgtcgacgacaatgacacccttgattcggtggagcagaggtgcatcgtgaacgtgtgccagccggggagcaacctgctggccgccggctactgcatgtactcgagctccgtgatcttcgtgctcaccgtcggcaccggggtgtacgtgttcacgctggaccccatgtacggcgagttcgtgctgacgcaggagaaggtgcagatccccaaggcgggcaagatctacgccttcaacgagggcaactacgcgctctgggacgacaagctgaagctgtacatggacagcctcaaggagcccggcgactcggggaagccctactccgcgcggtacatcggcagcctcgtcggcgacttccaccgcactctgctctacggagggatctacgggtaccccagggacaagaagagcaagaacggcaagctgcggcttctctacgagtgcgcccccatgagcttcatcgtcgagcaggccggtggcaagggctctgacggccaccagagaattcttgacatcacacctacagagatccaccaaagagtgcctctgtacattgggagcgtggaggaagtggacaaggtggagaaattcctggcttgaataccagagctctctcatcagatggactcccgaagacatcaagtttagggagggaatatgcatgtactctctctttcccaccccaaataagtcttcttcatctcatatttctcatctcatatttcgataaatcaaacaatctcaattttgatctaatatatatacac

SEQ ID NO: 8720 - protein, 439 aa, Zea mays subsp. mays
  peptide (1)..(439): Ceres Seq. ID no. 12349269
  misc_feature (105)..(439): Pfam Name: Fructose-1-6-bisphosphatase Pfam Description: Fructose-1-6-bisphosphatase
  misc_feature (27)..(439): Homolog of NCBI NO: 119745 NR Description: FRUCTOSE-1,6-BISPHOSPHATASE, CHLOROPLAST
  misc_feature (27)..(439): Homolog of NCBI NO: 4218951 NR Description: fructose-1,6-bisphosphatase precursor [Brassica
  misc_feature (27)..(439): Homolog of NCBI NO: 585118 NR Description: FRUCTOSE-1,6-BISPHOSPHATASE, CHLOROPLAST
  misc_feature (27)..(439): Homolog of NCBI NO: 15232408 NR Description: fructose-bisphosphatase precursor; protein id: supported by cDNA: gi_14532619, supported by cDNA: gi_16226764
  misc_feature (27)..(439): Homolog of NCBI NO: 99693 NR Description: fructose-bisphosphatase (EC 3.1.3.11) precursor,
  misc_feature (26)..(439): Homolog of NCBI NO: 4585576 NR Description: fructose-1,6-bisphosphatase precursor [Solanum
  misc_feature (73)..(439): Homolog of NCBI NO: 3915687 NR Description: Fructose-1,6-bisphosphatase, chloroplast
  misc_feature (29)..(439): Homolog of NCBI NO: 14318171 NR Description: fructose-1,6-bisphosphatase [Pisum sativum]
  misc_feature (85)..(439): Homolog of NCBI NO: 6730296 NR Description: Chain A, Oxidized Pea Fructose-1,6-Bisphosphatase
  misc_feature (105)..(433): Homolog of NCBI NO: 16519317 NR Description: fructose 1,6-bisphosphatase [Galdieria
RSSHHHRQQEQRGETARVYVPPAAAAMAAAATTSSSSHLLLLSRQQAASLRCRLSFLGQPRRPGRVTAQAPAAKDVRCMAAVDTAASAAAAETSPKSSSSYEIVTLTTWLLQQERTGAIDNEMTIVLASISTACKQIAALVQRAPISNLTGVQGAVNVQGEDQKKLDVVSNEVFSNCLKSSGRTGVIASEEEDVPVAVEQSYSGNYIVVFDPLDGSSNIDAAVSTGSIFGIYNPNDECLADVDDNDTLDSVEQRCIVNVCQPGSNLLAAGYCMYSSSVIFVLTVGTGVYVFTLDPMYGEFVLTQEKVQIPKAGKIYAFNEGNYALWDDKLKLYMDSLKEPGDSGKPYSARYIGSLVGDFHRTLLYGGIYGYPRDKKSKNGKLRLLYECAPMSFIVEQAGGKGSDGHQRILDITPTEIHQRVPLYIGSVEEVDKVEKFLA

SEQ ID NO: 8721 - protein, 413 aa, Zea mays subsp. mays
  peptide (1)..(413): Ceres Seq. ID no. 12349270
  misc_feature (79)..(413): Pfam Name: Fructose-1-6-bisphosphatase Pfam Description: Fructose-1-6-bisphosphatase
  misc_feature (1)..(413): Homolog of NCBI NO: 119745 NR Description: FRUCTOSE-1,6-BISPHOSPHATASE, CHLOROPLAST
  misc_feature (1)..(413): Homolog of NCBI NO: 4218951 NR Description: fructose-1,6-bisphosphatase precursor [Brassica
  misc_feature (1)..(413): Homolog of NCBI NO: 585118 NR Description: FRUCTOSE-1,6-BISPHOSPHATASE, CHLOROPLAST
  misc_feature (1)..(413): Homolog of NCBI NO: 15232408 NR Description: fructose-bisphosphatase precursor; protein id: supported by cDNA: gi_14532619, supported by cDNA: gi_16226764
  misc_feature (1)..(413): Homolog of NCBI NO: 99693 NR Description: fructose-bisphosphatase (EC 3.1.3.11) precursor,
  misc_feature (1)..(413): Homolog of NCBI NO: 4585576 NR Description: fructose-1,6-bisphosphatase precursor [Solanum
  misc_feature (47)..(413): Homolog of NCBI NO: 3915687 NR Description: Fructose-1,6-bisphosphatase, chloroplast
  misc_feature (3)..(413): Homolog of NCBI NO: 14318171 NR Description: fructose-1,6-bisphosphatase [Pisum sativum]
  misc_feature (59)..(413): Homolog of NCBI NO: 6730296 NR Description: Chain A, Oxidized Pea Fructose-1,6-Bisphosphatase
  misc_feature (79)..(407): Homolog of NCBI NO: 16519317 NR Description: fructose 1,6-bisphosphatase [Galdieria
MAAAATTSSSSHLLLLSRQQAASLRCRLSFLGQPRRPGRVTAQAPAAKDVRCMAAVDTAASAAAAETSPKSSSSYEIVTLTTWLLQQERTGAIDNEMTIVLASISTACKQIAALVQRAPISNLTGVQGAVNVQGEDQKKLDVVSNEVFSNCLKSSGRTGVIASEEEDVPVAVEQSYSGNYIVVFDPLDGSSNIDAAVSTGSIFGIYNPNDECLADVDDNDTLDSVEQRCIVNVCQPGSNLLAAGYCMYSSSVIFVLTVGTGVYVFTLDPMYGEFVLTQEKVQIPKAGKIYAFNEGNYALWDDKLKLYMDSLKEPGDSGKPYSARYIGSLVGDFHRTLLYGGIYGYPRDKKSKNGKLRLLYECAPMSFIVEQAGGKGSDGHQRILDITPTEIHQRVPLYIGSVEEVDKVEKFLA

SEQ ID NO: 8722 - protein, 361 aa, Zea mays subsp. mays
  peptide (1)..(361): Ceres Seq. ID no. 12349271
  misc_feature (27)..(361): Pfam Name: Fructose-1-6-bisphosphatase Pfam Description: Fructose-1-6-bisphosphatase
  misc_feature (1)..(361): Homolog of NCBI NO: 585118 NR Description: FRUCTOSE-1,6-BISPHOSPHATASE, CHLOROPLAST
  misc_feature (1)..(361): Homolog of NCBI NO: 15232408 NR Description: fructose-bisphosphatase precursor; protein id: supported by cDNA: gi_14532619, supported by cDNA: gi_16226764
  misc_feature (1)..(361): Homolog of NCBI NO: 99693 NR Description: fructose-bisphosphatase (EC 3.1.3.11) precursor,
  misc_feature (1)..(361): Homolog of NCBI NO: 4585576 NR Description: fructose-1,6-bisphosphatase precursor [Solanum
  misc_feature (1)..(361): Homolog of NCBI NO: 119745 NR Description: FRUCTOSE-1,6-BISPHOSPHATASE, CHLOROPLAST
  misc_feature (1)..(361): Homolog of NCBI NO: 4218951 NR Description: fructose-1,6-bisphosphatase precursor [Brassica
  misc_feature (1)..(361): Homolog of NCBI NO: 3915687 NR Description: Fructose-1,6-bisphosphatase, chloroplast
  misc_feature (1)..(361): Homolog of NCBI NO: 14318171 NR Description: fructose-1,6-bisphosphatase [Pisum sativum]
  misc_feature (7)..(361): Homolog of NCBI NO: 6730296 NR Description: Chain A, Oxidized Pea Fructose-1,6-Bisphosphatase
  misc_feature (27)..(355): Homolog of NCBI NO: 16519317 NR Description: fructose 1,6-bisphosphatase [Galdieria
MAAVDTAASAAAAETSPKSSSSYEIVTLTTWLLQQERTGAIDNEMTIVLASISTACKQIAALVQRAPISNLTGVQGAVNVQGEDQKKLDVVSNEVFSNCLKSSGRTGVIASEEEDVPVAVEQSYSGNYIVVFDPLDGSSNIDAAVSTGSIFGIYNPNDECLADVDDNDTLDSVEQRCIVNVCQPGSNLLAAGYCMYSSSVIFVLTVGTGVYVFTLDPMYGEFVLTQEKVQIPKAGKIYAFNEGNYALWDDKLKLYMDSLKEPGDSGKPYSARYIGSLVGDFHRTLLYGGIYGYPRDKKSKNGKLRLLYECAPMSFIVEQAGGKGSDGHQRILDITPTEIHQRVPLYIGSVEEVDKVEKFLA

SEQ ID NO: 8723 - DNA, 1142 bp, Zea mays subsp. mays
  misc_feature (1)..(1142): Ceres Seq. ID no. 12376498
  misc_feature: MA Experiment ID: 108530 Result: Down-regulated in Transcription
  misc_feature: MA Experiment 108530 PARAMETER Experiment Name: Zm_Imbibed_Seeds_P Parameter: Age (day) Value: 6 vs. 2
  misc_feature: MA Experiment 108530 PARAMETER Experiment Name: Zm_Imbibed_Seeds_P Parameter: Organism Value: Zea mays
  misc_feature: MA Experiment 108530 PARAMETER Experiment Name: Zm_Imbibed_Seeds_P Parameter: Plant Line Value: 35A19
  misc_feature: MA Experiment 108530 PARAMETER Experiment Name: Zm_Imbibed_Seeds_P Parameter: Tissue Value: Aerial vs. Embryo
  misc_feature: MA Experiment ID: 20000535 Result: Down-regulated in Transcription
  misc_feature: MA Experiment 20000535 PARAMETER Experiment Name: Zm_Hybrid_Seed_Dev_P Parameter: DAP Value: 30 vs. 12
  misc_feature: MA Experiment 20000535 PARAMETER Experiment Name: Zm_Hybrid_Seed_Dev_P Parameter: Organism Value: Zea mays
  misc_feature: MA Experiment 20000535 PARAMETER Experiment Name: Zm_Hybrid_Seed_Dev_P Parameter: Plant Line Value: 35A19
  misc_feature: MA Experiment 20000535 PARAMETER Experiment Name: Zm_Hybrid_Seed_Dev_P Parameter: Tissue Value: Embryo vs. Unfert Floret
gcacgagaccattacctagaacatcctaatcgaaaagccgagcagcaaaccaaccagcccacccgccggttggtcacgctcctccccgatcccgaattcccgatctccggccgacgccatggcagccccctccgcggccgtcataggggtgctcgtcctcctcgtcgtgggggcctcgggcgcgcgcctcccaggccgcggcagcaccacccggggagctgcgctgccgcgcgggggagcgccggccacggcggtgttcgcgctgggaagcttctggcggtcggaggcggcgttcgggtgcctccacggcgtgatccgcacctccgtcggctacgctggcggctccaagtccaaccccgagtaccgcaacctcgccgaccacgccgagtgcgtcaaggttgagtatgatccccggttgattcactacaggcaacttttggatgtgttctgggcaagtcatgacccacgtgaggtgtttgggcaagggccagatgttggcaaccagtatagatctgtcatcttcactaatggaaccatcgaggccagattggctggtcttagcaaagaaaaagaacaagctaaagaccgtagcagcgttgttaccacacagatccaaccattgggggtctttcatcatgctgaaccagaacatcagaaatttgaactgaagcgtaaaccgttcctcttgcaattgattgggaatttgccggaggaggagctcctgacatcaacactagctgcaaaactgaatgcatatgccgctgagctctgccctgtgaatacccaaaagagaattaactccaagattgatgaggtcacaaagaaaggatggcccattttaagggacatttaactctttctagcttttggactgaaaccgatcgatgcaatgtagacacagaagaggtgcatgattttgcaaagaagatttttaggaatatttcagctgttcgccactgccatgatgacctcaatcatccattcttcattttgctcacaaagattatatagttggtcataacatgtcgttgtgttacgatatttgtaacgcatattcatggttcgaagcttactcaacagacaactttttttcgtattgtttgtttttcatttatgaaaatatagatgttttgtttttattg

SEQ ID NO: 8724 - protein, 244 aa, Zea mays subsp. mays
  peptide (1)..(244): Ceres Seq. ID no. 12376499
  misc_feature (44)..(195): Pfam Name: Peptide methionine sulfoxide reductase Pfam Description: Peptide methionine sulfoxide reductase
  misc_feature (44)..(244): Homolog of NCBI NO: 15227955 NR Description: putative peptide methionine sulfoxide reductase; id: At2g18030.1 [Arabidopsis thaliana] >gi|25411824|pir||D84559
  misc_feature (45)..(215): Homolog of NCBI NO: 33089114 NR Description: methionine sulfoxide reductase [Apis mellifera
  misc_feature (43)..(215): Homolog of NCBI NO: 7937 NR Description: put. Eip 28 (aa 1-255) [Drosophila melanogaster]
  misc_feature (43)..(215): Homolog of NCBI NO: 119251 NR Description: Ecdysone-induced protein 28/29 kDa
  misc_feature (43)..(215): Homolog of NCBI NO: 24664627 NR Description: Ecdysone-induced protein 28/29kD CG7266-PA
  misc_feature (43)..(186): Homolog of NCBI NO: 22968448 NR Description: hypothetical protein [Rhodospirillum rubrum]
  misc_feature (45)..(193): Homolog of NCBI NO: 15678563 NR Description: peptide methionine sulfoxide reductase thermautotrophicus] >gi|12230335|sp|O26635|MSRA_METTH Peptide
  misc_feature (45)..(193): Homolog of NCBI NO: 20090291 NR Description: protein-methionine-S-oxide reductase
  misc_feature (43)..(228): Homolog of NCBI NO: 28557615 NR Description: RE51574p [Drosophila melanogaster]
  misc_feature (43)..(215): Homolog of NCBI NO: 311724 NR Description: EIP29 [Drosophila melanogaster]
MAAPSAAVIGVLVLLVVGASGARLPGRGSTTRGAALPRGGAPATAVFALGSFWRSEAAFGCLHGVIRTSVGYAGGSKSNPEYRNLADHAECVKVEYDPRLIHYRQLLDVFWASHDPREVFGQGPDVGNQYRSVIFTNGTIEARLAGLSKEKEQAKDRSSVVTTQIQPLGVFHHAEPEHQKFELKRKPFLLQLIGNLPEEELLTSTLAAKLNAYAAELCPVNTQKRINSKIDEVTKKGWPILRDI

SEQ ID NO: 8725 - protein, 133 aa, Zea mays subsp. mays
  peptide (1)..(133): Ceres Seq. ID no. 12376500
ARDHYLEHPNRKAEQQTNQPTRRLVTLLPDPEFPISGRRHGSPLRGRHRGARPPRRGGLGRAPPRPRQHHPGSCAAARGSAGHGGVRAGKLLAVGGGVRVPPRRDPHLRRLRWRLQVQPRVPQPRRPRRVRQG

SEQ ID NO: 8726 - DNA, 1498 bp, Zea mays subsp. mays
  misc_feature (1)..(1498): Ceres Seq. ID no. 13570285
  misc_feature: MA Experiment ID: 108522 Result: Up-regulated in Transcription
  misc_feature: MA Experiment 108522 PARAMETER Experiment Name: Zm_42deg_Heat_P Parameter: Age (day) Value: 8
  misc_feature: MA Experiment 108522 PARAMETER Experiment Name: Zm_42deg_Heat_P Parameter: Organism Value: Zea mays
  misc_feature: MA Experiment 108522 PARAMETER Experiment Name: Zm_42deg_Heat_P Parameter: Plant Line Value: 35A19
  misc_feature: MA Experiment 108522 PARAMETER Experiment Name: Zm_42deg_Heat_P Parameter: Temperature (deg C) Value: 42 vs. 22
  misc_feature: MA Experiment 108522 PARAMETER Experiment Name: Zm_42deg_Heat_P Parameter: Timepoint (hr) Value: 1
  misc_feature: MA Experiment 108522 PARAMETER Experiment Name: Zm_42deg_Heat_P Parameter: Tissue Value: Aerial
  misc_feature: MA Experiment ID: 108523 Result: Up-regulated in Transcription
  misc_feature: MA Experiment 108523 PARAMETER Experiment Name: Zm_42deg_Heat_P Parameter: Age (day) Value: 8
  misc_feature: MA Experiment 108523 PARAMETER Experiment Name: Zm_42deg_Heat_P Parameter: Organism Value: Zea mays
  misc_feature: MA Experiment 108523 PARAMETER Experiment Name: Zm_42deg_Heat_P Parameter: Plant Line Value: 35A19
  misc_feature: MA Experiment 108523 PARAMETER Experiment Name: Zm_42deg_Heat_P Parameter: Temperature (deg C) Value: 42 vs. 22
  misc_feature: MA Experiment 108523 PARAMETER Experiment Name: Zm_42deg_Heat_P Parameter: Timepoint (hr) Value: 6
  misc_feature: MA Experiment 108523 PARAMETER Experiment Name: Zm_42deg_Heat_P Parameter: Tissue Value: Aerial
agcaaaaaggaagagtaacagggaggccggaatctttcgatcgagggcaccaccggcggcgggggtagtagcacaggaggggagccgtggagcgatccgtcgggcatctgcgcccgatgtgggcgtggggctgcgtcgagcgcgtggccgcgggcttcctcggcggccccctcgccgccggcggccgctggaacaccgccgtcgccgtcggggtcacggccgccgcgggcctcgtgctcgtcgccatcgtcgtctcttcccgcagaggcgggctcaaatctccgtggtggcggcggcggaggaaggcgccacttacggcgcaagagtggtgcgacctgttcacaccgcaggggaagcttcaggacggcggagtgaagcttctgaagaaagttcggagcggagggattgaaccgagtatcagagcgcaagtctggccgttccttctgggagtgtaagtaatctggagtgttgatcacgaaaccgttgttttcatgcttggagatgtacaattagatccacacgatactttggaacaagatatgtgcrkgctaattccttaattacttcatmcgaagagattatattgcaattataataacattaaccatggtccatgagatggatgaacctgcattttasggagacakgtactttatatcatcaagctgaacttaagaagttgtggactactaaatgggcacaacaaaattcataaattttcttgctagatgtacaaatgaacacgcaatatttgtttttttctttattttttccacagttcaaccagatttgacgtsgtgkadggccattgaaggaccacatttatttgcatctgawccatctgccgcctgaggttytcaaagaraggctccctggcatttctgaaactgctgctatttttgctggtgttgacgtcaccaaggagcccattccagttttgcctactgtgcwytacaatatgggtggtatcccaacgaactaccatggggaggtagtggatatcaagggtgataatccagatgctgttrtycctggkctaatggctgctggtgaagcagcctgtgcatctgttcatggtgcgaataggctaggcgcaaattcgcttcttgacatagttgtttttggcagagcttgtgcaaacagggtagcagatatttctaaaccaggtgagaagcagaaacctctggaaaaagatgctggagaaaagaccatagcctggttggacaagctgaggaatgcgaatgggtcattgccaacttccaagatccgtctcaacatgcagcgtgttatgcaaaataatgctgctgtattccgtacacaagaaacacttgaagaaggttgtgagctgattagcaaaacatgggaaagtttccatgatgtgaagctcagtgaccggagtctcatttggaactctgacctgatagagacccttgagctggaaaatcttttgataaatgcatgcataaccatgtwttcggcagaggctcggaaggaaagc

SEQ ID NO: 8727 - protein, 180 aa, Zea mays subsp. mays
  peptide (1)..(180): Ceres Seq. ID no. 15222583
  misc_feature (1)..(85): Pfam Name: FAD binding domain Pfam Description: FAD binding domain
  misc_feature (1)..(179): Homolog of NCBI NO: 34394418 NR Description: putative succinate dehydrogenase flavoprotein
  misc_feature (1)..(179): Homolog of NCBI NO: 15240075 NR Description: succinate dehydrogenase [ubiquinone], putative thaliana] >gi|20454872|sp|O82663|DHSA_ARATH Succinate [ubiquinone] flavoprotein subunit, mitochondrial (FP)
  misc_feature (1)..(179): Homolog of NCBI NO: 15224174 NR Description: succinate dehydrogenase [ubiquinone], putative
  misc_feature (1)..(179): Homolog of NCBI NO: 21231574 NR Description: succinate dehydrogenase flavoprotein subunit campestris pv. campestris str. ATCC 33913] succinate dehydrogenase flavoprotein subunit [Xanthomonas
  misc_feature (1)..(179): Homolog of NCBI NO: 37362284 NR Description: succinate dehydrogenase complex, subunit A,
  misc_feature (1)..(179): Homolog of NCBI NO: 28374211 NR Description: Similar to succinate dehydrogenase complex,
  misc_feature (1)..(179): Homolog of NCBI NO: 21242816 NR Description: succinate dehydrogenase flavoprotein subunit axonopodis pv. citri str. 306] >gi|21108302|gb|AAM36934.1| dehydrogenase flavoprotein subunit [Xanthomonas axonopodis pv.
  misc_feature (1)..(179): Homolog of NCBI NO: 22996847 NR Description: hypothetical protein [Xylella fastidiosa Ann-1]
  misc_feature (1)..(179): Homolog of NCBI NO: 15837674 NR Description: succinate dehydrogenase, flavoprotein subunit fastidiosa 9a5c] >gi|11252510|pir||E82728 succinate
  misc_feature (1)..(179): Homolog of NCBI NO: 28198269 NR Description: succinate dehydrogenase flavoprotein subunit fastidiosa Temecula1] >gi|28056339|gb|AAO28232.1| succinate
  misc_feature (24)..(24): Xaa is any aa, unknown or other
  misc_feature (26)..(26): Xaa is any aa, unknown or other
  misc_feature (172)..(172): Xaa is any aa, unknown or other
MGGIPTNYHGEVVDIKGDNPDAVXPXLMAAGEAACASVHGANRLGANSLLDIVVFGRACANRVADISKPGEKQKPLEKDAGEKTIAWLDKLRNANGSLPTSKIRLNMQRVMQNNAAVFRTQETLEEGCELISKTWESFHDVKLSDRSLIWNSDLIETLELENLLINACITMXSAEARKES

SEQ ID NO: 8728 - protein, 153 aa, Zea mays subsp. mays
  peptide (1)..(153): Ceres Seq. ID no. 15222584
  misc_feature (1)..(58): Pfam Name: FAD binding domain Pfam Description: FAD binding domain
  misc_feature (1)..(152): Homolog of NCBI NO: 34394418 NR Description: putative succinate dehydrogenase flavoprotein
  misc_feature (1)..(152): Homolog of NCBI NO: 15240075 NR Description: succinate dehydrogenase [ubiquinone], putative thaliana] >gi|20454872|sp|O82663|DHSA_ARATH Succinate [ubiquinone] flavoprotein subunit, mitochondrial (FP)
  misc_feature (1)..(152): Homolog of NCBI NO: 15224174 NR Description: succinate dehydrogenase [ubiquinone], putative
  misc_feature (1)..(152): Homolog of NCBI NO: 21231574 NR Description: succinate dehydrogenase flavoprotein subunit campestris pv. campestris str. ATCC 33913] succinate dehydrogenase flavoprotein subunit [Xanthomonas
  misc_feature (1)..(152): Homolog of NCBI NO: 37362284 NR Description: succinate dehydrogenase complex, subunit A,
  misc_feature (1)..(152): Homolog of NCBI NO: 28374211 NR Description: Similar to succinate dehydrogenase complex,
  misc_feature (1)..(152): Homolog of NCBI NO: 21242816 NR Description: succinate dehydrogenase flavoprotein subunit axonopodis pv. citri str. 306] >gi|21108302|gb|AAM36934.1| dehydrogenase flavoprotein subunit [Xanthomonas axonopodis pv.
  misc_feature (1)..(152): Homolog of NCBI NO: 22996847 NR Description: hypothetical protein [Xylella fastidiosa Ann-1]
  misc_feature (1)..(152): Homolog of NCBI NO: 15837674 NR Description: succinate dehydrogenase, flavoprotein subunit fastidiosa 9a5c] >gi|11252510|pir||E82728 succinate
  misc_feature (1)..(152): Homolog of NCBI NO: 28198269 NR Description: succinate dehydrogenase flavoprotein subunit fastidiosa Temecula1] >gi|28056339|gb|AAO28232.1| succinate
  misc_feature (145)..(145): Xaa is any aa, unknown or other
MAAGEAACASVHGANRLGANSLLDIVVFGRACANRVADISKPGEKQKPLEKDAGEKTIAWLDKLRNANGSLPTSKIRLNMQRVMQNNAAVFRTQETLEEGCELISKTWESFHDVKLSDRSLIWNSDLIETLELENLLINACITMXSAEARKES

SEQ ID NO: 8729 - protein, 135 aa, Zea mays subsp. mays
  peptide (1)..(135): Ceres Seq. ID no. 15222585
AKRKSNREAGIFRSRAPPAAGVVAQEGSRGAIRRASAPDVGVGLRRARGRGLPRRPPRRRRPLEHRRRRRGHGRRGPRARRHRRLFPQRRAQISVVAAAEEGATYGARVVRPVHTAGEASGRRSEASEESSERRD

SEQ ID NO: 8730 - DNA, 1649 bp, Zea mays subsp. mays
  misc_feature (1)..(1649): Ceres Seq. ID no. 12372859
  misc_feature: MA Experiment ID: 108504 Result: Down-regulated in Transcription
  misc_feature: MA Experiment 108504 PARAMETER Experiment Name: Zm_Drought_P Parameter: Age (day) Value: 8
  misc_feature: MA Experiment 108504 PARAMETER Experiment Name: Zm_Drought_P Parameter: Organism Value: Zea mays
  misc_feature: MA Experiment 108504 PARAMETER Experiment Name: Zm_Drought_P Parameter: Plant Line Value: 35A19
  misc_feature: MA Experiment 108504 PARAMETER Experiment Name: Zm_Drought_P Parameter: Timepoint (hr) Value: 12
  misc_feature: MA Experiment 108504 PARAMETER Experiment Name: Zm_Drought_P Parameter: Tissue Value: Aerial
  misc_feature: MA Experiment 108504 PARAMETER Experiment Name: Zm_Drought_P Parameter: Treatment Value: Drought vs. No Drought
  misc_feature: MA Experiment ID: 108527 Result: Up-regulated in Transcription
  misc_feature: MA Experiment 108527 PARAMETER Experiment Name: Zm_5mM_NO_P Parameter: Age (day) Value: 8
  misc_feature: MA Experiment 108527 PARAMETER Experiment Name: Zm_5mM_NO_P Parameter: Organism Value: Zea mays
  misc_feature: MA Experiment 108527 PARAMETER Experiment Name: Zm_5mM_NO_P Parameter: Plant Line Value: 35A19
  misc_feature: MA Experiment 108527 PARAMETER Experiment Name: Zm_5mM_NO_P Parameter: Timepoint (hr) Value: 6
  misc_feature: MA Experiment 108527 PARAMETER Experiment Name: Zm_5mM_NO_P Parameter: Tissue Value: Aerial
  misc_feature: MA Experiment 108527 PARAMETER Experiment Name: Zm_5mM_NO_P Parameter: Treatment Value: 5mM NO vs. No Treatment
  misc_feature: MA Experiment ID: 108539 Result: Up-regulated in Transcription
  misc_feature: MA Experiment 108539 PARAMETER Experiment Name: Zm_20percent_PEG_P Parameter: Age (day) Value: 8
  misc_feature: MA Experiment 108539 PARAMETER Experiment Name: Zm_20percent_PEG_P Parameter: Organism Value: Zea mays
  misc_feature: MA Experiment 108539 PARAMETER Experiment Name: Zm_20percent_PEG_P Parameter: Plant Line Value: 35A19
  misc_feature: MA Experiment 108539 PARAMETER Experiment Name: Zm_20percent_PEG_P Parameter: Timepoint (hr) Value: 1
  misc_feature: MA Experiment 108539 PARAMETER Experiment Name: Zm_20percent_PEG_P Parameter: Tissue Value: Aerial
  misc_feature: MA Experiment 108539 PARAMETER Experiment Name: Zm_20percent_PEG_P Parameter: Treatment Value: 20percent PEG vs. No Treatment
  misc_feature: MA Experiment ID: 108543 Result: Down-regulated in Transcription
  misc_feature: MA Experiment ID: 108544 Result: Down-regulated in Transcription
  misc_feature: MA Experiment ID: 108559 Result: Up-regulated in Transcription
  misc_feature: MA Experiment 108559 PARAMETER Experiment Name: Zm_5mM_NO_P Parameter: Age (day) Value: 8
  misc_feature: MA Experiment 108559 PARAMETER Experiment Name: Zm_5mM_NO_P Parameter: Organism Value: Zea mays
  misc_feature: MA Experiment 108559 PARAMETER Experiment Name: Zm_5mM_NO_P Parameter: Plant Line Value: 35A19
  misc_feature: MA Experiment 108559 PARAMETER Experiment Name: Zm_5mM_NO_P Parameter: Timepoint (hr) Value: 12
  misc_feature: MA Experiment 108559 PARAMETER Experiment Name: Zm_5mM_NO_P Parameter: Tissue Value: Aerial
  misc_feature: MA Experiment 108559 PARAMETER Experiment Name: Zm_5mM_NO_P Parameter: Treatment Value: 5mM NO vs. No Treatment
  misc_feature: MA Experiment ID: 20000478 Result: Up-regulated in Transcription
  misc_feature: MA Experiment 20000478 PARAMETER Experiment Name: Zm_5mM_SA_P Parameter: Age (day) Value: 11
  misc_feature: MA Experiment 20000478 PARAMETER Experiment Name: Zm_5mM_SA_P Parameter: Organism Value: Zea mays
  misc_feature: MA Experiment 20000478 PARAMETER Experiment Name: Zm_5mM_SA_P Parameter: Plant Line Value: 35A19
  misc_feature: MA Experiment 20000478 PARAMETER Experiment Name: Zm_5mM_SA_P Parameter: Timepoint (hr) Value: 72
  misc_feature: MA Experiment 20000478 PARAMETER Experiment Name: Zm_5mM_SA_P Parameter: Tissue Value: Aerial
  misc_feature: MA Experiment 20000478 PARAMETER Experiment Name: Zm_5mM_SA_P Parameter: Treatment Value: 5mM SA vs. No Treatment
  misc_feature: MA Experiment ID: 20000492 Result: Up-regulated in Transcription
  misc_feature: MA Experiment 20000492 PARAMETER Experiment Name: Zm_Hybrid_Seed_Dev_P Parameter: DAP Value: 12
  misc_feature: MA Experiment 20000492 PARAMETER Experiment Name: Zm_Hybrid_Seed_Dev_P Parameter: Organism Value: Zea mays
  misc_feature: MA Experiment 20000492 PARAMETER Experiment Name: Zm_Hybrid_Seed_Dev_P Parameter: Plant Line Value: 35A19
  misc_feature: MA Experiment 20000492 PARAMETER Experiment Name: Zm_Hybrid_Seed_Dev_P Parameter: Tissue Value: Fert Kernel vs. Unfert Floret
  misc_feature: MA Experiment ID: 20000533 Result: Up-regulated in Transcription
  misc_feature: MA Experiment 20000533 PARAMETER Experiment Name: Zm_0.001percent_MeJA_P Parameter: Age (day) Value: 11
  misc_feature: MA Experiment 20000533 PARAMETER Experiment Name: Zm_0.001percent_MeJA_P Parameter: Organism Value: Zea mays
  misc_feature: MA Experiment 20000533 PARAMETER Experiment Name: Zm_0.001percent_MeJA_P Parameter: Plant Line Value: 35A19
  misc_feature: MA Experiment 20000533 PARAMETER Experiment Name: Zm_0.001percent_MeJA_P Parameter: Timepoint (hr) Value: 72
  misc_feature: MA Experiment 20000533 PARAMETER Experiment Name: Zm_0.001percent_MeJA_P Parameter: Tissue Value: Aerial
  misc_feature: MA Experiment 20000533 PARAMETER Experiment Name: Zm_0.001percent_MeJA_P Parameter: Treatment Value: 0.001percent MeJA vs. No Treatment
  misc_feature: MA Experiment ID: 20000535 Result: Up-regulated in Transcription
  misc_feature: MA Experiment 20000535 PARAMETER Experiment Name: Zm_Hybrid_Seed_Dev_P Parameter: DAP Value: 30 vs. 12
  misc_feature: MA Experiment 20000535 PARAMETER Experiment Name: Zm_Hybrid_Seed_Dev_P Parameter: Organism Value: Zea mays
  misc_feature: MA Experiment 20000535 PARAMETER Experiment Name: Zm_Hybrid_Seed_Dev_P Parameter: Plant Line Value: 35A19
  misc_feature: MA Experiment 20000535 PARAMETER Experiment Name: Zm_Hybrid_Seed_Dev_P Parameter: Tissue Value: Embryo vs. Unfert Floret
  misc_feature: MA Experiment ID: 20000626 Result: Up-regulated in Transcription
  misc_feature: MA Experiment 20000626 PARAMETER Experiment Name: Zm_Herbicide-Treatments_P Parameter: Timepoint (hr) Value: 12
  misc_feature: MA Experiment 20000626 PARAMETER Experiment Name: Zm_Herbicide-Treatments_P Parameter: Tissue Value: Aerial
  misc_feature: MA Experiment 20000626 PARAMETER Experiment Name: Zm_Herbicide-Treatments_P Parameter: Treatment Value: Roundup vs. No Treatment
tagttcatttatgatttcctgcgagcacaaagctagcgaagataccaaacaatggggagcacgagcgccacaggcaccacgtcgtcttcctcatcggctgcccacgggggcggtgccgcacacgtactgctcctgccgtacccgggcgcgcagggccatacaaacccgctgctccagttcggccgctgcctcgcctaccacggcctccgccccacgctcgtcacctcgcggtacgtgctctccaccaccccgcctcccggggagcccttcagggtggccgccatttccgatggcttcgacgacggcggggcggccgcgtgccccgacctcgacgtgtactggcgccagctcgaggccgtcggctcggagacgctggcggagctgatccgctccgaggccgccgatgggcggcctgtgcgcgtgctggtttacgacccgcacctgccgtgggcgcgacgggtggcacaggcggccgggctggcggcagcggcgttcctatcgcagccatgcgccgtcgacgtcgtctacggggaggtgtgtgcaggacggctgccactgccggtggtggacgggaaagagctgtttgcacgcgggctgctgggtgtcgagctcggtcccgacgacgttccgccgttcgcagcaaagccagactggtgccctgtgttccttcgggcatcactgcggcaatttgaggggctggaggacgccgacgacgtgctcgtcaactcattccacgagatcgaacccaaggaggcagattatatggccctaacatggcatgcaaagacaataggcccaactttgccatcattttatcttgatgatgaccgtttgcccttgaacaagacttacggtttcaacctcttcaacagcagcgagtcatgtctggcttggcttgacaaacagcttccgtgttctgttgttcttgtatcctatggtactgtctctgattatgatgaagcacagttagaggagcttggcaatggattgtacaattctggcaaaccattcatttgggttgtgaggtcaaacgaagaacacaagttgtccaatgaacttcgtgacaagtgcaaggaacgtggccttattgtttcttggtgcccccagctggaagttctagcacataaagctacaggttgtttcttcacacattgcggatggaactcgacattggaagcaattgttaatggtgtgccaatggtggcaataccacactgggcagaccagccgaccatatcaaaatatatggagagcatgtggggcttgggtgtccgagtgcgcaaggatgagaaaggcttggtaacgagggacgaggtggaaaggtgcatcaaggatgtcatggatggtgatagtaaggataagtataggaagagtgccactatgtggatgcaaaaggccaaggcagctatgcagaatggagggagctcggccaagaatattacagaattcgccgcgaagtattctttaagttaatttttcaaatatttcgtaaaaaaagttaattttcaaagatataatgatagtgttataattacttcctataccttcatggattgtatgccttcctgcatgttatatttttgtctcgggattgtgcgtattacgttttgacttgatgatgtacatgctacagcagcaacctccacgtc

SEQ ID NO: 8731 - protein, 473 aa, Zea mays subsp. mays
  peptide (1)..(473): Ceres Seq. ID no. 12372860
  misc_feature (23)..(469): Pfam Name: UDP-glucoronosyl and UDP-glucosyl transferase Pfam Description: UDP-glucoronosyl and UDP-glucosyl transferase
  misc_feature (8)..(471): Homolog of NCBI NO: 38345012 NR Description: OSJNBa0052O21.15 [Oryza sativa (japonica
  misc_feature (5)..(471): Homolog of NCBI NO: 38345013 NR Description: OSJNBa0052O21.16 [Oryza sativa (japonica
  misc_feature (12)..(470): Homolog of NCBI NO: 38345011 NR Description: OSJNBa0052O21.14 [Oryza sativa (japonica
  misc_feature (1)..(369): Homolog of NCBI NO: 38345000 NR Description: OSJNBa0052O21.3 [Oryza sativa (japonica
  misc_feature (3)..(362): Homolog of NCBI NO: 38344998 NR Description: OSJNBa0052O21.1 [Oryza sativa (japonica
  misc_feature (23)..(469): Homolog of NCBI NO: 7385017 NR Description: UDP-glucose:salicylic acid glucosyltransferase
  misc_feature (20)..(466): Homolog of NCBI NO: 33114570 NR Description: glucosyltransferase 2 [Crocus sativus]
  misc_feature (23)..(470): Homolog of NCBI NO: 15221233 NR Description: putative indole-3-acetate protein id: At1g05680.1 [Arabidopsis thaliana]
  misc_feature (24)..(469): Homolog of NCBI NO: 15224368 NR Description: putative glucosyltransferase; protein id: supported by cDNA: 34407., supported by cDNA: gi_17064813
  misc_feature (24)..(472): Homolog of NCBI NO: 15224372 NR Description: putative glucosyltransferase; protein id: [Arabidopsis thaliana] >gi|25286795|pir||B84871 probable
MGSTSATGTTSSSSSAAHGGGAAHVLLLPYPGAQGHTNPLLQFGRCLAYHGLRPTLVTSRYVLSTTPPPGEPFRVAAISDGFDDGGAAACPDLDVYWRQLEAVGSETLAELIRSEAADGRPVRVLVYDPHLPWARRVAQAAGLAAAAFLSQPCAVDVVYGEVCAGRLPLPVVDGKELFARGLLGVELGPDDVPPFAAKPDWCPVFLRASLRQFEGLEDADDVLVNSFHEIEPKEADYMALTWHAKTIGPTLPSFYLDDDRLPLNKTYGFNLFNSSESCLAWLDKQLPCSVVLVSYGTVSDYDEAQLEELGNGLYNSGKPFIWVVRSNEEHKLSNELRDKCKERGLIVSWCPQLEVLAHKATGCFFTHCGWNSTLEAIVNGVPMVAIPHWADQPTISKYMESMWGLGVRVRKDEKGLVTRDEVERCIKDVMDGDSKDKYRKSATMWMQKAKAAMQNGGSSAKNITEFAAKYSLS

SEQ ID NO: 8732 - protein, 236 aa, Zea mays subsp. mays
  peptide (1)..(236): Ceres Seq. ID no. 12372861
  misc_feature (1)..(232): Pfam Name: UDP-glucoronosyl and UDP-glucosyl transferase Pfam Description: UDP-glucoronosyl and UDP-glucosyl transferase
  misc_feature (1)..(234): Homolog of NCBI NO: 38345012 NR Description: OSJNBa0052O21.15 [Oryza sativa (japonica
  misc_feature (1)..(234): Homolog of NCBI NO: 38345013 NR Description: OSJNBa0052O21.16 [Oryza sativa (japonica
  misc_feature (1)..(233): Homolog of NCBI NO: 38345011 NR Description: OSJNBa0052O21.14 [Oryza sativa (japonica
  misc_feature (1)..(132): Homolog of NCBI NO: 38345000 NR Description: OSJNBa0052O21.3 [Oryza sativa (japonica
  misc_feature (1)..(125): Homolog of NCBI NO: 38344998 NR Description: OSJNBa0052O21.1 [Oryza sativa (japonica
  misc_feature (1)..(232): Homolog of NCBI NO: 7385017 NR Description: UDP-glucose:salicylic acid glucosyltransferase
  misc_feature (1)..(229): Homolog of NCBI NO: 33114570 NR Description: glucosyltransferase 2 [Crocus sativus]
  misc_feature (1)..(233): Homolog of NCBI NO: 15221233 NR Description: putative indole-3-acetate protein id: At1g05680.1 [Arabidopsis thaliana]
  misc_feature (1)..(232): Homolog of NCBI NO: 15224368 NR Description: putative glucosyltransferase; protein id: supported by cDNA: 34407., supported by cDNA: gi_17064813
  misc_feature (1)..(235): Homolog of NCBI NO: 15224372 NR Description: putative glucosyltransferase; protein id: [Arabidopsis thaliana] >gi|25286795|pir||B84871 probable
MALTWHAKTIGPTLPSFYLDDDRLPLNKTYGFNLFNSSESCLAWLDKQLPCSVVLVSYGTVSDYDEAQLEELGNGLYNSGKPFIWVVRSNEEHKLSNELRDKCKERGLIVSWCPQLEVLAHKATGCFFTHCGWNSTLEAIVNGVPMVAIPHWADQPTISKYMESMWGLGVRVRKDEKGLVTRDEVERCIKDVMDGDSKDKYRKSATMWMQKAKAAMQNGGSSAKNITEFAAKYSLS

SEQ ID NO: 8733 - DNA, 1205 bp, Zea mays subsp. mays
  misc_feature (1)..(1205): Ceres Seq. ID no. 12361617
  misc_feature: MA Experiment ID: 108522 Result: Up-regulated in Transcription
  misc_feature: MA Experiment 108522 PARAMETER Experiment Name: Zm_42deg_Heat_P Parameter: Age (day) Value: 8
  misc_feature: MA Experiment 108522 PARAMETER Experiment Name: Zm_42deg_Heat_P Parameter: Organism Value: Zea mays
  misc_feature: MA Experiment 108522 PARAMETER Experiment Name: Zm_42deg_Heat_P Parameter: Plant Line Value: 35A19
  misc_feature: MA Experiment 108522 PARAMETER Experiment Name: Zm_42deg_Heat_P Parameter: Temperature (deg C) Value: 42 vs. 22
  misc_feature: MA Experiment 108522 PARAMETER Experiment Name: Zm_42deg_Heat_P Parameter: Timepoint (hr) Value: 1
  misc_feature: MA Experiment 108522 PARAMETER Experiment Name: Zm_42deg_Heat_P Parameter: Tissue Value: Aerial
  misc_feature: MA Experiment ID: 108523 Result: Up-regulated in Transcription
  misc_feature: MA Experiment 108523 PARAMETER Experiment Name: Zm_42deg_Heat_P Parameter: Age (day) Value: 8
  misc_feature: MA Experiment 108523 PARAMETER Experiment Name: Zm_42deg_Heat_P Parameter: Organism Value: Zea mays
  misc_feature: MA Experiment 108523 PARAMETER Experiment Name: Zm_42deg_Heat_P Parameter: Plant Line Value: 35A19
  misc_feature: MA Experiment 108523 PARAMETER Experiment Name: Zm_42deg_Heat_P Parameter: Temperature (deg C) Value: 42 vs. 22
  misc_feature: MA Experiment 108523 PARAMETER Experiment Name: Zm_42deg_Heat_P Parameter: Timepoint (hr) Value: 6
  misc_feature: MA Experiment 108523 PARAMETER Experiment Name: Zm_42deg_Heat_P Parameter: Tissue Value: Aerial
  misc_feature: MA Experiment ID: 108597 Result: Up-regulated in Transcription
  misc_feature: MA Experiment 108597 PARAMETER Experiment Name: Zm_100uM_ABA_P Parameter: Age (day) Value: 9
  misc_feature: MA Experiment 108597 PARAMETER Experiment Name: Zm_100uM_ABA_P Parameter: Organism Value: Zea mays
  misc_feature: MA Experiment 108597 PARAMETER Experiment Name: Zm_100uM_ABA_P Parameter: Plant Line Value: 35A19
  misc_feature: MA Experiment 108597 PARAMETER Experiment Name: Zm_100uM_ABA_P Parameter: Timepoint (hr) Value: 24
  misc_feature: MA Experiment 108597 PARAMETER Experiment Name: Zm_100uM_ABA_P Parameter: Tissue Value: Aerial
  misc_feature: MA Experiment 108597 PARAMETER Experiment Name: Zm_100uM_ABA_P Parameter: Treatment Value: 100uM ABA vs. No Treatment
  misc_feature: MA Experiment ID: 108687 Result: Up-regulated in Transcription
  misc_feature: MA Experiment 108687 PARAMETER Experiment Name: Zm_Embryos-Flowers__P Parameter: Tissue Value: Embryo vs. Aerial+
  misc_feature: MA Experiment ID: 108688 Result: Down-regulated in Transcription
  misc_feature: MA Experiment 108688 PARAMETER Experiment Name: Zm_Embryos-Flowers__P Parameter: Tissue Value: Immature Flowers vs. Aerial+
  misc_feature: MA Experiment ID: 108689 Result: Up-regulated in Transcription
  misc_feature: MA Experiment 108689 PARAMETER Experiment Name: Zm_Drought_Roots_P Parameter: Age (day) Value: 9
  misc_feature: MA Experiment 108689 PARAMETER Experiment Name: Zm_Drought_Roots_P Parameter: Organism Value: Zea mays
  misc_feature: MA Experiment 108689 PARAMETER Experiment Name: Zm_Drought_Roots_P Parameter: Plant Line Value: 35A19
  misc_feature: MA Experiment 108689 PARAMETER Experiment Name: Zm_Drought_Roots_P Parameter: Timepoint (hr) Value: 24
  misc_feature: MA Experiment 108689 PARAMETER Experiment Name: Zm_Drought_Roots_P Parameter: Tissue Value: Roots
  misc_feature: MA Experiment 108689 PARAMETER Experiment Name: Zm_Drought_Roots_P Parameter: Treatment Value: Drought vs. No Drought
  misc_feature: MA Experiment ID: 20000480 Result: Up-regulated in Transcription
  misc_feature: MA Experiment 20000480 PARAMETER Experiment Name: Zm_Drought_P Parameter: Age (day) Value: 11
  misc_feature: MA Experiment 20000480 PARAMETER Experiment Name: Zm_Drought_P Parameter: Organism Value: Zea mays
  misc_feature: MA Experiment 20000480 PARAMETER Experiment Name: Zm_Drought_P Parameter: Plant Line Value: 35A19
  misc_feature: MA Experiment 20000480 PARAMETER Experiment Name: Zm_Drought_P Parameter: Timepoint (hr) Value: 72
  misc_feature: MA Experiment 20000480 PARAMETER Experiment Name: Zm_Drought_P Parameter: Tissue Value: Aerial
  misc_feature: MA Experiment 20000480 PARAMETER Experiment Name: Zm_Drought_P Parameter: Treatment Value: Drought vs. No Drought
  misc_feature: MA Experiment ID: 20000535 Result: Up-regulated in Transcription
  misc_feature: MA Experiment 20000535 PARAMETER Experiment Name: Zm_Hybrid_Seed_Dev_P Parameter: DAP Value: 30 vs. 12
  misc_feature: MA Experiment 20000535 PARAMETER Experiment Name: Zm_Hybrid_Seed_Dev_P Parameter: Organism Value: Zea mays
  misc_feature: MA Experiment 20000535 PARAMETER Experiment Name: Zm_Hybrid_Seed_Dev_P Parameter: Plant Line Value: 35A19
  misc_feature: MA Experiment 20000535 PARAMETER Experiment Name: Zm_Hybrid_Seed_Dev_P Parameter: Tissue Value: Embryo vs. Unfert Floret
ctctcgattcggaaaacctccaaccctagccgcgatccgacaacgcctccatccctagccgactgctgcaagcttcagagctcaagagtcagggcgccatggcgacagagacggagaccttcgcctttcaggctgagatcaaccagctgctctcactcatcatcaacaccttctattccaacaaggagatcttcctccgggagctcatttccaactcttccgatgcgttggacaaaatcaggttcgagagcctcactgacaagagcaagctcgatgcgcagccggagctgttcatccacattgtaccagacaaggcttcgaacacgctctccatcatcgacagcggcatcggcatgaccaagtccgaccttgtcaacaacctcggtaccatcgccaggtccgggaccaaggagttcatggaagcccttgctgctggcgctgatgtgtctatgattgggcagttcggtgtcggtttctactctgcctacctcgtcgccgagagggtcgtcgtgaccaccaagcataacgatgacgagcagtacgtgtgggaatcccaggcgggcgggtcgttcactgttactcgtgacacgtctggggagcagcttggcaggggtactaagattacacttttcctcaaggaagatcagttagaataccttgaggagcgtcgcctcaaggatttggtcaagaagcactctgagttcatcagctaccccatctccctgtggaccgaaaagacaacggagaaggagatttctgatgatgaagatgaggaagagaagaaagacgctgaggagggaaaggttgaggatgttgacgaggagaaggaagagaaagaaaaaaagaaaaagaagatcaaggaggtttctcacgagtggtcattgatcaacaagcagaagcccatctggatgaggaagccagaagagatcacaaaggaagaatatgctgccttctacaaaagcttgacaaatgactgggaggagcatctggctgtgaagcacttctctgtggagggtcagctggagttcaaggctgttctctttgttcctaagagggccccgtttgatctcttcgacacaaggaagaagcaaaacaacatcaagctctatgtgcgcagggtgtttatcatggacaactgtgaggaactgatccctgagtggctgagttttgttaagggtattgttgactctgaggaccttcccctc

SEQ ID NO: 8734 - protein, 369 aa, Zea mays subsp. mays
  peptide (1)..(369): Ceres Seq. ID no. 12361618
  misc_feature (185)..(368): Pfam Name: Hsp90 protein Pfam Description: Hsp90 protein
  misc_feature (1)..(368): Homolog of NCBI NO: 417154 NR Description: HEAT SHOCK PROTEIN 82 >gi|100685|pir||S25541 heat
  misc_feature (1)..(368): Homolog of NCBI NO: 5123910 NR Description: HSP80-2 [Triticum aestivum]
  misc_feature (1)..(368): Homolog of NCBI NO: 4204859 NR Description: heat shock protein 80 [Triticum aestivum]
  misc_feature (3)..(368): Homolog of NCBI NO: 547683 NR Description: HEAT SHOCK COGNATE PROTEIN 80
  misc_feature (4)..(368): Homolog of NCBI NO: 15241115 NR Description: HEAT SHOCK PROTEIN 81-2 (HSP81-2) (sp|P55737); id: At5g56030.1, supported by cDNA: gi_17065347 [Arabidopsis
  misc_feature (4)..(368): Homolog of NCBI NO: 23397152 NR Description: putative heat shock protein 81-2 (HSP81-2)
  misc_feature (4)..(368): Homolog of NCBI NO: 15215642 NR Description: AT5g56010/MDA7_5 [Arabidopsis thaliana]
  misc_feature (4)..(368): Homolog of NCBI NO: 15241113 NR Description: heat shock protein 90; protein id: At5g56010.1, by cDNA: gi_17065511, supported by cDNA: gi_17979040, supported cDNA: gi_19698910 [Arabidopsis thaliana]
  misc_feature (4)..(368): Homolog of NCBI NO: 17979041 NR Description: putative heat shock protein 90 [Arabidopsis
  misc_feature (4)..(368): Homolog of NCBI NO: 15241102 NR Description: heat shock protein (emb|CAA72514.1); protein id: [Arabidopsis thaliana] >gi|1906828|emb|CAA72514.1| heat shock [Arabidopsis thaliana] >gi|9758620|dbj|BAB09282.1| heat shock
MATETETFAFQAEINQLLSLIINTFYSNKEIFLRELISNSSDALDKIRFESLTDKSKLDAQPELFIHIVPDKASNTLSIIDSGIGMTKSDLVNNLGTIARSGTKEFMEALAAGADVSMIGQFGVGFYSAYLVAERVVVTTKHNDDEQYVWESQAGGSFTVTRDTSGEQLGRGTKITLFLKEDQLEYLEERRLKDLVKKHSEFISYPISLWTEKTTEKEISDDEDEEEKKDAEEGKVEDVDEEKEEKEKKKKKIKEVSHEWSLINKQKPIWMRKPEEITKEEYAAFYKSLTNDWEEHLAVKHFSVEGQLEFKAVLFVPKRAPFDLFDTRKKQNNIKLYVRRVFIMDNCEELIPEWLSFVKGIVDSEDLPL

SEQ ID NO: 8735 - protein, 284 aa, Zea mays subsp. mays
  peptide (1)..(284): Ceres Seq. ID no. 12361619
  misc_feature (100)..(283): Pfam Name: Hsp90 protein Pfam Description: Hsp90 protein
  misc_feature (1)..(283): Homolog of NCBI NO: 417154 NR Description: HEAT SHOCK PROTEIN 82 >gi|100685|pir||S25541 heat
  misc_feature (1)..(283): Homolog of NCBI NO: 5123910 NR Description: HSP80-2 [Triticum aestivum]
  misc_feature (1)..(283): Homolog of NCBI NO: 4204859 NR Description: heat shock protein 80 [Triticum aestivum]
  misc_feature (1)..(283): Homolog of NCBI NO: 547683 NR Description: HEAT SHOCK COGNATE PROTEIN 80
  misc_feature (1)..(283): Homolog of NCBI NO: 15241115 NR Description: HEAT SHOCK PROTEIN 81-2 (HSP81-2) (sp|P55737); id: At5g56030.1, supported by cDNA: gi_17065347 [Arabidopsis
  misc_feature (1)..(283): Homolog of NCBI NO: 23397152 NR Description: putative heat shock protein 81-2 (HSP81-2)
  misc_feature (1)..(283): Homolog of NCBI NO: 15215642 NR Description: AT5g56010/MDA7_5 [Arabidopsis thaliana]
  misc_feature (1)..(283): Homolog of NCBI NO: 17979041 NR Description: putative heat shock protein 90 [Arabidopsis
  misc_feature (1)..(283): Homolog of NCBI NO: 15241113 NR Description: heat shock protein 90; protein id: At5g56010.1, by cDNA: gi_17065511, supported by cDNA: gi_17979040, supported cDNA: gi_19698910 [Arabidopsis thaliana]
  misc_feature (1)..(283): Homolog of NCBI NO: 15241102 NR Description: heat shock protein (emb|CAA72514.1); protein id: [Arabidopsis thaliana] >gi|1906828|emb|CAA72514.1| heat shock [Arabidopsis thaliana] >gi|9758620|dbj|BAB09282.1| heat shock
MTKSDLVNNLGTIARSGTKEFMEALAAGADVSMIGQFGVGFYSAYLVAERVVVTTKHNDDEQYVWESQAGGSFTVTRDTSGEQLGRGTKITLFLKEDQLEYLEERRLKDLVKKHSEFISYPISLWTEKTTEKEISDDEDEEEKKDAEEGKVEDVDEEKEEKEKKKKKIKEVSHEWSLINKQKPIWMRKPEEITKEEYAAFYKSLTNDWEEHLAVKHFSVEGQLEFKAVLFVPKRAPFDLFDTRKKQNNIKLYVRRVFIMDNCEELIPEWLSFVKGIVDSEDLPL

SEQ ID NO: 8736 - protein, 263 aa, Zea mays subsp. mays
  peptide (1)..(263): Ceres Seq. ID no. 12361620
  misc_feature (79)..(262): Pfam Name: Hsp90 protein Pfam Description: Hsp90 protein
  misc_feature (1)..(262): Homolog of NCBI NO: 417154 NR Description: HEAT SHOCK PROTEIN 82 >gi|100685|pir||S25541 heat
  misc_feature (1)..(262): Homolog of NCBI NO: 5123910 NR Description: HSP80-2 [Triticum aestivum]
  misc_feature (1)..(262): Homolog of NCBI NO: 4204859 NR Description: heat shock protein 80 [Triticum aestivum]
  misc_feature (1)..(262): Homolog of NCBI NO: 547683 NR Description: HEAT SHOCK COGNATE PROTEIN 80
  misc_feature (1)..(262): Homolog of NCBI NO: 15241115 NR Description: HEAT SHOCK PROTEIN 81-2 (HSP81-2) (sp|P55737); id: At5g56030.1, supported by cDNA: gi_17065347 [Arabidopsis
  misc_feature (1)..(262): Homolog of NCBI NO: 23397152 NR Description: putative heat shock protein 81-2 (HSP81-2)
  misc_feature (1)..(262): Homolog of NCBI NO: 15215642 NR Description: AT5g56010/MDA7_5 [Arabidopsis thaliana]
  misc_feature (1)..(262): Homolog of NCBI NO: 15241113 NR Description: heat shock protein 90; protein id: At5g56010.1, by cDNA: gi_17065511, supported by cDNA: gi_17979040, supported cDNA: gi_19698910 [Arabidopsis thaliana]
  misc_feature (1)..(262): Homolog of NCBI NO: 17979041 NR Description: putative heat shock protein 90 [Arabidopsis
  misc_feature (1)..(262): Homolog of NCBI NO: 15241102 NR Description: heat shock protein (emb|CAA72514.1); protein id: [Arabidopsis thaliana] >gi|1906828|emb|CAA72514.1| heat shock [Arabidopsis thaliana] >gi|9758620|dbj|BAB09282.1| heat shock
MEALAAGADVSMIGQFGVGFYSAYLVAERVVVTTKHNDDEQYVWESQAGGSFTVTRDTSGEQLGRGTKITLFLKEDQLEYLEERRLKDLVKKHSEFISYPISLWTEKTTEKEISDDEDEEEKKDAEEGKVEDVDEEKEEKEKKKKKIKEVSHEWSLINKQKPIWMRKPEEITKEEYAAFYKSLTNDWEEHLAVKHFSVEGQLEFKAVLFVPKRAPFDLFDTRKKQNNIKLYVRRVFIMDNCEELIPEWLSFVKGIVDSEDLPL

SEQ ID NO: 8737 - DNA, 732 bp, Zea mays subsp. mays
  misc_feature (1)..(732): Ceres Seq. ID no. 12401713
  misc_feature: MA Experiment ID: 108543 Result: Up-regulated in Transcription
  misc_feature: MA Experiment ID: 20000478 Result: Down-regulated in Transcription
  misc_feature: MA Experiment 20000478 PARAMETER Experiment Name: Zm_5mM_SA_P Parameter: Age (day) Value: 11
  misc_feature: MA Experiment 20000478 PARAMETER Experiment Name: Zm_5mM_SA_P Parameter: Organism Value: Zea mays
  misc_feature: MA Experiment 20000478 PARAMETER Experiment Name: Zm_5mM_SA_P Parameter: Plant Line Value: 35A19
  misc_feature: MA Experiment 20000478 PARAMETER Experiment Name: Zm_5mM_SA_P Parameter: Timepoint (hr) Value: 72
  misc_feature: MA Experiment 20000478 PARAMETER Experiment Name: Zm_5mM_SA_P Parameter: Tissue Value: Aerial
  misc_feature: MA Experiment 20000478 PARAMETER Experiment Name: Zm_5mM_SA_P Parameter: Treatment Value: 5mM SA vs. No Treatment
ttgatgatgaggagaggccctatttacctaagcacattctctacaggcaaaaggaacagttcagtgatggtgttgggtatagttggatcgatggattgaaggaccatgccagccaacatgtctccgattccatgatgatgaatgctggctttgtttacccagagaacacacccacaacaaaagaagggtactactacagaatgatattcgagaaattctttcccaagcctgcagcaaggtcaactgttcctggaggtcctagtgtggcctgcagcactgccaaagctgttgaatgggacgcatcctggtccaagaaccttgatccttctggccgtgctgctttgggtgttcacgatgctgcgtatgaagacactgcagggaaaactcctgcctctgctgatcctgtctcagacaagggccttcgtccagctattggcgaaagcctagggacacccgttgcttcagccacagctgtctaaccttatgtttatcacccagcaatgcttgaaacagcaaaggttgtccattgcttgtttcagtttccttccgatcatgtttttagttccatcaatcaagcaatggagacatgcttgtgcttcatacttggcagcatcgtgtttgggttttcactgggcagtactgtttaatttttatggactgaaaagactcagttttgtaaatattcgtcactgtgaccaattcctgtggtggtttatgtgatntgcagattgc

SEQ ID NO: 8738 - protein, 158 aa, Zea mays subsp. mays
  peptide (1)..(158): Ceres Seq. ID no. 12401714
  misc_feature (1)..(83): Pfam Name: Asparagine synthase Pfam Description: Asparagine synthase
  misc_feature (1)..(158): Homolog of NCBI NO: 3182921 NR Description: Asparagine synthetase [glutamine-hydrolyzing] dependent asparagine synthetase) >gi|7438076|pir||T03602 probable
  misc_feature (1)..(134): Homolog of NCBI NO: 22208544 NR Description: asparagine synthetase 2 [Striga hermonthica]
  misc_feature (1)..(137): Homolog of NCBI NO: 30698086 NR Description: asparagine synthetase (gb|AAC72837.1) thaliana] >gi|8843765|dbj|BAA97313.1| asparagine synthetase thaliana] >gi|13605883|gb|AAK32927.1|AF367340_1 AT5g65010/MXK3_25
  misc_feature (1)..(137): Homolog of NCBI NO: 3859536 NR Description: asparagine synthetase [Arabidopsis thaliana]
  misc_feature (1)..(137): Homolog of NCBI NO: 30698088 NR Description: asparagine synthetase (gb|AAC72837.1)
  misc_feature (1)..(123): Homolog of NCBI NO: 6049843 NR Description: asparagine synthetase [Helianthus annuus]
  misc_feature (1)..(144): Homolog of NCBI NO: 25293864 NR Description: asparagine synthase (glutamine-hydrolyzing) (EC
  misc_feature (1)..(144): Homolog of NCBI NO: 7960743 NR Description: asparagine synthetase (ASN3)(fragment)
  misc_feature (1)..(144): Homolog of NCBI NO: 15238108 NR Description: asparagine synthetase ASN3; protein id: supported by cDNA: gi_3859533 [Arabidopsis thaliana]
  misc_feature (1)..(123): Homolog of NCBI NO: 5915696 NR Description: Asparagine synthetase [glutamine-hydrolyzing] dependent asparagine synthetase) >gi|2429280|gb|AAD05033.1| synthetase [Triphysaria versicolor] >gi|2429282|gb|AAD05034.1|
DDEERPYLPKHILYRQKEQFSDGVGYSWIDGLKDHASQHVSDSMMMNAGFVYPENTPTTKEGYYYRMIFEKFFPKPAARSTVPGGPSVACSTAKAVEWDASWSKNLDPSGRAALGVHDAAYEDTAGKTPASADPVSDKGLRPAIGESLGTPVASATAV

SEQ ID NO: 8739 - protein, 115 aa, Zea mays subsp. mays
  peptide (1)..(115): Ceres Seq. ID no. 12401715
  misc_feature (1)..(101): Homolog of NCBI NO: 15238108 NR Description: asparagine synthetase ASN3; protein id: supported by cDNA: gi_3859533 [Arabidopsis thaliana]
  misc_feature (1)..(80): Homolog of NCBI NO: 5915696 NR Description: Asparagine synthetase [glutamine-hydrolyzing] dependent asparagine synthetase) >gi|2429280|gb|AAD05033.1| synthetase [Triphysaria versicolor] >gi|2429282|gb|AAD05034.1|
  misc_feature (1)..(115): Homolog of NCBI NO: 3182921 NR Description: Asparagine synthetase [glutamine-hydrolyzing] dependent asparagine synthetase) >gi|7438076|pir||T03602 probable
  misc_feature (1)..(91): Homolog of NCBI NO: 22208544 NR Description: asparagine synthetase 2 [Striga hermonthica]
  misc_feature (1)..(94): Homolog of NCBI NO: 30698086 NR Description: asparagine synthetase (gb|AAC72837.1) thaliana] >gi|8843765|dbj|BAA97313.1| asparagine synthetase thaliana] >gi|13605883|gb|AAK32927.1|AF367340_1 AT5g65010/MXK3_25
  misc_feature (1)..(94): Homolog of NCBI NO: 3859536 NR Description: asparagine synthetase [Arabidopsis thaliana]
  misc_feature (1)..(94): Homolog of NCBI NO: 30698088 NR Description: asparagine synthetase (gb|AAC72837.1)
  misc_feature (1)..(80): Homolog of NCBI NO: 6049843 NR Description: asparagine synthetase [Helianthus annuus]
  misc_feature (1)..(101): Homolog of NCBI NO: 25293864 NR Description: asparagine synthase (glutamine-hydrolyzing) (EC
  misc_feature (1)..(101): Homolog of NCBI NO: 7960743 NR Description: asparagine synthetase (ASN3)(fragment)
MMMNAGFVYPENTPTTKEGYYYRMIFEKFFPKPAARSTVPGGPSVACSTAKAVEWDASWSKNLDPSGRAALGVHDAAYEDTAGKTPASADPVSDKGLRPAIGESLGTPVASATAV

SEQ ID NO: 8740 - protein, 114 aa, Zea mays subsp. mays
  peptide (1)..(114): Ceres Seq. ID no. 12401716
  misc_feature (1)..(114): Homolog of NCBI NO: 3182921 NR Description: Asparagine synthetase [glutamine-hydrolyzing] dependent asparagine synthetase) >gi|7438076|pir||T03602 probable
  misc_feature (1)..(90): Homolog of NCBI NO: 22208544 NR Description: asparagine synthetase 2 [Striga hermonthica]
  misc_feature (1)..(93): Homolog of NCBI NO: 30698086 NR Description: asparagine synthetase (gb|AAC72837.1) thaliana] >gi|8843765|dbj|BAA97313.1| asparagine synthetase thaliana] >gi|13605883|gb|AAK32927.1|AF367340_1 AT5g65010/MXK3_25
  misc_feature (1)..(93): Homolog of NCBI NO: 3859536 NR Description: asparagine synthetase [Arabidopsis thaliana]
  misc_feature (1)..(93): Homolog of NCBI NO: 30698088 NR Description: asparagine synthetase (gb|AAC72837.1)
  misc_feature (1)..(79): Homolog of NCBI NO: 6049843 NR Description: asparagine synthetase [Helianthus annuus]
  misc_feature (1)..(100): Homolog of NCBI NO: 25293864 NR Description: asparagine synthase (glutamine-hydrolyzing) (EC
  misc_feature (1)..(100): Homolog of NCBI NO: 7960743 NR Description: asparagine synthetase (ASN3)(fragment)
  misc_feature (1)..(100): Homolog of NCBI NO: 15238108 NR Description: asparagine synthetase ASN3; protein id: supported by cDNA: gi_3859533 [Arabidopsis thaliana]
  misc_feature (1)..(79): Homolog of NCBI NO: 5915696 NR Description: Asparagine synthetase [glutamine-hydrolyzing] dependent asparagine synthetase) >gi|2429280|gb|AAD05033.1| synthetase [Triphysaria versicolor] >gi|2429282|gb|AAD05034.1|
MMNAGFVYPENTPTTKEGYYYRMIFEKFFPKPAARSTVPGGPSVACSTAKAVEWDASWSKNLDPSGRAALGVHDAAYEDTAGKTPASADPVSDKGLRPAIGESLGTPVASATAV

SEQ ID NO: 8741 - DNA, 1759 bp, Zea mays subsp. mays
  misc_feature (1)..(1759): Ceres Seq. ID no. 12382113
  misc_feature: MA Experiment ID: 108527 Result: Down-regulated in Transcription
  misc_feature: MA Experiment 108527 PARAMETER Experiment Name: Zm_5mM_NO_P Parameter: Age (day) Value: 8
  misc_feature: MA Experiment 108527 PARAMETER Experiment Name: Zm_5mM_NO_P Parameter: Organism Value: Zea mays
  misc_feature: MA Experiment 108527 PARAMETER Experiment Name: Zm_5mM_NO_P Parameter: Plant Line Value: 35A19
  misc_feature: MA Experiment 108527 PARAMETER Experiment Name: Zm_5mM_NO_P Parameter: Timepoint (hr) Value: 6
  misc_feature: MA Experiment 108527 PARAMETER Experiment Name: Zm_5mM_NO_P Parameter: Tissue Value: Aerial
  misc_feature: MA Experiment 108527 PARAMETER Experiment Name: Zm_5mM_NO_P Parameter: Treatment Value: 5mM NO vs. No Treatment
  misc_feature: MA Experiment ID: 108530 Result: Up-regulated in Transcription
  misc_feature: MA Experiment 108530 PARAMETER Experiment Name: Zm_Imbibed_Seeds_P Parameter: Age (day) Value: 6 vs. 2
  misc_feature: MA Experiment 108530 PARAMETER Experiment Name: Zm_Imbibed_Seeds_P Parameter: Organism Value: Zea mays
  misc_feature: MA Experiment 108530 PARAMETER Experiment Name: Zm_Imbibed_Seeds_P Parameter: Plant Line Value: 35A19
  misc_feature: MA Experiment 108530 PARAMETER Experiment Name: Zm_Imbibed_Seeds_P Parameter: Tissue Value: Aerial vs. Embryo
  misc_feature: MA Experiment ID: 108543 Result: Up-regulated in Transcription
  misc_feature: MA Experiment ID: 108544 Result: Up-regulated in Transcription
  misc_feature: MA Experiment ID: 108556 Result: Down-regulated in Transcription
  misc_feature: MA Experiment 108556 PARAMETER Experiment Name: Zm_Drought_P Parameter: Age (day) Value: 9
  misc_feature: MA Experiment 108556 PARAMETER Experiment Name: Zm_Drought_P Parameter: Organism Value: Zea mays
  misc_feature: MA Experiment 108556 PARAMETER Experiment Name: Zm_Drought_P Parameter: Plant Line Value: 35A19
  misc_feature: MA Experiment 108556 PARAMETER Experiment Name: Zm_Drought_P Parameter: Timepoint (hr) Value: 24
  misc_feature: MA Experiment 108556 PARAMETER Experiment Name: Zm_Drought_P Parameter: Tissue Value: Aerial
  misc_feature: MA Experiment 108556 PARAMETER Experiment Name: Zm_Drought_P Parameter: Treatment Value: Drought vs. No Drought
  misc_feature: MA Experiment ID: 108599 Result: Down-regulated in Transcription
  misc_feature: MA Experiment 108599 PARAMETER Experiment Name: Zm_RT1_P Parameter: Age (day) Value: 11
  misc_feature: MA Experiment 108599 PARAMETER Experiment Name: Zm_RT1_P Parameter: Organism Value: Zea mays
  misc_feature: MA Experiment 108599 PARAMETER Experiment Name: Zm_RT1_P Parameter: Plant Line Value: rt1 mut vs. rt1 wt
  misc_feature: MA Experiment 108599 PARAMETER Experiment Name: Zm_RT1_P Parameter: Tissue Value: Roots
  misc_feature: MA Experiment ID: 108687 Result: Down-regulated in Transcription
  misc_feature: MA Experiment 108687 PARAMETER Experiment Name: Zm_Embryos-Flowers__P Parameter: Tissue Value: Embryo vs. Aerial+
  misc_feature: MA Experiment ID: 20000535 Result: Down-regulated in Transcription
  misc_feature: MA Experiment 20000535 PARAMETER Experiment Name: Zm_Hybrid_Seed_Dev_P Parameter: DAP Value: 30 vs. 12
  misc_feature: MA Experiment 20000535 PARAMETER Experiment Name: Zm_Hybrid_Seed_Dev_P Parameter: Organism Value: Zea mays
  misc_feature: MA Experiment 20000535 PARAMETER Experiment Name: Zm_Hybrid_Seed_Dev_P Parameter: Plant Line Value: 35A19
  misc_feature: MA Experiment 20000535 PARAMETER Experiment Name: Zm_Hybrid_Seed_Dev_P Parameter: Tissue Value: Embryo vs. Unfert Floret
  misc_feature: MA Experiment ID: 20001608 Result: Down-regulated in Transcription
  misc_feature: MA Experiment 20001608 PARAMETER Experiment Name: Zm_50ppm_KNO3_L-to-H_P Parameter: Age (day) Value: 21
  misc_feature: MA Experiment 20001608 PARAMETER Experiment Name: Zm_50ppm_KNO3_L-to-H_P Parameter: Organism Value: Zea mays
  misc_feature: MA Experiment 20001608 PARAMETER Experiment Name: Zm_50ppm_KNO3_L-to-H_P Parameter: Plant Line Value: 35A19
  misc_feature: MA Experiment 20001608 PARAMETER Experiment Name: Zm_50ppm_KNO3_L-to-H_P Parameter: Timepoint (hr) Value: 48
  misc_feature: MA Experiment 20001608 PARAMETER Experiment Name: Zm_50ppm_KNO3_L-to-H_P Parameter: Tissue Value: Shoots
  misc_feature: MA Experiment 20001608 PARAMETER Experiment Name: Zm_50ppm_KNO3_L-to-H_P Parameter: Treatment Value: 50ppm KNO3 vs. 50ppm KCl
  misc_feature: MA Experiment ID: 20001610 Result: Down-regulated in Transcription
  misc_feature: MA Experiment 20001610 PARAMETER Experiment Name: Zm_50ppm_KNO3_L-to-H_P Parameter: Age (day) Value: 19
  misc_feature: MA Experiment 20001610 PARAMETER Experiment Name: Zm_50ppm_KNO3_L-to-H_P Parameter: Organism Value: Zea mays
  misc_feature: MA Experiment 20001610 PARAMETER Experiment Name: Zm_50ppm_KNO3_L-to-H_P Parameter: Plant Line Value: 35A19
  misc_feature: MA Experiment 20001610 PARAMETER Experiment Name: Zm_50ppm_KNO3_L-to-H_P Parameter: Timepoint (hr) Value: 2
  misc_feature: MA Experiment 20001610 PARAMETER Experiment Name: Zm_50ppm_KNO3_L-to-H_P Parameter: Tissue Value: Roots
  misc_feature: MA Experiment 20001610 PARAMETER Experiment Name: Zm_50ppm_KNO3_L-to-H_P Parameter: Treatment Value: 50ppm KNO3 vs. 50ppm KCl
  misc_feature: MA Experiment ID: 20001613 Result: Down-regulated in Transcription
  misc_feature: MA Experiment 20001613 PARAMETER Experiment Name: Zm_50ppm_KNO3_L-to-H_P Parameter: Age (day) Value: 20
  misc_feature: MA Experiment 20001613 PARAMETER Experiment Name: Zm_50ppm_KNO3_L-to-H_P Parameter: Organism Value: Zea mays
  misc_feature: MA Experiment 20001613 PARAMETER Experiment Name: Zm_50ppm_KNO3_L-to-H_P Parameter: Plant Line Value: 35A19
  misc_feature: MA Experiment 20001613 PARAMETER Experiment Name: Zm_50ppm_KNO3_L-to-H_P Parameter: Timepoint (hr) Value: 24
  misc_feature: MA Experiment 20001613 PARAMETER Experiment Name: Zm_50ppm_KNO3_L-to-H_P Parameter: Tissue Value: Roots
  misc_feature: MA Experiment 20001613 PARAMETER Experiment Name: Zm_50ppm_KNO3_L-to-H_P Parameter: Treatment Value: 50ppm KNO3 vs. 50ppm KCl
  misc_feature: MA Experiment ID: 20001614 Result: Down-regulated in Transcription
  misc_feature: MA Experiment 20001614 PARAMETER Experiment Name: Zm_50ppm_KNO3_L-to-H_P Parameter: Age (day) Value: 21
  misc_feature: MA Experiment 20001614 PARAMETER Experiment Name: Zm_50ppm_KNO3_L-to-H_P Parameter: Organism Value: Zea mays
  misc_feature: MA Experiment 20001614 PARAMETER Experiment Name: Zm_50ppm_KNO3_L-to-H_P Parameter: Plant Line Value: 35A19
  misc_feature: MA Experiment 20001614 PARAMETER Experiment Name: Zm_50ppm_KNO3_L-to-H_P Parameter: Timepoint (hr) Value: 48
  misc_feature: MA Experiment 20001614 PARAMETER Experiment Name: Zm_50ppm_KNO3_L-to-H_P Parameter: Tissue Value: Roots
  misc_feature: MA Experiment 20001614 PARAMETER Experiment Name: Zm_50ppm_KNO3_L-to-H_P Parameter: Treatment Value: 50ppm KNO3 vs. 50ppm KCl
atcatctacaccgccgaggcgccgacaaccacttggcgaccatgagcacgggcacggacgccgtcccggtcgccgtggcgccggcgaagcgcccgcccatcaacaagtacgccttcgcctgcgccctgctcgcctccatgaactccgtcctcctcggctatgacatctcggtgatgagcggcgcgcagctgttcatgaaggaggacctcaagatcacggacacgcagatcgagatcctcgccggcgtcatcaacatctactcgctcttcggctccctcgccgcgggcctcacctccgactggctcggccgccgctacaccatggtgctggcggccgccatcttcttcacgggcgcgctcctcatgggcctcgccccggactacgggttcctcatggcgggccgcttcgtggccggcatcggcgtcggcttcgcgctcatgatcgcccccgtgtacaccgccgaggtggcgcccacctccgcgcgcggcttcctcacctccttcccggaggtcttcaacaacttcggcatcctcctcggctacgtctccaacttcgccttcgcgcgcctgcccgtccacctcagctggcgcgccatgttcctggtcggcgccgtgccgcccgtcttcctcggcgtcgccgtcctcgccatgccggagtcgccgcgctggctcgtcatgcggggccgcatcgacgacgcgcgccgcgtgctgcagaagacctccgactcccccgccgaggccgaggagcgtctgctcgacatcaagaaggtggtcggcatccccgagggcgtgaccgacgccgacgacgtggccgccatcgtccgcgccagcagcaaggcatcgtcgtcgtcgtcgtcgtcgcgccacgacggggtgtggaaggagctgctcatcaacccttcccgccccgtgcgccgcatgctcgtggcggggctcggcctcatgttcatccagcaggccacgggcgtggactgcgtggtgatgtacagcccgcgggtgttcgagcgggcgggcatcaagtccaagaccaactcgctgggcgcgtccatggcggtgggcgcgtgcaagaccttcttcatacccatctccacgctgctcctggaccgcatcggccgccgcccgctgctgctggccagcggcggcgggatgaccatcttcctcttcacgctggccacgtccttgcacatgatggaccggcgccccgagggggaggccgcggcactgggcgcggtgagcatcgcggccatgctgtcgttcgtggcgtcgttcgcgtccggcctgggccccgtcgcctgggtctactgctccgagatctacccgctgcggctgcgcgcgcaggctgctgccatcggcacggggctcaaccggatcatgagcggcgccaccaccatgtccttcctctcgctctccaacgccatcaccatcgccggcagcttctacctctacgcgtgcatcgccgccgcaggctgggtgttcatgtacttcttcctgccggagaccatgggcaggagcctggaggacaccgtgaagctcttcggcaaggacgcggacgacgaggacgtcggcgacagccgtcgtcacgcgcccagtaagaagccctccacttccactgagcttgagctcagtgctcagcactgagtgatgtgccatgcaacacgtgtcctcccgagtgtgaccgaagcttatgtctaaagcttcgatgatacagtctactcctagtatcttgtgtgctcgaactgtggtgaatcttttgtagatcc

SEQ ID NO: 8742 - protein, 544 aa, Zea mays subsp. mays
  peptide (1)..(544): Ceres Seq. ID no. 12382114
  misc_feature (40)..(511): Pfam Name: Sugar (and other) transporter Pfam Description: Sugar (and other) transporter
  misc_feature (8)..(529): Homolog of NCBI NO: 15230212 NR Description: sugar transport, putative; protein id: [Arabidopsis thaliana] >gi|9293909|dbj|BAB01812.1| sugar
  misc_feature (7)..(531): Homolog of NCBI NO: 16118827 NR Description: putative sugar transporter [Oryza sativa]
  misc_feature (15)..(512): Homolog of NCBI NO: 15226682 NR Description: putative sugar transporter; protein id: [Arabidopsis thaliana] >gi|25308957|pir||H84536 probable sugar
  misc_feature (27)..(513): Homolog of NCBI NO: 30025133 NR Description: putative sorbitol transporter [Prunus cerasus]
  misc_feature (14)..(512): Homolog of NCBI NO: 12004316 NR Description: mannitol transporter [Apium graveolens var. dulce]
  misc_feature (14)..(512): Homolog of NCBI NO: 15226696 NR Description: putative sugar transporter; protein id: [Arabidopsis thaliana] >gi|25308959|pir||A84537 probable sugar
  misc_feature (27)..(511): Homolog of NCBI NO: 1778095 NR Description: putative sugar transporter; member of major
  misc_feature (27)..(511): Homolog of NCBI NO: 7484647 NR Description: probable sugar transport protein 205 - beet putative sugar transporter; member of major facilitative
  misc_feature (29)..(513): Homolog of NCBI NO: 28316433 NR Description: sorbitol transporter [Prunus cerasus]
  misc_feature (55)..(542): Homolog of NCBI NO: 34905902 NR Description: similar to myo-inositol transporter 2 [Oryza
HLHRRGADNHLATMSTGTDAVPVAVAPAKRPPINKYAFACALLASMNSVLLGYDISVMSGAQLFMKEDLKITDTQIEILAGVINIYSLFGSLAAGLTSDWLGRRYTMVLAAAIFFTGALLMGLAPDYGFLMAGRFVAGIGVGFALMIAPVYTAEVAPTSARGFLTSFPEVFNNFGILLGYVSNFAFARLPVHLSWRAMFLVGAVPPVFLGVAVLAMPESPRWLVMRGRIDDARRVLQKTSDSPAEAEERLLDIKKVVGIPEGVTDADDVAAIVRASSKASSSSSSSRHDGVWKELLINPSRPVRRMLVAGLGLMFIQQATGVDCVVMYSPRVFERAGIKSKTNSLGASMAVGACKTFFIPISTLLLDRIGRRPLLLASGGGMTIFLFTLATSLHMMDRRPEGEAAALGAVSIAAMLSFVASFASGLGPVAWVYCSEIYPLRLRAQAAAIGTGLNRIMSGATTMSFLSLSNAITIAGSFYLYACIAAAGWVFMYFFLPETMGRSLEDTVKLFGKDADDEDVGDSRRHAPSKKPSTSTELELSAQH

SEQ ID NO: 8743 - protein, 531 aa, Zea mays subsp. mays
  peptide (1)..(531): Ceres Seq. ID no. 12382115
  misc_feature (27)..(498): Pfam Name: Sugar (and other) transporter Pfam Description: Sugar (and other) transporter
  misc_feature (1)..(516): Homolog of NCBI NO: 15230212 NR Description: sugar transport, putative; protein id: [Arabidopsis thaliana] >gi|9293909|dbj|BAB01812.1| sugar
  misc_feature (1)..(518): Homolog of NCBI NO: 16118827 NR Description: putative sugar transporter [Oryza sativa]
  misc_feature (2)..(499): Homolog of NCBI NO: 15226682 NR Description: putative sugar transporter; protein id: [Arabidopsis thaliana] >gi|25308957|pir||H84536 probable sugar
  misc_feature (14)..(500): Homolog of NCBI NO: 30025133 NR Description: putative sorbitol transporter [Prunus cerasus]
  misc_feature (1)..(499): Homolog of NCBI NO: 12004316 NR Description: mannitol transporter [Apium graveolens var. dulce]
  misc_feature (1)..(499): Homolog of NCBI NO: 15226696 NR Description: putative sugar transporter; protein id: [Arabidopsis thaliana] >gi|25308959|pir||A84537 probable sugar
  misc_feature (14)..(498): Homolog of NCBI NO: 1778095 NR Description: putative sugar transporter; member of major
  misc_feature (14)..(498): Homolog of NCBI NO: 7484647 NR Description: probable sugar transport protein 205 - beet putative sugar transporter; member of major facilitative
  misc_feature (16)..(500): Homolog of NCBI NO: 28316433 NR Description: sorbitol transporter [Prunus cerasus]
  misc_feature (42)..(529): Homolog of NCBI NO: 34905902 NR Description: similar to myo-inositol transporter 2 [Oryza
MSTGTDAVPVAVAPAKRPPINKYAFACALLASMNSVLLGYDISVMSGAQLFMKEDLKITDTQIEILAGVINIYSLFGSLAAGLTSDWLGRRYTMVLAAAIFFTGALLMGLAPDYGFLMAGRFVAGIGVGFALMIAPVYTAEVAPTSARGFLTSFPEVFNNFGILLGYVSNFAFARLPVHLSWRAMFLVGAVPPVFLGVAVLAMPESPRWLVMRGRIDDARRVLQKTSDSPAEAEERLLDIKKVVGIPEGVTDADDVAAIVRASSKASSSSSSSRHDGVWKELLINPSRPVRRMLVAGLGLMFIQQATGVDCVVMYSPRVFERAGIKSKTNSLGASMAVGACKTFFIPISTLLLDRIGRRPLLLASGGGMTIFLFTLATSLHMMDRRPEGEAAALGAVSIAAMLSFVASFASGLGPVAWVYCSEIYPLRLRAQAAAIGTGLNRIMSGATTMSFLSLSNAITIAGSFYLYACIAAAGWVFMYFFLPETMGRSLEDTVKLFGKDADDEDVGDSRRHAPSKKPSTSTELELSAQH

SEQ ID NO: 8744 - protein, 499 aa, Zea mays subsp. mays
  peptide (1)..(499): Ceres Seq. ID no. 12382116
  misc_feature (1)..(466): Pfam Name: Sugar (and other) transporter Pfam Description: Sugar (and other) transporter
  misc_feature (1)..(484): Homolog of NCBI NO: 15230212 NR Description: sugar transport, putative; protein id: [Arabidopsis thaliana] >gi|9293909|dbj|BAB01812.1| sugar
  misc_feature (1)..(486): Homolog of NCBI NO: 16118827 NR Description: putative sugar transporter [Oryza sativa]
  misc_feature (1)..(467): Homolog of NCBI NO: 15226682 NR Description: putative sugar transporter; protein id: [Arabidopsis thaliana] >gi|25308957|pir||H84536 probable sugar
  misc_feature (1)..(468): Homolog of NCBI NO: 30025133 NR Description: putative sorbitol transporter [Prunus cerasus]
  misc_feature (1)..(467): Homolog of NCBI NO: 12004316 NR Description: mannitol transporter [Apium graveolens var. dulce]
  misc_feature (1)..(467): Homolog of NCBI NO: 15226696 NR Description: putative sugar transporter; protein id: [Arabidopsis thaliana] >gi|25308959|pir||A84537 probable sugar
  misc_feature (1)..(466): Homolog of NCBI NO: 1778095 NR Description: putative sugar transporter; member of major
  misc_feature (1)..(466): Homolog of NCBI NO: 7484647 NR Description: probable sugar transport protein 205 - beet putative sugar transporter; member of major facilitative
  misc_feature (1)..(468): Homolog of NCBI NO: 28316433 NR Description: sorbitol transporter [Prunus cerasus]
  misc_feature (10)..(497): Homolog of NCBI NO: 34905902 NR Description: similar to myo-inositol transporter 2 [Oryza
MNSVLLGYDISVMSGAQLFMKEDLKITDTQIEILAGVINIYSLFGSLAAGLTSDWLGRRYTMVLAAAIFFTGALLMGLAPDYGFLMAGRFVAGIGVGFALMIAPVYTAEVAPTSARGFLTSFPEVFNNFGILLGYVSNFAFARLPVHLSWRAMFLVGAVPPVFLGVAVLAMPESPRWLVMRGRIDDARRVLQKTSDSPAEAEERLLDIKKVVGIPEGVTDADDVAAIVRASSKASSSSSSSRHDGVWKELLINPSRPVRRMLVAGLGLMFIQQATGVDCVVMYSPRVFERAGIKSKTNSLGASMAVGACKTFFIPISTLLLDRIGRRPLLLASGGGMTIFLFTLATSLHMMDRRPEGEAAALGAVSIAAMLSFVASFASGLGPVAWVYCSEIYPLRLRAQAAAIGTGLNRIMSGATTMSFLSLSNAITIAGSFYLYACIAAAGWVFMYFFLPETMGRSLEDTVKLFGKDADDEDVGDSRRHAPSKKPSTSTELELSAQH

SEQ ID NO: 8745 - DNA, 1572 bp, Zea mays subsp. mays
  misc_feature (1)..(1572): Ceres Seq. ID no. 12354017
  misc_feature: MA Experiment ID: 108689 Result: Up-regulated in Transcription
  misc_feature: MA Experiment 108689 PARAMETER Experiment Name: Zm_Drought_Roots_P Parameter: Age (day) Value: 9
  misc_feature: MA Experiment 108689 PARAMETER Experiment Name: Zm_Drought_Roots_P Parameter: Organism Value: Zea mays
  misc_feature: MA Experiment 108689 PARAMETER Experiment Name: Zm_Drought_Roots_P Parameter: Plant Line Value: 35A19
  misc_feature: MA Experiment 108689 PARAMETER Experiment Name: Zm_Drought_Roots_P Parameter: Timepoint (hr) Value: 24
  misc_feature: MA Experiment 108689 PARAMETER Experiment Name: Zm_Drought_Roots_P Parameter: Tissue Value: Roots
  misc_feature: MA Experiment 108689 PARAMETER Experiment Name: Zm_Drought_Roots_P Parameter: Treatment Value: Drought vs. No Drought
aaccgaaacggaaccttttattttcccgtcccgcgttctcccccaccgtcccgcgtccgccgtgcctccccaccggcggccaccgctaccggcccacctatctccggcacccggcgctcctcaccctcccttctccacgcgatggcgattcgccgcggcggtagccagtcctacggcttcccgatctactgcgccgcctggctcccgctcgcccacatcctgaagcccgaccgtcccgccgccgaggcggacgcggatgccccctcaccctcccctcccccgcctccgatggttttgctcgggggcggtggtgggaagggacggaacggcgtgccgaacaagctcgtgatggcggccctcgccgccggcgaagaggccgcgccggccctctcccccgatacggtgattgaggtgaggacccaagaggaggtgccgtacaaaatggccgtacaccctcgcggcgacggcgtgttctgcgctttccccaacggctgcaagttgtatcgatgggaatcacaggaaggagaggggctacagaacttgtctttggagccagaccaggaagctttagcggagctgaaagaagatggtttgcagttggccatatccttcagtcaagaaggttcaatacttgccattggtggtgaagatgggcatttaagagtcttcaagtggccggctatggcgcctgttctcacagaaactgatactaaaacatcaattaaggatcttaccatcagttccgatgagaggtttattgccgtgaataggagcagtggcccatgcagagtgtgggatttgcattcatctgaagttgtagccagtctgccaagagaagcaggggaaatgtttggattctgcagattttgtaataaggcagacaacagtcatgtcctatttataacagcaatggaaggtgattatggaaaaatagtatcttggaatactacctcatggacaagaacagggtcaaagaaaataactcgtgaggcaatttcagcttttgcggtgtcgccccaacggtgctctccttgcaattggaacaatcgaaggaagcgtcgtcatagtcgactcaaaagacatgcggacacttgtaacagttaaaaaggcccatcttggtgttgtgactacactgtccttctctcaggattcaagaacattgctgtcaacttcctttgactctactgcaagggtgacgtacgttggttccccgaagagtaatggaacaagtatatggcccatcctactagctatcattcttgcagttttagtgtactactgtatgcagcacaaagaagacattctggcgatgttgccgcgttgagatagatttctgttgagccccaccgctcccctgactgatctactctactggacatattagtagtgttgcttcagagattggacaagttttggacttaggtcaacttcattattttctcaaggatacaacaatacagcaaaaggtgttgagccctttcatgtttgtagtagaaagggtcatgtactcaggttgtccaagttttgtaagttgatgatggccgcaagtgatagtcatctgtgtttatgttt

SEQ ID NO: 8746 - protein, 367 aa, Zea mays subsp. mays
  peptide (1)..(367): Ceres Seq. ID no. 12354018
  misc_feature (56)..(338): Homolog of NCBI NO: 15226281 NR Description: putative protein transport protein SEC12p; id: At2g01470.1, supported by cDNA: gi_166877, supported by cDNA: [Arabidopsis thaliana] >gi|25410908|pir||B84425 probable protein
  misc_feature (56)..(338): Homolog of NCBI NO: 11358859 NR Description: St12p protein [imported] - Arabidopsis thaliana
  misc_feature (56)..(338): Homolog of NCBI NO: 18423177 NR Description: St12p protein; protein id: At5g50550.1 thaliana] >gi|22327692|ref|NP_680414.1| St12p protein; protein At5g50650.1 [Arabidopsis thaliana] >gi|9758764|dbj|BAB09140.1|
  misc_feature (56)..(338): Homolog of NCBI NO: 8777388 NR Description: protein transport protein SEC12p-like
  misc_feature (56)..(338): Homolog of NCBI NO: 322598 NR Description: St12p protein - Arabidopsis thaliana
  misc_feature (56)..(316): Homolog of NCBI NO: 17473926 NR Description: putative protein transport protein SEC12p
  misc_feature (143)..(338): Homolog of NCBI NO: 34394605 NR Description: transducin / WD-40 repeat protein-like [Oryza
  misc_feature (112)..(338): Homolog of NCBI NO: 34897162 NR Description: putative membrane protein [Oryza sativa (japonica group)] >gi|28209528|gb|AAO37546.1| putative membrane protein
  misc_feature (126)..(338): Homolog of NCBI NO: 18409509 NR Description: expressed protein; protein id: At3g52190.1, by cDNA: 124263. [Arabidopsis thaliana] >gi|11357774|pir||T49098
  misc_feature (202)..(338): Homolog of NCBI NO: 26450470 NR Description: unknown protein [Arabidopsis thaliana]
NRNGTFYFPVPRSPPPSRVRRASPPAATATGPPISGTRRSSPSLLHAMAIRRGGSQSYGFPIYCAAWLPLAHILKPDRPAAEADADAPSPSPPPPPMVLLGGGGGKGRNGVPNKLVMAALAAGEEAAPALSPDTVIEVRTQEEVPYKMAVHPRGDGVFCAFPNGCKLYRWESQEGEGLQNLSLEPDQEALAELKEDGLQLAISFSQEGSILAIGGEDGHLRVFKWPAMAPVLTETDTKTSIKDLTISSDERFIAVNRSSGPCRVWDLHSSEVVASLPREAGEMFGFCRFCNKADNSHVLFITAMEGDYGKIVSWNTTSWTRTGSKKITREAISAFAVSPQRCSPCNWNNRRKRRHSRLKRHADTCNS

SEQ ID NO: 8747 - protein, 320 aa, Zea mays subsp. mays
  peptide (1)..(320): Ceres Seq. ID no. 12354019
  misc_feature (9)..(291): Homolog of NCBI NO: 15226281 NR Description: putative protein transport protein SEC12p; id: At2g01470.1, supported by cDNA: gi_166877, supported by cDNA: [Arabidopsis thaliana] >gi|25410908|pir||B84425 probable protein
  misc_feature (9)..(291): Homolog of NCBI NO: 11358859 NR Description: St12p protein [imported] - Arabidopsis thaliana
  misc_feature (9)..(291): Homolog of NCBI NO: 18423177 NR Description: St12p protein; protein id: At5g50550.1 thaliana] >gi|22327692|ref|NP_680414.1| St12p protein; protein At5g50650.1 [Arabidopsis thaliana] >gi|9758764|dbj|BAB09140.1|
  misc_feature (9)..(291): Homolog of NCBI NO: 8777388 NR Description: protein transport protein SEC12p-like
  misc_feature (9)..(291): Homolog of NCBI NO: 322598 NR Description: St12p protein - Arabidopsis thaliana
  misc_feature (9)..(269): Homolog of NCBI NO: 17473926 NR Description: putative protein transport protein SEC12p
  misc_feature (96)..(291): Homolog of NCBI NO: 34394605 NR Description: transducin / WD-40 repeat protein-like [Oryza
  misc_feature (65)..(291): Homolog of NCBI NO: 34897162 NR Description: putative membrane protein [Oryza sativa (japonica group)] >gi|28209528|gb|AAO37546.1| putative membrane protein
  misc_feature (79)..(291): Homolog of NCBI NO: 18409509 NR Description: expressed protein; protein id: At3g52190.1, by cDNA: 124263. [Arabidopsis thaliana] >gi|11357774|pir||T49098
  misc_feature (155)..(291): Homolog of NCBI NO: 26450470 NR Description: unknown protein [Arabidopsis thaliana]
MAIRRGGSQSYGFPIYCAAWLPLAHILKPDRPAAEADADAPSPSPPPPPMVLLGGGGGKGRNGVPNKLVMAALAAGEEAAPALSPDTVIEVRTQEEVPYKMAVHPRGDGVFCAFPNGCKLYRWESQEGEGLQNLSLEPDQEALAELKEDGLQLAISFSQEGSILAIGGEDGHLRVFKWPAMAPVLTETDTKTSIKDLTISSDERFIAVNRSSGPCRVWDLHSSEVVASLPREAGEMFGFCRFCNKADNSHVLFITAMEGDYGKIVSWNTTSWTRTGSKKITREAISAFAVSPQRCSPCNWNNRRKRRHSRLKRHADTCNS

SEQ ID NO: 8748 - protein, 271 aa, Zea mays subsp. mays
  peptide (1)..(271): Ceres Seq. ID no. 12354020
  misc_feature (1)..(242): Homolog of NCBI NO: 15226281 NR Description: putative protein transport protein SEC12p; id: At2g01470.1, supported by cDNA: gi_166877, supported by cDNA: [Arabidopsis thaliana] >gi|25410908|pir||B84425 probable protein
  misc_feature (1)..(242): Homolog of NCBI NO: 11358859 NR Description: St12p protein [imported] - Arabidopsis thaliana
  misc_feature (1)..(242): Homolog of NCBI NO: 18423177 NR Description: St12p protein; protein id: At5g50550.1 thaliana] >gi|22327692|ref|NP_680414.1| St12p protein; protein At5g50650.1 [Arabidopsis thaliana] >gi|9758764|dbj|BAB09140.1|
  misc_feature (1)..(242): Homolog of NCBI NO: 8777388 NR Description: protein transport protein SEC12p-like
  misc_feature (1)..(242): Homolog of NCBI NO: 322598 NR Description: St12p protein - Arabidopsis thaliana
  misc_feature (1)..(220): Homolog of NCBI NO: 17473926 NR Description: putative protein transport protein SEC12p
  misc_feature (47)..(242): Homolog of NCBI NO: 34394605 NR Description: transducin / WD-40 repeat protein-like [Oryza
  misc_feature (16)..(242): Homolog of NCBI NO: 34897162 NR Description: putative membrane protein [Oryza sativa (japonica group)] >gi|28209528|gb|AAO37546.1| putative membrane protein
  misc_feature (30)..(242): Homolog of NCBI NO: 18409509 NR Description: expressed protein; protein id: At3g52190.1, by cDNA: 124263. [Arabidopsis thaliana] >gi|11357774|pir||T49098
  misc_feature (106)..(242): Homolog of NCBI NO: 26450470 NR Description: unknown protein [Arabidopsis thaliana]
MVLLGGGGGKGRNGVPNKLVMAALAAGEEAAPALSPDTVIEVRTQEEVPYKMAVHPRGDGVFCAFPNGCKLYRWESQEGEGLQNLSLEPDQEALAELKEDGLQLAISFSQEGSILAIGGEDGHLRVFKWPAMAPVLTETDTKTSIKDLTISSDERFIAVNRSSGPCRVWDLHSSEVVASLPREAGEMFGFCRFCNKADNSHVLFITAMEGDYGKIVSWNTTSWTRTGSKKITREAISAFAVSPQRCSPCNWNNRRKRRHSRLKRHADTCNS

SEQ ID NO: 8749 - DNA, 822 bp, Zea mays subsp. mays
  misc_feature (1)..(822): Ceres Seq. ID no. 12354021
  misc_feature: MA Experiment ID: 108503 Result: Down-regulated in Transcription
  misc_feature: MA Experiment 108503 PARAMETER Experiment Name: Zm_Drought_P Parameter: Age (day) Value: 8
  misc_feature: MA Experiment 108503 PARAMETER Experiment Name: Zm_Drought_P Parameter: Organism Value: Zea mays
  misc_feature: MA Experiment 108503 PARAMETER Experiment Name: Zm_Drought_P Parameter: Plant Line Value: 35A19
  misc_feature: MA Experiment 108503 PARAMETER Experiment Name: Zm_Drought_P Parameter: Timepoint (hr) Value: 6
  misc_feature: MA Experiment 108503 PARAMETER Experiment Name: Zm_Drought_P Parameter: Tissue Value: Aerial
  misc_feature: MA Experiment 108503 PARAMETER Experiment Name: Zm_Drought_P Parameter: Treatment Value: Drought vs. No Drought
  misc_feature: MA Experiment ID: 108504 Result: Down-regulated in Transcription
  misc_feature: MA Experiment 108504 PARAMETER Experiment Name: Zm_Drought_P Parameter: Age (day) Value: 8
  misc_feature: MA Experiment 108504 PARAMETER Experiment Name: Zm_Drought_P Parameter: Organism Value: Zea mays
  misc_feature: MA Experiment 108504 PARAMETER Experiment Name: Zm_Drought_P Parameter: Plant Line Value: 35A19
  misc_feature: MA Experiment 108504 PARAMETER Experiment Name: Zm_Drought_P Parameter: Timepoint (hr) Value: 12
  misc_feature: MA Experiment 108504 PARAMETER Experiment Name: Zm_Drought_P Parameter: Tissue Value: Aerial
  misc_feature: MA Experiment 108504 PARAMETER Experiment Name: Zm_Drought_P Parameter: Treatment Value: Drought vs. No Drought
  misc_feature: MA Experiment ID: 108522 Result: Down-regulated in Transcription
  misc_feature: MA Experiment 108522 PARAMETER Experiment Name: Zm_42deg_Heat_P Parameter: Age (day) Value: 8
  misc_feature: MA Experiment 108522 PARAMETER Experiment Name: Zm_42deg_Heat_P Parameter: Organism Value: Zea mays
  misc_feature: MA Experiment 108522 PARAMETER Experiment Name: Zm_42deg_Heat_P Parameter: Plant Line Value: 35A19
  misc_feature: MA Experiment 108522 PARAMETER Experiment Name: Zm_42deg_Heat_P Parameter: Temperature (deg C) Value: 42 vs. 22
  misc_feature: MA Experiment 108522 PARAMETER Experiment Name: Zm_42deg_Heat_P Parameter: Timepoint (hr) Value: 1
  misc_feature: MA Experiment 108522 PARAMETER Experiment Name: Zm_42deg_Heat_P Parameter: Tissue Value: Aerial
  misc_feature: MA Experiment ID: 108527 Result: Down-regulated in Transcription
  misc_feature: MA Experiment 108527 PARAMETER Experiment Name: Zm_5mM_NO_P Parameter: Age (day) Value: 8
  misc_feature: MA Experiment 108527 PARAMETER Experiment Name: Zm_5mM_NO_P Parameter: Organism Value: Zea mays
  misc_feature: MA Experiment 108527 PARAMETER Experiment Name: Zm_5mM_NO_P Parameter: Plant Line Value: 35A19
  misc_feature: MA Experiment 108527 PARAMETER Experiment Name: Zm_5mM_NO_P Parameter: Timepoint (hr) Value: 6
  misc_feature: MA Experiment 108527 PARAMETER Experiment Name: Zm_5mM_NO_P Parameter: Tissue Value: Aerial
  misc_feature: MA Experiment 108527 PARAMETER Experiment Name: Zm_5mM_NO_P Parameter: Treatment Value: 5mM NO vs. No Treatment
  misc_feature: MA Experiment ID: 108529 Result: Up-regulated in Transcription
  misc_feature: MA Experiment 108529 PARAMETER Experiment Name: Zm_Imbibed_Seeds_P Parameter: Age (day) Value: 5 vs. 2
  misc_feature: MA Experiment 108529 PARAMETER Experiment Name: Zm_Imbibed_Seeds_P Parameter: Organism Value: Zea mays
  misc_feature: MA Experiment 108529 PARAMETER Experiment Name: Zm_Imbibed_Seeds_P Parameter: Plant Line Value: 35A19
  misc_feature: MA Experiment 108529 PARAMETER Experiment Name: Zm_Imbibed_Seeds_P Parameter: Tissue Value: Roots vs. Embryo
  misc_feature: MA Experiment ID: 108530 Result: Up-regulated in Transcription
  misc_feature: MA Experiment 108530 PARAMETER Experiment Name: Zm_Imbibed_Seeds_P Parameter: Age (day) Value: 6 vs. 2
  misc_feature: MA Experiment 108530 PARAMETER Experiment Name: Zm_Imbibed_Seeds_P Parameter: Organism Value: Zea mays
  misc_feature: MA Experiment 108530 PARAMETER Experiment Name: Zm_Imbibed_Seeds_P Parameter: Plant Line Value: 35A19
  misc_feature: MA Experiment 108530 PARAMETER Experiment Name: Zm_Imbibed_Seeds_P Parameter: Tissue Value: Aerial vs. Embryo
  misc_feature: MA Experiment ID: 108534 Result: Down-regulated in Transcription
  misc_feature: MA Experiment 108534 PARAMETER Experiment Name: Zm_4deg_Cold_P Parameter: Age (hr) Value: 8
  misc_feature: MA Experiment 108534 PARAMETER Experiment Name: Zm_4deg_Cold_P Parameter: Organism Value: Zea mays
  misc_feature: MA Experiment 108534 PARAMETER Experiment Name: Zm_4deg_Cold_P Parameter: Plant Line Value: 35A19
  misc_feature: MA Experiment 108534 PARAMETER Experiment Name: Zm_4deg_Cold_P Parameter: Temperature (deg C) Value: 4 vs. 22
  misc_feature: MA Experiment 108534 PARAMETER Experiment Name: Zm_4deg_Cold_P Parameter: Timepoint (hr) Value: 6
  misc_feature: MA Experiment 108534 PARAMETER Experiment Name: Zm_4deg_Cold_P Parameter: Tissue Value: Aerial
  misc_feature: MA Experiment ID: 108536 Result: Down-regulated in Transcription
  misc_feature: MA Experiment 108536 PARAMETER Experiment Name: Zm_Meristem_P Parameter: Age (day) Value: 8
  misc_feature: MA Experiment 108536 PARAMETER Experiment Name: Zm_Meristem_P Parameter: Organism Value: Zea mays
  misc_feature: MA Experiment 108536 PARAMETER Experiment Name: Zm_Meristem_P Parameter: Plant Line Value: 35A19
  misc_feature: MA Experiment 108536 PARAMETER Experiment Name: Zm_Meristem_P Parameter: Tissue Value: Shoot Meristem vs. Above Shoot Meristem
  misc_feature: MA Experiment ID: 108540 Result: Down-regulated in Transcription
  misc_feature: MA Experiment 108540 PARAMETER Experiment Name: Zm_20percent_PEG_P Parameter: Age (day) Value: 8
  misc_feature: MA Experiment 108540 PARAMETER Experiment Name: Zm_20percent_PEG_P Parameter: Organism Value: Zea mays
  misc_feature: MA Experiment 108540 PARAMETER Experiment Name: Zm_20percent_PEG_P Parameter: Plant Line Value: 35A19
  misc_feature: MA Experiment 108540 PARAMETER Experiment Name: Zm_20percent_PEG_P Parameter: Timepoint (hr) Value: 6
  misc_feature: MA Experiment 108540 PARAMETER Experiment Name: Zm_20percent_PEG_P Parameter: Tissue Value: Aerial
  misc_feature: MA Experiment 108540 PARAMETER Experiment Name: Zm_20percent_PEG_P Parameter: Treatment Value: 20percent PEG vs. No Treatment
  misc_feature: MA Experiment ID: 108542 Result: Down-regulated in Transcription
  misc_feature: MA Experiment 108542 PARAMETER Experiment Name: Zm_150mM_NaCl_P Parameter: Age (day) Value: 8
  misc_feature: MA Experiment 108542 PARAMETER Experiment Name: Zm_150mM_NaCl_P Parameter: Organism Value: Zea mays
  misc_feature: MA Experiment 108542 PARAMETER Experiment Name: Zm_150mM_NaCl_P Parameter: Plant Line Value: 35A19
  misc_feature: MA Experiment 108542 PARAMETER Experiment Name: Zm_150mM_NaCl_P Parameter: Timepoint (hr) Value: 6
  misc_feature: MA Experiment 108542 PARAMETER Experiment Name: Zm_150mM_NaCl_P Parameter: Tissue Value: Aerial
  misc_feature: MA Experiment 108542 PARAMETER Experiment Name: Zm_150mM_NaCl_P Parameter: Treatment Value: 150mM NaCl vs. No Treatment
  misc_feature: MA Experiment ID: 108543 Result: Up-regulated in Transcription
  misc_feature: MA Experiment ID: 108545 Result: Up-regulated in Transcription
  misc_feature: MA Experiment 108545 PARAMETER Experiment Name: Zm_Imbibed_Seeds_P Parameter: Age (day) Value: 3 vs. 2
  misc_feature: MA Experiment 108545 PARAMETER Experiment Name: Zm_Imbibed_Seeds_P Parameter: Organism Value: Zea mays
  misc_feature: MA Experiment 108545 PARAMETER Experiment Name: Zm_Imbibed_Seeds_P Parameter: Plant Line Value: 35A19
  misc_feature: MA Experiment 108545 PARAMETER Experiment Name: Zm_Imbibed_Seeds_P Parameter: Tissue Value: Aerial vs. Embryo
  misc_feature: MA Experiment ID: 108546 Result: Up-regulated in Transcription
  misc_feature: MA Experiment 108546 PARAMETER Experiment Name: Zm_Imbibed_Seeds_P Parameter: Age (day) Value: 3 vs. 2
  misc_feature: MA Experiment 108546 PARAMETER Experiment Name: Zm_Imbibed_Seeds_P Parameter: Organism Value: Zea mays
  misc_feature: MA Experiment 108546 PARAMETER Experiment Name: Zm_Imbibed_Seeds_P Parameter: Plant Line Value: 35A19
  misc_feature: MA Experiment 108546 PARAMETER Experiment Name: Zm_Imbibed_Seeds_P Parameter: Tissue Value: Roots vs. Embryo
  misc_feature: MA Experiment ID: 108559 Result: Down-regulated in Transcription
  misc_feature: MA Experiment 108559 PARAMETER Experiment Name: Zm_5mM_NO_P Parameter: Age (day) Value: 8
  misc_feature: MA Experiment 108559 PARAMETER Experiment Name: Zm_5mM_NO_P Parameter: Organism Value: Zea mays
  misc_feature: MA Experiment 108559 PARAMETER Experiment Name: Zm_5mM_NO_P Parameter: Plant Line Value: 35A19
  misc_feature: MA Experiment 108559 PARAMETER Experiment Name: Zm_5mM_NO_P Parameter: Timepoint (hr) Value: 12
  misc_feature: MA Experiment 108559 PARAMETER Experiment Name: Zm_5mM_NO_P Parameter: Tissue Value: Aerial
  misc_feature: MA Experiment 108559 PARAMETER Experiment Name: Zm_5mM_NO_P Parameter: Treatment Value: 5mM NO vs. No Treatment
  misc_feature: MA Experiment ID: 108597 Result: Down-regulated in Transcription
  misc_feature: MA Experiment 108597 PARAMETER Experiment Name: Zm_100uM_ABA_P Parameter: Age (day) Value: 9
  misc_feature: MA Experiment 108597 PARAMETER Experiment Name: Zm_100uM_ABA_P Parameter: Organism Value: Zea mays
  misc_feature: MA Experiment 108597 PARAMETER Experiment Name: Zm_100uM_ABA_P Parameter: Plant Line Value: 35A19
  misc_feature: MA Experiment 108597 PARAMETER Experiment Name: Zm_100uM_ABA_P Parameter: Timepoint (hr) Value: 24
  misc_feature: MA Experiment 108597 PARAMETER Experiment Name: Zm_100uM_ABA_P Parameter: Tissue Value: Aerial
  misc_feature: MA Experiment 108597 PARAMETER Experiment Name: Zm_100uM_ABA_P Parameter: Treatment Value: 100uM ABA vs. No Treatment
  misc_feature: MA Experiment ID: 20000108 Result: Down-regulated in Transcription
  misc_feature: MA Experiment 20000108 PARAMETER Experiment Name: Zm_Root-Tips_P Parameter: Age (day) Value: 12
  misc_feature: MA Experiment 20000108 PARAMETER Experiment Name: Zm_Root-Tips_P Parameter: Organism Value: Zea mays
  misc_feature: MA Experiment 20000108 PARAMETER Experiment Name: Zm_Root-Tips_P Parameter: Tissue Value: Root tips vs. Root mid region    35
  misc_feature: MA Experiment 20000108 PARAMETER Experiment Name: Zm_Root-Tips_P Parameter: Tissue Value: Root tips vs. Root mid region   Sequence Listing-Misc Features (4)
  misc_feature: MA Experiment ID: 20000478 Result: Down-regulated in Transcription
  misc_feature: MA Experiment 20000478 PARAMETER Experiment Name: Zm_5mM_SA_P Parameter: Age (day) Value: 11
  misc_feature: MA Experiment 20000478 PARAMETER Experiment Name: Zm_5mM_SA_P Parameter: Organism Value: Zea mays
  misc_feature: MA Experiment 20000478 PARAMETER Experiment Name: Zm_5mM_SA_P Parameter: Plant Line Value: 35A19
  misc_feature: MA Experiment 20000478 PARAMETER Experiment Name: Zm_5mM_SA_P Parameter: Timepoint (hr) Value: 72
  misc_feature: MA Experiment 20000478 PARAMETER Experiment Name: Zm_5mM_SA_P Parameter: Tissue Value: Aerial
  misc_feature: MA Experiment 20000478 PARAMETER Experiment Name: Zm_5mM_SA_P Parameter: Treatment Value: 5mM SA vs. No Treatment
  misc_feature: MA Experiment ID: 20000532 Result: Down-regulated in Transcription
  misc_feature: MA Experiment 20000532 PARAMETER Experiment Name: Zm_0.001percent_MeJA_P Parameter: Age (day) Value: 10
  misc_feature: MA Experiment 20000532 PARAMETER Experiment Name: Zm_0.001percent_MeJA_P Parameter: Organism Value: Zea mays
  misc_feature: MA Experiment 20000532 PARAMETER Experiment Name: Zm_0.001percent_MeJA_P Parameter: Plant Line Value: 35A19
  misc_feature: MA Experiment 20000532 PARAMETER Experiment Name: Zm_0.001percent_MeJA_P Parameter: Timepoint (hr) Value: 48
  misc_feature: MA Experiment 20000532 PARAMETER Experiment Name: Zm_0.001percent_MeJA_P Parameter: Tissue Value: Aerial
  misc_feature: MA Experiment 20000532 PARAMETER Experiment Name: Zm_0.001percent_MeJA_P Parameter: Treatment Value: 0.001percent MeJA vs. No Treatment
  misc_feature: MA Experiment ID: 20000533 Result: Down-regulated in Transcription
  misc_feature: MA Experiment 20000533 PARAMETER Experiment Name: Zm_0.001percent_MeJA_P Parameter: Age (day) Value: 11
  misc_feature: MA Experiment 20000533 PARAMETER Experiment Name: Zm_0.001percent_MeJA_P Parameter: Organism Value: Zea mays
  misc_feature: MA Experiment 20000533 PARAMETER Experiment Name: Zm_0.001percent_MeJA_P Parameter: Plant Line Value: 35A19
  misc_feature: MA Experiment 20000533 PARAMETER Experiment Name: Zm_0.001percent_MeJA_P Parameter: Timepoint (hr) Value: 72
  misc_feature: MA Experiment 20000533 PARAMETER Experiment Name: Zm_0.001percent_MeJA_P Parameter: Tissue Value: Aerial
  misc_feature: MA Experiment 20000533 PARAMETER Experiment Name: Zm_0.001percent_MeJA_P Parameter: Treatment Value: 0.001percent MeJA vs. No Treatment
  misc_feature: MA Experiment ID: 20000535 Result: Down-regulated in Transcription
  misc_feature: MA Experiment 20000535 PARAMETER Experiment Name: Zm_Hybrid_Seed_Dev_P Parameter: DAP Value: 30 vs. 12
  misc_feature: MA Experiment 20000535 PARAMETER Experiment Name: Zm_Hybrid_Seed_Dev_P Parameter: Organism Value: Zea mays
  misc_feature: MA Experiment 20000535 PARAMETER Experiment Name: Zm_Hybrid_Seed_Dev_P Parameter: Plant Line Value: 35A19
  misc_feature: MA Experiment 20000535 PARAMETER Experiment Name: Zm_Hybrid_Seed_Dev_P Parameter: Tissue Value: Embryo vs. Unfert Floret
  misc_feature: MA Experiment ID: 20001608 Result: Down-regulated in Transcription
  misc_feature: MA Experiment 20001608 PARAMETER Experiment Name: Zm_50ppm_KNO3_L-to-H_P Parameter: Age (day) Value: 21
  misc_feature: MA Experiment 20001608 PARAMETER Experiment Name: Zm_50ppm_KNO3_L-to-H_P Parameter: Organism Value: Zea mays
  misc_feature: MA Experiment 20001608 PARAMETER Experiment Name: Zm_50ppm_KNO3_L-to-H_P Parameter: Plant Line Value: 35A19
  misc_feature: MA Experiment 20001608 PARAMETER Experiment Name: Zm_50ppm_KNO3_L-to-H_P Parameter: Timepoint (hr) Value: 48
  misc_feature: MA Experiment 20001608 PARAMETER Experiment Name: Zm_50ppm_KNO3_L-to-H_P Parameter: Tissue Value: Shoots
  misc_feature: MA Experiment 20001608 PARAMETER Experiment Name: Zm_50ppm_KNO3_L-to-H_P Parameter: Treatment Value: 50ppm KNO3 vs. 50ppm KCl
attcctgtcggcaaggtgaacgcgagagccgaccgtctcagtgtgcgcgcgaagaagagaaggaggaggaggaggaggaagaagtagaagaatgtatccggccaagcccaccgtcgccaccgccagcgagccggtaaccgggatggcggcgccgccggtgaccggcatcccgatcagcagccccggccccgcagtcgcggccagccagtggtcctcgggcctctgcgcctgcttcgacgactgcggcctctgctgcatgacgtgctggtgcccgtgcgtgacgttcgggcggatcgcggagatcgtggaccgcggcgcgacgtcgtgcgcggctgcggggggccatctacacgctgctggcctgcttcacggggttccagtgccactggatctactcctgcacgtaccgctccaagatgcgcgcgcagctggggctccccgacgtcggctgctgcgactgctgcgtccacttctgctgcgagccgtgcgcgctctgccagcagtacagggagctcagggcacgcggcttggaccccgcgctcggctgggacgtcaacgcccagaaggcggccaataataacgccggcgccggcatgacgatgtacccgccgacggcgcaggggatgggccgctaattacgctaccagctccatcggtaaactcatatgtgttgtgttgtgttgtgtcagccagatcatcgcgtacgtacgggtatacttgtgatatgtaatgtcagggaccggcatgcccatgtgtttcaagatatttcacgttcgagtcctttctgtccgctcactatccgaatgaaaatcattttccttg

SEQ ID NO: 8750 - protein, 161 aa, Zea mays subsp. mays
  peptide (1)..(161): Ceres Seq. ID no. 12354022
  misc_feature (19)..(92): Homolog of NCBI NO: 34897274 NR Description: hypothetical protein [Oryza sativa (japonica group)] >gi|28372695|gb|AAO39879.1| hypothetical protein [Oryza
  misc_feature (19)..(88): Homolog of NCBI NO: 34897270 NR Description: hypothetical protein [Oryza sativa (japonica group)] >gi|28372688|gb|AAO39872.1| hypothetical protein [Oryza
  misc_feature (36)..(88): Homolog of NCBI NO: 34897268 NR Description: unknown protein [Oryza sativa (japonica
  misc_feature (35)..(83): Homolog of NCBI NO: 15221456 NR Description: hypothetical protein; protein id: At1g68610.1
  misc_feature (36)..(88): Homolog of NCBI NO: 15223920 NR Description: unknown protein; protein id: At1g14870.1, by cDNA: gi_18252924 [Arabidopsis thaliana] F10B6.27 [Arabidopsis thaliana] >gi|18252925|gb|AAL62389.1|
  misc_feature (40)..(83): Homolog of NCBI NO: 4105794 NR Description: PGPS/D12 [Petunia x hybrida]
  misc_feature (6)..(96): Homolog of NCBI NO: 27414005 NR Description: fw2.2 [Lycopersicon pimpinellifolium] fw2.2 [Lycopersicon pimpinellifolium] >gi|27414009|gb|AAO12192.1| [Lycopersicon pimpinellifolium] >gi|27414011|gb|AAO12193.1| fw2.2
  misc_feature (6)..(96): Homolog of NCBI NO: 27414017 NR Description: fw2.2 [Lycopersicon pennellii]
  misc_feature (1)..(80): Homolog of NCBI NO: 37530512 NR Description: unknown protein [Oryza sativa (japonica
  misc_feature (18)..(96): Homolog of NCBI NO: 8272626 NR Description: ORFX [Lycopersicon esculentum] fw2.2 [Lycopersicon esculentum] >gi|27413997|gb|AAO12186.1| fw2.2 esculentum] >gi|27413999|gb|AAO12187.1| fw2.2 [Lycopersicon
MYPAKPTVATASEPVTGMAAPPVTGIPISSPGPAVAASQWSSGLCACFDDCGLCCMTCWCPCVTFGRIAEIVDRGATSCAAAGGHLHAAGLLHGVPVPLDLLLHVPLQDARAAGAPRRRLLRLLRPLLLRAVRALPAVQGAQGTRLGPRARLGRQRPEGGQ

SEQ ID NO: 8751 - protein, 144 aa, Zea mays subsp. mays
  peptide (1)..(144): Ceres Seq. ID no. 12354023
  misc_feature (2)..(75): Homolog of NCBI NO: 34897274 NR Description: hypothetical protein [Oryza sativa (japonica group)] >gi|28372695|gb|AAO39879.1| hypothetical protein [Oryza
  misc_feature (2)..(71): Homolog of NCBI NO: 34897270 NR Description: hypothetical protein [Oryza sativa (japonica group)] >gi|28372688|gb|AAO39872.1| hypothetical protein [Oryza
  misc_feature (19)..(71): Homolog of NCBI NO: 34897268 NR Description: unknown protein [Oryza sativa (japonica
  misc_feature (18)..(66): Homolog of NCBI NO: 15221456 NR Description: hypothetical protein; protein id: At1g68610.1
  misc_feature (19)..(71): Homolog of NCBI NO: 15223920 NR Description: unknown protein; protein id: At1g14870.1, by cDNA: gi_18252924 [Arabidopsis thaliana] F10B6.27 [Arabidopsis thaliana] >gi|18252925|gb|AAL62389.1|
  misc_feature (23)..(66): Homolog of NCBI NO: 4105794 NR Description: PGPS/D12 [Petunia x hybrida]
  misc_feature (1)..(79): Homolog of NCBI NO: 27414005 NR Description: fw2.2 [Lycopersicon pimpinellifolium] fw2.2 [Lycopersicon pimpinellifolium] >gi|27414009|gb|AAO12192.1| [Lycopersicon pimpinellifolium] >gi|27414011|gb|AAO12193.1| fw2.2
  misc_feature (1)..(79): Homolog of NCBI NO: 27414017 NR Description: fw2.2 [Lycopersicon pennellii]
  misc_feature (1)..(63): Homolog of NCBI NO: 37530512 NR Description: unknown protein [Oryza sativa (japonica
  misc_feature (1)..(79): Homolog of NCBI NO: 8272626 NR Description: ORFX [Lycopersicon esculentum] fw2.2 [Lycopersicon esculentum] >gi|27413997|gb|AAO12186.1| fw2.2 esculentum] >gi|27413999|gb|AAO12187.1| fw2.2 [Lycopersicon
MAAPPVTGIPISSPGPAVAASQWSSGLCACFDDCGLCCMTCWCPCVTFGRIAEIVDRGATSCAAAGGHLHAAGLLHGVPVPLDLLLHVPLQDARAAGAPRRRLLRLLRPLLLRAVRALPAVQGAQGTRLGPRARLGRQRPEGGQ

SEQ ID NO: 8752 - protein, 106 aa, Zea mays subsp. mays
  peptide (1)..(106): Ceres Seq. ID no. 12354024
  misc_feature (1)..(41): Homolog of NCBI NO: 27414017 NR Description: fw2.2 [Lycopersicon pennellii]
  misc_feature (1)..(25): Homolog of NCBI NO: 37530512 NR Description: unknown protein [Oryza sativa (japonica
  misc_feature (1)..(41): Homolog of NCBI NO: 8272626 NR Description: ORFX [Lycopersicon esculentum] fw2.2 [Lycopersicon esculentum] >gi|27413997|gb|AAO12186.1| fw2.2 esculentum] >gi|27413999|gb|AAO12187.1| fw2.2 [Lycopersicon
  misc_feature (1)..(37): Homolog of NCBI NO: 34897274 NR Description: hypothetical protein [Oryza sativa (japonica group)] >gi|28372695|gb|AAO39879.1| hypothetical protein [Oryza
  misc_feature (1)..(33): Homolog of NCBI NO: 34897270 NR Description: hypothetical protein [Oryza sativa (japonica group)] >gi|28372688|gb|AAO39872.1| hypothetical protein [Oryza
  misc_feature (1)..(33): Homolog of NCBI NO: 34897268 NR Description: unknown protein [Oryza sativa (japonica
  misc_feature (1)..(28): Homolog of NCBI NO: 15221456 NR Description: hypothetical protein; protein id: At1g68610.1
  misc_feature (1)..(33): Homolog of NCBI NO: 15223920 NR Description: unknown protein; protein id: At1g14870.1, by cDNA: gi_18252924 [Arabidopsis thaliana] F10B6.27 [Arabidopsis thaliana] >gi|18252925|gb|AAL62389.1|
  misc_feature (1)..(28): Homolog of NCBI NO: 4105794 NR Description: PGPS/D12 [Petunia x hybrida]
  misc_feature (1)..(41): Homolog of NCBI NO: 27414005 NR Description: fw2.2 [Lycopersicon pimpinellifolium] fw2.2 [Lycopersicon pimpinellifolium] >gi|27414009|gb|AAO12192.1| [Lycopersicon pimpinellifolium] >gi|27414011|gb|AAO12193.1| fw2.2
MTCWCPCVTFGRIAEIVDRGATSCAAAGGHLHAAGLLHGVPVPLDLLLHVPLQDARAAGAPRRRLLRLLRPLLLRAVRALPAVQGAQGTRLGPRARLGRQRPEGGQ

SEQ ID NO: 8753 - DNA, 1117 bp, Zea mays subsp. mays
  misc_feature (1)..(1117): Ceres Seq. ID no. 12355198
  misc_feature: MA Experiment ID: 108527 Result: Up-regulated in Transcription
  misc_feature: MA Experiment 108527 PARAMETER Experiment Name: Zm_5mM_NO_P Parameter: Age (day) Value: 8
  misc_feature: MA Experiment 108527 PARAMETER Experiment Name: Zm_5mM_NO_P Parameter: Organism Value: Zea mays
  misc_feature: MA Experiment 108527 PARAMETER Experiment Name: Zm_5mM_NO_P Parameter: Plant Line Value: 35A19
  misc_feature: MA Experiment 108527 PARAMETER Experiment Name: Zm_5mM_NO_P Parameter: Timepoint (hr) Value: 6
  misc_feature: MA Experiment 108527 PARAMETER Experiment Name: Zm_5mM_NO_P Parameter: Tissue Value: Aerial
  misc_feature: MA Experiment 108527 PARAMETER Experiment Name: Zm_5mM_NO_P Parameter: Treatment Value: 5mM NO vs. No Treatment
  misc_feature: MA Experiment ID: 108532 Result: Down-regulated in Transcription
  misc_feature: MA Experiment 108532 PARAMETER Experiment Name: Zm_20uM_KNO3_H-to-L_P Parameter: Age (day) Value: 11
  misc_feature: MA Experiment 108532 PARAMETER Experiment Name: Zm_20uM_KNO3_H-to-L_P Parameter: Organism Value: Zea mays
  misc_feature: MA Experiment 108532 PARAMETER Experiment Name: Zm_20uM_KNO3_H-to-L_P Parameter: Plant Line Value: 35A19
  misc_feature: MA Experiment 108532 PARAMETER Experiment Name: Zm_20uM_KNO3_H-to-L_P Parameter: Timepoint (hr) Value: 16
  misc_feature: MA Experiment 108532 PARAMETER Experiment Name: Zm_20uM_KNO3_H-to-L_P Parameter: Tissue Value: Roots
  misc_feature: MA Experiment 108532 PARAMETER Experiment Name: Zm_20uM_KNO3_H-to-L_P Parameter: Treatment Value: 20uM KNO3 vs. 60mM KNO3
  misc_feature: MA Experiment ID: 20000478 Result: Up-regulated in Transcription
  misc_feature: MA Experiment 20000478 PARAMETER Experiment Name: Zm_5mM_SA_P Parameter: Age (day) Value: 11
  misc_feature: MA Experiment 20000478 PARAMETER Experiment Name: Zm_5mM_SA_P Parameter: Organism Value: Zea mays
  misc_feature: MA Experiment 20000478 PARAMETER Experiment Name: Zm_5mM_SA_P Parameter: Plant Line Value: 35A19
  misc_feature: MA Experiment 20000478 PARAMETER Experiment Name: Zm_5mM_SA_P Parameter: Timepoint (hr) Value: 72
  misc_feature: MA Experiment 20000478 PARAMETER Experiment Name: Zm_5mM_SA_P Parameter: Tissue Value: Aerial
  misc_feature: MA Experiment 20000478 PARAMETER Experiment Name: Zm_5mM_SA_P Parameter: Treatment Value: 5mM SA vs. No Treatment
ccccgagccgcaaacctgcaaccaccttcccaaatcctagttctcgcttctcgtcgtctagcctcggcccgttccaaaagccccgcagctctcgcatctcatcagacgccaccaccacctccggcgaccgaaagatgatctctccggatgcagcccgcaacgtcgtaggcatcatcggcaatgtcatctccttcggcctcttcctctccccagtgctgacgttctggcggatctgcaaggccagggacgtggaggagtttaagcctgacccctacctggcgacgctgctcaactgcatgctctgggtgttctacggcatccccgtcgtccaccccaacagcatcctcgtcgtcaccatcaacggcgtcgggctcgtcatcgaggccatctacctcaccatcttcttcctttactctgatggcccgaaacgcaggaaagcgttcggaatcctggccgtggagattttgttcatggtcgccgtggtgcttggtgtgattttgggcgcccacacgcacgagaagcgctccatgatcgtcggcattctctgcgtcattttcggctcgatgatgtacgcctccccactcaccattatgagccgtgtgatcaagaccaagagcgttgagtacatgcccttcctcctctcgctggtgagcttcctcaatggctgctgctggacggcctacgcgctcatccgcttcgacctctacgttacgatccccaacgcccttggcgccttcttcggcctcatccagctaatcctctacttctgctactacaagtcgacccccaaggagaagaatgtggagctgcccaccgtctccagcaacgccggcggcggcaacgtcaccgtcagcgtcgagcgataggcgacgtagctgcagcggcagcgccgccgcccgtcgagaaagaactcgacgagacgtactttagcaatagtagttgccattcatcgctcttctaggatggtttgttttaagtgagtgctacctagttttgcccggtgcgtgtcgtgtcaaagaacagttaggggtgtttggttcacccaattaaataaagttaaagtttagtatttgctctgaatgtttgaatagtaattatgactattaaatatagtttt

SEQ ID NO: 8754 - protein, 287 aa, Zea mays subsp. mays
  peptide (1)..(287): Ceres Seq. ID no. 12355199
  misc_feature (53)..(142): Pfam Name: MtN3/saliva family Pfam Description: MtN3/saliva family
  misc_feature (45)..(287): Homolog of NCBI NO: 34912462 NR Description: MtN3-like protein [Oryza sativa (japonica
  misc_feature (45)..(287): Homolog of NCBI NO: 34912454 NR Description: P0681B11.31 [Oryza sativa (japonica
  misc_feature (45)..(268): Homolog of NCBI NO: 18405611 NR Description: Expressed protein; protein id: At3g28007.1, by cDNA: 22745., supported by cDNA: gi_16226221 [Arabidopsis >gi|16226222|gb|AAL16107.1|AF428275_1 unknown protein
  misc_feature (45)..(268): Homolog of NCBI NO: 21592355 NR Description: contains similarity to nodulin MtN3 protein
  misc_feature (52)..(263): Homolog of NCBI NO: 18413388 NR Description: putative protein; protein id: At4g10850.1, by cDNA: 33161. [Arabidopsis thaliana] contains similarity to Medicago truncatula MtN3 (GB:Y08726)
  misc_feature (45)..(276): Homolog of NCBI NO: 18421965 NR Description: putative protein; protein id: At5g40260.1, by cDNA: 11922. [Arabidopsis thaliana] contains similarity to MtN3 [Arabidopsis thaliana]
  misc_feature (45)..(238): Homolog of NCBI NO: 10177463 NR Description: contains similarity to MtN3
  misc_feature (83)..(261): Homolog of NCBI NO: 431154 NR Description: ORF [Lilium longiflorum]
  misc_feature (52)..(261): Homolog of NCBI NO: 15219732 NR Description: hypothetical protein; protein id: At1g66770.1 thaliana] >gi|12597757|gb|AAG60070.1|AC013288_4 hypothetical
  misc_feature (83)..(268): Homolog of NCBI NO: 11994120 NR Description: contains similarity to nodulin MtN3
PSRKPATTFPNPSSRFSSSSLGPFQKPRSSRISSDATTTSGDRKMISPDAARNVVGIIGNVISFGLFLSPVLTFWRICKARDVEEFKPDPYLATLLNCMLWVFYGIPVVHPNSILVVTINGVGLVIEAIYLTIFFLYSDGPKRRKAFGILAVEILFMVAVVLGVILGAHTHEKRSMIVGILCVIFGSMMYASPLTIMSRVIKTKSVEYMPFLLSLVSFLNGCCWTAYALIRFDLYVTIPNALGAFFGLIQLILYFCYYKSTPKEKNVELPTVSSNAGGGNVTVSVER

SEQ ID NO: 8755 - protein, 243 aa, Zea mays subsp. mays
  peptide (1)..(243): Ceres Seq. ID no. 12355200
  misc_feature (9)..(98): Pfam Name: MtN3/saliva family Pfam Description: MtN3/saliva family
  misc_feature (1)..(243): Homolog of NCBI NO: 34912462 NR Description: MtN3-like protein [Oryza sativa (japonica
  misc_feature (1)..(243): Homolog of NCBI NO: 34912454 NR Description: P0681B11.31 [Oryza sativa (japonica
  misc_feature (1)..(224): Homolog of NCBI NO: 18405611 NR Description: Expressed protein; protein id: At3g28007.1, by cDNA: 22745., supported by cDNA: gi_16226221 [Arabidopsis >gi|16226222|gb|AAL16107.1|AF428275_1 unknown protein
  misc_feature (1)..(224): Homolog of NCBI NO: 21592355 NR Description: contains similarity to nodulin MtN3 protein
  misc_feature (8)..(219): Homolog of NCBI NO: 18413388 NR Description: putative protein; protein id: At4g10850.1, by cDNA: 33161. [Arabidopsis thaliana] contains similarity to Medicago truncatula MtN3 (GB:Y08726)
  misc_feature (1)..(232): Homolog of NCBI NO: 18421965 NR Description: putative protein; protein id: At5g40260.1, by cDNA: 11922. [Arabidopsis thaliana] contains similarity to MtN3 [Arabidopsis thaliana]
  misc_feature (1)..(194): Homolog of NCBI NO: 10177463 NR Description: contains similarity to MtN3
  misc_feature (39)..(217): Homolog of NCBI NO: 431154 NR Description: ORF [Lilium longiflorum]
  misc_feature (8)..(217): Homolog of NCBI NO: 15219732 NR Description: hypothetical protein; protein id: At1g66770.1 thaliana] >gi|12597757|gb|AAG60070.1|AC013288_4 hypothetical
  misc_feature (39)..(224): Homolog of NCBI NO: 11994120 NR Description: contains similarity to nodulin MtN3
MISPDAARNVVGIIGNVISFGLFLSPVLTFWRICKARDVEEFKPDPYLATLLNCMLWVFYGIPVVHPNSILVVTINGVGLVIEAIYLTIFFLYSDGPKRRKAFGILAVEILFMVAVVLGVILGAHTHEKRSMIVGILCVIFGSMMYASPLTIMSRVIKTKSVEYMPFLLSLVSFLNGCCWTAYALIRFDLYVTIPNALGAFFGLIQLILYFCYYKSTPKEKNVELPTVSSNAGGGNVTVSVER

SEQ ID NO: 8756 - protein, 189 aa, Zea mays subsp. mays
  peptide (1)..(189): Ceres Seq. ID no. 12355201
  misc_feature (1)..(189): Homolog of NCBI NO: 34912462 NR Description: MtN3-like protein [Oryza sativa (japonica
  misc_feature (1)..(189): Homolog of NCBI NO: 34912454 NR Description: P0681B11.31 [Oryza sativa (japonica
  misc_feature (1)..(170): Homolog of NCBI NO: 18405611 NR Description: Expressed protein; protein id: At3g28007.1, by cDNA: 22745., supported by cDNA: gi_16226221 [Arabidopsis >gi|16226222|gb|AAL16107.1|AF428275_1 unknown protein
  misc_feature (1)..(170): Homolog of NCBI NO: 21592355 NR Description: contains similarity to nodulin MtN3 protein
  misc_feature (1)..(165): Homolog of NCBI NO: 18413388 NR Description: putative protein; protein id: At4g10850.1, by cDNA: 33161. [Arabidopsis thaliana] contains similarity to Medicago truncatula MtN3 (GB:Y08726)
  misc_feature (1)..(178): Homolog of NCBI NO: 18421965 NR Description: putative protein; protein id: At5g40260.1, by cDNA: 11922. [Arabidopsis thaliana] contains similarity to MtN3 [Arabidopsis thaliana]
  misc_feature (1)..(140): Homolog of NCBI NO: 10177463 NR Description: contains similarity to MtN3
  misc_feature (1)..(163): Homolog of NCBI NO: 431154 NR Description: ORF [Lilium longiflorum]
  misc_feature (1)..(163): Homolog of NCBI NO: 15219732 NR Description: hypothetical protein; protein id: At1g66770.1 thaliana] >gi|12597757|gb|AAG60070.1|AC013288_4 hypothetical
  misc_feature (1)..(170): Homolog of NCBI NO: 11994120 NR Description: contains similarity to nodulin MtN3
MLWVFYGIPVVHPNSILVVTINGVGLVIEAIYLTIFFLYSDGPKRRKAFGILAVEILFMVAVVLGVILGAHTHEKRSMIVGILCVIFGSMMYASPLTIMSRVIKTKSVEYMPFLLSLVSFLNGCCWTAYALIRFDLYVTIPNALGAFFGLIQLILYFCYYKSTPKEKNVELPTVSSNAGGGNVTVSVER

SEQ ID NO: 8757 - DNA, 1005 bp, Zea mays subsp. mays
  misc_feature (1)..(1005): Ceres Seq. ID no. 12348092
  misc_feature: MA Experiment ID: 108527 Result: Up-regulated in Transcription
  misc_feature: MA Experiment 108527 PARAMETER Experiment Name: Zm_5mM_NO_P Parameter: Age (day) Value: 8
  misc_feature: MA Experiment 108527 PARAMETER Experiment Name: Zm_5mM_NO_P Parameter: Organism Value: Zea mays
  misc_feature: MA Experiment 108527 PARAMETER Experiment Name: Zm_5mM_NO_P Parameter: Plant Line Value: 35A19
  misc_feature: MA Experiment 108527 PARAMETER Experiment Name: Zm_5mM_NO_P Parameter: Timepoint (hr) Value: 6
  misc_feature: MA Experiment 108527 PARAMETER Experiment Name: Zm_5mM_NO_P Parameter: Tissue Value: Aerial
  misc_feature: MA Experiment 108527 PARAMETER Experiment Name: Zm_5mM_NO_P Parameter: Treatment Value: 5mM NO vs. No Treatment
  misc_feature: MA Experiment ID: 108542 Result: Up-regulated in Transcription
  misc_feature: MA Experiment 108542 PARAMETER Experiment Name: Zm_150mM_NaCl_P Parameter: Age (day) Value: 8
  misc_feature: MA Experiment 108542 PARAMETER Experiment Name: Zm_150mM_NaCl_P Parameter: Organism Value: Zea mays
  misc_feature: MA Experiment 108542 PARAMETER Experiment Name: Zm_150mM_NaCl_P Parameter: Plant Line Value: 35A19
  misc_feature: MA Experiment 108542 PARAMETER Experiment Name: Zm_150mM_NaCl_P Parameter: Timepoint (hr) Value: 6
  misc_feature: MA Experiment 108542 PARAMETER Experiment Name: Zm_150mM_NaCl_P Parameter: Tissue Value: Aerial
  misc_feature: MA Experiment 108542 PARAMETER Experiment Name: Zm_150mM_NaCl_P Parameter: Treatment Value: 150mM NaCl vs. No Treatment
  misc_feature: MA Experiment ID: 20000492 Result: Down-regulated in Transcription
  misc_feature: MA Experiment 20000492 PARAMETER Experiment Name: Zm_Hybrid_Seed_Dev_P Parameter: DAP Value: 12
  misc_feature: MA Experiment 20000492 PARAMETER Experiment Name: Zm_Hybrid_Seed_Dev_P Parameter: Organism Value: Zea mays
  misc_feature: MA Experiment 20000492 PARAMETER Experiment Name: Zm_Hybrid_Seed_Dev_P Parameter: Plant Line Value: 35A19
  misc_feature: MA Experiment 20000492 PARAMETER Experiment Name: Zm_Hybrid_Seed_Dev_P Parameter: Tissue Value: Fert Kernel vs. Unfert Floret
  misc_feature: MA Experiment ID: 20000535 Result: Down-regulated in Transcription
  misc_feature: MA Experiment 20000535 PARAMETER Experiment Name: Zm_Hybrid_Seed_Dev_P Parameter: DAP Value: 30 vs. 12
  misc_feature: MA Experiment 20000535 PARAMETER Experiment Name: Zm_Hybrid_Seed_Dev_P Parameter: Organism Value: Zea mays
  misc_feature: MA Experiment 20000535 PARAMETER Experiment Name: Zm_Hybrid_Seed_Dev_P Parameter: Plant Line Value: 35A19
  misc_feature: MA Experiment 20000535 PARAMETER Experiment Name: Zm_Hybrid_Seed_Dev_P Parameter: Tissue Value: Embryo vs. Unfert Floret
  misc_feature: MA Experiment ID: 20001608 Result: Down-regulated in Transcription
  misc_feature: MA Experiment 20001608 PARAMETER Experiment Name: Zm_50ppm_KNO3_L-to-H_P Parameter: Age (day) Value: 21
  misc_feature: MA Experiment 20001608 PARAMETER Experiment Name: Zm_50ppm_KNO3_L-to-H_P Parameter: Organism Value: Zea mays
  misc_feature: MA Experiment 20001608 PARAMETER Experiment Name: Zm_50ppm_KNO3_L-to-H_P Parameter: Plant Line Value: 35A19
  misc_feature: MA Experiment 20001608 PARAMETER Experiment Name: Zm_50ppm_KNO3_L-to-H_P Parameter: Timepoint (hr) Value: 48
  misc_feature: MA Experiment 20001608 PARAMETER Experiment Name: Zm_50ppm_KNO3_L-to-H_P Parameter: Tissue Value: Shoots
  misc_feature: MA Experiment 20001608 PARAMETER Experiment Name: Zm_50ppm_KNO3_L-to-H_P Parameter: Treatment Value: 50ppm KNO3 vs. 50ppm KCl
atcatcatgtatcctaaatccaaagccagcgaagaagagattccgccggtgccgtagccgctgagctaaccaccagccggttcttgtcgcgttgtctgcaactttgcaagtaagcaactcgtcaccggtcagccaccaacaaggcaccttggttatcgtcttgcacgtccaagaaatcgagaactcaggcaggcgtcgcccacttgccctcctcctcctcctcccgtcgtgaattccacgctggttcagggatgtcgatcgagctcctgacgaaattcctcacattgctgttcgggtatgccatgccagcgctggagtgcttcaaggcgatcgagcagcggcccggccgggcagatcagctccgcttctggtgcgagtattggatcatcctagtcctcctcgtcatgttcgacgaaattgctggggttctcatttctaagatcccaatgtactacgagctgaagctagccttcctcgtctacttgtggtacccaaagacaaggggaacggacatcgtgtacgagaccttcctccagccgctggtgatgcagtaccagcccaacatcgaggccaggctccagtacctgcgcgccaatgccggtgacatcctcgtcttctacctcaagaacttcaccgagagaggctacgagctcttcctccgagtgcttgactacgtccggtcgcaggcgtccagagggtcaagaacacggagtttcttctcgttccgaggtgaacgttcggagaggccaagcttcaccgatgactatgtcactggcggcgaccggagggacgggggaaggcaccgtcgaccacgcagtggctactagtagaccaagtagtcactggatgtataggatgtgcacagaaacatatacgattactggtatagtgttaggtaggagtaggatcaaatcaagcaaaccttacggacagaacttgtaggatccactggaaaaacagatagcttcttataaattttctattcatattgtcactttgtcagcc

SEQ ID NO: 8758 - protein, 191 aa, Zea mays subsp. mays
  peptide (1)..(191): Ceres Seq. ID no. 12348093
  misc_feature (6)..(98): Pfam Name: TB2/DP1, HVA22 family Pfam Description: TB2/DP1, HVA22 family
  misc_feature (1)..(191): Homolog of NCBI NO: 38344031 NR Description: OJ991214_12.7 [Oryza sativa (japonica
  misc_feature (4)..(150): Homolog of NCBI NO: 18404020 NR Description: expressed protein; protein id: At2g36020.1, by cDNA: 13310. [Arabidopsis thaliana]
  misc_feature (4)..(150): Homolog of NCBI NO: 21537355 NR Description: unknown [Arabidopsis thaliana]
  misc_feature (6)..(147): Homolog of NCBI NO: 18422223 NR Description: expressed protein; protein id: At5g42560.1,
  misc_feature (6)..(147): Homolog of NCBI NO: 21553813 NR Description: unknown [Arabidopsis thaliana]
  misc_feature (4)..(150): Homolog of NCBI NO: 26451594 NR Description: unknown protein [Arabidopsis thaliana]
  misc_feature (6)..(147): Homolog of NCBI NO: 21553483 NR Description: pathogenicity protein PATH531-like protein
  misc_feature (6)..(147): Homolog of NCBI NO: 18394805 NR Description: expressed protein; protein id: At1g19950.1, by cDNA: 147130., supported by cDNA: gi_15010625 [Arabidopsis >gi|15010626|gb|AAK73972.1| At1g19950/T20H2_25 [Arabidopsis
  misc_feature (12)..(147): Homolog of NCBI NO: 9759014 NR Description: gene_id:K16E1.3~unknown protein [Arabidopsis
  misc_feature (1)..(154): Homolog of NCBI NO: 21671921 NR Description: Putative protein with HVA22 domain [Oryza sativa
MSIELLTKFLTLLFGYAMPALECFKAIEQRPGRADQLRFWCEYWIILVLLVMFDEIAGVLISKIPMYYELKLAFLVYLWYPKTRGTDIVYETFLQPLVMQYQPNIEARLQYLRANAGDILVFYLKNFTERGYELFLRVLDYVRSQASRGSRTRSFFSFRGERSERPSFTDDYVTGGDRRDGGRHRRPRSGY

SEQ ID NO: 8759 - protein, 174 aa, Zea mays subsp. mays
  peptide (1)..(174): Ceres Seq. ID no. 12348094
  misc_feature (1)..(81): Pfam Name: TB2/DP1, HVA22 family Pfam Description: TB2/DP1, HVA22 family
  misc_feature (1)..(174): Homolog of NCBI NO: 38344031 NR Description: OJ991214_12.7 [Oryza sativa (japonica
  misc_feature (1)..(133): Homolog of NCBI NO: 18404020 NR Description: expressed protein; protein id: At2g36020.1, by cDNA: 13310. [Arabidopsis thaliana]
  misc_feature (1)..(133): Homolog of NCBI NO: 21537355 NR Description: unknown [Arabidopsis thaliana]
  misc_feature (1)..(130): Homolog of NCBI NO: 18422223 NR Description: expressed protein; protein id: At5g42560.1,
  misc_feature (1)..(130): Homolog of NCBI NO: 21553813 NR Description: unknown [Arabidopsis thaliana]
  misc_feature (1)..(133): Homolog of NCBI NO: 26451594 NR Description: unknown protein [Arabidopsis thaliana]
  misc_feature (1)..(130): Homolog of NCBI NO: 21553483 NR Description: pathogenicity protein PATH531-like protein
  misc_feature (1)..(130): Homolog of NCBI NO: 18394805 NR Description: expressed protein; protein id: At1g19950.1, by cDNA: 147130., supported by cDNA: gi_15010625 [Arabidopsis >gi|15010626|gb|AAK73972.1| At1g19950/T20H2_25 [Arabidopsis
  misc_feature (1)..(130): Homolog of NCBI NO: 9759014 NR Description: gene_id:K16E1.3~unknown protein [Arabidopsis
  misc_feature (1)..(137): Homolog of NCBI NO: 21671921 NR Description: Putative protein with HVA22 domain [Oryza sativa
MPALECFKAIEQRPGRADQLRFWCEYWIILVLLVMFDEIAGVLISKIPMYYELKLAFLVYLWYPKTRGTDIVYETFLQPLVMQYQPNIEARLQYLRANAGDILVFYLKNFTERGYELFLRVLDYVRSQASRGSRTRSFFSFRGERSERPSFTDDYVTGGDRRDGGRHRRPRSGY

SEQ ID NO: 8760 - protein, 140 aa, Zea mays subsp. mays
  peptide (1)..(140): Ceres Seq. ID no. 12348095
  misc_feature (1)..(140): Homolog of NCBI NO: 38344031 NR Description: OJ991214_12.7 [Oryza sativa (japonica
  misc_feature (1)..(99): Homolog of NCBI NO: 18404020 NR Description: expressed protein; protein id: At2g36020.1, by cDNA: 13310. [Arabidopsis thaliana]
  misc_feature (1)..(99): Homolog of NCBI NO: 21537355 NR Description: unknown [Arabidopsis thaliana]
  misc_feature (1)..(96): Homolog of NCBI NO: 18422223 NR Description: expressed protein; protein id: At5g42560.1,
  misc_feature (1)..(96): Homolog of NCBI NO: 21553813 NR Description: unknown [Arabidopsis thaliana]
  misc_feature (1)..(99): Homolog of NCBI NO: 26451594 NR Description: unknown protein [Arabidopsis thaliana]
  misc_feature (1)..(96): Homolog of NCBI NO: 21553483 NR Description: pathogenicity protein PATH531-like protein
  misc_feature (1)..(96): Homolog of NCBI NO: 18394805 NR Description: expressed protein; protein id: At1g19950.1, by cDNA: 147130., supported by cDNA: gi_15010625 [Arabidopsis >gi|15010626|gb|AAK73972.1| At1g19950/T20H2_25 [Arabidopsis
  misc_feature (1)..(96): Homolog of NCBI NO: 9759014 NR Description: gene_id:K16E1.3~unknown protein [Arabidopsis
  misc_feature (1)..(103): Homolog of NCBI NO: 21671921 NR Description: Putative protein with HVA22 domain [Oryza sativa
MFDEIAGVLISKIPMYYELKLAFLVYLWYPKTRGTDIVYETFLQPLVMQYQPNIEARLQYLRANAGDILVFYLKNFTERGYELFLRVLDYVRSQASRGSRTRSFFSFRGERSERPSFTDDYVTGGDRRDGGRHRRPRSGY

SEQ ID NO: 8761 - DNA, 769 bp, Zea mays subsp. mays
  misc_feature (1)..(769): Ceres Seq. ID no. 12382102
  misc_feature: MA Experiment ID: 108522 Result: Down-regulated in Transcription
  misc_feature: MA Experiment 108522 PARAMETER Experiment Name: Zm_42deg_Heat_P Parameter: Age (day) Value: 8
  misc_feature: MA Experiment 108522 PARAMETER Experiment Name: Zm_42deg_Heat_P Parameter: Organism Value: Zea mays
  misc_feature: MA Experiment 108522 PARAMETER Experiment Name: Zm_42deg_Heat_P Parameter: Plant Line Value: 35A19
  misc_feature: MA Experiment 108522 PARAMETER Experiment Name: Zm_42deg_Heat_P Parameter: Temperature (deg C) Value: 42 vs. 22
  misc_feature: MA Experiment 108522 PARAMETER Experiment Name: Zm_42deg_Heat_P Parameter: Timepoint (hr) Value: 1
  misc_feature: MA Experiment 108522 PARAMETER Experiment Name: Zm_42deg_Heat_P Parameter: Tissue Value: Aerial
  misc_feature: MA Experiment ID: 108528 Result: Up-regulated in Transcription
  misc_feature: MA Experiment 108528 PARAMETER Experiment Name: Zm_Imbibed_Seeds_P Parameter: Age (day) Value: 5 vs. 2
  misc_feature: MA Experiment 108528 PARAMETER Experiment Name: Zm_Imbibed_Seeds_P Parameter: Organism Value: Zea mays
  misc_feature: MA Experiment 108528 PARAMETER Experiment Name: Zm_Imbibed_Seeds_P Parameter: Plant Line Value: 35A19
  misc_feature: MA Experiment 108528 PARAMETER Experiment Name: Zm_Imbibed_Seeds_P Parameter: Tissue Value: Aerial vs. Embryo
  misc_feature: MA Experiment ID: 108530 Result: Up-regulated in Transcription
  misc_feature: MA Experiment 108530 PARAMETER Experiment Name: Zm_Imbibed_Seeds_P Parameter: Age (day) Value: 6 vs. 2
  misc_feature: MA Experiment 108530 PARAMETER Experiment Name: Zm_Imbibed_Seeds_P Parameter: Organism Value: Zea mays
  misc_feature: MA Experiment 108530 PARAMETER Experiment Name: Zm_Imbibed_Seeds_P Parameter: Plant Line Value: 35A19
  misc_feature: MA Experiment 108530 PARAMETER Experiment Name: Zm_Imbibed_Seeds_P Parameter: Tissue Value: Aerial vs. Embryo
  misc_feature: MA Experiment ID: 108543 Result: Up-regulated in Transcription
  misc_feature: MA Experiment ID: 108545 Result: Up-regulated in Transcription
  misc_feature: MA Experiment 108545 PARAMETER Experiment Name: Zm_Imbibed_Seeds_P Parameter: Age (day) Value: 3 vs. 2
  misc_feature: MA Experiment 108545 PARAMETER Experiment Name: Zm_Imbibed_Seeds_P Parameter: Organism Value: Zea mays
  misc_feature: MA Experiment 108545 PARAMETER Experiment Name: Zm_Imbibed_Seeds_P Parameter: Plant Line Value: 35A19
  misc_feature: MA Experiment 108545 PARAMETER Experiment Name: Zm_Imbibed_Seeds_P Parameter: Tissue Value: Aerial vs. Embryo
  misc_feature: MA Experiment ID: 108546 Result: Down-regulated in Transcription
  misc_feature: MA Experiment 108546 PARAMETER Experiment Name: Zm_Imbibed_Seeds_P Parameter: Age (day) Value: 3 vs. 2
  misc_feature: MA Experiment 108546 PARAMETER Experiment Name: Zm_Imbibed_Seeds_P Parameter: Organism Value: Zea mays
  misc_feature: MA Experiment 108546 PARAMETER Experiment Name: Zm_Imbibed_Seeds_P Parameter: Plant Line Value: 35A19
  misc_feature: MA Experiment 108546 PARAMETER Experiment Name: Zm_Imbibed_Seeds_P Parameter: Tissue Value: Roots vs. Embryo
  misc_feature: MA Experiment ID: 108547 Result: Up-regulated in Transcription
  misc_feature: MA Experiment 108547 PARAMETER Experiment Name: Zm_Imbibed_Seeds_P Parameter: Age (day) Value: 4 vs. 2
  misc_feature: MA Experiment 108547 PARAMETER Experiment Name: Zm_Imbibed_Seeds_P Parameter: Organism Value: Zea mays
  misc_feature: MA Experiment 108547 PARAMETER Experiment Name: Zm_Imbibed_Seeds_P Parameter: Plant Line Value: 35A19
  misc_feature: MA Experiment 108547 PARAMETER Experiment Name: Zm_Imbibed_Seeds_P Parameter: Tissue Value: Aerial vs. Embryo
  misc_feature: MA Experiment ID: 108556 Result: Down-regulated in Transcription
  misc_feature: MA Experiment 108556 PARAMETER Experiment Name: Zm_Drought_P Parameter: Age (day) Value: 9
  misc_feature: MA Experiment 108556 PARAMETER Experiment Name: Zm_Drought_P Parameter: Organism Value: Zea mays
  misc_feature: MA Experiment 108556 PARAMETER Experiment Name: Zm_Drought_P Parameter: Plant Line Value: 35A19
  misc_feature: MA Experiment 108556 PARAMETER Experiment Name: Zm_Drought_P Parameter: Timepoint (hr) Value: 24
  misc_feature: MA Experiment 108556 PARAMETER Experiment Name: Zm_Drought_P Parameter: Tissue Value: Aerial
  misc_feature: MA Experiment 108556 PARAMETER Experiment Name: Zm_Drought_P Parameter: Treatment Value: Drought vs. No Drought
  misc_feature: MA Experiment ID: 20000477 Result: Down-regulated in Transcription
  misc_feature: MA Experiment 20000477 PARAMETER Experiment Name: Zm_5mM_SA_P Parameter: Age (day) Value: 10
  misc_feature: MA Experiment 20000477 PARAMETER Experiment Name: Zm_5mM_SA_P Parameter: Organism Value: Zea mays
  misc_feature: MA Experiment 20000477 PARAMETER Experiment Name: Zm_5mM_SA_P Parameter: Plant Line Value: 35A19
  misc_feature: MA Experiment 20000477 PARAMETER Experiment Name: Zm_5mM_SA_P Parameter: Timepoint (hr) Value: 48
  misc_feature: MA Experiment 20000477 PARAMETER Experiment Name: Zm_5mM_SA_P Parameter: Tissue Value: Aerial
  misc_feature: MA Experiment 20000477 PARAMETER Experiment Name: Zm_5mM_SA_P Parameter: Treatment Value: 5mM SA vs. No Treatment
  misc_feature: MA Experiment ID: 20000478 Result: Down-regulated in Transcription
  misc_feature: MA Experiment 20000478 PARAMETER Experiment Name: Zm_5mM_SA_P Parameter: Age (day) Value: 11
  misc_feature: MA Experiment 20000478 PARAMETER Experiment Name: Zm_5mM_SA_P Parameter: Organism Value: Zea mays
  misc_feature: MA Experiment 20000478 PARAMETER Experiment Name: Zm_5mM_SA_P Parameter: Plant Line Value: 35A19
  misc_feature: MA Experiment 20000478 PARAMETER Experiment Name: Zm_5mM_SA_P Parameter: Timepoint (hr) Value: 72
  misc_feature: MA Experiment 20000478 PARAMETER Experiment Name: Zm_5mM_SA_P Parameter: Tissue Value: Aerial
  misc_feature: MA Experiment 20000478 PARAMETER Experiment Name: Zm_5mM_SA_P Parameter: Treatment Value: 5mM SA vs. No Treatment
  misc_feature: MA Experiment ID: 20000480 Result: Down-regulated in Transcription
  misc_feature: MA Experiment 20000480 PARAMETER Experiment Name: Zm_Drought_P Parameter: Age (day) Value: 11
  misc_feature: MA Experiment 20000480 PARAMETER Experiment Name: Zm_Drought_P Parameter: Organism Value: Zea mays
  misc_feature: MA Experiment 20000480 PARAMETER Experiment Name: Zm_Drought_P Parameter: Plant Line Value: 35A19
  misc_feature: MA Experiment 20000480 PARAMETER Experiment Name: Zm_Drought_P Parameter: Timepoint (hr) Value: 72
  misc_feature: MA Experiment 20000480 PARAMETER Experiment Name: Zm_Drought_P Parameter: Tissue Value: Aerial
  misc_feature: MA Experiment 20000480 PARAMETER Experiment Name: Zm_Drought_P Parameter: Treatment Value: Drought vs. No Drought
  misc_feature: MA Experiment ID: 20000488 Result: Down-regulated in Transcription
  misc_feature: MA Experiment 20000488 PARAMETER Experiment Name: Zm_50mM_NH4NO3_L_to_H_P Parameter: Organism Value: Zea mays
  misc_feature: MA Experiment 20000488 PARAMETER Experiment Name: Zm_50mM_NH4NO3_L_to_H_P Parameter: Timepoint (hr) Value: 8
  misc_feature: MA Experiment 20000488 PARAMETER Experiment Name: Zm_50mM_NH4NO3_L_to_H_P Parameter: Tissue Value: Leaves
  misc_feature: MA Experiment 20000488 PARAMETER Experiment Name: Zm_50mM_NH4NO3_L_to_H_P Parameter: Treatment Value: 50mM NH4NO3 vs. 100mM Mannitol
atgcgtgcatggcgtgctagctaggtaccttgcggccaagagcgaggcggaccactacaagcgggagatgagaagggagcaggaggagatcatcgccgtcccagacaccgaggccgctgagattggagagatcatgtcacggtatgggctcgagccgcaggagtacggccctgtcgtcgccgggctcaggcggaaccctcaagcttggctagacttcatgatgaggttcgagctgggactggagagaccggatcccagaagggctctgcagagcgccttcacgatcgcactgtcctacgtggtcggcgggctggtccctctcctgccctacgtgctcgtctccgccgcgcaggatgccatgctcacatccgtcggagtcacgctggccgcgctgcttttcttcggctacgtcaagggccgcttcacgggggaaccggccgttcgccagtgccgtccagaccgctgtcattggagcgctcgcttcggcggcggcgtacgggatggcgaaggctgttcaggcgaggtagttgtttgttggtgaggcggcgtcaggcgttttgggaaccagggctgcggtaaaactgaagaaagctgcatacttctgatcctttggggacttctcgttacagtgttaatcgcgggatctaatgctagtctactcttttgaataaatctagggaaggagataatcatagataaaatatatcttcgcctcactttggttaatgtaaagactctgaactacatattcaatcattattacaagcct

SEQ ID NO: 8762 - protein, 179 aa, Zea mays subsp. mays
  peptide (1)..(179): Ceres Seq. ID no. 12382103
  misc_feature (6)..(143): Homolog of NCBI NO: 38567721 NR Description: B1358B12.19 [Oryza sativa (japonica
  misc_feature (6)..(148): Homolog of NCBI NO: 15226346 NR Description: putative membrane protein; protein id: [Arabidopsis thaliana] >gi|25410932|pir||H84428 probable membrane
  misc_feature (6)..(142): Homolog of NCBI NO: 6323249 NR Description: Functions in the homeostasis of both calcium and ions; Ccc1p [Saccharomyces cerevisiae]
  misc_feature (6)..(138): Homolog of NCBI NO: 40740699 NR Description: hypothetical protein AN3681.2 [Aspergillus
  misc_feature (6)..(150): Homolog of NCBI NO: 19554141 NR Description: uncharacterized membrane protein [Corynebacterium ATCC 13032] >gi|21325728|dbj|BAC00349.1| Uncharacterized membrane
  misc_feature (2)..(141): Homolog of NCBI NO: 40741878 NR Description: hypothetical protein AN4990.2 [Aspergillus
  misc_feature (9)..(147): Homolog of NCBI NO: 23136261 NR Description: hypothetical protein [Cytophaga hutchinsonii]
  misc_feature (6)..(143): Homolog of NCBI NO: 15922654 NR Description: 247aa long conserved hypothetical protein tokodaii] >gi|15623444|dbj|BAB67432.1| 247aa long conserved
CVHGVLARYLAAKSEADHYKREMRREQEEIIAVPDTEAAEIGEIMSRYGLEPQEYGPVVAGLRRNPQAWLDFMMRFELGLERPDPRRALQSAFTIALSYVVGGLVPLLPYVLVSAAQDAMLTSVGVTLAALLFFGYVKGRFTGEPAVRQCRPDRCHWSARFGGGVRDGEGCSGEVVVCW

SEQ ID NO: 8763 - protein, 157 aa, Zea mays subsp. mays
  peptide (1)..(157): Ceres Seq. ID no. 12382104
  misc_feature (1)..(121): Homolog of NCBI NO: 38567721 NR Description: B1358B12.19 [Oryza sativa (japonica
  misc_feature (1)..(126): Homolog of NCBI NO: 15226346 NR Description: putative membrane protein; protein id: [Arabidopsis thaliana] >gi|25410932|pir||H84428 probable membrane
  misc_feature (1)..(120): Homolog of NCBI NO: 6323249 NR Description: Functions in the homeostasis of both calcium and ions; Ccc1p [Saccharomyces cerevisiae]
  misc_feature (1)..(116): Homolog of NCBI NO: 40740699 NR Description: hypothetical protein AN3681.2 [Aspergillus
  misc_feature (1)..(128): Homolog of NCBI NO: 19554141 NR Description: uncharacterized membrane protein [Corynebacterium ATCC 13032] >gi|21325728|dbj|BAC00349.1| Uncharacterized membrane
  misc_feature (1)..(119): Homolog of NCBI NO: 40741878 NR Description: hypothetical protein AN4990.2 [Aspergillus
  misc_feature (1)..(125): Homolog of NCBI NO: 23136261 NR Description: hypothetical protein [Cytophaga hutchinsonii]
  misc_feature (1)..(121): Homolog of NCBI NO: 15922654 NR Description: 247aa long conserved hypothetical protein tokodaii] >gi|15623444|dbj|BAB67432.1| 247aa long conserved
MRREQEEIIAVPDTEAAEIGEIMSRYGLEPQEYGPVVAGLRRNPQAWLDFMMRFELGLERPDPRRALQSAFTIALSYVVGGLVPLLPYVLVSAAQDAMLTSVGVTLAALLFFGYVKGRFTGEPAVRQCRPDRCHWSARFGGGVRDGEGCSGEVVVCW

SEQ ID NO: 8764 - protein, 135 aa, Zea mays subsp. mays
  peptide (1)..(135): Ceres Seq. ID no. 12382105
  misc_feature (1)..(99): Homolog of NCBI NO: 38567721 NR Description: B1358B12.19 [Oryza sativa (japonica
  misc_feature (1)..(104): Homolog of NCBI NO: 15226346 NR Description: putative membrane protein; protein id: [Arabidopsis thaliana] >gi|25410932|pir||H84428 probable membrane
  misc_feature (1)..(98): Homolog of NCBI NO: 6323249 NR Description: Functions in the homeostasis of both calcium and ions; Ccc1p [Saccharomyces cerevisiae]
  misc_feature (1)..(94): Homolog of NCBI NO: 40740699 NR Description: hypothetical protein AN3681.2 [Aspergillus
  misc_feature (1)..(106): Homolog of NCBI NO: 19554141 NR Description: uncharacterized membrane protein [Corynebacterium ATCC 13032] >gi|21325728|dbj|BAC00349.1| Uncharacterized membrane
  misc_feature (1)..(97): Homolog of NCBI NO: 40741878 NR Description: hypothetical protein AN4990.2 [Aspergillus
  misc_feature (1)..(103): Homolog of NCBI NO: 23136261 NR Description: hypothetical protein [Cytophaga hutchinsonii]
  misc_feature (1)..(99): Homolog of NCBI NO: 15922654 NR Description: 247aa long conserved hypothetical protein tokodaii] >gi|15623444|dbj|BAB67432.1| 247aa long conserved
MSRYGLEPQEYGPVVAGLRRNPQAWLDFMMRFELGLERPDPRRALQSAFTIALSYVVGGLVPLLPYVLVSAAQDAMLTSVGVTLAALLFFGYVKGRFTGEPAVRQCRPDRCHWSARFGGGVRDGEGCSGEVVVCW

SEQ ID NO: 8765 - DNA, 1140 bp, Zea mays subsp. mays; identical to SEQ ID NO: 4797
  misc_feature (1)..(1140): Ceres Seq. ID no. 12386869
  misc_feature: MA Experiment ID: 108528 Result: Up-regulated in Transcription
  misc_feature: MA Experiment 108528 PARAMETER Experiment Name: Zm_Imbibed_Seeds_P Parameter: Age (day) Value: 5 vs. 2
  misc_feature: MA Experiment 108528 PARAMETER Experiment Name: Zm_Imbibed_Seeds_P Parameter: Organism Value: Zea mays
  misc_feature: MA Experiment 108528 PARAMETER Experiment Name: Zm_Imbibed_Seeds_P Parameter: Plant Line Value: 35A19
  misc_feature: MA Experiment 108528 PARAMETER Experiment Name: Zm_Imbibed_Seeds_P Parameter: Tissue Value: Aerial vs. Embryo
  misc_feature: MA Experiment ID: 108530 Result: Up-regulated in Transcription
  misc_feature: MA Experiment 108530 PARAMETER Experiment Name: Zm_Imbibed_Seeds_P Parameter: Age (day) Value: 6 vs. 2
  misc_feature: MA Experiment 108530 PARAMETER Experiment Name: Zm_Imbibed_Seeds_P Parameter: Organism Value: Zea mays
  misc_feature: MA Experiment 108530 PARAMETER Experiment Name: Zm_Imbibed_Seeds_P Parameter: Plant Line Value: 35A19
  misc_feature: MA Experiment 108530 PARAMETER Experiment Name: Zm_Imbibed_Seeds_P Parameter: Tissue Value: Aerial vs. Embryo
  misc_feature: MA Experiment ID: 108543 Result: Up-regulated in Transcription
  misc_feature: MA Experiment ID: 108544 Result: Up-regulated in Transcription
  misc_feature: MA Experiment ID: 108688 Result: Down-regulated in Transcription
  misc_feature: MA Experiment 108688 PARAMETER Experiment Name: Zm_Embryos-Flowers__P Parameter: Tissue Value: Immature Flowers vs. Aerial+
  misc_feature: MA Experiment ID: 20000535 Result: Down-regulated in Transcription
  misc_feature: MA Experiment 20000535 PARAMETER Experiment Name: Zm_Hybrid_Seed_Dev_P Parameter: DAP Value: 30 vs. 12
  misc_feature: MA Experiment 20000535 PARAMETER Experiment Name: Zm_Hybrid_Seed_Dev_P Parameter: Organism Value: Zea mays
  misc_feature: MA Experiment 20000535 PARAMETER Experiment Name: Zm_Hybrid_Seed_Dev_P Parameter: Plant Line Value: 35A19
  misc_feature: MA Experiment 20000535 PARAMETER Experiment Name: Zm_Hybrid_Seed_Dev_P Parameter: Tissue Value: Embryo vs. Unfert Floret

SEQ ID NO: 8766 - protein, 274 aa, Zea mays subsp. mays; identical to SEQ ID NO: 4798
  peptide (1)..(274): Ceres Seq. ID no. 12386870
  misc_feature (92)..(270): Pfam Name: Ribose 5-phosphate isomerase A (phosphoriboisomerase A) Pfam Description: Ribose 5-phosphate isomerase A
  misc_feature (92)..(270): Pfam Name: Ribose 5-phosphate isomerase A (phosphoriboisomerase A) Pfam Description: Ribose 5-phosphate isomerase A
  misc_feature (92)..(270): Pfam Name: Ribose 5-phosphate isomerase A (phosphoriboisomerase A) Pfam Description: Ribose 5-phosphate isomerase A
  misc_feature (1)..(274): Homolog of NCBI NO: 34393835 NR Description: putative ribose-5-phosphate isomerase [Oryza
  misc_feature (31)..(274): Homolog of NCBI NO: 34393836 NR Description: putative ribose-5-phosphate isomerase [Oryza
  misc_feature (29)..(274): Homolog of NCBI NO: 18654317 NR Description: ribose-5-phosphate isomerase [Spinacia oleracea]
  misc_feature (1)..(274): Homolog of NCBI NO: 21594002 NR Description: putative ribose 5-phosphate isomerase
  misc_feature (1)..(274): Homolog of NCBI NO: 15229349 NR Description: putative ribose 5-phosphate isomerase; protein At3g04790.1, supported by cDNA: 6349., supported by cDNA:
  misc_feature (31)..(274): Homolog of NCBI NO: 34393836 NR Description: putative ribose-5-phosphate isomerase [Oryza
  misc_feature (1)..(274): Homolog of NCBI NO: 21594002 NR Description: putative ribose 5-phosphate isomerase
  misc_feature (26)..(274): Homolog of NCBI NO: 21592672 NR Description: putative ribose 5-phosphate isomerase
  misc_feature (26)..(274): Homolog of NCBI NO: 15226223 NR Description: putative ribose 5-phosphate isomerase; protein At2g01290.1, supported by cDNA: gi_15809809, supported by cDNA:
  misc_feature (1)..(274): Homolog of NCBI NO: 15229349 NR Description: putative ribose 5-phosphate isomerase; protein At3g04790.1, supported by cDNA: 6349., supported by cDNA:
  misc_feature (34)..(268): Homolog of NCBI NO: 38347196 NR Description: OSJNBa0023J03.8 [Oryza sativa (japonica
  misc_feature (26)..(274): Homolog of NCBI NO: 13430836 NR Description: putative ribose 5-phosphate isomerase
  misc_feature (26)..(274): Homolog of NCBI NO: 15223936 NR Description: putative ribose 5-phosphate isomerase; protein At1g71100.1, supported by cDNA: 3116., supported by cDNA: [Arabidopsis thaliana] >gi|25329397|pir||E96735 hypothetical
  misc_feature (26)..(274): Homolog of NCBI NO: 21592672 NR Description: putative ribose 5-phosphate isomerase
  misc_feature (26)..(274): Homolog of NCBI NO: 15226223 NR Description: putative ribose 5-phosphate isomerase; protein At2g01290.1, supported by cDNA: gi_15809809, supported by cDNA:
  misc_feature (1)..(274): Homolog of NCBI NO: 15229349 NR Description: putative ribose 5-phosphate isomerase; protein At3g04790.1, supported by cDNA: 6349., supported by cDNA:
  misc_feature (1)..(274): Homolog of NCBI NO: 21594002 NR Description: putative ribose 5-phosphate isomerase
  misc_feature (29)..(274): Homolog of NCBI NO: 18654317 NR Description: ribose-5-phosphate isomerase [Spinacia oleracea]
  misc_feature (31)..(274): Homolog of NCBI NO: 34393836 NR Description: putative ribose-5-phosphate isomerase [Oryza
  misc_feature (1)..(274): Homolog of NCBI NO: 34393835 NR Description: putative ribose-5-phosphate isomerase [Oryza
  misc_feature (34)..(268): Homolog of NCBI NO: 38347196 NR Description: OSJNBa0023J03.8 [Oryza sativa (japonica
  misc_feature (26)..(274): Homolog of NCBI NO: 13430836 NR Description: putative ribose 5-phosphate isomerase
  misc_feature (26)..(274): Homolog of NCBI NO: 15223936 NR Description: putative ribose 5-phosphate isomerase; protein At1g71100.1, supported by cDNA: 3116., supported by cDNA: [Arabidopsis thaliana] >gi|25329397|pir||E96735 hypothetical
  misc_feature (29)..(274): Homolog of NCBI NO: 18654317 NR Description: ribose-5-phosphate isomerase [Spinacia oleracea]
  misc_feature (1)..(274): Homolog of NCBI NO: 34393835 NR Description: putative ribose-5-phosphate isomerase [Oryza
  misc_feature (26)..(274): Homolog of NCBI NO: 15226223 NR Description: putative ribose 5-phosphate isomerase; protein At2g01290.1, supported by cDNA: gi_15809809, supported by cDNA:
  misc_feature (26)..(274): Homolog of NCBI NO: 21592672 NR Description: putative ribose 5-phosphate isomerase
  misc_feature (26)..(274): Homolog of NCBI NO: 15223936 NR Description: putative ribose 5-phosphate isomerase; protein At1g71100.1, supported by cDNA: 3116., supported by cDNA: [Arabidopsis thaliana] >gi|25329397|pir||E96735 hypothetical
  misc_feature (26)..(274): Homolog of NCBI NO: 13430836 NR Description: putative ribose 5-phosphate isomerase
  misc_feature (34)..(268): Homolog of NCBI NO: 38347196 NR Description: OSJNBa0023J03.8 [Oryza sativa (japonica

SEQ ID NO: 8767 - protein, 212 aa, Zea mays subsp. mays; identical to SEQ ID NO: 4799
  peptide (1)..(212): Ceres Seq. ID no. 12386871
  misc_feature (30)..(208): Pfam Name: Ribose 5-phosphate isomerase A (phosphoriboisomerase A) Pfam Description: Ribose 5-phosphate isomerase A
  misc_feature (30)..(208): Pfam Name: Ribose 5-phosphate isomerase A (phosphoriboisomerase A) Pfam Description: Ribose 5-phosphate isomerase A
  misc_feature (30)..(208): Pfam Name: Ribose 5-phosphate isomerase A (phosphoriboisomerase A) Pfam Description: Ribose 5-phosphate isomerase A
  misc_feature (1)..(212): Homolog of NCBI NO: 21592672 NR Description: putative ribose 5-phosphate isomerase
  misc_feature (1)..(212): Homolog of NCBI NO: 15223936 NR Description: putative ribose 5-phosphate isomerase; protein At1g71100.1, supported by cDNA: 3116., supported by cDNA: [Arabidopsis thaliana] >gi|25329397|pir||E96735 hypothetical
  misc_feature (1)..(212): Homolog of NCBI NO: 34393835 NR Description: putative ribose-5-phosphate isomerase [Oryza
  misc_feature (1)..(212): Homolog of NCBI NO: 18654317 NR Description: ribose-5-phosphate isomerase [Spinacia oleracea]
  misc_feature (1)..(212): Homolog of NCBI NO: 15229349 NR Description: putative ribose 5-phosphate isomerase; protein At3g04790.1, supported by cDNA: 6349., supported by cDNA:
  misc_feature (1)..(212): Homolog of NCBI NO: 34393836 NR Description: putative ribose-5-phosphate isomerase [Oryza
  misc_feature (1)..(212): Homolog of NCBI NO: 21594002 NR Description: putative ribose 5-phosphate isomerase
  misc_feature (1)..(212): Homolog of NCBI NO: 18654317 NR Description: ribose-5-phosphate isomerase [Spinacia oleracea]
  misc_feature (1)..(212): Homolog of NCBI NO: 34393836 NR Description: putative ribose-5-phosphate isomerase [Oryza
  misc_feature (1)..(212): Homolog of NCBI NO: 34393835 NR Description: putative ribose-5-phosphate isomerase [Oryza
  misc_feature (1)..(206): Homolog of NCBI NO: 38347196 NR Description: OSJNBa0023J03.8 [Oryza sativa (japonica
  misc_feature (1)..(212): Homolog of NCBI NO: 13430836 NR Description: putative ribose 5-phosphate isomerase
  misc_feature (1)..(212): Homolog of NCBI NO: 15223936 NR Description: putative ribose 5-phosphate isomerase; protein At1g71100.1, supported by cDNA: 3116., supported by cDNA: [Arabidopsis thaliana] >gi|25329397|pir||E96735 hypothetical
  misc_feature (1)..(212): Homolog of NCBI NO: 21592672 NR Description: putative ribose 5-phosphate isomerase
  misc_feature (1)..(212): Homolog of NCBI NO: 15226223 NR Description: putative ribose 5-phosphate isomerase; protein At2g01290.1, supported by cDNA: gi_15809809, supported by cDNA:
  misc_feature (1)..(212): Homolog of NCBI NO: 15229349 NR Description: putative ribose 5-phosphate isomerase; protein At3g04790.1, supported by cDNA: 6349., supported by cDNA:
  misc_feature (1)..(206): Homolog of NCBI NO: 38347196 NR Description: OSJNBa0023J03.8 [Oryza sativa (japonica
  misc_feature (1)..(212): Homolog of NCBI NO: 13430836 NR Description: putative ribose 5-phosphate isomerase
  misc_feature (1)..(212): Homolog of NCBI NO: 15223936 NR Description: putative ribose 5-phosphate isomerase; protein At1g71100.1, supported by cDNA: 3116., supported by cDNA: [Arabidopsis thaliana] >gi|25329397|pir||E96735 hypothetical
  misc_feature (1)..(212): Homolog of NCBI NO: 21592672 NR Description: putative ribose 5-phosphate isomerase
  misc_feature (1)..(212): Homolog of NCBI NO: 15226223 NR Description: putative ribose 5-phosphate isomerase; protein At2g01290.1, supported by cDNA: gi_15809809, supported by cDNA:
  misc_feature (1)..(212): Homolog of NCBI NO: 15229349 NR Description: putative ribose 5-phosphate isomerase; protein At3g04790.1, supported by cDNA: 6349., supported by cDNA:
  misc_feature (1)..(212): Homolog of NCBI NO: 21594002 NR Description: putative ribose 5-phosphate isomerase
  misc_feature (1)..(212): Homolog of NCBI NO: 18654317 NR Description: ribose-5-phosphate isomerase [Spinacia oleracea]
  misc_feature (1)..(212): Homolog of NCBI NO: 34393835 NR Description: putative ribose-5-phosphate isomerase [Oryza
  misc_feature (1)..(212): Homolog of NCBI NO: 15226223 NR Description: putative ribose 5-phosphate isomerase; protein At2g01290.1, supported by cDNA: gi_15809809, supported by cDNA:
  misc_feature (1)..(212): Homolog of NCBI NO: 21594002 NR Description: putative ribose 5-phosphate isomerase
  misc_feature (1)..(212): Homolog of NCBI NO: 34393836 NR Description: putative ribose-5-phosphate isomerase [Oryza
  misc_feature (1)..(212): Homolog of NCBI NO: 13430836 NR Description: putative ribose 5-phosphate isomerase
  misc_feature (1)..(206): Homolog of NCBI NO: 38347196 NR Description: OSJNBa0023J03.8 [Oryza sativa (japonica

SEQ ID NO: 8768 - protein, 178 aa, Zea mays subsp. mays; identical to SEQ ID NO: 4800
  peptide (1)..(178): Ceres Seq. ID no. 12386872

SEQ ID NO: 8769 - DNA, 1267 bp, Zea mays subsp. mays
  misc_feature (1)..(1267): Ceres Seq. ID no. 12373164
  misc_feature: MA Experiment ID: 108535 Result: Up-regulated in Transcription
  misc_feature: MA Experiment 108535 PARAMETER Experiment Name: Zm_Meristem_P Parameter: Age (day) Value: 8
  misc_feature: MA Experiment 108535 PARAMETER Experiment Name: Zm_Meristem_P Parameter: Organism Value: Zea mays
  misc_feature: MA Experiment 108535 PARAMETER Experiment Name: Zm_Meristem_P Parameter: Plant Line Value: 35A19
  misc_feature: MA Experiment 108535 PARAMETER Experiment Name: Zm_Meristem_P Parameter: Tissue Value: Root Meristem vs. Above Root Meristem
  misc_feature: MA Experiment ID: 108543 Result: Up-regulated in Transcription
  misc_feature: MA Experiment ID: 108556 Result: Down-regulated in Transcription
  misc_feature: MA Experiment 108556 PARAMETER Experiment Name: Zm_Drought_P Parameter: Age (day) Value: 9
  misc_feature: MA Experiment 108556 PARAMETER Experiment Name: Zm_Drought_P Parameter: Organism Value: Zea mays
  misc_feature: MA Experiment 108556 PARAMETER Experiment Name: Zm_Drought_P Parameter: Plant Line Value: 35A19
  misc_feature: MA Experiment 108556 PARAMETER Experiment Name: Zm_Drought_P Parameter: Timepoint (hr) Value: 24
  misc_feature: MA Experiment 108556 PARAMETER Experiment Name: Zm_Drought_P Parameter: Tissue Value: Aerial
  misc_feature: MA Experiment 108556 PARAMETER Experiment Name: Zm_Drought_P Parameter: Treatment Value: Drought vs. No Drought
  misc_feature: MA Experiment ID: 20000108 Result: Up-regulated in Transcription
  misc_feature: MA Experiment 20000108 PARAMETER Experiment Name: Zm_Root-Tips_P Parameter: Age (day) Value: 12
  misc_feature: MA Experiment 20000108 PARAMETER Experiment Name: Zm_Root-Tips_P Parameter: Organism Value: Zea mays
  misc_feature: MA Experiment 20000108 PARAMETER Experiment Name: Zm_Root-Tips_P Parameter: Tissue Value: Root tips vs. Root mid region    35
  misc_feature: MA Experiment 20000108 PARAMETER Experiment Name: Zm_Root-Tips_P Parameter: Tissue Value: Root tips vs. Root mid region   Sequence Listing-Misc Features (4)
  misc_feature: MA Experiment ID: 20000477 Result: Down-regulated in Transcription
  misc_feature: MA Experiment 20000477 PARAMETER Experiment Name: Zm_5mM_SA_P Parameter: Age (day) Value: 10
  misc_feature: MA Experiment 20000477 PARAMETER Experiment Name: Zm_5mM_SA_P Parameter: Organism Value: Zea mays
  misc_feature: MA Experiment 20000477 PARAMETER Experiment Name: Zm_5mM_SA_P Parameter: Plant Line Value: 35A19
  misc_feature: MA Experiment 20000477 PARAMETER Experiment Name: Zm_5mM_SA_P Parameter: Timepoint (hr) Value: 48
  misc_feature: MA Experiment 20000477 PARAMETER Experiment Name: Zm_5mM_SA_P Parameter: Tissue Value: Aerial
  misc_feature: MA Experiment 20000477 PARAMETER Experiment Name: Zm_5mM_SA_P Parameter: Treatment Value: 5mM SA vs. No Treatment
  misc_feature: MA Experiment ID: 20000479 Result: Down-regulated in Transcription
  misc_feature: MA Experiment 20000479 PARAMETER Experiment Name: Zm_Drought_P Parameter: Age (day) Value: 10
  misc_feature: MA Experiment 20000479 PARAMETER Experiment Name: Zm_Drought_P Parameter: Organism Value: Zea mays
  misc_feature: MA Experiment 20000479 PARAMETER Experiment Name: Zm_Drought_P Parameter: Plant Line Value: 35A19
  misc_feature: MA Experiment 20000479 PARAMETER Experiment Name: Zm_Drought_P Parameter: Timepoint (hr) Value: 48
  misc_feature: MA Experiment 20000479 PARAMETER Experiment Name: Zm_Drought_P Parameter: Tissue Value: Aerial
  misc_feature: MA Experiment 20000479 PARAMETER Experiment Name: Zm_Drought_P Parameter: Treatment Value: Drought vs. No Drought
  misc_feature: MA Experiment ID: 20000487 Result: Down-regulated in Transcription
  misc_feature: MA Experiment 20000487 PARAMETER Experiment Name: Zm_50mM_NH4NO3_L_to_H_P Parameter: Organism Value: Zea mays
  misc_feature: MA Experiment 20000487 PARAMETER Experiment Name: Zm_50mM_NH4NO3_L_to_H_P Parameter: Timepoint (hr) Value: 4
  misc_feature: MA Experiment 20000487 PARAMETER Experiment Name: Zm_50mM_NH4NO3_L_to_H_P Parameter: Tissue Value: Leaves
  misc_feature: MA Experiment 20000487 PARAMETER Experiment Name: Zm_50mM_NH4NO3_L_to_H_P Parameter: Treatment Value: 50mM NH4NO3 vs. 100mM Mannitol
  misc_feature: MA Experiment ID: 20000632 Result: Down-regulated in Transcription
  misc_feature: MA Experiment 20000632 PARAMETER Experiment Name: Zm_Herbicide-Treatments_P Parameter: Timepoint (hr) Value: 4
  misc_feature: MA Experiment 20000632 PARAMETER Experiment Name: Zm_Herbicide-Treatments_P Parameter: Tissue Value: Aerial
  misc_feature: MA Experiment 20000632 PARAMETER Experiment Name: Zm_Herbicide-Treatments_P Parameter: Treatment Value: Glean vs. No Treatment
actctccagtctccactagcatcagtcgccgccgcctatcctcgagcaccatttccatcaacagcatccgcctctggcaagctagcgacagcaactcatggcactccgcgcgctcgacaacacgatgcccgccgccgtcgaggagcggcccaagaaggtggctaaggtgggcgtccccgccgccgccgccaaggccgccgcctccccctcccccgggagtggcggcaagaagaagaaggggaacgacgagaactcggcgccaagggccacggccgcggcggcggagcaggcggtggagtacatctcgtcggaggagctggaggcggcggccagccccaaggccaaggccgcggggctggtgcgcggacctggactccaaggactgggtcaggacctgcgaggcgctcaacgacgcgcgccgcctcgcgatccaccaccccgcgctgctgaacccgatcctggagaaggtggtgctggcggtcgtgaagacgatgaagagcccccgcagcgcggtgctcaagacgtccatcatggcctgcgccgacatcttcagttccttcggcaacctcctcgcctccgtctccgacgacaccttcgacaagctgctgctccagctcctgctgaaggcgtcccaggacaagcggttcgtgtgcgaggaggccgagaaggcgacgcgcgcgatggcggcgtcgatggcgccgctgccgctgctgaagaagctcaaggcgtacgtccaccacgccaacctcagggtcagggctaaggccgccgtcgccatctcccactgcgccgcccggatggacatcggcgcgatgaaggagttcgggatgtcggcgctgctgcagctggcggcggagctgctgaacgaccggctgccggaggcgagggaggccgcccgcggcgtggtggcgtcgacgcacgcggccttcgccaaggaggccgccgcgagcggccaggaggacgacgcggccgcgtcctgggagagcctctgcgcgctcagcctcccgcccatctccgcgcaggccgtcgccaagatcgctgccgccgccgcctcctcgcagtagccactgcacgcgtgcggacgtgcgccgctggcgttgattttgggggtcgtctggttcggttcagaagtagcgctcgtgagtcttcagacagagctcgtttgtcgccgccgccgccgagtctgtttgtttgttctttctactccatgctatctcgcatggttagtgttctgtttatggcttcgtcaagtaataacatatcaatt

SEQ ID NO: 8770 - protein, 353 aa, Zea mays subsp. mays
  peptide (1)..(353): Ceres Seq. ID no. 12373165
  misc_feature (122)..(348): Homolog of NCBI NO: 21593517 NR Description: unknown [Arabidopsis thaliana]
  misc_feature (122)..(348): Homolog of NCBI NO: 18414533 NR Description: expressed protein; protein id: At4g15830.1,
  misc_feature (122)..(349): Homolog of NCBI NO: 21537265 NR Description: unknown [Arabidopsis thaliana]
  misc_feature (122)..(349): Homolog of NCBI NO: 18395821 NR Description: expressed protein; protein id: At3g01450.1, by cDNA: 125711. [Arabidopsis thaliana]
  misc_feature (155)..(348): Homolog of NCBI NO: 7485173 NR Description: hypothetical protein - Arabidopsis thaliana hypothetical protein [Arabidopsis thaliana]
  misc_feature (121)..(345): Homolog of NCBI NO: 15241493 NR Description: putative protein; protein id: At5g14790.1, by cDNA: 98046., supported by cDNA: gi_20260677 [Arabidopsis
  misc_feature (132)..(304): Homolog of NCBI NO: 9294314 NR Description: gb|AAF24615.1~gene_id:K24M9.2~similar to unknown
  misc_feature (139)..(267): Homolog of NCBI NO: 15229670 NR Description: unknown protein; protein id: At3g18530.1
  misc_feature (7)..(117): Homolog of NCBI NO: 23274133 NR Description: Similar to serine/arginine repetitive matrix 1
  misc_feature (43)..(105): Homolog of NCBI NO: 465445 NR Description: PROBABLE NUCLEAR ANTIGEN >gi|418708|pir||B45344
SPVSTSISRRRLSSSTISINSIRLWQASDSNSWHSARSTTRCPPPSRSGPRRWLRWASPPPPPRPPPPPPPGVAARRRRGTTRTRRQGPRPRRRSRRWSTSRRRSWRRRPAPRPRPRGWCADLDSKDWVRTCEALNDARRLAIHHPALLNPILEKVVLAVVKTMKSPRSAVLKTSIMACADIFSSFGNLLASVSDDTFDKLLLQLLLKASQDKRFVCEEAEKATRAMAASMAPLPLLKKLKAYVHHANLRVRAKAAVAISHCAARMDIGAMKEFGMSALLQLAAELLNDRLPEAREAARGVVASTHAAFAKEAAASGQEDDAAASWESLCALSLPPISAQAVAKIAAAAASSQ

SEQ ID NO: 8771 - protein, 221 aa, Zea mays subsp. mays
  peptide (1)..(221): Ceres Seq. ID no. 12373166
  misc_feature (173)..(221): Homolog of NCBI NO: 9453859 NR Description: EBNA-1 [Cynomolgus Epstein-Barr Virus Si-IIA]
  misc_feature (171)..(221): Homolog of NCBI NO: 9625624 NR Description: nuclear antigen EBNA1 [Human herpesvirus 4]
  misc_feature (170)..(221): Homolog of NCBI NO: 9453857 NR Description: EBNA-1 [Cynomolgus Epstein-Barr Virus TsB-B6]
  misc_feature (197)..(221): Homolog of NCBI NO: 465445 NR Description: PROBABLE NUCLEAR ANTIGEN >gi|418708|pir||B45344
  misc_feature (197)..(221): Homolog of NCBI NO: 93144 NR Description: hypothetical protein - suid herpesvirus 1 (strain
  misc_feature (27)..(221): Homolog of NCBI NO: 13561986 NR Description: major ampullate spidroin 2 [Argiope trifasciata]
MALRALDNTMPAAVEERPKKVAKVGVPAAAAKAAASPSPGSGGKKKKGNDENSAPRATAAAAEQAVEYISSEELEAAASPKAKAAGLVRGPGLQGLGQDLRGAQRRAPPRDPPPRAAEPDPGEGGAGGREDDEEPPQRGAQDVHHGLRRHLQFLRQPPRLRLRRHLRQAAAPAPAEGVPGQAVRVRGGREGDARDGGVDGAAAAAEEAQGVRPPRQPQGQG

SEQ ID NO: 8772 - protein, 212 aa, Zea mays subsp. mays
  peptide (1)..(212): Ceres Seq. ID no. 12373167
  misc_feature (164)..(212): Homolog of NCBI NO: 9453859 NR Description: EBNA-1 [Cynomolgus Epstein-Barr Virus Si-IIA]
  misc_feature (162)..(212): Homolog of NCBI NO: 9625624 NR Description: nuclear antigen EBNA1 [Human herpesvirus 4]
  misc_feature (161)..(212): Homolog of NCBI NO: 9453857 NR Description: EBNA-1 [Cynomolgus Epstein-Barr Virus TsB-B6]
  misc_feature (188)..(212): Homolog of NCBI NO: 465445 NR Description: PROBABLE NUCLEAR ANTIGEN >gi|418708|pir||B45344
  misc_feature (188)..(212): Homolog of NCBI NO: 93144 NR Description: hypothetical protein - suid herpesvirus 1 (strain
  misc_feature (18)..(212): Homolog of NCBI NO: 13561986 NR Description: major ampullate spidroin 2 [Argiope trifasciata]
MPAAVEERPKKVAKVGVPAAAAKAAASPSPGSGGKKKKGNDENSAPRATAAAAEQAVEYISSEELEAAASPKAKAAGLVRGPGLQGLGQDLRGAQRRAPPRDPPPRAAEPDPGEGGAGGREDDEEPPQRGAQDVHHGLRRHLQFLRQPPRLRLRRHLRQAAAPAPAEGVPGQAVRVRGGREGDARDGGVDGAAAAAEEAQGVRPPRQPQGQG

SEQ ID NO: 8773 - DNA, 1112 bp, Zea mays subsp. mays
  misc_feature (1)..(1112): Ceres Seq. ID no. 12382179
  misc_feature: MA Experiment ID: 108504 Result: Up-regulated in Transcription
  misc_feature: MA Experiment 108504 PARAMETER Experiment Name: Zm_Drought_P Parameter: Age (day) Value: 8
  misc_feature: MA Experiment 108504 PARAMETER Experiment Name: Zm_Drought_P Parameter: Organism Value: Zea mays
  misc_feature: MA Experiment 108504 PARAMETER Experiment Name: Zm_Drought_P Parameter: Plant Line Value: 35A19
  misc_feature: MA Experiment 108504 PARAMETER Experiment Name: Zm_Drought_P Parameter: Timepoint (hr) Value: 12
  misc_feature: MA Experiment 108504 PARAMETER Experiment Name: Zm_Drought_P Parameter: Tissue Value: Aerial
  misc_feature: MA Experiment 108504 PARAMETER Experiment Name: Zm_Drought_P Parameter: Treatment Value: Drought vs. No Drought
  misc_feature: MA Experiment ID: 108526 Result: Up-regulated in Transcription
  misc_feature: MA Experiment 108526 PARAMETER Experiment Name: Zm_5mM_NO_P Parameter: Age (day) Value: 8
  misc_feature: MA Experiment 108526 PARAMETER Experiment Name: Zm_5mM_NO_P Parameter: Organism Value: Zea mays
  misc_feature: MA Experiment 108526 PARAMETER Experiment Name: Zm_5mM_NO_P Parameter: Plant Line Value: 35A19
  misc_feature: MA Experiment 108526 PARAMETER Experiment Name: Zm_5mM_NO_P Parameter: Timepoint (hr) Value: 1
  misc_feature: MA Experiment 108526 PARAMETER Experiment Name: Zm_5mM_NO_P Parameter: Tissue Value: Aerial
  misc_feature: MA Experiment 108526 PARAMETER Experiment Name: Zm_5mM_NO_P Parameter: Treatment Value: 5mM NO vs. No Treatment
  misc_feature: MA Experiment ID: 108527 Result: Up-regulated in Transcription
  misc_feature: MA Experiment 108527 PARAMETER Experiment Name: Zm_5mM_NO_P Parameter: Age (day) Value: 8
  misc_feature: MA Experiment 108527 PARAMETER Experiment Name: Zm_5mM_NO_P Parameter: Organism Value: Zea mays
  misc_feature: MA Experiment 108527 PARAMETER Experiment Name: Zm_5mM_NO_P Parameter: Plant Line Value: 35A19
  misc_feature: MA Experiment 108527 PARAMETER Experiment Name: Zm_5mM_NO_P Parameter: Timepoint (hr) Value: 6
  misc_feature: MA Experiment 108527 PARAMETER Experiment Name: Zm_5mM_NO_P Parameter: Tissue Value: Aerial
  misc_feature: MA Experiment 108527 PARAMETER Experiment Name: Zm_5mM_NO_P Parameter: Treatment Value: 5mM NO vs. No Treatment
  misc_feature: MA Experiment ID: 108528 Result: Down-regulated in Transcription
  misc_feature: MA Experiment 108528 PARAMETER Experiment Name: Zm_Imbibed_Seeds_P Parameter: Age (day) Value: 5 vs. 2
  misc_feature: MA Experiment 108528 PARAMETER Experiment Name: Zm_Imbibed_Seeds_P Parameter: Organism Value: Zea mays
  misc_feature: MA Experiment 108528 PARAMETER Experiment Name: Zm_Imbibed_Seeds_P Parameter: Plant Line Value: 35A19
  misc_feature: MA Experiment 108528 PARAMETER Experiment Name: Zm_Imbibed_Seeds_P Parameter: Tissue Value: Aerial vs. Embryo
  misc_feature: MA Experiment ID: 108529 Result: Down-regulated in Transcription
  misc_feature: MA Experiment 108529 PARAMETER Experiment Name: Zm_Imbibed_Seeds_P Parameter: Age (day) Value: 5 vs. 2
  misc_feature: MA Experiment 108529 PARAMETER Experiment Name: Zm_Imbibed_Seeds_P Parameter: Organism Value: Zea mays
  misc_feature: MA Experiment 108529 PARAMETER Experiment Name: Zm_Imbibed_Seeds_P Parameter: Plant Line Value: 35A19
  misc_feature: MA Experiment 108529 PARAMETER Experiment Name: Zm_Imbibed_Seeds_P Parameter: Tissue Value: Roots vs. Embryo
  misc_feature: MA Experiment ID: 108535 Result: Up-regulated in Transcription
  misc_feature: MA Experiment 108535 PARAMETER Experiment Name: Zm_Meristem_P Parameter: Age (day) Value: 8
  misc_feature: MA Experiment 108535 PARAMETER Experiment Name: Zm_Meristem_P Parameter: Organism Value: Zea mays
  misc_feature: MA Experiment 108535 PARAMETER Experiment Name: Zm_Meristem_P Parameter: Plant Line Value: 35A19
  misc_feature: MA Experiment 108535 PARAMETER Experiment Name: Zm_Meristem_P Parameter: Tissue Value: Root Meristem vs. Above Root Meristem
  misc_feature: MA Experiment ID: 108540 Result: Up-regulated in Transcription
  misc_feature: MA Experiment 108540 PARAMETER Experiment Name: Zm_20percent_PEG_P Parameter: Age (day) Value: 8
  misc_feature: MA Experiment 108540 PARAMETER Experiment Name: Zm_20percent_PEG_P Parameter: Organism Value: Zea mays
  misc_feature: MA Experiment 108540 PARAMETER Experiment Name: Zm_20percent_PEG_P Parameter: Plant Line Value: 35A19
  misc_feature: MA Experiment 108540 PARAMETER Experiment Name: Zm_20percent_PEG_P Parameter: Timepoint (hr) Value: 6
  misc_feature: MA Experiment 108540 PARAMETER Experiment Name: Zm_20percent_PEG_P Parameter: Tissue Value: Aerial
  misc_feature: MA Experiment 108540 PARAMETER Experiment Name: Zm_20percent_PEG_P Parameter: Treatment Value: 20percent PEG vs. No Treatment
  misc_feature: MA Experiment ID: 108542 Result: Up-regulated in Transcription
  misc_feature: MA Experiment 108542 PARAMETER Experiment Name: Zm_150mM_NaCl_P Parameter: Age (day) Value: 8
  misc_feature: MA Experiment 108542 PARAMETER Experiment Name: Zm_150mM_NaCl_P Parameter: Organism Value: Zea mays
  misc_feature: MA Experiment 108542 PARAMETER Experiment Name: Zm_150mM_NaCl_P Parameter: Plant Line Value: 35A19
  misc_feature: MA Experiment 108542 PARAMETER Experiment Name: Zm_150mM_NaCl_P Parameter: Timepoint (hr) Value: 6
  misc_feature: MA Experiment 108542 PARAMETER Experiment Name: Zm_150mM_NaCl_P Parameter: Tissue Value: Aerial
  misc_feature: MA Experiment 108542 PARAMETER Experiment Name: Zm_150mM_NaCl_P Parameter: Treatment Value: 150mM NaCl vs. No Treatment
  misc_feature: MA Experiment ID: 108543 Result: Down-regulated in Transcription
  misc_feature: MA Experiment ID: 108545 Result: Down-regulated in Transcription
  misc_feature: MA Experiment 108545 PARAMETER Experiment Name: Zm_Imbibed_Seeds_P Parameter: Age (day) Value: 3 vs. 2
  misc_feature: MA Experiment 108545 PARAMETER Experiment Name: Zm_Imbibed_Seeds_P Parameter: Organism Value: Zea mays
  misc_feature: MA Experiment 108545 PARAMETER Experiment Name: Zm_Imbibed_Seeds_P Parameter: Plant Line Value: 35A19
  misc_feature: MA Experiment 108545 PARAMETER Experiment Name: Zm_Imbibed_Seeds_P Parameter: Tissue Value: Aerial vs. Embryo
  misc_feature: MA Experiment ID: 108546 Result: Down-regulated in Transcription
  misc_feature: MA Experiment 108546 PARAMETER Experiment Name: Zm_Imbibed_Seeds_P Parameter: Age (day) Value: 3 vs. 2
  misc_feature: MA Experiment 108546 PARAMETER Experiment Name: Zm_Imbibed_Seeds_P Parameter: Organism Value: Zea mays
  misc_feature: MA Experiment 108546 PARAMETER Experiment Name: Zm_Imbibed_Seeds_P Parameter: Plant Line Value: 35A19
  misc_feature: MA Experiment 108546 PARAMETER Experiment Name: Zm_Imbibed_Seeds_P Parameter: Tissue Value: Roots vs. Embryo
  misc_feature: MA Experiment ID: 108547 Result: Down-regulated in Transcription
  misc_feature: MA Experiment 108547 PARAMETER Experiment Name: Zm_Imbibed_Seeds_P Parameter: Age (day) Value: 4 vs. 2
  misc_feature: MA Experiment 108547 PARAMETER Experiment Name: Zm_Imbibed_Seeds_P Parameter: Organism Value: Zea mays
  misc_feature: MA Experiment 108547 PARAMETER Experiment Name: Zm_Imbibed_Seeds_P Parameter: Plant Line Value: 35A19
  misc_feature: MA Experiment 108547 PARAMETER Experiment Name: Zm_Imbibed_Seeds_P Parameter: Tissue Value: Aerial vs. Embryo
  misc_feature: MA Experiment ID: 108556 Result: Up-regulated in Transcription
  misc_feature: MA Experiment 108556 PARAMETER Experiment Name: Zm_Drought_P Parameter: Age (day) Value: 9
  misc_feature: MA Experiment 108556 PARAMETER Experiment Name: Zm_Drought_P Parameter: Organism Value: Zea mays
  misc_feature: MA Experiment 108556 PARAMETER Experiment Name: Zm_Drought_P Parameter: Plant Line Value: 35A19
  misc_feature: MA Experiment 108556 PARAMETER Experiment Name: Zm_Drought_P Parameter: Timepoint (hr) Value: 24
  misc_feature: MA Experiment 108556 PARAMETER Experiment Name: Zm_Drought_P Parameter: Tissue Value: Aerial
  misc_feature: MA Experiment 108556 PARAMETER Experiment Name: Zm_Drought_P Parameter: Treatment Value: Drought vs. No Drought
  misc_feature: MA Experiment ID: 108559 Result: Up-regulated in Transcription
  misc_feature: MA Experiment 108559 PARAMETER Experiment Name: Zm_5mM_NO_P Parameter: Age (day) Value: 8
  misc_feature: MA Experiment 108559 PARAMETER Experiment Name: Zm_5mM_NO_P Parameter: Organism Value: Zea mays
  misc_feature: MA Experiment 108559 PARAMETER Experiment Name: Zm_5mM_NO_P Parameter: Plant Line Value: 35A19
  misc_feature: MA Experiment 108559 PARAMETER Experiment Name: Zm_5mM_NO_P Parameter: Timepoint (hr) Value: 12
  misc_feature: MA Experiment 108559 PARAMETER Experiment Name: Zm_5mM_NO_P Parameter: Tissue Value: Aerial
  misc_feature: MA Experiment 108559 PARAMETER Experiment Name: Zm_5mM_NO_P Parameter: Treatment Value: 5mM NO vs. No Treatment
  misc_feature: MA Experiment ID: 108597 Result: Up-regulated in Transcription
  misc_feature: MA Experiment 108597 PARAMETER Experiment Name: Zm_100uM_ABA_P Parameter: Age (day) Value: 9
  misc_feature: MA Experiment 108597 PARAMETER Experiment Name: Zm_100uM_ABA_P Parameter: Organism Value: Zea mays
  misc_feature: MA Experiment 108597 PARAMETER Experiment Name: Zm_100uM_ABA_P Parameter: Plant Line Value: 35A19
  misc_feature: MA Experiment 108597 PARAMETER Experiment Name: Zm_100uM_ABA_P Parameter: Timepoint (hr) Value: 24
  misc_feature: MA Experiment 108597 PARAMETER Experiment Name: Zm_100uM_ABA_P Parameter: Tissue Value: Aerial
  misc_feature: MA Experiment 108597 PARAMETER Experiment Name: Zm_100uM_ABA_P Parameter: Treatment Value: 100uM ABA vs. No Treatment
  misc_feature: MA Experiment ID: 108689 Result: Up-regulated in Transcription
  misc_feature: MA Experiment 108689 PARAMETER Experiment Name: Zm_Drought_Roots_P Parameter: Age (day) Value: 9
  misc_feature: MA Experiment 108689 PARAMETER Experiment Name: Zm_Drought_Roots_P Parameter: Organism Value: Zea mays
  misc_feature: MA Experiment 108689 PARAMETER Experiment Name: Zm_Drought_Roots_P Parameter: Plant Line Value: 35A19
  misc_feature: MA Experiment 108689 PARAMETER Experiment Name: Zm_Drought_Roots_P Parameter: Timepoint (hr) Value: 24
  misc_feature: MA Experiment 108689 PARAMETER Experiment Name: Zm_Drought_Roots_P Parameter: Tissue Value: Roots
  misc_feature: MA Experiment 108689 PARAMETER Experiment Name: Zm_Drought_Roots_P Parameter: Treatment Value: Drought vs. No Drought
  misc_feature: MA Experiment ID: 20000477 Result: Up-regulated in Transcription
  misc_feature: MA Experiment 20000477 PARAMETER Experiment Name: Zm_5mM_SA_P Parameter: Age (day) Value: 10
  misc_feature: MA Experiment 20000477 PARAMETER Experiment Name: Zm_5mM_SA_P Parameter: Organism Value: Zea mays
  misc_feature: MA Experiment 20000477 PARAMETER Experiment Name: Zm_5mM_SA_P Parameter: Plant Line Value: 35A19
  misc_feature: MA Experiment 20000477 PARAMETER Experiment Name: Zm_5mM_SA_P Parameter: Timepoint (hr) Value: 48
  misc_feature: MA Experiment 20000477 PARAMETER Experiment Name: Zm_5mM_SA_P Parameter: Tissue Value: Aerial
  misc_feature: MA Experiment 20000477 PARAMETER Experiment Name: Zm_5mM_SA_P Parameter: Treatment Value: 5mM SA vs. No Treatment
  misc_feature: MA Experiment ID: 20000479 Result: Up-regulated in Transcription
  misc_feature: MA Experiment 20000479 PARAMETER Experiment Name: Zm_Drought_P Parameter: Age (day) Value: 10
  misc_feature: MA Experiment 20000479 PARAMETER Experiment Name: Zm_Drought_P Parameter: Organism Value: Zea mays
  misc_feature: MA Experiment 20000479 PARAMETER Experiment Name: Zm_Drought_P Parameter: Plant Line Value: 35A19
  misc_feature: MA Experiment 20000479 PARAMETER Experiment Name: Zm_Drought_P Parameter: Timepoint (hr) Value: 48
  misc_feature: MA Experiment 20000479 PARAMETER Experiment Name: Zm_Drought_P Parameter: Tissue Value: Aerial
  misc_feature: MA Experiment 20000479 PARAMETER Experiment Name: Zm_Drought_P Parameter: Treatment Value: Drought vs. No Drought
  misc_feature: MA Experiment ID: 20000480 Result: Up-regulated in Transcription
  misc_feature: MA Experiment 20000480 PARAMETER Experiment Name: Zm_Drought_P Parameter: Age (day) Value: 11
  misc_feature: MA Experiment 20000480 PARAMETER Experiment Name: Zm_Drought_P Parameter: Organism Value: Zea mays
  misc_feature: MA Experiment 20000480 PARAMETER Experiment Name: Zm_Drought_P Parameter: Plant Line Value: 35A19
  misc_feature: MA Experiment 20000480 PARAMETER Experiment Name: Zm_Drought_P Parameter: Timepoint (hr) Value: 72
  misc_feature: MA Experiment 20000480 PARAMETER Experiment Name: Zm_Drought_P Parameter: Tissue Value: Aerial
  misc_feature: MA Experiment 20000480 PARAMETER Experiment Name: Zm_Drought_P Parameter: Treatment Value: Drought vs. No Drought
gcaggctgctccggcagactccttcaccgcgaagacttctcctctcctctctcctctctcccttccactcgcgctctcctggataccgcgcgcggcgacgagatggcgatagatcacgggacccctctcgggctgaagcggagaggcgccatgggcggaggtggcgagtgctgcgacgacggcagcgagacccggcggtggccgccgtggctgaggccgctgctgtccgcgagcttcttcgtccaatgcagggtccacgccgacgcgcacaagagcgagtgcaacatgtactgcctcgactgcatgggcgacgctctctgcgcgctctgcctcgccgcgcgccaccgcgaccaccactccatccagatacggaggtcgtcgtaccacgacgtgatccgggtgtcggagatacagaaggtgctggacatcgccggcgtgcagacgtacatcatcaacagcgcgcgcgtggtgttcctgaacgagcggccgcagccccgcccgggcaagggcgtcaccaacacctgcgaggtctgcgagcgcagcctcctcgactgcttccgcttctgctcccttgggtgcaagatagtgggcacggcccgtggctaccgtcctgggaagaagaagcacggcggcggcggcggtaacaagaagagggcggcgccggcgccggcgcttaaggacgtgcggtctgactcggaggactcgtgcaccagcaccagcggcgccagcagcgacaagagcagcgtcgtgcagagctcccctccgccgccgacctctgccagccaccgcccccccgggaacaagcgccggaagggcgtcccgcaccggtcgcccttgggcagcctcatcgtcgagctctaggactcttcgtcagcgccaaggcaaggcaaggcaacgcactctgtactgtacatgacataccccccgaagagaagggaataacaaacagtaagcctctggacgtggagggcgaagggcgacagcggtaagccgtaagatcggacaatccttagttttgcttcttctcaggttttgttttgcttttacagttactagcactctagcagtggtaccatcagtaagataaccgcgactaagttttgcagccttgt

SEQ ID NO: 8774 - protein, 286 aa, Zea mays subsp. mays
  peptide (1)..(286): Ceres Seq. ID no. 12382180
  misc_feature (66)..(273): Pfam Name: Protein of unknown function, DUF597 Pfam Description: Protein of unknown function, DUF597
  misc_feature (48)..(285): Homolog of NCBI NO: 38346725 NR Description: OSJNBa0086O06.23 [Oryza sativa (japonica
  misc_feature (35)..(285): Homolog of NCBI NO: 37537092 NR Description: unknown protein [Oryza sativa (japonica
  misc_feature (63)..(285): Homolog of NCBI NO: 6714272 NR Description: F6N18.8 [Arabidopsis thaliana]
  misc_feature (63)..(285): Homolog of NCBI NO: 18398555 NR Description: expressed protein; protein id: At1g32700.1,
  misc_feature (46)..(280): Homolog of NCBI NO: 15236696 NR Description: putative protein; protein id: At4g17900.1
  misc_feature (63)..(285): Homolog of NCBI NO: 21554139 NR Description: unknown [Arabidopsis thaliana]
  misc_feature (68)..(223): Homolog of NCBI NO: 18394936 NR Description: expressed protein; protein id: At1g21000.1, by cDNA: 119384., supported by cDNA: gi_14030626, supported by gi_16226406 [Arabidopsis thaliana]
  misc_feature (68)..(223): Homolog of NCBI NO: 25337907 NR Description: hypothetical protein F9H16.1 - Arabidopsis >gi|4836888|gb|AAD30591.1|AC007369_1 Unknown protein [Arabidopsis >gi|13877713|gb|AAK43934.1|AF370615_1 Unknown protein
  misc_feature (68)..(223): Homolog of NCBI NO: 21537073 NR Description: unknown [Arabidopsis thaliana]
  misc_feature (66)..(278): Homolog of NCBI NO: 15237491 NR Description: putative protein; protein id: At5g46710.1, by cDNA: 42747. [Arabidopsis thaliana] gene_id:MZA15.12~pir||T05076~similar to unknown protein
AGCSGRLLHREDFSSPLSSLPSTRALLDTARGDEMAIDHGTPLGLKRRGAMGGGGECCDDGSETRRWPPWLRPLLSASFFVQCRVHADAHKSECNMYCLDCMGDALCALCLAARHRDHHSIQIRRSSYHDVIRVSEIQKVLDIAGVQTYIINSARVVFLNERPQPRPGKGVTNTCEVCERSLLDCFRFCSLGCKIVGTARGYRPGKKKHGGGGGNKKRAAPAPALKDVRSDSEDSCTSTSGASSDKSSVVQSSPPPPTSASHRPPGNKRRKGVPHRSPLGSLIVEL

SEQ ID NO: 8775 - protein, 252 aa, Zea mays subsp. mays
  peptide (1)..(252): Ceres Seq. ID no. 12382181
  misc_feature (32)..(239): Pfam Name: Protein of unknown function, DUF597 Pfam Description: Protein of unknown function, DUF597
  misc_feature (14)..(251): Homolog of NCBI NO: 38346725 NR Description: OSJNBa0086O06.23 [Oryza sativa (japonica
  misc_feature (1)..(251): Homolog of NCBI NO: 37537092 NR Description: unknown protein [Oryza sativa (japonica
  misc_feature (29)..(251): Homolog of NCBI NO: 6714272 NR Description: F6N18.8 [Arabidopsis thaliana]
  misc_feature (29)..(251): Homolog of NCBI NO: 18398555 NR Description: expressed protein; protein id: At1g32700.1,
  misc_feature (12)..(246): Homolog of NCBI NO: 15236696 NR Description: putative protein; protein id: At4g17900.1
  misc_feature (29)..(251): Homolog of NCBI NO: 21554139 NR Description: unknown [Arabidopsis thaliana]
  misc_feature (34)..(189): Homolog of NCBI NO: 18394936 NR Description: expressed protein; protein id: At1g21000.1, by cDNA: 119384., supported by cDNA: gi_14030626, supported by gi_16226406 [Arabidopsis thaliana]
  misc_feature (34)..(189): Homolog of NCBI NO: 25337907 NR Description: hypothetical protein F9H16.1 - Arabidopsis >gi|4836888|gb|AAD30591.1|AC007369_1 Unknown protein [Arabidopsis >gi|13877713|gb|AAK43934.1|AF370615_1 Unknown protein
  misc_feature (34)..(189): Homolog of NCBI NO: 21537073 NR Description: unknown [Arabidopsis thaliana]
  misc_feature (32)..(244): Homolog of NCBI NO: 15237491 NR Description: putative protein; protein id: At5g46710.1, by cDNA: 42747. [Arabidopsis thaliana] gene_id:MZA15.12~pir||T05076~similar to unknown protein
MAIDHGTPLGLKRRGAMGGGGECCDDGSETRRWPPWLRPLLSASFFVQCRVHADAHKSECNMYCLDCMGDALCALCLAARHRDHHSIQIRRSSYHDVIRVSEIQKVLDIAGVQTYIINSARVVFLNERPQPRPGKGVTNTCEVCERSLLDCFRFCSLGCKIVGTARGYRPGKKKHGGGGGNKKRAAPAPALKDVRSDSEDSCTSTSGASSDKSSVVQSSPPPPTSASHRPPGNKRRKGVPHRSPLGSLIVEL

SEQ ID NO: 8776 - protein, 236 aa, Zea mays subsp. mays
  peptide (1)..(236): Ceres Seq. ID no. 12382182
  misc_feature (16)..(223): Pfam Name: Protein of unknown function, DUF597 Pfam Description: Protein of unknown function, DUF597
  misc_feature (1)..(235): Homolog of NCBI NO: 38346725 NR Description: OSJNBa0086O06.23 [Oryza sativa (japonica
  misc_feature (1)..(235): Homolog of NCBI NO: 37537092 NR Description: unknown protein [Oryza sativa (japonica
  misc_feature (13)..(235): Homolog of NCBI NO: 6714272 NR Description: F6N18.8 [Arabidopsis thaliana]
  misc_feature (13)..(235): Homolog of NCBI NO: 18398555 NR Description: expressed protein; protein id: At1g32700.1,
  misc_feature (1)..(230): Homolog of NCBI NO: 15236696 NR Description: putative protein; protein id: At4g17900.1
  misc_feature (13)..(235): Homolog of NCBI NO: 21554139 NR Description: unknown [Arabidopsis thaliana]
  misc_feature (18)..(173): Homolog of NCBI NO: 18394936 NR Description: expressed protein; protein id: At1g21000.1, by cDNA: 119384., supported by cDNA: gi_14030626, supported by gi_16226406 [Arabidopsis thaliana]
  misc_feature (18)..(173): Homolog of NCBI NO: 25337907 NR Description: hypothetical protein F9H16.1 - Arabidopsis >gi|4836888|gb|AAD30591.1|AC007369_1 Unknown protein [Arabidopsis >gi|13877713|gb|AAK43934.1|AF370615_1 Unknown protein
  misc_feature (18)..(173): Homolog of NCBI NO: 21537073 NR Description: unknown [Arabidopsis thaliana]
  misc_feature (16)..(228): Homolog of NCBI NO: 15237491 NR Description: putative protein; protein id: At5g46710.1, by cDNA: 42747. [Arabidopsis thaliana] gene_id:MZA15.12~pir||T05076~similar to unknown protein
MGGGGECCDDGSETRRWPPWLRPLLSASFFVQCRVHADAHKSECNMYCLDCMGDALCALCLAARHRDHHSIQIRRSSYHDVIRVSEIQKVLDIAGVQTYIINSARVVFLNERPQPRPGKGVTNTCEVCERSLLDCFRFCSLGCKIVGTARGYRPGKKKHGGGGGNKKRAAPAPALKDVRSDSEDSCTSTSGASSDKSSVVQSSPPPPTSASHRPPGNKRRKGVPHRSPLGSLIVEL

SEQ ID NO: 8777 - DNA, 1388 bp, Zea mays subsp. mays; identical to SEQ ID NO: 1761
  misc_feature (1)..(1388): Ceres Seq. ID no. 12588453
  misc_feature: MA Experiment ID: 20000492 Result: Up-regulated in Transcription
  misc_feature: MA Experiment 20000492 PARAMETER Experiment Name: Zm_Hybrid_Seed_Dev_P Parameter: DAP Value: 12
  misc_feature: MA Experiment 20000492 PARAMETER Experiment Name: Zm_Hybrid_Seed_Dev_P Parameter: Organism Value: Zea mays
  misc_feature: MA Experiment 20000492 PARAMETER Experiment Name: Zm_Hybrid_Seed_Dev_P Parameter: Plant Line Value: 35A19
  misc_feature: MA Experiment 20000492 PARAMETER Experiment Name: Zm_Hybrid_Seed_Dev_P Parameter: Tissue Value: Fert Kernel vs. Unfert Floret

SEQ ID NO: 8778 - protein, 378 aa, Zea mays subsp. mays; identical to SEQ ID NO: 1762
  peptide (1)..(378): Ceres Seq. ID no. 12588454
  misc_feature (70)..(308): Pfam Name: Isocitrate lyase family Pfam Description: Isocitrate lyase family
  misc_feature (1)..(314): Homolog of NCBI NO: 32490267 NR Description: OSJNBb0116K07.9 [Oryza sativa (japonica
  misc_feature (66)..(314): Homolog of NCBI NO: 38347227 NR Description: OSJNBa0044M19.9 [Oryza sativa (japonica
  misc_feature (1)..(314): Homolog of NCBI NO: 30689278 NR Description: carboxyphosphonoenolpyruvate mutase -related thaliana] >gi|26450281|dbj|BAC42257.1| putative mutase [Arabidopsis thaliana] >gi|28827730|gb|AAO50709.1|
  misc_feature (1)..(314): Homolog of NCBI NO: 30689282 NR Description: carboxyphosphonoenolpyruvate mutase -related
  misc_feature (1)..(314): Homolog of NCBI NO: 25408843 NR Description: probable carboxyphosphonoenolpyruvate mutase - Arabidopsis thaliana >gi|3763927|gb|AAC64307.1| putative
  misc_feature (73)..(313): Homolog of NCBI NO: 23043034 NR Description: hypothetical protein [Trichodesmium erythraeum
  misc_feature (73)..(309): Homolog of NCBI NO: 17229355 NR Description: carboxyphosphonoenolpyruvate phosphonomutase sp. PCC 7120] >gi|25324632|pir||AI2038
  misc_feature (71)..(305): Homolog of NCBI NO: 33599708 NR Description: carboxyvinyl-carboxyphosphonate phosphorylmutase
  misc_feature (86)..(314): Homolog of NCBI NO: 40747280 NR Description: hypothetical protein AN9369.2 [Aspergillus
  misc_feature (66)..(313): Homolog of NCBI NO: 40739091 NR Description: hypothetical protein AN6882.2 [Aspergillus

SEQ ID NO: 8779 - protein, 300 aa, Zea mays subsp. mays; identical to SEQ ID NO: 1763
  peptide (1)..(300): Ceres Seq. ID no. 12588455
  misc_feature (1)..(230): Pfam Name: Isocitrate lyase family Pfam Description: Isocitrate lyase family
  misc_feature (1)..(236): Homolog of NCBI NO: 32490267 NR Description: OSJNBb0116K07.9 [Oryza sativa (japonica
  misc_feature (1)..(236): Homolog of NCBI NO: 38347227 NR Description: OSJNBa0044M19.9 [Oryza sativa (japonica
  misc_feature (1)..(236): Homolog of NCBI NO: 30689278 NR Description: carboxyphosphonoenolpyruvate mutase -related thaliana] >gi|26450281|dbj|BAC42257.1| putative mutase [Arabidopsis thaliana] >gi|28827730|gb|AAO50709.1|
  misc_feature (1)..(236): Homolog of NCBI NO: 30689282 NR Description: carboxyphosphonoenolpyruvate mutase -related
  misc_feature (1)..(236): Homolog of NCBI NO: 25408843 NR Description: probable carboxyphosphonoenolpyruvate mutase - Arabidopsis thaliana >gi|3763927|gb|AAC64307.1| putative
  misc_feature (1)..(235): Homolog of NCBI NO: 23043034 NR Description: hypothetical protein [Trichodesmium erythraeum
  misc_feature (1)..(231): Homolog of NCBI NO: 17229355 NR Description: carboxyphosphonoenolpyruvate phosphonomutase sp. PCC 7120] >gi|25324632|pir||AI2038
  misc_feature (1)..(227): Homolog of NCBI NO: 33599708 NR Description: carboxyvinyl-carboxyphosphonate phosphorylmutase
  misc_feature (8)..(236): Homolog of NCBI NO: 40747280 NR Description: hypothetical protein AN9369.2 [Aspergillus
  misc_feature (1)..(235): Homolog of NCBI NO: 40739091 NR Description: hypothetical protein AN6882.2 [Aspergillus

SEQ ID NO: 8780 - protein, 249 aa, Zea mays subsp. mays; identical to SEQ ID NO: 1764
  peptide (1)..(249): Ceres Seq. ID no. 12588456
  misc_feature (1)..(179): Pfam Name: Isocitrate lyase family Pfam Description: Isocitrate lyase family
  misc_feature (1)..(185): Homolog of NCBI NO: 32490267 NR Description: OSJNBb0116K07.9 [Oryza sativa (japonica
  misc_feature (1)..(185): Homolog of NCBI NO: 38347227 NR Description: OSJNBa0044M19.9 [Oryza sativa (japonica
  misc_feature (1)..(185): Homolog of NCBI NO: 30689278 NR Description: carboxyphosphonoenolpyruvate mutase -related thaliana] >gi|26450281|dbj|BAC42257.1| putative mutase [Arabidopsis thaliana] >gi|28827730|gb|AAO50709.1|
  misc_feature (1)..(185): Homolog of NCBI NO: 30689282 NR Description: carboxyphosphonoenolpyruvate mutase -related
  misc_feature (1)..(185): Homolog of NCBI NO: 25408843 NR Description: probable carboxyphosphonoenolpyruvate mutase - Arabidopsis thaliana >gi|3763927|gb|AAC64307.1| putative
  misc_feature (1)..(184): Homolog of NCBI NO: 23043034 NR Description: hypothetical protein [Trichodesmium erythraeum
  misc_feature (1)..(180): Homolog of NCBI NO: 17229355 NR Description: carboxyphosphonoenolpyruvate phosphonomutase sp. PCC 7120] >gi|25324632|pir||AI2038
  misc_feature (1)..(176): Homolog of NCBI NO: 33599708 NR Description: carboxyvinyl-carboxyphosphonate phosphorylmutase
  misc_feature (1)..(185): Homolog of NCBI NO: 40747280 NR Description: hypothetical protein AN9369.2 [Aspergillus
  misc_feature (1)..(184): Homolog of NCBI NO: 40739091 NR Description: hypothetical protein AN6882.2 [Aspergillus

SEQ ID NO: 8781 - DNA, 1186 bp, Zea mays subsp. mays
  misc_feature (1)..(1186): Ceres Seq. ID no. 12373161
  misc_feature: MA Experiment ID: 108529 Result: Up-regulated in Transcription
  misc_feature: MA Experiment 108529 PARAMETER Experiment Name: Zm_Imbibed_Seeds_P Parameter: Age (day) Value: 5 vs. 2
  misc_feature: MA Experiment 108529 PARAMETER Experiment Name: Zm_Imbibed_Seeds_P Parameter: Organism Value: Zea mays
  misc_feature: MA Experiment 108529 PARAMETER Experiment Name: Zm_Imbibed_Seeds_P Parameter: Plant Line Value: 35A19
  misc_feature: MA Experiment 108529 PARAMETER Experiment Name: Zm_Imbibed_Seeds_P Parameter: Tissue Value: Roots vs. Embryo
  misc_feature: MA Experiment ID: 108530 Result: Up-regulated in Transcription
  misc_feature: MA Experiment 108530 PARAMETER Experiment Name: Zm_Imbibed_Seeds_P Parameter: Age (day) Value: 6 vs. 2
  misc_feature: MA Experiment 108530 PARAMETER Experiment Name: Zm_Imbibed_Seeds_P Parameter: Organism Value: Zea mays
  misc_feature: MA Experiment 108530 PARAMETER Experiment Name: Zm_Imbibed_Seeds_P Parameter: Plant Line Value: 35A19
  misc_feature: MA Experiment 108530 PARAMETER Experiment Name: Zm_Imbibed_Seeds_P Parameter: Tissue Value: Aerial vs. Embryo
  misc_feature: MA Experiment ID: 108535 Result: Down-regulated in Transcription
  misc_feature: MA Experiment 108535 PARAMETER Experiment Name: Zm_Meristem_P Parameter: Age (day) Value: 8
  misc_feature: MA Experiment 108535 PARAMETER Experiment Name: Zm_Meristem_P Parameter: Organism Value: Zea mays
  misc_feature: MA Experiment 108535 PARAMETER Experiment Name: Zm_Meristem_P Parameter: Plant Line Value: 35A19
  misc_feature: MA Experiment 108535 PARAMETER Experiment Name: Zm_Meristem_P Parameter: Tissue Value: Root Meristem vs. Above Root Meristem
  misc_feature: MA Experiment ID: 108546 Result: Up-regulated in Transcription
  misc_feature: MA Experiment 108546 PARAMETER Experiment Name: Zm_Imbibed_Seeds_P Parameter: Age (day) Value: 3 vs. 2
  misc_feature: MA Experiment 108546 PARAMETER Experiment Name: Zm_Imbibed_Seeds_P Parameter: Organism Value: Zea mays
  misc_feature: MA Experiment 108546 PARAMETER Experiment Name: Zm_Imbibed_Seeds_P Parameter: Plant Line Value: 35A19
  misc_feature: MA Experiment 108546 PARAMETER Experiment Name: Zm_Imbibed_Seeds_P Parameter: Tissue Value: Roots vs. Embryo
  misc_feature: MA Experiment ID: 20000488 Result: Down-regulated in Transcription
  misc_feature: MA Experiment 20000488 PARAMETER Experiment Name: Zm_50mM_NH4NO3_L_to_H_P Parameter: Organism Value: Zea mays
  misc_feature: MA Experiment 20000488 PARAMETER Experiment Name: Zm_50mM_NH4NO3_L_to_H_P Parameter: Timepoint (hr) Value: 8
  misc_feature: MA Experiment 20000488 PARAMETER Experiment Name: Zm_50mM_NH4NO3_L_to_H_P Parameter: Tissue Value: Leaves
  misc_feature: MA Experiment 20000488 PARAMETER Experiment Name: Zm_50mM_NH4NO3_L_to_H_P Parameter: Treatment Value: 50mM NH4NO3 vs. 100mM Mannitol
  misc_feature: MA Experiment ID: 20001608 Result: Down-regulated in Transcription
  misc_feature: MA Experiment 20001608 PARAMETER Experiment Name: Zm_50ppm_KNO3_L-to-H_P Parameter: Age (day) Value: 21
  misc_feature: MA Experiment 20001608 PARAMETER Experiment Name: Zm_50ppm_KNO3_L-to-H_P Parameter: Organism Value: Zea mays
  misc_feature: MA Experiment 20001608 PARAMETER Experiment Name: Zm_50ppm_KNO3_L-to-H_P Parameter: Plant Line Value: 35A19
  misc_feature: MA Experiment 20001608 PARAMETER Experiment Name: Zm_50ppm_KNO3_L-to-H_P Parameter: Timepoint (hr) Value: 48
  misc_feature: MA Experiment 20001608 PARAMETER Experiment Name: Zm_50ppm_KNO3_L-to-H_P Parameter: Tissue Value: Shoots
  misc_feature: MA Experiment 20001608 PARAMETER Experiment Name: Zm_50ppm_KNO3_L-to-H_P Parameter: Treatment Value: 50ppm KNO3 vs. 50ppm KCl
acaaaacccgccttcctctcattccccaatcgccacaactctcgtcggagctccgagccctaaacaacagccttcgccggccgactcccgggcggaggaggcggccggggagatggacgacatcggcggcggcgcaccgggtgcctgccccaagaacaagaagccccggcacctgtcccgctcgctgacctaccaccaccacccgtaccaggggcgccaggtgctgccggcgccggcgcccaacccgcagcgcccgcagtcggtggtcctgtacacgacgtcgctccgcggcgtgcgccgcacgttcgcggactgctgcgcggtgcgcgccgcgctgcggggcctccgcgtcgccgtggacgagcgccacgtctccatggacgcggcgctccggcgcgagctgcaggggatcctcgcggcacggggccgcgggttctcgctcccgcagctcctggtcgggggcgcgctcgtcggcggcgccgacgaggtccgccggctgcacgagtccggcgagctccgccgcgtcctcgaaggcgcccccgggcaggaccccgccttcgtctgcggcgcctgcggcgggttccggttcgcgccctgtccggcctgcgacggctcccgcaaggtgttcgtggaggaagaggggcgagcccgccgctgcctggagtgcaacgaaaacggcttggtacgctgccccaattgctgttcttgatagcttgtttaagttgagtgtatacgagaacttaaggattgcttgattagaggtagtgggagaggaaaagagcatttcttgtgttctttggctgctgtatattgtggacgcagttgggaggataggtattgggtatgccatcagtgttttgaaaggatagcgaatgggttcttggccctcaagttatcacgtctggagtaccatcgatggtaaggtgccatctcatagtacttcatgtacatgtgtgtgtctgtgaatgtgtattgatagaccttcttcaagttggaaaagaaggcccaaagcaaagggttagagatttagaggttgtgctacatagcggcaagaaaaggtggagccttccttgattctttgggcgtgctattagcatattctgagaagggcaatatggcttctggccctatagtttgagattgtataaaatatgtatattatacattgataaccagagtgggtttg

SEQ ID NO: 8782 - protein, 235 aa, Zea mays subsp. mays
  peptide (1)..(235): Ceres Seq. ID no. 12373162
  misc_feature (41)..(235): Homolog of NCBI NO: 34899098 NR Description: hypothetical protein~similar to Arabidopsis
  misc_feature (82)..(235): Homolog of NCBI NO: 15240723 NR Description: putative protein; protein id: At5g13810.1, by cDNA: 124023., supported by cDNA: gi_14532459, supported by gi_16974532 [Arabidopsis thaliana] >gi|10177647|dbj|BAB11109.1|
  misc_feature (73)..(234): Homolog of NCBI NO: 15451042 NR Description: putative protein [Arabidopsis thaliana]
  misc_feature (73)..(234): Homolog of NCBI NO: 30694571 NR Description: expressed protein [Arabidopsis thaliana]
  misc_feature (5)..(233): Homolog of NCBI NO: 34907946 NR Description: B1088C09.21 [Oryza sativa (japonica
  misc_feature (88)..(234): Homolog of NCBI NO: 15227326 NR Description: unknown protein; protein id: At2g41330.1, by cDNA: gi_18491270 [Arabidopsis thaliana]
  misc_feature (82)..(234): Homolog of NCBI NO: 32490043 NR Description: OSJNBa0063C18.3 [Oryza sativa (japonica
  misc_feature (82)..(231): Homolog of NCBI NO: 10241626 NR Description: Contains similarity to F1N 19.7 [Oryza sativa
  misc_feature (8)..(233): Homolog of NCBI NO: 38346321 NR Description: OJ000126_13.3 [Oryza sativa (japonica
  misc_feature (76)..(233): Homolog of NCBI NO: 34899868 NR Description: OJ1714_H10.16 [Oryza sativa (japonica
QNPPSSHSPIATTLVGAPSPKQQPSPADSRAEEAAGEMDDIGGGAPGACPKNKKPRHLSRSLTYHHHPYQGRQVLPAPAPNPQRPQSVVLYTTSLRGVRRTFADCCAVRAALRGLRVAVDERHVSMDAALRRELQGILAARGRGFSLPQLLVGGALVGGADEVRRLHESGELRRVLEGAPGQDPAFVCGACGGFRFAPCPACDGSRKVFVEEEGRARRCLECNENGLVRCPNCCS

SEQ ID NO: 8783 - protein, 198 aa, Zea mays subsp. mays
  peptide (1)..(198): Ceres Seq. ID no. 12373163
  misc_feature (4)..(198): Homolog of NCBI NO: 34899098 NR Description: hypothetical protein~similar to Arabidopsis
  misc_feature (45)..(198): Homolog of NCBI NO: 15240723 NR Description: putative protein; protein id: At5g13810.1, by cDNA: 124023., supported by cDNA: gi_14532459, supported by gi_16974532 [Arabidopsis thaliana] >gi|10177647|dbj|BAB11109.1|
  misc_feature (36)..(197): Homolog of NCBI NO: 15451042 NR Description: putative protein [Arabidopsis thaliana]
  misc_feature (36)..(197): Homolog of NCBI NO: 30694571 NR Description: expressed protein [Arabidopsis thaliana]
  misc_feature (1)..(196): Homolog of NCBI NO: 34907946 NR Description: B1088C09.21 [Oryza sativa (japonica
  misc_feature (51)..(197): Homolog of NCBI NO: 15227326 NR Description: unknown protein; protein id: At2g41330.1, by cDNA: gi_18491270 [Arabidopsis thaliana]
  misc_feature (45)..(197): Homolog of NCBI NO: 32490043 NR Description: OSJNBa0063C18.3 [Oryza sativa (japonica
  misc_feature (45)..(194): Homolog of NCBI NO: 10241626 NR Description: Contains similarity to F1N 19.7 [Oryza sativa
  misc_feature (1)..(196): Homolog of NCBI NO: 38346321 NR Description: OJ000126_13.3 [Oryza sativa (japonica
  misc_feature (39)..(196): Homolog of NCBI NO: 34899868 NR Description: OJ1714_H10.16 [Oryza sativa (japonica
MDDIGGGAPGACPKNKKPRHLSRSLTYHHHPYQGRQVLPAPAPNPQRPQSVVLYTTSLRGVRRTFADCCAVRAALRGLRVAVDERHVSMDAALRRELQGILAARGRGFSLPQLLVGGALVGGADEVRRLHESGELRRVLEGAPGQDPAFVCGACGGFRFAPCPACDGSRKVFVEEEGRARRCLECNENGLVRCPNCCS

SEQ ID NO: 8784 - DNA, 1331 bp, Zea mays subsp. mays
  misc_feature (1)..(1331): Ceres Seq. ID no. 12365852
  misc_feature: MA Experiment ID: 20000535 Result: Down-regulated in Transcription
  misc_feature: MA Experiment 20000535 PARAMETER Experiment Name: Zm_Hybrid_Seed_Dev_P Parameter: DAP Value: 30 vs. 12
  misc_feature: MA Experiment 20000535 PARAMETER Experiment Name: Zm_Hybrid_Seed_Dev_P Parameter: Organism Value: Zea mays
  misc_feature: MA Experiment 20000535 PARAMETER Experiment Name: Zm_Hybrid_Seed_Dev_P Parameter: Plant Line Value: 35A19
  misc_feature: MA Experiment 20000535 PARAMETER Experiment Name: Zm_Hybrid_Seed_Dev_P Parameter: Tissue Value: Embryo vs. Unfert Floret
cttgcgacctgattcgccatgccctgcgtgtcctttcgaaaacggctgtcgacactgcccctctcgctcgctttccactcgattccagcaggcgtgcgtggcccaagtacccaacgcaccaccaggtggggcatctgctccacccccactccacttccactagcaccaacaccaacagcctcgccgccagccgcagccacgcgacacgacgcgacgcgagacgcggagcggtacaaaaggtggactgggtgggtggctggttccgtggttcaactcctaccactaccacagcaccaacgacggaccaggcagcagagaaaaagcagaccagacgagacctctcgcgttccgtcctcctcccccctgcccctgctgccgttccccttcttcctcagttctcccgcccgctgctgccctccgtccgcgtccagatcccgccaccaaccgatccggcgccctccagcatggcgggggcgggggcgaaggcggcgggagccctggctctggcgctcgtgctcgcgctcgcgggggccaactccgagggcgacgcgctctcggcgctgcgccggagcctcagggaccccggcggcgttctgcagagctgggaccccacgctcgtcaacccctgcacctggttccacgtcacctgcgaccgcgacaaccgcgtcacccgcctagatcttggtaatttgaacttatctggtcatctggtgcctgagcttgggaaactggagcatcttcagtatctggaactttataagaataacattcaaggaacagtcccttctgagcttggcaacttgaagaatctaataagcttcgacttgtacaagaacaacatttcggggacaatacctcctgcccttggaaagttgaagtcccttgtattcttgcgtctcaatggcaatcatttgactgggcccatcccaagggaactcgctggaatatctagtctcaaagttgttgatgtttcaagtaatgatttgtgcgggacgattcccacgtctggaccatttgaacatattcctctgagcaactttgagaagaacccgcgcttggaaggtccagagctacaaggcctggccatatacgacaccaactgctagaggcaccacgaagataagaactgctagaaagtaacgagcgaacaaggttacgagaaattgggcgatatagatttactaggtctggatctgtaatcctccctgcatagctcttattcgtaactcgctgcctgcacgaaagttggtgtgtgttttagcagaatgctttctgtccgtgaaagtaaacttgaactgcttattacgactgaaatgatattgtcgttcctc

SEQ ID NO: 8785 - protein, 367 aa, Zea mays subsp. mays
  peptide (1)..(367): Ceres Seq. ID no. 12365853
  misc_feature (155)..(367): Homolog of NCBI NO: 34903344 NR Description: unnamed protein product [Oryza sativa (japonica group)] >gi|6498429|dbj|BAA87832.1| unnamed protein product
  misc_feature (171)..(367): Homolog of NCBI NO: 30385250 NR Description: leucine-rich repeat protein [x Citrofortunella
  misc_feature (161)..(367): Homolog of NCBI NO: 7489030 NR Description: leucine-rich repeat protein LRP - tomato
  misc_feature (163)..(367): Homolog of NCBI NO: 15242153 NR Description: leucine-rich repeat protein; protein id: supported by cDNA: gi_13358181, supported by cDNA: gi_13899096, by cDNA: gi_20148426 [Arabidopsis thaliana]
  misc_feature (163)..(367): Homolog of NCBI NO: 34146800 NR Description: At3g43740 [Arabidopsis thaliana]
  misc_feature (162)..(367): Homolog of NCBI NO: 34896972 NR Description: putative leucine-rich repeat protein [Oryza
  misc_feature (157)..(309): Homolog of NCBI NO: 34909134 NR Description: putative leucine-rich repeat protein [Oryza
  misc_feature (153)..(355): Homolog of NCBI NO: 13897310 NR Description: SERK2 protein [Zea mays]
  misc_feature (157)..(367): Homolog of NCBI NO: 29468120 NR Description: leucine-rich repeat protein [Oryza sativa]
  misc_feature (157)..(367): Homolog of NCBI NO: 27497122 NR Description: floral organ regulator 1 [Oryza sativa (japonica
CDLIRHALRVLSKTAVDTAPLARFPLDSSRRAWPKYPTHHQVGHLLHPHSTSTSTNTNSLAASRSHATRRDARRGAVQKVDWVGGWFRGSTPTTTTAPTTDQAAEKKQTRRDLSRSVLLPPAPAAVPLLPQFSRPLLPSVRVQIPPPTDPAPSSMAGAGAKAAGALALALVLALAGANSEGDALSALRRSLRDPGGVLQSWDPTLVNPCTWFHVTCDRDNRVTRLDLGNLNLSGHLVPELGKLEHLQYLELYKNNIQGTVPSELGNLKNLISFDLYKNNISGTIPPALGKLKSLVFLRLNGNHLTGPIPRELAGISSLKVVDVSSNDLCGTIPTSGPFEHIPLSNFEKNPRLEGPELQGLAIYDTNC

SEQ ID NO: 8786 - protein, 219 aa, Zea mays subsp. mays
  peptide (1)..(219): Ceres Seq. ID no. 12365854
MPCVSFRKRLSTLPLSLAFHSIPAGVRGPSTQRTTRWGICSTPTPLPLAPTPTASPPAAATRHDATRDAERYKRWTGWVAGSVVQLLPLPQHQRRTRQQRKSRPDETSRVPSSSPLPLLPFPFFLSSPARCCPPSASRSRHQPIRRPPAWRGRGRRRREPWLWRSCSRSRGPTPRATRSRRCAGASGTPAAFCRAGTPRSSTPAPGSTSPATATTASPA

SEQ ID NO: 8787 - protein, 213 aa, Zea mays subsp. mays; identical to SEQ ID NO: 1607
  peptide (1)..(213): Ceres Seq. ID no. 12365855
  misc_feature (3)..(213): Homolog of NCBI NO: 29468120 NR Description: leucine-rich repeat protein [Oryza sativa]
  misc_feature (3)..(213): Homolog of NCBI NO: 27497122 NR Description: floral organ regulator 1 [Oryza sativa (japonica
  misc_feature (1)..(213): Homolog of NCBI NO: 34903344 NR Description: unnamed protein product [Oryza sativa (japonica group)] >gi|6498429|dbj|BAA87832.1| unnamed protein product
  misc_feature (17)..(213): Homolog of NCBI NO: 30385250 NR Description: leucine-rich repeat protein [x Citrofortunella
  misc_feature (7)..(213): Homolog of NCBI NO: 7489030 NR Description: leucine-rich repeat protein LRP - tomato
  misc_feature (9)..(213): Homolog of NCBI NO: 15242153 NR Description: leucine-rich repeat protein; protein id: supported by cDNA: gi_13358181, supported by cDNA: gi_13899096, by cDNA: gi_20148426 [Arabidopsis thaliana]
  misc_feature (9)..(213): Homolog of NCBI NO: 34146800 NR Description: At3g43740 [Arabidopsis thaliana]
  misc_feature (8)..(213): Homolog of NCBI NO: 34896972 NR Description: putative leucine-rich repeat protein [Oryza
  misc_feature (3)..(155): Homolog of NCBI NO: 34909134 NR Description: putative leucine-rich repeat protein [Oryza
  misc_feature (1)..(201): Homolog of NCBI NO: 13897310 NR Description: SERK2 protein [Zea mays]

SEQ ID NO: 8788 - DNA, 1175 bp, Zea mays subsp. mays
  misc_feature (1)..(1175): Ceres Seq. ID no. 12358359
  misc_feature: MA Experiment ID: 108529 Result: Up-regulated in Transcription
  misc_feature: MA Experiment 108529 PARAMETER Experiment Name: Zm_Imbibed_Seeds_P Parameter: Age (day) Value: 5 vs. 2
  misc_feature: MA Experiment 108529 PARAMETER Experiment Name: Zm_Imbibed_Seeds_P Parameter: Organism Value: Zea mays
  misc_feature: MA Experiment 108529 PARAMETER Experiment Name: Zm_Imbibed_Seeds_P Parameter: Plant Line Value: 35A19
  misc_feature: MA Experiment 108529 PARAMETER Experiment Name: Zm_Imbibed_Seeds_P Parameter: Tissue Value: Roots vs. Embryo
  misc_feature: MA Experiment ID: 108535 Result: Down-regulated in Transcription
  misc_feature: MA Experiment 108535 PARAMETER Experiment Name: Zm_Meristem_P Parameter: Age (day) Value: 8
  misc_feature: MA Experiment 108535 PARAMETER Experiment Name: Zm_Meristem_P Parameter: Organism Value: Zea mays
  misc_feature: MA Experiment 108535 PARAMETER Experiment Name: Zm_Meristem_P Parameter: Plant Line Value: 35A19
  misc_feature: MA Experiment 108535 PARAMETER Experiment Name: Zm_Meristem_P Parameter: Tissue Value: Root Meristem vs. Above Root Meristem
  misc_feature: MA Experiment ID: 108543 Result: Down-regulated in Transcription
  misc_feature: MA Experiment ID: 20000479 Result: Up-regulated in Transcription
  misc_feature: MA Experiment 20000479 PARAMETER Experiment Name: Zm_Drought_P Parameter: Age (day) Value: 10
  misc_feature: MA Experiment 20000479 PARAMETER Experiment Name: Zm_Drought_P Parameter: Organism Value: Zea mays
  misc_feature: MA Experiment 20000479 PARAMETER Experiment Name: Zm_Drought_P Parameter: Plant Line Value: 35A19
  misc_feature: MA Experiment 20000479 PARAMETER Experiment Name: Zm_Drought_P Parameter: Timepoint (hr) Value: 48
  misc_feature: MA Experiment 20000479 PARAMETER Experiment Name: Zm_Drought_P Parameter: Tissue Value: Aerial
  misc_feature: MA Experiment 20000479 PARAMETER Experiment Name: Zm_Drought_P Parameter: Treatment Value: Drought vs. No Drought
aaatccacaaaggcacaaagatggaaaaggtgtattggactctttttaaagctaaaaaaacagttcaaaagattgctgcttttcgcttcagtgctgctccgattctgtttcagaagattaacaatttgaaattgtgacgatcctaattgccatcttctcgataataatgaggaaaaaaagattgacgcgcttttcgtgtcctcagaaactgcgggtttgctgaaattctcctccactttcccaagcaaagaacaaagaaccgcccttgttctctgcgactctgcccggccggtctccgaggcgggcggagggaaccagagagcaaggcgaggagcgcggaagggctgagggaaggggcggcggggcatggctcgccggccggcgtcgtgggagcagggcggcgacgagtacgactatctcttcaaggtcgtgctcatcggcgactctggcgtggggaagtccaacctgctctcccgcttcaccaagaacaccttcgccctcgactccaagtccaccatcggcgttgagttcgccacgcgcacactccaggtggagaacaagattataaaagctcaaatctgggacactgctgggcaggagaggtaccgagcaattacaagtgcttactatcgaggagctgtcggggcgttgctagtctacgatgtcactaaagtaatgacatttgagaatgtgaagaggtggttgaaggagctccgggaccatgctgactcgaacatagtcgtaatgctcattggcaacaagactgaccttaggcacctgcgctctgtcgccgttgaggatgctgcaagctttgcaggagagcgaaaggttttgttcttcatcgagacctctgcgctcgatgcgacaaacgtcgagaaggccttccacaccgttctagccgagatctaccggataatcagcaagaagcccctgtcttcggaggagtctggtttggggtccggtaacctcagagagggacagtccatccaagtgtcagccacaaattctggcgcccttacgtcgcggtgctgctcttcttagagccacgcccaccagaatcatctgaagaacaacagttcgtcaagaaggtcctctcttccgaagtcgaaatatttactcccctttgtgtgaacaataagcgtagatttaaagaatgtcagactcagacgctgact

SEQ ID NO: 8789 - protein, 224 aa, Zea mays subsp. mays
  peptide (1)..(224): Ceres Seq. ID no. 12358360
  misc_feature (20)..(182): Pfam Name: Ras family Pfam Description: Ras family
  misc_feature (1)..(224): Homolog of NCBI NO: 15217568 NR Description: GTP-binding protein, putative; protein id: supported by cDNA: 17081., supported by cDNA: gi_15010637,
  misc_feature (14)..(224): Homolog of NCBI NO: 15222396 NR Description: GTP-binding protein, putative; protein id:
  misc_feature (14)..(224): Homolog of NCBI NO: 15232652 NR Description: GTP-binding protein, putative; protein id: supported by cDNA: 35596., supported by cDNA: gi_20465470
  misc_feature (13)..(224): Homolog of NCBI NO: 34908298 NR Description: Ras-related GTP-binding protein [Oryza sativa
  misc_feature (13)..(222): Homolog of NCBI NO: 18376163 NR Description: probable GTP-binding protein Drab11 [Neurospora
  misc_feature (13)..(224): Homolog of NCBI NO: 34897394 NR Description: Ras-related GTP-binding protein [Oryza sativa
  misc_feature (13)..(224): Homolog of NCBI NO: 3024502 NR Description: RAS-RELATED PROTEIN RAB11D
  misc_feature (14)..(224): Homolog of NCBI NO: 3024501 NR Description: RAS-RELATED PROTEIN RAB11C
  misc_feature (14)..(224): Homolog of NCBI NO: 15237828 NR Description: Ras-related GTP-binding protein, putative; id: At5g59150.1, supported by cDNA: gi_13877728 [Arabidopsis
  misc_feature (13)..(223): Homolog of NCBI NO: 3025293 NR Description: RAS-RELATED PROTEIN YPTC6 >gi|1363476|pir||JC4108
MARRPASWEQGGDEYDYLFKVVLIGDSGVGKSNLLSRFTKNTFALDSKSTIGVEFATRTLQVENKIIKAQIWDTAGQERYRAITSAYYRGAVGALLVYDVTKVMTFENVKRWLKELRDHADSNIVVMLIGNKTDLRHLRSVAVEDAASFAGERKVLFFIETSALDATNVEKAFHTVLAEIYRIISKKPLSSEESGLGSGNLREGQSIQVSATNSGALTSRCCSS

SEQ ID NO: 8790 - protein, 121 aa, Zea mays subsp. mays
  peptide (1)..(121): Ceres Seq. ID no. 12358361
  misc_feature (1)..(79): Pfam Name: Ras family Pfam Description: Ras family
  misc_feature (1)..(121): Homolog of NCBI NO: 15217568 NR Description: GTP-binding protein, putative; protein id: supported by cDNA: 17081., supported by cDNA: gi_15010637,
  misc_feature (1)..(121): Homolog of NCBI NO: 15222396 NR Description: GTP-binding protein, putative; protein id:
  misc_feature (1)..(121): Homolog of NCBI NO: 15232652 NR Description: GTP-binding protein, putative; protein id: supported by cDNA: 35596., supported by cDNA: gi_20465470
  misc_feature (1)..(121): Homolog of NCBI NO: 34908298 NR Description: Ras-related GTP-binding protein [Oryza sativa
  misc_feature (1)..(119): Homolog of NCBI NO: 18376163 NR Description: probable GTP-binding protein Drab11 [Neurospora
  misc_feature (1)..(121): Homolog of NCBI NO: 34897394 NR Description: Ras-related GTP-binding protein [Oryza sativa
  misc_feature (1)..(121): Homolog of NCBI NO: 3024502 NR Description: RAS-RELATED PROTEIN RAB11D
  misc_feature (1)..(121): Homolog of NCBI NO: 3024501 NR Description: RAS-RELATED PROTEIN RAB11C
  misc_feature (1)..(121): Homolog of NCBI NO: 15237828 NR Description: Ras-related GTP-binding protein, putative; id: At5g59150.1, supported by cDNA: gi_13877728 [Arabidopsis
  misc_feature (1)..(120): Homolog of NCBI NO: 3025293 NR Description: RAS-RELATED PROTEIN YPTC6 >gi|1363476|pir||JC4108
MTFENVKRWLKELRDHADSNIVVMLIGNKTDLRHLRSVAVEDAASFAGERKVLFFIETSALDATNVEKAFHTVLAEIYRIISKKPLSSEESGLGSGNLREGQSIQVSATNSGALTSRCCSS

SEQ ID NO: 8791 - DNA, 702 bp, Zea mays subsp. mays
  misc_feature (1)..(702): Ceres Seq. ID no. 12346922
  misc_feature: MA Experiment ID: 108522 Result: Up-regulated in Transcription
  misc_feature: MA Experiment 108522 PARAMETER Experiment Name: Zm_42deg_Heat_P Parameter: Age (day) Value: 8
  misc_feature: MA Experiment 108522 PARAMETER Experiment Name: Zm_42deg_Heat_P Parameter: Organism Value: Zea mays
  misc_feature: MA Experiment 108522 PARAMETER Experiment Name: Zm_42deg_Heat_P Parameter: Plant Line Value: 35A19
  misc_feature: MA Experiment 108522 PARAMETER Experiment Name: Zm_42deg_Heat_P Parameter: Temperature (deg C) Value: 42 vs. 22
  misc_feature: MA Experiment 108522 PARAMETER Experiment Name: Zm_42deg_Heat_P Parameter: Timepoint (hr) Value: 1
  misc_feature: MA Experiment 108522 PARAMETER Experiment Name: Zm_42deg_Heat_P Parameter: Tissue Value: Aerial
taaagatgacctgtctcaaattggatttgatgtcgaatcaattcagaaaatggttgctggattggagggaaagatcgagttacttgagaacaaacaggacgtggctaatactggtatctggtatctctgccaagtagcaggcggtttaaaagatggaataaacaccaggtttttccaggaaaccagtgagaagctgaagctctcacattcagctcaacctgaaaacaagccagtgaaggggcttgaatttttttcggaaagcaccatggaacagaaagtagctgactccaaaccaattgcggtgacagtcgacgctgagaagcctgagaaaaccgctgctgtaatgggcaccacagtgcacaggtctatcaggttctcatatcggaatgcaggccttgctttgtgatcaaatcctctccgcttgagatgcacgtggccttcctggttgctttttcttttttggcaacaaccttcctggttgctttgtgtgatggtcagaaaacatagaagaataacctgcaactggagtgacagaatttcttttccccgcagtagacaggtgtgcgttatttggttggaattatctccagtccactatcaattttttttccttggattttgattcattttatgtttcgatttgttgccttatatactgtaaagtcattggaaagaataaataaaacacgaatgttttttgtt

SEQ ID NO: 8792 - protein, 134 aa, Zea mays subsp. mays
  peptide (1)..(134): Ceres Seq. ID no. 12346923
  misc_feature (1)..(122): Homolog of NCBI NO: 18390460 NR Description: expressed protein; protein id: At1g04960.1, by cDNA: 39874., supported by cDNA: gi_16649050 [Arabidopsis
KDDLSQIGFDVESIQKMVAGLEGKIELLENKQDVANTGIWYLCQVAGGLKDGINTRFFQETSEKLKLSHSAQPENKPVKGLEFFSESTMEQKVADSKPIAVTVDAEKPEKTAAVMGTTVHRSIRFSYRNAGLAL

SEQ ID NO: 8793 - protein, 118 aa, Zea mays subsp. mays
  peptide (1)..(118): Ceres Seq. ID no. 12346924
  misc_feature (1)..(106): Homolog of NCBI NO: 18390460 NR Description: expressed protein; protein id: At1g04960.1, by cDNA: 39874., supported by cDNA: gi_16649050 [Arabidopsis
MVAGLEGKIELLENKQDVANTGIWYLCQVAGGLKDGINTRFFQETSEKLKLSHSAQPENKPVKGLEFFSESTMEQKVADSKPIAVTVDAEKPEKTAAVMGTTVHRSIRFSYRNAGLAL

SEQ ID NO: 8794 - DNA, 1997 bp, Zea mays subsp. mays
  misc_feature (1)..(1997): Ceres Seq. ID no. 12373157
  misc_feature: MA Experiment ID: 108543 Result: Up-regulated in Transcription
  misc_feature: MA Experiment ID: 20000477 Result: Down-regulated in Transcription
  misc_feature: MA Experiment 20000477 PARAMETER Experiment Name: Zm_5mM_SA_P Parameter: Age (day) Value: 10
  misc_feature: MA Experiment 20000477 PARAMETER Experiment Name: Zm_5mM_SA_P Parameter: Organism Value: Zea mays
  misc_feature: MA Experiment 20000477 PARAMETER Experiment Name: Zm_5mM_SA_P Parameter: Plant Line Value: 35A19
  misc_feature: MA Experiment 20000477 PARAMETER Experiment Name: Zm_5mM_SA_P Parameter: Timepoint (hr) Value: 48
  misc_feature: MA Experiment 20000477 PARAMETER Experiment Name: Zm_5mM_SA_P Parameter: Tissue Value: Aerial
  misc_feature: MA Experiment 20000477 PARAMETER Experiment Name: Zm_5mM_SA_P Parameter: Treatment Value: 5mM SA vs. No Treatment
  misc_feature: MA Experiment ID: 20000478 Result: Down-regulated in Transcription
  misc_feature: MA Experiment 20000478 PARAMETER Experiment Name: Zm_5mM_SA_P Parameter: Age (day) Value: 11
  misc_feature: MA Experiment 20000478 PARAMETER Experiment Name: Zm_5mM_SA_P Parameter: Organism Value: Zea mays
  misc_feature: MA Experiment 20000478 PARAMETER Experiment Name: Zm_5mM_SA_P Parameter: Plant Line Value: 35A19
  misc_feature: MA Experiment 20000478 PARAMETER Experiment Name: Zm_5mM_SA_P Parameter: Timepoint (hr) Value: 72
  misc_feature: MA Experiment 20000478 PARAMETER Experiment Name: Zm_5mM_SA_P Parameter: Tissue Value: Aerial
  misc_feature: MA Experiment 20000478 PARAMETER Experiment Name: Zm_5mM_SA_P Parameter: Treatment Value: 5mM SA vs. No Treatment
  misc_feature: MA Experiment ID: 20000487 Result: Down-regulated in Transcription
  misc_feature: MA Experiment 20000487 PARAMETER Experiment Name: Zm_50mM_NH4NO3_L_to_H_P Parameter: Organism Value: Zea mays
  misc_feature: MA Experiment 20000487 PARAMETER Experiment Name: Zm_50mM_NH4NO3_L_to_H_P Parameter: Timepoint (hr) Value: 4
  misc_feature: MA Experiment 20000487 PARAMETER Experiment Name: Zm_50mM_NH4NO3_L_to_H_P Parameter: Tissue Value: Leaves
  misc_feature: MA Experiment 20000487 PARAMETER Experiment Name: Zm_50mM_NH4NO3_L_to_H_P Parameter: Treatment Value: 50mM NH4NO3 vs. 100mM Mannitol
  misc_feature: MA Experiment ID: 20000632 Result: Down-regulated in Transcription
  misc_feature: MA Experiment 20000632 PARAMETER Experiment Name: Zm_Herbicide-Treatments_P Parameter: Timepoint (hr) Value: 4
  misc_feature: MA Experiment 20000632 PARAMETER Experiment Name: Zm_Herbicide-Treatments_P Parameter: Tissue Value: Aerial
  misc_feature: MA Experiment 20000632 PARAMETER Experiment Name: Zm_Herbicide-Treatments_P Parameter: Treatment Value: Glean vs. No Treatment
attcgatagttccatcctcctccctcccccttcgccggcctcgcttcgtccctcccgctctcccccttttaaatcaaaccctctctcggctcctttataaatcctagtcgaagcaagggtgcgcgcacttcactacccaacctgaccccgaagatcgcgtccgcagagacagtagccgcgtcatggcgaccccgccgccgccgctcccgcccatgccgccgaggcacgtctcctgcggctcacttctacaggaactgcaggaactatggggagaaattggtcaggatgaaatgaaaagagataggatgatactgcaactggaggaggattgtctcaatgtttacaagcaaaaagtgaatcagactaggaaacagaaggcagacctgcttcaagagctgtcccttggcgaagctgatatagacaagatcctttctgctcttggagagagagaaacatttcctaggtcagagaagcttgggggcacattaatggaacaactcgctaagatagagccagtgctagaagatttgaggcgtaggagggatgagagagtaaatgagttcaaggctattcagtcaaagattgtatgtctacaagcagaaatttcaggagccattgatcatggggatcctgctgctcctgtggtagatgagaatgatttatccttgaaaagatcaggggaattgaaggagcatcttaatgatcttcagacagaaaagaatggaaggctgcaaaaaattgacatccagactaacagtattcatgaaatgtgcaacataatgtctattgatctcaaaatggcactaaaggatgttcatcccagttacgctgagctggggagaagcaaacccatgagtattagcaacagttcgcttgatagactatctgaaaaagtacatgcgttaaatcatgaaaagaaacaaaggcttcggaagcttcaagatcttggcagcacactcattgagttatggaacctcatggatacaccaactgatgaacagagattttttgaccatgtgacttctcttattaaagtctcaccaactacagcgatgccccaagggtgccttgcacacgaaataattgaaaaggtagagactgaggttaagagactgactaagttgaaagctagcaaaatgaaagagctagtcttcaagaaattgactgatcttgaggaaatctacagaagtgttcacatggatattgatagtgattctgagcggcaaaccctcaatgatctcattgattctggtagagcagatctttcagagttgctggcaagaatggatattcgaattgcggaggcaaaagaacatgcattaagtagaaaggatattttagaaaaggtggagaagtggacattggcatcagaagaggagacttggcttgatgaatacgaaagggatcaaaaccgatataatgctgtccgaggagctcacataaatctcaagcgtgcggagaaagctaggatattggtcagcaaacttccatctcttttggagaacttgactgctaaaattaaagcctgggaaaaggaaatgggtattccatttatatttaacaaggtgaggctgttggactgtttagatgaatacacctgtacaagacagcaaaaagaagaggaaaagcgccgatcaagggaattgaagaaactgcaagaacagtttgctacagagcaaggtgccaagttcggaacgaaaccaagccctatccgtcctctttcttcaaggaagcctcttgggcagagctctaatgccaatattattggtggaactccgaccagccgccgtgtttctacccccatgtcacggaagggtaggccatcttctggaagggtgcaggaagctgtcaagactgctgtggcaccagcaaactatgttgcccttcccaaggactgctcagacatttctaccctttgaagtgtaatcacctactctgaccatcgattgacttctcacttgatcgacctacatactatatagtcttgactccagtgc

SEQ ID NO: 8795 - protein, 578 aa, Zea mays subsp. mays
  peptide (1)..(578): Ceres Seq. ID no. 12373158
  misc_feature (38)..(571): Pfam Name: Microtubule associated protein (MAP65/ASE1 family) Pfam Description: Microtubule associated protein (MAP65/ASE1
  misc_feature (16)..(571): Homolog of NCBI NO: 15240485 NR Description: putative protein; protein id: At5g55230.1 thaliana] >gi|9758120|dbj|BAB08592.1| similarity to unknown protein [Arabidopsis thaliana]
  misc_feature (17)..(571): Homolog of NCBI NO: 11558252 NR Description: microtubule-associated protein MAP65-1a
  misc_feature (16)..(571): Homolog of NCBI NO: 18416818 NR Description: putative protein; protein id: At4g26760.1, by cDNA: 151418., supported by cDNA: gi_18377611 [Arabidopsis
  misc_feature (12)..(436): Homolog of NCBI NO: 15224935 NR Description: hypothetical protein; protein id: At2g38720.1
  misc_feature (437)..(571): Homolog of NCBI NO: 15224935 NR Description: hypothetical protein; protein id: At2g38720.1
  misc_feature (17)..(562): Homolog of NCBI NO: 28200790 NR Description: 65kD microtubule associated protein [Daucus
  misc_feature (17)..(571): Homolog of NCBI NO: 11558254 NR Description: microtubule-associated protein MAP65-1b
  misc_feature (17)..(571): Homolog of NCBI NO: 11558256 NR Description: microtubule-associated protein MAP65-1c
  misc_feature (18)..(573): Homolog of NCBI NO: 27357984 NR Description: Unknown protein [Oryza sativa (japonica
  misc_feature (15)..(577): Homolog of NCBI NO: 25410943 NR Description: hypothetical protein At2g01910 [imported] - thaliana >gi|4522009|gb|AAD21782.1| unknown protein [Arabidopsis
MATPPPPLPPMPPRHVSCGSLLQELQELWGEIGQDEMKRDRMILQLEEDCLNVYKQKVNQTRKQKADLLQELSLGEADIDKILSALGERETFPRSEKLGGTLMEQLAKIEPVLEDLRRRRDERVNEFKAIQSKIVCLQAEISGAIDHGDPAAPVVDENDLSLKRSGELKEHLNDLQTEKNGRLQKIDIQTNSIHEMCNIMSIDLKMALKDVHPSYAELGRSKPMSISNSSLDRLSEKVHALNHEKKQRLRKLQDLGSTLIELWNLMDTPTDEQRFFDHVTSLIKVSPTTAMPQGCLAHEIIEKVETEVKRLTKLKASKMKELVFKKLTDLEEIYRSVHMDIDSDSERQTLNDLIDSGRADLSELLARMDIRIAEAKEHALSRKDILEKVEKWTLASEEETWLDEYERDQNRYNAVRGAHINLKRAEKARILVSKLPSLLENLTAKIKAWEKEMGIPFIFNKVRLLDCLDEYTCTRQQKEEEKRRSRELKKLQEQFATEQGAKFGTKPSPIRPLSSRKPLGQSSNANIIGGTPTSRRVSTPMSRKGRPSSGRVQEAVKTAVAPANYVALPKDCSDISTL

SEQ ID NO: 8796 - protein, 568 aa, Zea mays subsp. mays
  peptide (1)..(568): Ceres Seq. ID no. 12373159
  misc_feature (28)..(561): Pfam Name: Microtubule associated protein (MAP65/ASE1 family) Pfam Description: Microtubule associated protein (MAP65/ASE1
  misc_feature (6)..(561): Homolog of NCBI NO: 15240485 NR Description: putative protein; protein id: At5g55230.1 thaliana] >gi|9758120|dbj|BAB08592.1| similarity to unknown protein [Arabidopsis thaliana]
  misc_feature (7)..(561): Homolog of NCBI NO: 11558252 NR Description: microtubule-associated protein MAP65-1a
  misc_feature (6)..(561): Homolog of NCBI NO: 18416818 NR Description: putative protein; protein id: At4g26760.1, by cDNA: 151418., supported by cDNA: gi_18377611 [Arabidopsis
  misc_feature (2)..(426): Homolog of NCBI NO: 15224935 NR Description: hypothetical protein; protein id: At2g38720.1
  misc_feature (427)..(561): Homolog of NCBI NO: 15224935 NR Description: hypothetical protein; protein id: At2g38720.1
  misc_feature (7)..(552): Homolog of NCBI NO: 28200790 NR Description: 65kD microtubule associated protein [Daucus
  misc_feature (7)..(561): Homolog of NCBI NO: 11558254 NR Description: microtubule-associated protein MAP65-1b
  misc_feature (7)..(561): Homolog of NCBI NO: 11558256 NR Description: microtubule-associated protein MAP65-1c
  misc_feature (8)..(563): Homolog of NCBI NO: 27357984 NR Description: Unknown protein [Oryza sativa (japonica
  misc_feature (5)..(567): Homolog of NCBI NO: 25410943 NR Description: hypothetical protein At2g01910 [imported] - thaliana >gi|4522009|gb|AAD21782.1| unknown protein [Arabidopsis
MPPRHVSCGSLLQELQELWGEIGQDEMKRDRMILQLEEDCLNVYKQKVNQTRKQKADLLQELSLGEADIDKILSALGERETFPRSEKLGGTLMEQLAKIEPVLEDLRRRRDERVNEFKAIQSKIVCLQAEISGAIDHGDPAAPVVDENDLSLKRSGELKEHLNDLQTEKNGRLQKIDIQTNSIHEMCNIMSIDLKMALKDVHPSYAELGRSKPMSISNSSLDRLSEKVHALNHEKKQRLRKLQDLGSTLIELWNLMDTPTDEQRFFDHVTSLIKVSPTTAMPQGCLAHEIIEKVETEVKRLTKLKASKMKELVFKKLTDLEEIYRSVHMDIDSDSERQTLNDLIDSGRADLSELLARMDIRIAEAKEHALSRKDILEKVEKWTLASEEETWLDEYERDQNRYNAVRGAHINLKRAEKARILVSKLPSLLENLTAKIKAWEKEMGIPFIFNKVRLLDCLDEYTCTRQQKEEEKRRSRELKKLQEQFATEQGAKFGTKPSPIRPLSSRKPLGQSSNANIIGGTPTSRRVSTPMSRKGRPSSGRVQEAVKTAVAPANYVALPKDCSDISTL

SEQ ID NO: 8797 - protein, 542 aa, Zea mays subsp. mays
  peptide (1)..(542): Ceres Seq. ID no. 12373160
  misc_feature (2)..(535): Pfam Name: Microtubule associated protein (MAP65/ASE1 family) Pfam Description: Microtubule associated protein (MAP65/ASE1
  misc_feature (1)..(535): Homolog of NCBI NO: 15240485 NR Description: putative protein; protein id: At5g55230.1 thaliana] >gi|9758120|dbj|BAB08592.1| similarity to unknown protein [Arabidopsis thaliana]
  misc_feature (1)..(535): Homolog of NCBI NO: 11558252 NR Description: microtubule-associated protein MAP65-1a
  misc_feature (1)..(535): Homolog of NCBI NO: 18416818 NR Description: putative protein; protein id: At4g26760.1, by cDNA: 151418., supported by cDNA: gi_18377611 [Arabidopsis
  misc_feature (1)..(400): Homolog of NCBI NO: 15224935 NR Description: hypothetical protein; protein id: At2g38720.1
  misc_feature (401)..(535): Homolog of NCBI NO: 15224935 NR Description: hypothetical protein; protein id: At2g38720.1
  misc_feature (1)..(526): Homolog of NCBI NO: 28200790 NR Description: 65kD microtubule associated protein [Daucus
  misc_feature (1)..(535): Homolog of NCBI NO: 11558254 NR Description: microtubule-associated protein MAP65-1b
  misc_feature (1)..(535): Homolog of NCBI NO: 11558256 NR Description: microtubule-associated protein MAP65-1c
  misc_feature (1)..(537): Homolog of NCBI NO: 27357984 NR Description: Unknown protein [Oryza sativa (japonica
  misc_feature (1)..(541): Homolog of NCBI NO: 25410943 NR Description: hypothetical protein At2g01910 [imported] - thaliana >gi|4522009|gb|AAD21782.1| unknown protein [Arabidopsis
MKRDRMILQLEEDCLNVYKQKVNQTRKQKADLLQELSLGEADIDKILSALGERETFPRSEKLGGTLMEQLAKIEPVLEDLRRRRDERVNEFKAIQSKIVCLQAEISGAIDHGDPAAPVVDENDLSLKRSGELKEHLNDLQTEKNGRLQKIDIQTNSIHEMCNIMSIDLKMALKDVHPSYAELGRSKPMSISNSSLDRLSEKVHALNHEKKQRLRKLQDLGSTLIELWNLMDTPTDEQRFFDHVTSLIKVSPTTAMPQGCLAHEIIEKVETEVKRLTKLKASKMKELVFKKLTDLEEIYRSVHMDIDSDSERQTLNDLIDSGRADLSELLARMDIRIAEAKEHALSRKDILEKVEKWTLASEEETWLDEYERDQNRYNAVRGAHINLKRAEKARILVSKLPSLLENLTAKIKAWEKEMGIPFIFNKVRLLDCLDEYTCTRQQKEEEKRRSRELKKLQEQFATEQGAKFGTKPSPIRPLSSRKPLGQSSNANIIGGTPTSRRVSTPMSRKGRPSSGRVQEAVKTAVAPANYVALPKDCSDISTL

SEQ ID NO: 8798 - DNA, 2063 bp, Zea mays subsp. mays
  misc_feature (1)..(2063): Ceres Seq. ID no. 12406630
  misc_feature: MA Experiment ID: 108504 Result: Up-regulated in Transcription
  misc_feature: MA Experiment 108504 PARAMETER Experiment Name: Zm_Drought_P Parameter: Age (day) Value: 8
  misc_feature: MA Experiment 108504 PARAMETER Experiment Name: Zm_Drought_P Parameter: Organism Value: Zea mays
  misc_feature: MA Experiment 108504 PARAMETER Experiment Name: Zm_Drought_P Parameter: Plant Line Value: 35A19
  misc_feature: MA Experiment 108504 PARAMETER Experiment Name: Zm_Drought_P Parameter: Timepoint (hr) Value: 12
  misc_feature: MA Experiment 108504 PARAMETER Experiment Name: Zm_Drought_P Parameter: Tissue Value: Aerial
  misc_feature: MA Experiment 108504 PARAMETER Experiment Name: Zm_Drought_P Parameter: Treatment Value: Drought vs. No Drought
  misc_feature: MA Experiment ID: 108529 Result: Up-regulated in Transcription
  misc_feature: MA Experiment 108529 PARAMETER Experiment Name: Zm_Imbibed_Seeds_P Parameter: Age (day) Value: 5 vs. 2
  misc_feature: MA Experiment 108529 PARAMETER Experiment Name: Zm_Imbibed_Seeds_P Parameter: Organism Value: Zea mays
  misc_feature: MA Experiment 108529 PARAMETER Experiment Name: Zm_Imbibed_Seeds_P Parameter: Plant Line Value: 35A19
  misc_feature: MA Experiment 108529 PARAMETER Experiment Name: Zm_Imbibed_Seeds_P Parameter: Tissue Value: Roots vs. Embryo
  misc_feature: MA Experiment ID: 108535 Result: Down-regulated in Transcription
  misc_feature: MA Experiment 108535 PARAMETER Experiment Name: Zm_Meristem_P Parameter: Age (day) Value: 8
  misc_feature: MA Experiment 108535 PARAMETER Experiment Name: Zm_Meristem_P Parameter: Organism Value: Zea mays
  misc_feature: MA Experiment 108535 PARAMETER Experiment Name: Zm_Meristem_P Parameter: Plant Line Value: 35A19
  misc_feature: MA Experiment 108535 PARAMETER Experiment Name: Zm_Meristem_P Parameter: Tissue Value: Root Meristem vs. Above Root Meristem
  misc_feature: MA Experiment ID: 108556 Result: Up-regulated in Transcription
  misc_feature: MA Experiment 108556 PARAMETER Experiment Name: Zm_Drought_P Parameter: Age (day) Value: 9
  misc_feature: MA Experiment 108556 PARAMETER Experiment Name: Zm_Drought_P Parameter: Organism Value: Zea mays
  misc_feature: MA Experiment 108556 PARAMETER Experiment Name: Zm_Drought_P Parameter: Plant Line Value: 35A19
  misc_feature: MA Experiment 108556 PARAMETER Experiment Name: Zm_Drought_P Parameter: Timepoint (hr) Value: 24
  misc_feature: MA Experiment 108556 PARAMETER Experiment Name: Zm_Drought_P Parameter: Tissue Value: Aerial
  misc_feature: MA Experiment 108556 PARAMETER Experiment Name: Zm_Drought_P Parameter: Treatment Value: Drought vs. No Drought
  misc_feature: MA Experiment ID: 108689 Result: Up-regulated in Transcription
  misc_feature: MA Experiment 108689 PARAMETER Experiment Name: Zm_Drought_Roots_P Parameter: Age (day) Value: 9
  misc_feature: MA Experiment 108689 PARAMETER Experiment Name: Zm_Drought_Roots_P Parameter: Organism Value: Zea mays
  misc_feature: MA Experiment 108689 PARAMETER Experiment Name: Zm_Drought_Roots_P Parameter: Plant Line Value: 35A19
  misc_feature: MA Experiment 108689 PARAMETER Experiment Name: Zm_Drought_Roots_P Parameter: Timepoint (hr) Value: 24
  misc_feature: MA Experiment 108689 PARAMETER Experiment Name: Zm_Drought_Roots_P Parameter: Tissue Value: Roots
  misc_feature: MA Experiment 108689 PARAMETER Experiment Name: Zm_Drought_Roots_P Parameter: Treatment Value: Drought vs. No Drought
  misc_feature: MA Experiment ID: 20000479 Result: Up-regulated in Transcription
  misc_feature: MA Experiment 20000479 PARAMETER Experiment Name: Zm_Drought_P Parameter: Age (day) Value: 10
  misc_feature: MA Experiment 20000479 PARAMETER Experiment Name: Zm_Drought_P Parameter: Organism Value: Zea mays
  misc_feature: MA Experiment 20000479 PARAMETER Experiment Name: Zm_Drought_P Parameter: Plant Line Value: 35A19
  misc_feature: MA Experiment 20000479 PARAMETER Experiment Name: Zm_Drought_P Parameter: Timepoint (hr) Value: 48
  misc_feature: MA Experiment 20000479 PARAMETER Experiment Name: Zm_Drought_P Parameter: Tissue Value: Aerial
  misc_feature: MA Experiment 20000479 PARAMETER Experiment Name: Zm_Drought_P Parameter: Treatment Value: Drought vs. No Drought
gatctgcgaggcttttattttagacgttgtaataaactccgcttgcaaccgcaccgaactaatcgcgccagtatcagttacttctaggagcagtcctcccgttgttccagccagcgctttccccatcggccaaggatctgtgcgatctaactaagtccccttcgaatctccccacggtctaggctaactccgtctccgccgctcgccgtcggccccgccttcggttgctgcagatcgcgaccatgggaccccgcggcgtcgccctagcgctcctcgcggcggcgctcctccaggccctcgcccccgcgtcggcgncggcggcggcggcgncggcggcggggggcctggtgcgggtcgcgctgaagaagcagcccgtcgaccagaacgcccgcgtcgccgcgcgcctctccgctgaggagaggcagcgcctcctcctccgcggcgccaacgccctgggctcggccggcggcgacgacgactccgacgtcatcgcgctcaataactacatgaacgcgcagtactttggggagatcggcgtcgggacgccgccgcagaagttcaccgtcatcttcgacaccggcagctccaacctctgggtgccgtcctccaagtgctatttctcgatcgcttgctacttccactcgcgctacaagtcagggcagtcaagtacttataagaagaacggaaaacctgctgccattcaatatggaaccggtgcaattgctggttttttcagtgaggatagcgttaaattaggtgatctggatgtgaatgatcaggaatttattgaagctacaaaggagccaggccttaccttcatggttgcaaaatttgatggcattcttgggctaggctttcaggaaatatctgttgggaatgcaacacctgtgtggtataacatggtaaaacaaggtctcatcagtgaccctgttttctctttctggtttaaccgacatgctggtgaaggagaaggtggtgaaattgtgtttggtggaatggattctagtcactacaagggtgatcacacctatgtcccagtcactcagaagggatactggcagtttaatatgggtgatgtcctggttgatggaaagttccactgggttttgtgctggtggttgtgcagcaatagcagattctggaacttccttgcttgctggccccacagccattattactgaaatcaacgaaaagatcggtgctgctggtgtagtcagccaggagtgcaagactgttgtttctcaatacggacaacagatcctagatcttctgctagctgagacgcaaccagcgaagatctgttctcaggttggcctgtgcacttttgatggcactcacggtgttagcactggaattcgtagcgtagtggatgacaaagctgggaaatcaaatggtggtctcaagagtgatccaatgtgcaatgcctgtgagatggctgtggtatggatgcagaaccaactggcccagaacaagacacaggagctcatcctgacctacattaatcagctttgtgagcgtcttccttctcccatgggagaatcagccgtggactgtgccagtcttgggtccatgcccgacattgcgttcaccattggaggcaagaagttcaagctgaaaccggagcagtacattctgaaggtcggtgaaggacaagctgcccagtgcatcagtggattcacagctatggacatcccaccacctcgtggccccctctggatcctgggcgatgttttcatgggagtctaccacaccgtcttcgattacggcaagctgagggttggcttcgcggagtcggcctaaggaacgtatggtttggcgcctcctccagaggaggcaaaacgcatgcgccgagagaaaagcttcgcttgtttttaacttgtgtatttatgcggccggcggtgtgtgtatatatgctacatgtttagtgatgctttccgagacctgagacaatgcccgtctgttttaacctggcacaaggaaatttctcgatgtgtttgccaagccaatcttgtacccaattgtcaccgtgcatcctggcaacgtgtactcaaagtatttttcct

SEQ ID NO: 8799 - protein, 312 aa, Zea mays subsp. mays
  peptide (1)..(312): Ceres Seq. ID no. 12406631
  misc_feature (35)..(284): Pfam Name: Eukaryotic aspartyl protease Pfam Description: Eukaryotic aspartyl protease
  misc_feature (1)..(284): Homolog of NCBI NO: 2499819 NR Description: Aspartic proteinase oryzasin 1 precursor
  misc_feature (1)..(284): Homolog of NCBI NO: 1168536 NR Description: Phytepsin precursor (Aspartic proteinase)
  misc_feature (36)..(284): Homolog of NCBI NO: 5822248 NR Description: Chain A, Crystal Structure Of Prophytepsin, A Of A Barley Vacuolar Aspartic Proteinase. >gi|5822249|pdb|1QDM|B B, Crystal Structure Of Prophytepsin, A Zymogen Of A Barley
  misc_feature (35)..(295): Homolog of NCBI NO: 21616051 NR Description: aspartic proteinase [Theobroma cacao]
  misc_feature (34)..(284): Homolog of NCBI NO: 21616053 NR Description: aspartic proteinase [Theobroma cacao]
  misc_feature (34)..(284): Homolog of NCBI NO: 12231176 NR Description: aspartic proteinase 3 [Nepenthes alata]
  misc_feature (1)..(284): Homolog of NCBI NO: 1665867 NR Description: aspartic proteinase [Centaurea calcitrapa]
  misc_feature (1)..(284): Homolog of NCBI NO: 1076696 NR Description: cyprosin (EC 3.4.23.-) - cardoon
  misc_feature (25)..(25): Xaa is any aa, unknown or other
  misc_feature (30)..(30): Xaa is any aa, unknown or other
MGPRGVALALLAAALLQALAPASAXAAAAXAAGGLVRVALKKQPVDQNARVAARLSAEERQRLLLRGANALGSAGGDDDSDVIALNNYMNAQYFGEIGVGTPPQKFTVIFDTGSSNLWVPSSKCYFSIACYFHSRYKSGQSSTYKKNGKPAAIQYGTGAIAGFFSEDSVKLGDLDVNDQEFIEATKEPGLTFMVAKFDGILGLGFQEISVGNATPVWYNMVKQGLISDPVFSFWFNRHAGEGEGGEIVFGGMDSSHYKGDHTYVPVTQKGYWQFNMGDVLVDGKFHWVLCWWLCSNSRFWNFLACWPHSHYY

SEQ ID NO: 8800 - protein, 281 aa, Zea mays subsp. mays
  peptide (1)..(281): Ceres Seq. ID no. 12406632
  misc_feature (48)..(130): Pfam Name: Eukaryotic aspartyl protease Pfam Description: Eukaryotic aspartyl protease
  misc_feature (48)..(281): Homolog of NCBI NO: 2499819 NR Description: Aspartic proteinase oryzasin 1 precursor
  misc_feature (48)..(281): Homolog of NCBI NO: 1168536 NR Description: Phytepsin precursor (Aspartic proteinase)
  misc_feature (48)..(281): Homolog of NCBI NO: 5822248 NR Description: Chain A, Crystal Structure Of Prophytepsin, A Of A Barley Vacuolar Aspartic Proteinase. >gi|5822249|pdb|1QDM|B B, Crystal Structure Of Prophytepsin, A Zymogen Of A Barley
  misc_feature (48)..(281): Homolog of NCBI NO: 21616051 NR Description: aspartic proteinase [Theobroma cacao]
  misc_feature (44)..(281): Homolog of NCBI NO: 21616053 NR Description: aspartic proteinase [Theobroma cacao]
  misc_feature (48)..(281): Homolog of NCBI NO: 12231176 NR Description: aspartic proteinase 3 [Nepenthes alata]
  misc_feature (46)..(281): Homolog of NCBI NO: 1665867 NR Description: aspartic proteinase [Centaurea calcitrapa]
  misc_feature (46)..(281): Homolog of NCBI NO: 1076696 NR Description: cyprosin (EC 3.4.23.-) - cardoon
MLVKEKVVKLCLVEWILVTTRVITPMSQSLRRDTGSLIWVMSWLMESSTGFCAGGCAAIADSGTSLLAGPTAIITEINEKIGAAGVVSQECKTVVSQYGQQILDLLLAETQPAKICSQVGLCTFDGTHGVSTGIRSVVDDKAGKSNGGLKSDPMCNACEMAVVWMQNQLAQNKTQELILTYINQLCERLPSPMGESAVDCASLGSMPDIAFTIGGKKFKLKPEQYILKVGEGQAAQCISGFTAMDIPPPRGPLWILGDVFMGVYHTVFDYGKLRVGFAESA

SEQ ID NO: 8801 - protein, 256 aa, Zea mays subsp. mays
  peptide (1)..(256): Ceres Seq. ID no. 12406633
  misc_feature (23)..(105): Pfam Name: Eukaryotic aspartyl protease Pfam Description: Eukaryotic aspartyl protease
  misc_feature (23)..(256): Homolog of NCBI NO: 2499819 NR Description: Aspartic proteinase oryzasin 1 precursor
  misc_feature (23)..(256): Homolog of NCBI NO: 1168536 NR Description: Phytepsin precursor (Aspartic proteinase)
  misc_feature (23)..(256): Homolog of NCBI NO: 5822248 NR Description: Chain A, Crystal Structure Of Prophytepsin, A Of A Barley Vacuolar Aspartic Proteinase. >gi|5822249|pdb|1QDM|B B, Crystal Structure Of Prophytepsin, A Zymogen Of A Barley
  misc_feature (23)..(256): Homolog of NCBI NO: 21616051 NR Description: aspartic proteinase [Theobroma cacao]
  misc_feature (19)..(256): Homolog of NCBI NO: 21616053 NR Description: aspartic proteinase [Theobroma cacao]
  misc_feature (23)..(256): Homolog of NCBI NO: 12231176 NR Description: aspartic proteinase 3 [Nepenthes alata]
  misc_feature (21)..(256): Homolog of NCBI NO: 1665867 NR Description: aspartic proteinase [Centaurea calcitrapa]
  misc_feature (21)..(256): Homolog of NCBI NO: 1076696 NR Description: cyprosin (EC 3.4.23.-) - cardoon
MSQSLRRDTGSLIWVMSWLMESSTGFCAGGCAAIADSGTSLLAGPTAIITEINEKIGAAGVVSQECKTVVSQYGQQILDLLLAETQPAKICSQVGLCTFDGTHGVSTGIRSVVDDKAGKSNGGLKSDPMCNACEMAVVWMQNQLAQNKTQELILTYINQLCERLPSPMGESAVDCASLGSMPDIAFTIGGKKFKLKPEQYILKVGEGQAAQCISGFTAMDIPPPRGPLWILGDVFMGVYHTVFDYGKLRVGFAESA

SEQ ID NO: 8802 - DNA, 948 bp, Zea mays subsp. mays
  misc_feature (1)..(948): Ceres Seq. ID no. 12348096
  misc_feature: MA Experiment ID: 20000488 Result: Down-regulated in Transcription
  misc_feature: MA Experiment 20000488 PARAMETER Experiment Name: Zm_50mM_NH4NO3_L_to_H_P Parameter: Organism Value: Zea mays
  misc_feature: MA Experiment 20000488 PARAMETER Experiment Name: Zm_50mM_NH4NO3_L_to_H_P Parameter: Timepoint (hr) Value: 8
  misc_feature: MA Experiment 20000488 PARAMETER Experiment Name: Zm_50mM_NH4NO3_L_to_H_P Parameter: Tissue Value: Leaves
  misc_feature: MA Experiment 20000488 PARAMETER Experiment Name: Zm_50mM_NH4NO3_L_to_H_P Parameter: Treatment Value: 50mM NH4NO3 vs. 100mM Mannitol
aaacggaaacgggggcagttggtgagttgggacttgggagccgacgctgtcggggtgatccagtcgccgccgacgccgccgaacgcgcccgcgcccgagcctccctctacgcggacgcgggaggacccttccactcccagagccgggcgtgtccgatcgtgagcccatggcggaatccatcgtctccggcgccgccgccccgccgccgggcgcgccctcgttctcctacctggccgtgttctccaactgcccgctcgtcgccgcggtgctcgccttcgccatcgcgcagtccatcaaggtcctcaccacctggtataaggagaaccggtgggacgcgaagcagctggtgggctccggcgggatgccgtcctcgcactcggccaccgtcaccgcgctcgccgtcgccgtcgggctgcaggaggggttcgccagctcgctgttcgccaccaccgccgtcttcgcctccgtggtgatgtatgatgcctttggtgttaggctacatgcagggaagcaagcagaggtcttgaaccagattgtgtacgagcttccatcagaacatccactagctgaaacaagaccgctgcgagagctgctagggcacacacctccacaggtatttgctggcggagtgcttggatttgcagtagccacatttacagcgatgatcgctgggcttggtagttgactccgcatttgaagaaatggtcaacattcgcattgaagttctggaattcaaattggacacatgtttcctagccagcttatgatagataatgcgttgtgtataggtgtatttaatatgcaaattgctgtcaatttgttgaagagaaacttgcgccattcttttgtagttaatcgacgagtgaactatatgctgtattcgttcctgtccaaagtatttggagtgattgaaagtacctcgtgataaagcattcatgagatttccgc

SEQ ID NO: 8803 - protein, 172 aa, Zea mays subsp. mays
  peptide (1)..(172): Ceres Seq. ID no. 12348097
  misc_feature (22)..(161): Pfam Name: Divergent PAP2 family Pfam Description: Divergent PAP2 family
  misc_feature (9)..(161): Homolog of NCBI NO: 21555270 NR Description: unknown [Arabidopsis thaliana]
  misc_feature (18)..(161): Homolog of NCBI NO: 15220480 NR Description: F12A21.27; protein id: At1g67600.1, supported by
  misc_feature (9)..(161): Homolog of NCBI NO: 18395459 NR Description: expressed protein; protein id: At1g24350.1,
  misc_feature (18)..(150): Homolog of NCBI NO: 12324675 NR Description: unknown protein [Arabidopsis thaliana]
  misc_feature (9)..(150): Homolog of NCBI NO: 9743358 NR Description: F21J9.1 [Arabidopsis thaliana]
  misc_feature (23)..(161): Homolog of NCBI NO: 38344227 NR Description: OJ991113_30.3 [Oryza sativa (japonica
  misc_feature (9)..(161): Homolog of NCBI NO: 7486375 NR Description: hypothetical protein F3I6.29 - Arabidopsis >gi|2829889|gb|AAC00597.1| Hypothetical protein [Arabidopsis
  misc_feature (9)..(150): Homolog of NCBI NO: 26449729 NR Description: unknown protein [Arabidopsis thaliana]
  misc_feature (23)..(150): Homolog of NCBI NO: 29150195 NR Description: putative protein [Oryza sativa (indica
  misc_feature (21)..(163): Homolog of NCBI NO: 18412127 NR Description: putative protein; protein id: At3g61770.1, by cDNA: 29280., supported by cDNA: gi_19347770 [Arabidopsis >gi|19347771|gb|AAL86337.1| unknown protein [Arabidopsis
MAESIVSGAAAPPPGAPSFSYLAVFSNCPLVAAVLAFAIAQSIKVLTTWYKENRWDAKQLVGSGGMPSSHSATVTALAVAVGLQEGFASSLFATTAVFASVVMYDAFGVRLHAGKQAEVLNQIVYELPSEHPLAETRPLRELLGHTPPQVFAGGVLGFAVATFTAMIAGLGS

SEQ ID NO: 8804 - protein, 156 aa, Zea mays subsp. mays
  peptide (1)..(156): Ceres Seq. ID no. 12348098
  misc_feature (44)..(155): Pfam Name: Extensin-like region Pfam Description: Extensin-like region
  misc_feature (45)..(154): Homolog of NCBI NO: 2429362 NR Description: proline rich protein [Santalum album]
  misc_feature (51)..(154): Homolog of NCBI NO: 1076211 NR Description: hypothetical protein VSP-3 - Chlamydomonas >gi|530876|gb|AAB53953.1| amino acid feature: Rod protein domain,
  misc_feature (41)..(155): Homolog of NCBI NO: 2429362 NR Description: proline rich protein [Santalum album]
  misc_feature (48)..(155): Homolog of NCBI NO: 1076211 NR Description: hypothetical protein VSP-3 - Chlamydomonas >gi|530876|gb|AAB53953.1| amino acid feature: Rod protein domain,
  misc_feature (23)..(155): Homolog of NCBI NO: 25143299 NR Description: pre-mRNA splicing SR protein related RSR-1 (68.2
  misc_feature (42)..(154): Homolog of NCBI NO: 1076205 NR Description: hypothetical protein WP6 - Chlamydomonas eugametos
  misc_feature (51)..(155): Homolog of NCBI NO: 14253159 NR Description: VMP3 protein [Volvox carteri f. nagariensis]
  misc_feature (42)..(155): Homolog of NCBI NO: 18138528 NR Description: hypothetical protein [Grapevine fleck virus]
  misc_feature (23)..(154): Homolog of NCBI NO: 2429362 NR Description: proline rich protein [Santalum album]
TETGAVGELGLGSRRCRGDPVAADAAERARARASLYADAGGPFHSQSRACPIVSPWRNPSSPAPPPRRRARPRSPTWPCSPTARSSPRCSPSPSRSPSRSSPPGIRRTGGTRSSWWAPAGCRPRTRPPSPRSPSPSGCRRGSPARCSPPPPSSPPW

SEQ ID NO: 8805 - protein, 107 aa, Zea mays subsp. mays
  peptide (1)..(107): Ceres Seq. ID no. 12348099
  misc_feature (1)..(96): Pfam Name: Divergent PAP2 family Pfam Description: Divergent PAP2 family
  misc_feature (1)..(96): Homolog of NCBI NO: 21555270 NR Description: unknown [Arabidopsis thaliana]
  misc_feature (1)..(96): Homolog of NCBI NO: 15220480 NR Description: F12A21.27; protein id: At1g67600.1, supported by
  misc_feature (1)..(96): Homolog of NCBI NO: 18395459 NR Description: expressed protein; protein id: At1g24350.1,
  misc_feature (1)..(85): Homolog of NCBI NO: 12324675 NR Description: unknown protein [Arabidopsis thaliana]
  misc_feature (1)..(85): Homolog of NCBI NO: 9743358 NR Description: F21J9.1 [Arabidopsis thaliana]
  misc_feature (1)..(96): Homolog of NCBI NO: 38344227 NR Description: OJ991113_30.3 [Oryza sativa (japonica
  misc_feature (1)..(96): Homolog of NCBI NO: 7486375 NR Description: hypothetical protein F3I6.29 - Arabidopsis >gi|2829889|gb|AAC00597.1| Hypothetical protein [Arabidopsis
  misc_feature (1)..(85): Homolog of NCBI NO: 26449729 NR Description: unknown protein [Arabidopsis thaliana]
  misc_feature (1)..(85): Homolog of NCBI NO: 29150195 NR Description: putative protein [Oryza sativa (indica
  misc_feature (1)..(98): Homolog of NCBI NO: 18412127 NR Description: putative protein; protein id: At3g61770.1, by cDNA: 29280., supported by cDNA: gi_19347770 [Arabidopsis >gi|19347771|gb|AAL86337.1| unknown protein [Arabidopsis
MPSSHSATVTALAVAVGLQEGFASSLFATTAVFASVVMYDAFGVRLHAGKQAEVLNQIVYELPSEHPLAETRPLRELLGHTPPQVFAGGVLGFAVATFTAMIAGLGS

SEQ ID NO: 8806 - DNA, 1283 bp, Zea mays subsp. mays
  misc_feature (1)..(1283): Ceres Seq. ID no. 13494403
  misc_feature: MA Experiment ID: 108504 Result: Down-regulated in Transcription
  misc_feature: MA Experiment 108504 PARAMETER Experiment Name: Zm_Drought_P Parameter: Age (day) Value: 8
  misc_feature: MA Experiment 108504 PARAMETER Experiment Name: Zm_Drought_P Parameter: Organism Value: Zea mays
  misc_feature: MA Experiment 108504 PARAMETER Experiment Name: Zm_Drought_P Parameter: Plant Line Value: 35A19
  misc_feature: MA Experiment 108504 PARAMETER Experiment Name: Zm_Drought_P Parameter: Timepoint (hr) Value: 12
  misc_feature: MA Experiment 108504 PARAMETER Experiment Name: Zm_Drought_P Parameter: Tissue Value: Aerial
  misc_feature: MA Experiment 108504 PARAMETER Experiment Name: Zm_Drought_P Parameter: Treatment Value: Drought vs. No Drought
  misc_feature: MA Experiment ID: 108522 Result: Down-regulated in Transcription
  misc_feature: MA Experiment 108522 PARAMETER Experiment Name: Zm_42deg_Heat_P Parameter: Age (day) Value: 8
  misc_feature: MA Experiment 108522 PARAMETER Experiment Name: Zm_42deg_Heat_P Parameter: Organism Value: Zea mays
  misc_feature: MA Experiment 108522 PARAMETER Experiment Name: Zm_42deg_Heat_P Parameter: Plant Line Value: 35A19
  misc_feature: MA Experiment 108522 PARAMETER Experiment Name: Zm_42deg_Heat_P Parameter: Temperature (deg C) Value: 42 vs. 22
  misc_feature: MA Experiment 108522 PARAMETER Experiment Name: Zm_42deg_Heat_P Parameter: Timepoint (hr) Value: 1
  misc_feature: MA Experiment 108522 PARAMETER Experiment Name: Zm_42deg_Heat_P Parameter: Tissue Value: Aerial
  misc_feature: MA Experiment ID: 108527 Result: Down-regulated in Transcription
  misc_feature: MA Experiment 108527 PARAMETER Experiment Name: Zm_5mM_NO_P Parameter: Age (day) Value: 8
  misc_feature: MA Experiment 108527 PARAMETER Experiment Name: Zm_5mM_NO_P Parameter: Organism Value: Zea mays
  misc_feature: MA Experiment 108527 PARAMETER Experiment Name: Zm_5mM_NO_P Parameter: Plant Line Value: 35A19
  misc_feature: MA Experiment 108527 PARAMETER Experiment Name: Zm_5mM_NO_P Parameter: Timepoint (hr) Value: 6
  misc_feature: MA Experiment 108527 PARAMETER Experiment Name: Zm_5mM_NO_P Parameter: Tissue Value: Aerial
  misc_feature: MA Experiment 108527 PARAMETER Experiment Name: Zm_5mM_NO_P Parameter: Treatment Value: 5mM NO vs. No Treatment
  misc_feature: MA Experiment ID: 108528 Result: Up-regulated in Transcription
  misc_feature: MA Experiment 108528 PARAMETER Experiment Name: Zm_Imbibed_Seeds_P Parameter: Age (day) Value: 5 vs. 2
  misc_feature: MA Experiment 108528 PARAMETER Experiment Name: Zm_Imbibed_Seeds_P Parameter: Organism Value: Zea mays
  misc_feature: MA Experiment 108528 PARAMETER Experiment Name: Zm_Imbibed_Seeds_P Parameter: Plant Line Value: 35A19
  misc_feature: MA Experiment 108528 PARAMETER Experiment Name: Zm_Imbibed_Seeds_P Parameter: Tissue Value: Aerial vs. Embryo
  misc_feature: MA Experiment ID: 108530 Result: Up-regulated in Transcription
  misc_feature: MA Experiment 108530 PARAMETER Experiment Name: Zm_Imbibed_Seeds_P Parameter: Age (day) Value: 6 vs. 2
  misc_feature: MA Experiment 108530 PARAMETER Experiment Name: Zm_Imbibed_Seeds_P Parameter: Organism Value: Zea mays
  misc_feature: MA Experiment 108530 PARAMETER Experiment Name: Zm_Imbibed_Seeds_P Parameter: Plant Line Value: 35A19
  misc_feature: MA Experiment 108530 PARAMETER Experiment Name: Zm_Imbibed_Seeds_P Parameter: Tissue Value: Aerial vs. Embryo
  misc_feature: MA Experiment ID: 108536 Result: Down-regulated in Transcription
  misc_feature: MA Experiment 108536 PARAMETER Experiment Name: Zm_Meristem_P Parameter: Age (day) Value: 8
  misc_feature: MA Experiment 108536 PARAMETER Experiment Name: Zm_Meristem_P Parameter: Organism Value: Zea mays
  misc_feature: MA Experiment 108536 PARAMETER Experiment Name: Zm_Meristem_P Parameter: Plant Line Value: 35A19
  misc_feature: MA Experiment 108536 PARAMETER Experiment Name: Zm_Meristem_P Parameter: Tissue Value: Shoot Meristem vs. Above Shoot Meristem
  misc_feature: MA Experiment ID: 108542 Result: Down-regulated in Transcription
  misc_feature: MA Experiment 108542 PARAMETER Experiment Name: Zm_150mM_NaCl_P Parameter: Age (day) Value: 8
  misc_feature: MA Experiment 108542 PARAMETER Experiment Name: Zm_150mM_NaCl_P Parameter: Organism Value: Zea mays
  misc_feature: MA Experiment 108542 PARAMETER Experiment Name: Zm_150mM_NaCl_P Parameter: Plant Line Value: 35A19
  misc_feature: MA Experiment 108542 PARAMETER Experiment Name: Zm_150mM_NaCl_P Parameter: Timepoint (hr) Value: 6
  misc_feature: MA Experiment 108542 PARAMETER Experiment Name: Zm_150mM_NaCl_P Parameter: Tissue Value: Aerial
  misc_feature: MA Experiment 108542 PARAMETER Experiment Name: Zm_150mM_NaCl_P Parameter: Treatment Value: 150mM NaCl vs. No Treatment
  misc_feature: MA Experiment ID: 108547 Result: Up-regulated in Transcription
  misc_feature: MA Experiment 108547 PARAMETER Experiment Name: Zm_Imbibed_Seeds_P Parameter: Age (day) Value: 4 vs. 2
  misc_feature: MA Experiment 108547 PARAMETER Experiment Name: Zm_Imbibed_Seeds_P Parameter: Organism Value: Zea mays
  misc_feature: MA Experiment 108547 PARAMETER Experiment Name: Zm_Imbibed_Seeds_P Parameter: Plant Line Value: 35A19
  misc_feature: MA Experiment 108547 PARAMETER Experiment Name: Zm_Imbibed_Seeds_P Parameter: Tissue Value: Aerial vs. Embryo
  misc_feature: MA Experiment ID: 108556 Result: Down-regulated in Transcription
  misc_feature: MA Experiment 108556 PARAMETER Experiment Name: Zm_Drought_P Parameter: Age (day) Value: 9
  misc_feature: MA Experiment 108556 PARAMETER Experiment Name: Zm_Drought_P Parameter: Organism Value: Zea mays
  misc_feature: MA Experiment 108556 PARAMETER Experiment Name: Zm_Drought_P Parameter: Plant Line Value: 35A19
  misc_feature: MA Experiment 108556 PARAMETER Experiment Name: Zm_Drought_P Parameter: Timepoint (hr) Value: 24
  misc_feature: MA Experiment 108556 PARAMETER Experiment Name: Zm_Drought_P Parameter: Tissue Value: Aerial
  misc_feature: MA Experiment 108556 PARAMETER Experiment Name: Zm_Drought_P Parameter: Treatment Value: Drought vs. No Drought
  misc_feature: MA Experiment ID: 108559 Result: Down-regulated in Transcription
  misc_feature: MA Experiment 108559 PARAMETER Experiment Name: Zm_5mM_NO_P Parameter: Age (day) Value: 8
  misc_feature: MA Experiment 108559 PARAMETER Experiment Name: Zm_5mM_NO_P Parameter: Organism Value: Zea mays
  misc_feature: MA Experiment 108559 PARAMETER Experiment Name: Zm_5mM_NO_P Parameter: Plant Line Value: 35A19
  misc_feature: MA Experiment 108559 PARAMETER Experiment Name: Zm_5mM_NO_P Parameter: Timepoint (hr) Value: 12
  misc_feature: MA Experiment 108559 PARAMETER Experiment Name: Zm_5mM_NO_P Parameter: Tissue Value: Aerial
  misc_feature: MA Experiment 108559 PARAMETER Experiment Name: Zm_5mM_NO_P Parameter: Treatment Value: 5mM NO vs. No Treatment
  misc_feature: MA Experiment ID: 108687 Result: Down-regulated in Transcription
  misc_feature: MA Experiment 108687 PARAMETER Experiment Name: Zm_Embryos-Flowers__P Parameter: Tissue Value: Embryo vs. Aerial+
  misc_feature: MA Experiment ID: 20000477 Result: Down-regulated in Transcription
  misc_feature: MA Experiment 20000477 PARAMETER Experiment Name: Zm_5mM_SA_P Parameter: Age (day) Value: 10
  misc_feature: MA Experiment 20000477 PARAMETER Experiment Name: Zm_5mM_SA_P Parameter: Organism Value: Zea mays
  misc_feature: MA Experiment 20000477 PARAMETER Experiment Name: Zm_5mM_SA_P Parameter: Plant Line Value: 35A19
  misc_feature: MA Experiment 20000477 PARAMETER Experiment Name: Zm_5mM_SA_P Parameter: Timepoint (hr) Value: 48
  misc_feature: MA Experiment 20000477 PARAMETER Experiment Name: Zm_5mM_SA_P Parameter: Tissue Value: Aerial
  misc_feature: MA Experiment 20000477 PARAMETER Experiment Name: Zm_5mM_SA_P Parameter: Treatment Value: 5mM SA vs. No Treatment
  misc_feature: MA Experiment ID: 20000478 Result: Down-regulated in Transcription
  misc_feature: MA Experiment 20000478 PARAMETER Experiment Name: Zm_5mM_SA_P Parameter: Age (day) Value: 11
  misc_feature: MA Experiment 20000478 PARAMETER Experiment Name: Zm_5mM_SA_P Parameter: Organism Value: Zea mays
  misc_feature: MA Experiment 20000478 PARAMETER Experiment Name: Zm_5mM_SA_P Parameter: Plant Line Value: 35A19
  misc_feature: MA Experiment 20000478 PARAMETER Experiment Name: Zm_5mM_SA_P Parameter: Timepoint (hr) Value: 72
  misc_feature: MA Experiment 20000478 PARAMETER Experiment Name: Zm_5mM_SA_P Parameter: Tissue Value: Aerial
  misc_feature: MA Experiment 20000478 PARAMETER Experiment Name: Zm_5mM_SA_P Parameter: Treatment Value: 5mM SA vs. No Treatment
gcgctctgtgcacagacgaccttcttcccatcccttcccttccctctgctagtctgcttcgttcctcggccatggtggtcctcgccaagggtgagctcgagcagatcgccctcccggctgcagagccgcccccggccgacgtgcggtcggtggacctgtccgccccggcgggccccgcgcgcgaggccgcggcgcgcgcgctggtggcggcgtgcgaggagcacgggttcttccgggtgacgggccacggcgtgccgkgccagactcgtgcgcgccgcggaggccgcggcggccggngttcttcgcgcggccacagggcgagaaggaggaggagggccccacgctcgggtacggaagcaagcgcatcggcggcaacggcgacctcggctgggtcgagtacctcctgctcggtggcacacccgccgccgccgcgtcctcctcggcattattgccctgcgccgccgccccgtcgccgtccgcgccggccgggccgttacgggaccttctggacgagtacacggtggcggtgcggcggatggcgtgcgcggtgctggagctgatggcggaggggctgggcatcgccggggacgcgccgcagctggcgcggctggtggcgcgcgcggacagcgactgcatgctgcgggtgaaccactacccgccgcggccggcgctcaaccccagcctcacggggttcggcgagcacaccgacccgcagatcatctcggtgctccgcgccaacggcacctccggcctggagatcgcgctgcgggacggcgcctgggcctccgtcccgcccgacggggacgccttcttcgtcaacgtcggcgacaccctgcaggtgttgacgaacgggaggttcaggagcgtgaggcacagggtggtggtgaacagcgagaagtcccgggtgtccatggtcttcttcggcggcccgccgcccggcgagaggctgggcccgctgccgcagctcctgggcgacggcggccggagccggtaccgggacttcacctggagcgagttcaagaccagcgggtgcaggaccaggctcgcggaagaccgcctgtcccgcttcgagaagaagtagctagaggctacgtcatttgcatgaccggcggtaggatcgattaccatgtatgcttctctgtatatgtcagttgcattgccacagctctagctactggcgcccgtacgtgtatattagtggccatgctcgtattgtacgtgcacgtgtatgcacgcatatacatggtggcaccacacagggtatcatgcatccattgttatct

SEQ ID NO: 8807 - protein, 185 aa, Zea mays subsp. mays
  peptide (1)..(185): Ceres Seq. ID no. 15222925
  misc_feature (24)..(88): Homolog of NCBI NO: 34909676 NR Description: putative GA 2-oxidase [Oryza sativa (japonica
  misc_feature (24)..(87): Homolog of NCBI NO: 1666096 NR Description: dioxygenase [Marah macrocarpus]
  misc_feature (86)..(86): Xaa is any aa, unknown or other
  misc_feature (99)..(99): Xaa is any aa, unknown or other
ALCTDDLLPIPSLPSASLLRSSAMVVLAKGELEQIALPAAEPPPADVRSVDLSAPAGPAREAAARALVAACEEHGFFRVTGHGVPXQTRARRGGRGGRXSSRGHRARRRRRAPRSGTEASASAATATSAGSSTSCSVAHPPPPRPPRHYCPAPPPRRRPRRPGRYGTFWTSTRWRCGGWRARCWS

SEQ ID NO: 8808 - protein, 181 aa, Zea mays subsp. mays
  peptide (1)..(181): Ceres Seq. ID no. 15222926
  misc_feature (31)..(132): Pfam Name: 2OG-Fe(II) oxygenase superfamily Pfam Description: 2OG-Fe(II) oxygenase superfamily
  misc_feature (1)..(179): Homolog of NCBI NO: 34903844 NR Description: unnamed protein product [Oryza sativa (japonica group)] >gi|8096606|dbj|BAA96178.1| unnamed protein product
  misc_feature (1)..(181): Homolog of NCBI NO: 34909676 NR Description: putative GA 2-oxidase [Oryza sativa (japonica
  misc_feature (1)..(180): Homolog of NCBI NO: 1666096 NR Description: dioxygenase [Marah macrocarpus]
MACAVLELMAEGLGIAGDAPQLARLVARADSDCMLRVNHYPPRPALNPSLTGFGEHTDPQIISVLRANGTSGLEIALRDGAWASVPPDGDAFFVNVGDTLQVLTNGRFRSVRHRVVVNSEKSRVSMVFFGGPPPGERLGPLPQLLGDGGRSRYRDFTWSEFKTSGCRTRLAEDRLSRFEKK

SEQ ID NO: 8809 - protein, 173 aa, Zea mays subsp. mays
  peptide (1)..(173): Ceres Seq. ID no. 15222927
  misc_feature (23)..(124): Pfam Name: 2OG-Fe(II) oxygenase superfamily Pfam Description: 2OG-Fe(II) oxygenase superfamily
  misc_feature (1)..(171): Homolog of NCBI NO: 34903844 NR Description: unnamed protein product [Oryza sativa (japonica group)] >gi|8096606|dbj|BAA96178.1| unnamed protein product
  misc_feature (1)..(173): Homolog of NCBI NO: 34909676 NR Description: putative GA 2-oxidase [Oryza sativa (japonica
  misc_feature (1)..(172): Homolog of NCBI NO: 1666096 NR Description: dioxygenase [Marah macrocarpus]
MAEGLGIAGDAPQLARLVARADSDCMLRVNHYPPRPALNPSLTGFGEHTDPQIISVLRANGTSGLEIALRDGAWASVPPDGDAFFVNVGDTLQVLTNGRFRSVRHRVVVNSEKSRVSMVFFGGPPPGERLGPLPQLLGDGGRSRYRDFTWSEFKTSGCRTRLAEDRLSRFEKK

SEQ ID NO: 8810 - DNA, 1761 bp, Zea mays subsp. mays
  misc_feature (1)..(1761): Ceres Seq. ID no. 12349307
  misc_feature: MA Experiment ID: 20000535 Result: Down-regulated in Transcription
  misc_feature: MA Experiment 20000535 PARAMETER Experiment Name: Zm_Hybrid_Seed_Dev_P Parameter: DAP Value: 30 vs. 12
  misc_feature: MA Experiment 20000535 PARAMETER Experiment Name: Zm_Hybrid_Seed_Dev_P Parameter: Organism Value: Zea mays
  misc_feature: MA Experiment 20000535 PARAMETER Experiment Name: Zm_Hybrid_Seed_Dev_P Parameter: Plant Line Value: 35A19
  misc_feature: MA Experiment 20000535 PARAMETER Experiment Name: Zm_Hybrid_Seed_Dev_P Parameter: Tissue Value: Embryo vs. Unfert Floret
atctcttcttcctcccccagagcccctgccctcttccgccgacagcgagaaagcacgcggcgcacagcaacacgtccctgccgttccttttgactccggggatccctctcctccttgcctgccgaggaacccactagcttcctactacttcccctccgtcctctcgatccctctccccgttcccttgaccacccgagcatcaagtggcggggagggaacgcggcggcgcgggcgaggaccgatggagaaggggagcgcgccggcgatggccctggcgctcgccatgcttctcgcctgctccagcatcgctgccgtcacggcgcaggagaccgagcggatcgaaggaagcgctggtgatgtgttagaagataaccctgttgggaggctcaaggtctttgtctatgatctccccagcaaatacaacaagaagctgctgaagaaggatcctaggtgcctgaaccacatgtttgccgccgagatcttcatgcacaggttcctgttgtcgagtgctgtccgaacttttaatcctgaggaagcagattggttctacacgcccgtatacacgacatgcgatctcacccccaagggtcttcccttgcctttcaagtctcctcgaatgatgcgcagcgcgatccagctgattgctacgaattggccttactggaatagatcagagggcgctgatcatttctttgtcacgccccatgactttggtgcttgctttcattatcaggaagaaaaagcaatcggacggggaatccttcccttgcttcagcgtgctacgctggttcagaccttcggacagaagaaccatgtctgcctgaaggatgggtccatcaccatcccaccatacgcgcctcctcagaagatgcagactcaccttatccctgcagacacccctcgatccatcttcgtgtacttccgaggtctgttctatgacaccggcaatgaccccgagggtggttattatgcgagaggtgctcgcgcgtcggtctgggagaacttcaagaacaacccgctgtttgacatctcgaccgaccacccaccgacatactacgaagacatgcagcgctccgtgttctgcctctgcccgttgggctgggcaccgtggagtcccaggctggtggaggccgtggtcttcggctgcatcccggtgatcatcgcagacgacatcgtccttcccttcgcggacgccatcccgtgggaggagatcggcgtctttgtcgccgaggaggatgtcccgcggctggacagcatcctgacgtccattcccacggacgtcgtgctgaggaagcaacggctcctcgcgaacccgtctatgaagcaggccatgctgttcccacagcctgctcaagcaggagacgcgttccaccagattctgaacggtctcgcgcgcaagctcccgcacggtagcaatgtgttcctgaagcccggtgagagggccctgaactggacagccggaccaccaggcgacctcaagccttggtagcgtcttgtggatggatatgacctcttctctggaaaggaagtatggacaacatgattaatatacctgtgcctttgaactgccatgggtgcacatagtgctgaccacaagccaaatgtacattttttttgtatgtttttttcttctatctacaactgttacatatatatcttcatttctttttttctctttcccatttgcttgatgatataagagttccaaaccctgtcgaccatgtgtggatatatcataaatggaatttacaagattgtact

SEQ ID NO: 8811 - protein, 495 aa, Zea mays subsp. mays
  peptide (1)..(495): Ceres Seq. ID no. 12349308
  misc_feature (131)..(435): Pfam Name: Exostosin family Pfam Description: Exostosin family
  misc_feature (89)..(495): Homolog of NCBI NO: 34907048 NR Description: contains EST D24978(R2878)~similar to Arabidopsis
  misc_feature (89)..(495): Homolog of NCBI NO: 18424516 NR Description: putative protein; protein id: At5g61840.1, by cDNA: 34861., supported by cDNA: gi_15809825, supported by gi_17978868 [Arabidopsis thaliana] >gi|15809826|gb|AAL06841.1|
  misc_feature (89)..(495): Homolog of NCBI NO: 21592991 NR Description: unknown [Arabidopsis thaliana]
  misc_feature (92)..(495): Homolog of NCBI NO: 15223522 NR Description: unknown protein; protein id: At1g27440.1 thaliana] >gi|9802541|gb|AAF99743.1|AC004557_22 F17L21.23
  misc_feature (89)..(495): Homolog of NCBI NO: 18642697 NR Description: Unknown protein [Oryza sativa]
  misc_feature (155)..(495): Homolog of NCBI NO: 23821292 NR Description: pectin-glucuronyltransferase [Nicotiana
  misc_feature (155)..(495): Homolog of NCBI NO: 10176877 NR Description: gb|AAC80624.1~gene_id:MAC9.17~strong similarity unknown protein [Arabidopsis thaliana]
  misc_feature (45)..(467): Homolog of NCBI NO: 15237173 NR Description: putative protein; protein id: At5g22940.1 thaliana] >gi|10177241|dbj|BAB10615.1|
  misc_feature (129)..(475): Homolog of NCBI NO: 25407954 NR Description: hypothetical protein At2g28110 [imported] - thaliana >gi|4063747|gb|AAC98455.1| hypothetical protein
  misc_feature (128)..(467): Homolog of NCBI NO: 9758008 NR Description: contains similarity to limonene
SLLPPPEPLPSSADSEKARGAQQHVPAVPFDSGDPSPPCLPRNPLASYYFPSVLSIPLPVPLTTRASSGGEGTRRRGRGPMEKGSAPAMALALAMLLACSSIAAVTAQETERIEGSAGDVLEDNPVGRLKVFVYDLPSKYNKKLLKKDPRCLNHMFAAEIFMHRFLLSSAVRTFNPEEADWFYTPVYTTCDLTPKGLPLPFKSPRMMRSAIQLIATNWPYWNRSEGADHFFVTPHDFGACFHYQEEKAIGRGILPLLQRATLVQTFGQKNHVCLKDGSITIPPYAPPQKMQTHLIPADTPRSIFVYFRGLFYDTGNDPEGGYYARGARASVWENFKNNPLFDISTDHPPTYYEDMQRSVFCLCPLGWAPWSPRLVEAVVFGCIPVIIADDIVLPFADAIPWEEIGVFVAEEDVPRLDSILTSIPTDVVLRKQRLLANPSMKQAMLFPQPAQAGDAFHQILNGLARKLPHGSNVFLKPGERALNWTAGPPGDLKPW

SEQ ID NO: 8812 - protein, 415 aa, Zea mays subsp. mays
  peptide (1)..(415): Ceres Seq. ID no. 12349309
  misc_feature (51)..(355): Pfam Name: Exostosin family Pfam Description: Exostosin family
  misc_feature (9)..(415): Homolog of NCBI NO: 34907048 NR Description: contains EST D24978(R2878)~similar to Arabidopsis
  misc_feature (9)..(415): Homolog of NCBI NO: 18424516 NR Description: putative protein; protein id: At5g61840.1, by cDNA: 34861., supported by cDNA: gi_15809825, supported by gi_17978868 [Arabidopsis thaliana] >gi|15809826|gb|AAL06841.1|
  misc_feature (9)..(415): Homolog of NCBI NO: 21592991 NR Description: unknown [Arabidopsis thaliana]
  misc_feature (12)..(415): Homolog of NCBI NO: 15223522 NR Description: unknown protein; protein id: At1g27440.1 thaliana] >gi|9802541|gb|AAF99743.1|AC004557_22 F17L21.23
  misc_feature (9)..(415): Homolog of NCBI NO: 18642697 NR Description: Unknown protein [Oryza sativa]
  misc_feature (75)..(415): Homolog of NCBI NO: 23821292 NR Description: pectin-glucuronyltransferase [Nicotiana
  misc_feature (75)..(415): Homolog of NCBI NO: 10176877 NR Description: gb|AAC80624.1~gene_id:MAC9.17~strong similarity unknown protein [Arabidopsis thaliana]
  misc_feature (1)..(387): Homolog of NCBI NO: 15237173 NR Description: putative protein; protein id: At5g22940.1 thaliana] >gi|10177241|dbj|BAB10615.1|
  misc_feature (49)..(395): Homolog of NCBI NO: 25407954 NR Description: hypothetical protein At2g28110 [imported] - thaliana >gi|4063747|gb|AAC98455.1| hypothetical protein
  misc_feature (48)..(387): Homolog of NCBI NO: 9758008 NR Description: contains similarity to limonene
MEKGSAPAMALALAMLLACSSIAAVTAQETERIEGSAGDVLEDNPVGRLKVFVYDLPSKYNKKLLKKDPRCLNHMFAAEIFMHRFLLSSAVRTFNPEEADWFYTPVYTTCDLTPKGLPLPFKSPRMMRSAIQLIATNWPYWNRSEGADHFFVTPHDFGACFHYQEEKAIGRGILPLLQRATLVQTFGQKNHVCLKDGSITIPPYAPPQKMQTHLIPADTPRSIFVYFRGLFYDTGNDPEGGYYARGARASVWENFKNNPLFDISTDHPPTYYEDMQRSVFCLCPLGWAPWSPRLVEAVVFGCIPVIIADDIVLPFADAIPWEEIGVFVAEEDVPRLDSILTSIPTDVVLRKQRLLANPSMKQAMLFPQPAQAGDAFHQILNGLARKLPHGSNVFLKPGERALNWTAGPPGDLKPW

SEQ ID NO: 8813 - protein, 407 aa, Zea mays subsp. mays
  peptide (1)..(407): Ceres Seq. ID no. 12349310
  misc_feature (43)..(347): Pfam Name: Exostosin family Pfam Description: Exostosin family
  misc_feature (1)..(407): Homolog of NCBI NO: 34907048 NR Description: contains EST D24978(R2878)~similar to Arabidopsis
  misc_feature (1)..(407): Homolog of NCBI NO: 18424516 NR Description: putative protein; protein id: At5g61840.1, by cDNA: 34861., supported by cDNA: gi_15809825, supported by gi_17978868 [Arabidopsis thaliana] >gi|15809826|gb|AAL06841.1|
  misc_feature (1)..(407): Homolog of NCBI NO: 21592991 NR Description: unknown [Arabidopsis thaliana]
  misc_feature (4)..(407): Homolog of NCBI NO: 15223522 NR Description: unknown protein; protein id: At1g27440.1 thaliana] >gi|9802541|gb|AAF99743.1|AC004557_22 F17L21.23
  misc_feature (1)..(407): Homolog of NCBI NO: 18642697 NR Description: Unknown protein [Oryza sativa]
  misc_feature (67)..(407): Homolog of NCBI NO: 23821292 NR Description: pectin-glucuronyltransferase [Nicotiana
  misc_feature (67)..(407): Homolog of NCBI NO: 10176877 NR Description: gb|AAC80624.1~gene_id:MAC9.17~strong similarity unknown protein [Arabidopsis thaliana]
  misc_feature (1)..(379): Homolog of NCBI NO: 15237173 NR Description: putative protein; protein id: At5g22940.1 thaliana] >gi|10177241|dbj|BAB10615.1|
  misc_feature (41)..(387): Homolog of NCBI NO: 25407954 NR Description: hypothetical protein At2g28110 [imported] - thaliana >gi|4063747|gb|AAC98455.1| hypothetical protein
  misc_feature (40)..(379): Homolog of NCBI NO: 9758008 NR Description: contains similarity to limonene
MALALAMLLACSSIAAVTAQETERIEGSAGDVLEDNPVGRLKVFVYDLPSKYNKKLLKKDPRCLNHMFAAEIFMHRFLLSSAVRTFNPEEADWFYTPVYTTCDLTPKGLPLPFKSPRMMRSAIQLIATNWPYWNRSEGADHFFVTPHDFGACFHYQEEKAIGRGILPLLQRATLVQTFGQKNHVCLKDGSITIPPYAPPQKMQTHLIPADTPRSIFVYFRGLFYDTGNDPEGGYYARGARASVWENFKNNPLFDISTDHPPTYYEDMQRSVFCLCPLGWAPWSPRLVEAVVFGCIPVIIADDIVLPFADAIPWEEIGVFVAEEDVPRLDSILTSIPTDVVLRKQRLLANPSMKQAMLFPQPAQAGDAFHQILNGLARKLPHGSNVFLKPGERALNWTAGPPGDLKPW

SEQ ID NO: 8814 - DNA, 1878 bp, Zea mays subsp. mays
  misc_feature (1)..(1878): Ceres Seq. ID no. 13498997
  misc_feature: MA Experiment ID: 108542 Result: Up-regulated in Transcription
  misc_feature: MA Experiment 108542 PARAMETER Experiment Name: Zm_150mM_NaCl_P Parameter: Age (day) Value: 8
  misc_feature: MA Experiment 108542 PARAMETER Experiment Name: Zm_150mM_NaCl_P Parameter: Organism Value: Zea mays
  misc_feature: MA Experiment 108542 PARAMETER Experiment Name: Zm_150mM_NaCl_P Parameter: Plant Line Value: 35A19
  misc_feature: MA Experiment 108542 PARAMETER Experiment Name: Zm_150mM_NaCl_P Parameter: Timepoint (hr) Value: 6
  misc_feature: MA Experiment 108542 PARAMETER Experiment Name: Zm_150mM_NaCl_P Parameter: Tissue Value: Aerial
  misc_feature: MA Experiment 108542 PARAMETER Experiment Name: Zm_150mM_NaCl_P Parameter: Treatment Value: 150mM NaCl vs. No Treatment
gcacgagaccattacctagaacatcctaatcgaaaacttctctgccttcgtgaaccaccgcgcgagagagagtcgagatccgtcgctgccgtgcggcttgagagagaagcaccgtgccgggcgaacctccaccgttgggctcaatcgattgggtcagtggggttcggcaacgctcgagagaacgggcgaagtggtgatcggagcaagtggcgatttcatgccggagtcggagctccgccgcggattccgctgcgccccgcgggcagactacttcgcagctgtcgctggccgcgaccacgtcgtcatcttccctttcatggcgaagggccacatgctcccgctgctccacttcgccacggcactctcgtgcgcaacacgggaggctccgcgtgaccctgggtcaccaccccgggcaacgtggccttcgcccggagccgtctgcccgcgtcggtgggcctcgtcgcgctcccgttcccgtcgttcccgccgctgccggagggcgtcgagtccaccnacnccctcccgtgcccatcgctgcacctgacgttcatgcaggcgacggggctcctgcgcgggccgttcgccgagttcctggcgtcgctcccgtccccgccgctcgcgctcgtctccgacttcttcctcgggttcacgcgccgcgtggcggccgacgccggcgtccgccgcatcgtgttcaatggcatgtcctgcttcgcctcggcgatctgcaaggcgctcgctgcgagcccgccgaccagcttcgagcccgggaccatgatccaggtgcccggcatgccggagcacgtggcggtcagggcggaggaggttcccgatggggtcaccaagagggccgaccccgacaacccgttcacgcgcttcttcatggacgagatcggtgattcggacgtgcgcagctggggagtcctcagcaacagcctcgacgcgctcgacgcggcctacgtgtcggccttggagtcattctacgagacgggcgcccgtgcctggctcgtgggcccgctgttcatggccgccggcgacatgccggatggcgagaagaaggagcaagaccccgagggctgtctctcgtggctcgacgagagggcggcgcatctggggtcggtggtgtacatctcgttcgggacgcaggcccacatcacggacgcgcagctggacgagctggtgcacgggctggtgcagtccggccatcccttcctctgggccgtccgatctgacacgtggtcgccgccgttggacgtggggcccaacaaccggatcgtccgtggttgggttccgcagagaagtattctggcccacaaggcagttggtgggttcgtgagccattgcgggtggaactctgtgatggagagcctcgccgccgggaagcccatgctggcgtggccgatgatcgcggagcagcacctgaacgcaaggcacgtggccaacatcttaggcgccggcgtcaggatagccctgaaggttggcgctgacgtcgtcgggagcacggaggtggaggagaaggttcgggagctgatggacgctgaaagcaaggcggcgaagcggatgcgggagagggctgcgtgggcgcagcaagcagccaagtcagcggtgagccacggtggaacctgccatggctttgctcaagcttgtggaagagctacaggagacctatgatgatggggtcgtaggcaaatgtgcgaatagtgtttagaatgatctttccagtaattctgttaagctggtgtttagaatgatcttgctagtacttctattaggcttagctacgtatgtgtcattagcgtctatggtgtcttctcaaaacacaaatcaatcgactcttagcaggtgttttgataattgatcataaataaaaatcaacgacat

SEQ ID NO: 8815 - protein, 372 aa, Zea mays subsp. mays
  peptide (1)..(372): Ceres Seq. ID no. 13498998
  misc_feature (1)..(357): Homolog of NCBI NO: 22330612 NR Description: glycosyltransferase family [Arabidopsis thaliana]
  misc_feature (1)..(357): Homolog of NCBI NO: 25406301 NR Description: protein glucosyltransferase F2P9.25 [imported] - thaliana >gi|12325153|gb|AAG52529.1|AC016662_23 putative
  misc_feature (1)..(347): Homolog of NCBI NO: 15241515 NR Description: glycosyltransferase family [Arabidopsis thaliana]
  misc_feature (1)..(355): Homolog of NCBI NO: 30679796 NR Description: glycosyltransferase family [Arabidopsis thaliana]
  misc_feature (1)..(359): Homolog of NCBI NO: 25286796 NR Description: probable glucosyltransferase [imported] - thaliana >gi|4335714|gb|AAD17392.1| putative glucosyltransferase
  misc_feature (1)..(355): Homolog of NCBI NO: 21553613 NR Description: putative glucosyltransferase [Arabidopsis
  misc_feature (1)..(355): Homolog of NCBI NO: 4914344 NR Description: F14N23.30 [Arabidopsis thaliana]
  misc_feature (1)..(359): Homolog of NCBI NO: 30725312 NR Description: At2g15490 [Arabidopsis thaliana]
  misc_feature (1)..(353): Homolog of NCBI NO: 15242769 NR Description: glycosyltransferase family [Arabidopsis thaliana]
  misc_feature (1)..(359): Homolog of NCBI NO: 15290056 NR Description: putative glucosyltransferase IS5a,
MQATGLLRGPFAEFLASLPSPPLALVSDFFLGFTRRVAADAGVRRIVFNGMSCFASAICKALAASPPTSFEPGTMIQVPGMPEHVAVRAEEVPDGVTKRADPDNPFTRFFMDEIGDSDVRSWGVLSNSLDALDAAYVSALESFYETGARAWLVGPLFMAAGDMPDGEKKEQDPEGCLSWLDERAAHLGSVVYISFGTQAHITDAQLDELVHGLVQSGHPFLWAVRSDTWSPPLDVGPNNRIVRGWVPQRSILAHKAVGGFVSHCGWNSVMESLAAGKPMLAWPMIAEQHLNARHVANILGAGVRIALKVGADVVGSTEVEEKVRELMDAESKAAKRMRERAAWAQQAAKSAVSHGGTCHGFAQACGRATGDL

SEQ ID NO: 8816 - protein, 322 aa, Zea mays subsp. mays
  peptide (1)..(322): Ceres Seq. ID no. 13498999
  misc_feature (1)..(307): Homolog of NCBI NO: 22330612 NR Description: glycosyltransferase family [Arabidopsis thaliana]
  misc_feature (1)..(307): Homolog of NCBI NO: 25406301 NR Description: protein glucosyltransferase F2P9.25 [imported] - thaliana >gi|12325153|gb|AAG52529.1|AC016662_23 putative
  misc_feature (1)..(297): Homolog of NCBI NO: 15241515 NR Description: glycosyltransferase family [Arabidopsis thaliana]
  misc_feature (1)..(305): Homolog of NCBI NO: 30679796 NR Description: glycosyltransferase family [Arabidopsis thaliana]
  misc_feature (1)..(309): Homolog of NCBI NO: 25286796 NR Description: probable glucosyltransferase [imported] - thaliana >gi|4335714|gb|AAD17392.1| putative glucosyltransferase
  misc_feature (1)..(305): Homolog of NCBI NO: 21553613 NR Description: putative glucosyltransferase [Arabidopsis
  misc_feature (1)..(305): Homolog of NCBI NO: 4914344 NR Description: F14N23.30 [Arabidopsis thaliana]
  misc_feature (1)..(309): Homolog of NCBI NO: 30725312 NR Description: At2g15490 [Arabidopsis thaliana]
  misc_feature (1)..(303): Homolog of NCBI NO: 15242769 NR Description: glycosyltransferase family [Arabidopsis thaliana]
  misc_feature (1)..(309): Homolog of NCBI NO: 15290056 NR Description: putative glucosyltransferase IS5a,
MSCFASAICKALAASPPTSFEPGTMIQVPGMPEHVAVRAEEVPDGVTKRADPDNPFTRFFMDEIGDSDVRSWGVLSNSLDALDAAYVSALESFYETGARAWLVGPLFMAAGDMPDGEKKEQDPEGCLSWLDERAAHLGSVVYISFGTQAHITDAQLDELVHGLVQSGHPFLWAVRSDTWSPPLDVGPNNRIVRGWVPQRSILAHKAVGGFVSHCGWNSVMESLAAGKPMLAWPMIAEQHLNARHVANILGAGVRIALKVGADVVGSTEVEEKVRELMDAESKAAKRMRERAAWAQQAAKSAVSHGGTCHGFAQACGRATGDL

SEQ ID NO: 8817 - protein, 298 aa, Zea mays subsp. mays
  peptide (1)..(298): Ceres Seq. ID no. 13499000
  misc_feature (1)..(283): Homolog of NCBI NO: 22330612 NR Description: glycosyltransferase family [Arabidopsis thaliana]
  misc_feature (1)..(283): Homolog of NCBI NO: 25406301 NR Description: protein glucosyltransferase F2P9.25 [imported] - thaliana >gi|12325153|gb|AAG52529.1|AC016662_23 putative
  misc_feature (1)..(273): Homolog of NCBI NO: 15241515 NR Description: glycosyltransferase family [Arabidopsis thaliana]
  misc_feature (1)..(281): Homolog of NCBI NO: 30679796 NR Description: glycosyltransferase family [Arabidopsis thaliana]
  misc_feature (1)..(285): Homolog of NCBI NO: 25286796 NR Description: probable glucosyltransferase [imported] - thaliana >gi|4335714|gb|AAD17392.1| putative glucosyltransferase
  misc_feature (1)..(281): Homolog of NCBI NO: 21553613 NR Description: putative glucosyltransferase [Arabidopsis
  misc_feature (1)..(281): Homolog of NCBI NO: 4914344 NR Description: F14N23.30 [Arabidopsis thaliana]
  misc_feature (1)..(285): Homolog of NCBI NO: 30725312 NR Description: At2g15490 [Arabidopsis thaliana]
  misc_feature (1)..(279): Homolog of NCBI NO: 15242769 NR Description: glycosyltransferase family [Arabidopsis thaliana]
  misc_feature (1)..(285): Homolog of NCBI NO: 15290056 NR Description: putative glucosyltransferase IS5a,
MIQVPGMPEHVAVRAEEVPDGVTKRADPDNPFTRFFMDEIGDSDVRSWGVLSNSLDALDAAYVSALESFYETGARAWLVGPLFMAAGDMPDGEKKEQDPEGCLSWLDERAAHLGSVVYISFGTQAHITDAQLDELVHGLVQSGHPFLWAVRSDTWSPPLDVGPNNRIVRGWVPQRSILAHKAVGGFVSHCGWNSVMESLAAGKPMLAWPMIAEQHLNARHVANILGAGVRIALKVGADVVGSTEVEEKVRELMDAESKAAKRMRERAAWAQQAAKSAVSHGGTCHGFAQACGRATGDL

SEQ ID NO: 8818 - DNA, 1291 bp, Zea mays subsp. mays
  misc_feature (1)..(1291): Ceres Seq. ID no. 12401920
  misc_feature: MA Experiment ID: 108527 Result: Down-regulated in Transcription
  misc_feature: MA Experiment 108527 PARAMETER Experiment Name: Zm_5mM_NO_P Parameter: Age (day) Value: 8
  misc_feature: MA Experiment 108527 PARAMETER Experiment Name: Zm_5mM_NO_P Parameter: Organism Value: Zea mays
  misc_feature: MA Experiment 108527 PARAMETER Experiment Name: Zm_5mM_NO_P Parameter: Plant Line Value: 35A19
  misc_feature: MA Experiment 108527 PARAMETER Experiment Name: Zm_5mM_NO_P Parameter: Timepoint (hr) Value: 6
  misc_feature: MA Experiment 108527 PARAMETER Experiment Name: Zm_5mM_NO_P Parameter: Tissue Value: Aerial
  misc_feature: MA Experiment 108527 PARAMETER Experiment Name: Zm_5mM_NO_P Parameter: Treatment Value: 5mM NO vs. No Treatment
  misc_feature: MA Experiment ID: 108530 Result: Up-regulated in Transcription
  misc_feature: MA Experiment 108530 PARAMETER Experiment Name: Zm_Imbibed_Seeds_P Parameter: Age (day) Value: 6 vs. 2
  misc_feature: MA Experiment 108530 PARAMETER Experiment Name: Zm_Imbibed_Seeds_P Parameter: Organism Value: Zea mays
  misc_feature: MA Experiment 108530 PARAMETER Experiment Name: Zm_Imbibed_Seeds_P Parameter: Plant Line Value: 35A19
  misc_feature: MA Experiment 108530 PARAMETER Experiment Name: Zm_Imbibed_Seeds_P Parameter: Tissue Value: Aerial vs. Embryo
  misc_feature: MA Experiment ID: 108536 Result: Up-regulated in Transcription
  misc_feature: MA Experiment 108536 PARAMETER Experiment Name: Zm_Meristem_P Parameter: Age (day) Value: 8
  misc_feature: MA Experiment 108536 PARAMETER Experiment Name: Zm_Meristem_P Parameter: Organism Value: Zea mays
  misc_feature: MA Experiment 108536 PARAMETER Experiment Name: Zm_Meristem_P Parameter: Plant Line Value: 35A19
  misc_feature: MA Experiment 108536 PARAMETER Experiment Name: Zm_Meristem_P Parameter: Tissue Value: Shoot Meristem vs. Above Shoot Meristem
  misc_feature: MA Experiment ID: 108543 Result: Up-regulated in Transcription
  misc_feature: MA Experiment ID: 108559 Result: Down-regulated in Transcription
  misc_feature: MA Experiment 108559 PARAMETER Experiment Name: Zm_5mM_NO_P Parameter: Age (day) Value: 8
  misc_feature: MA Experiment 108559 PARAMETER Experiment Name: Zm_5mM_NO_P Parameter: Organism Value: Zea mays
  misc_feature: MA Experiment 108559 PARAMETER Experiment Name: Zm_5mM_NO_P Parameter: Plant Line Value: 35A19
  misc_feature: MA Experiment 108559 PARAMETER Experiment Name: Zm_5mM_NO_P Parameter: Timepoint (hr) Value: 12
  misc_feature: MA Experiment 108559 PARAMETER Experiment Name: Zm_5mM_NO_P Parameter: Tissue Value: Aerial
  misc_feature: MA Experiment 108559 PARAMETER Experiment Name: Zm_5mM_NO_P Parameter: Treatment Value: 5mM NO vs. No Treatment
  misc_feature: MA Experiment ID: 108599 Result: Up-regulated in Transcription
  misc_feature: MA Experiment 108599 PARAMETER Experiment Name: Zm_RT1_P Parameter: Age (day) Value: 11
  misc_feature: MA Experiment 108599 PARAMETER Experiment Name: Zm_RT1_P Parameter: Organism Value: Zea mays
  misc_feature: MA Experiment 108599 PARAMETER Experiment Name: Zm_RT1_P Parameter: Plant Line Value: rt1 mut vs. rt1 wt
  misc_feature: MA Experiment 108599 PARAMETER Experiment Name: Zm_RT1_P Parameter: Tissue Value: Roots
  misc_feature: MA Experiment ID: 20000477 Result: Down-regulated in Transcription
  misc_feature: MA Experiment 20000477 PARAMETER Experiment Name: Zm_5mM_SA_P Parameter: Age (day) Value: 10
  misc_feature: MA Experiment 20000477 PARAMETER Experiment Name: Zm_5mM_SA_P Parameter: Organism Value: Zea mays
  misc_feature: MA Experiment 20000477 PARAMETER Experiment Name: Zm_5mM_SA_P Parameter: Plant Line Value: 35A19
  misc_feature: MA Experiment 20000477 PARAMETER Experiment Name: Zm_5mM_SA_P Parameter: Timepoint (hr) Value: 48
  misc_feature: MA Experiment 20000477 PARAMETER Experiment Name: Zm_5mM_SA_P Parameter: Tissue Value: Aerial
  misc_feature: MA Experiment 20000477 PARAMETER Experiment Name: Zm_5mM_SA_P Parameter: Treatment Value: 5mM SA vs. No Treatment
  misc_feature: MA Experiment ID: 20000478 Result: Down-regulated in Transcription
  misc_feature: MA Experiment 20000478 PARAMETER Experiment Name: Zm_5mM_SA_P Parameter: Age (day) Value: 11
  misc_feature: MA Experiment 20000478 PARAMETER Experiment Name: Zm_5mM_SA_P Parameter: Organism Value: Zea mays
  misc_feature: MA Experiment 20000478 PARAMETER Experiment Name: Zm_5mM_SA_P Parameter: Plant Line Value: 35A19
  misc_feature: MA Experiment 20000478 PARAMETER Experiment Name: Zm_5mM_SA_P Parameter: Timepoint (hr) Value: 72
  misc_feature: MA Experiment 20000478 PARAMETER Experiment Name: Zm_5mM_SA_P Parameter: Tissue Value: Aerial
  misc_feature: MA Experiment 20000478 PARAMETER Experiment Name: Zm_5mM_SA_P Parameter: Treatment Value: 5mM SA vs. No Treatment
  misc_feature: MA Experiment ID: 20000479 Result: Down-regulated in Transcription
  misc_feature: MA Experiment 20000479 PARAMETER Experiment Name: Zm_Drought_P Parameter: Age (day) Value: 10
  misc_feature: MA Experiment 20000479 PARAMETER Experiment Name: Zm_Drought_P Parameter: Organism Value: Zea mays
  misc_feature: MA Experiment 20000479 PARAMETER Experiment Name: Zm_Drought_P Parameter: Plant Line Value: 35A19
  misc_feature: MA Experiment 20000479 PARAMETER Experiment Name: Zm_Drought_P Parameter: Timepoint (hr) Value: 48
  misc_feature: MA Experiment 20000479 PARAMETER Experiment Name: Zm_Drought_P Parameter: Tissue Value: Aerial
  misc_feature: MA Experiment 20000479 PARAMETER Experiment Name: Zm_Drought_P Parameter: Treatment Value: Drought vs. No Drought
  misc_feature: MA Experiment ID: 20000480 Result: Down-regulated in Transcription
  misc_feature: MA Experiment 20000480 PARAMETER Experiment Name: Zm_Drought_P Parameter: Age (day) Value: 11
  misc_feature: MA Experiment 20000480 PARAMETER Experiment Name: Zm_Drought_P Parameter: Organism Value: Zea mays
  misc_feature: MA Experiment 20000480 PARAMETER Experiment Name: Zm_Drought_P Parameter: Plant Line Value: 35A19
  misc_feature: MA Experiment 20000480 PARAMETER Experiment Name: Zm_Drought_P Parameter: Timepoint (hr) Value: 72
  misc_feature: MA Experiment 20000480 PARAMETER Experiment Name: Zm_Drought_P Parameter: Tissue Value: Aerial
  misc_feature: MA Experiment 20000480 PARAMETER Experiment Name: Zm_Drought_P Parameter: Treatment Value: Drought vs. No Drought
  misc_feature: MA Experiment ID: 20000533 Result: Up-regulated in Transcription
  misc_feature: MA Experiment 20000533 PARAMETER Experiment Name: Zm_0.001percent_MeJA_P Parameter: Age (day) Value: 11
  misc_feature: MA Experiment 20000533 PARAMETER Experiment Name: Zm_0.001percent_MeJA_P Parameter: Organism Value: Zea mays
  misc_feature: MA Experiment 20000533 PARAMETER Experiment Name: Zm_0.001percent_MeJA_P Parameter: Plant Line Value: 35A19
  misc_feature: MA Experiment 20000533 PARAMETER Experiment Name: Zm_0.001percent_MeJA_P Parameter: Timepoint (hr) Value: 72
  misc_feature: MA Experiment 20000533 PARAMETER Experiment Name: Zm_0.001percent_MeJA_P Parameter: Tissue Value: Aerial
  misc_feature: MA Experiment 20000533 PARAMETER Experiment Name: Zm_0.001percent_MeJA_P Parameter: Treatment Value: 0.001percent MeJA vs. No Treatment
  misc_feature: MA Experiment ID: 20000626 Result: Up-regulated in Transcription
  misc_feature: MA Experiment 20000626 PARAMETER Experiment Name: Zm_Herbicide-Treatments_P Parameter: Timepoint (hr) Value: 12
  misc_feature: MA Experiment 20000626 PARAMETER Experiment Name: Zm_Herbicide-Treatments_P Parameter: Tissue Value: Aerial
  misc_feature: MA Experiment 20000626 PARAMETER Experiment Name: Zm_Herbicide-Treatments_P Parameter: Treatment Value: Roundup vs. No Treatment
  misc_feature: MA Experiment ID: 20001612 Result: Up-regulated in Transcription
  misc_feature: MA Experiment 20001612 PARAMETER Experiment Name: Zm_50ppm_KNO3_L-to-H_P Parameter: Age (day) Value: 19
  misc_feature: MA Experiment 20001612 PARAMETER Experiment Name: Zm_50ppm_KNO3_L-to-H_P Parameter: Organism Value: Zea mays
  misc_feature: MA Experiment 20001612 PARAMETER Experiment Name: Zm_50ppm_KNO3_L-to-H_P Parameter: Plant Line Value: 35A19
  misc_feature: MA Experiment 20001612 PARAMETER Experiment Name: Zm_50ppm_KNO3_L-to-H_P Parameter: Timepoint (hr) Value: 8
  misc_feature: MA Experiment 20001612 PARAMETER Experiment Name: Zm_50ppm_KNO3_L-to-H_P Parameter: Tissue Value: Roots
  misc_feature: MA Experiment 20001612 PARAMETER Experiment Name: Zm_50ppm_KNO3_L-to-H_P Parameter: Treatment Value: 50ppm KNO3 vs. 50ppm KCl
aaaaaaaattgcacgcaagggtccacgcggcgaacagatcgtgccgttccgcggcggcgtcggtgcggcgctggagccgaagtgaaaagtcgatcgggattgggccgttgggggtgcgatacccctcgcctcgaatgcgagctccgtaggtccgcccccccggcggatggccgagctgggccgccgccgccgcccgctgggatgaggcagcgtgaggagtcgcgctcgcggcttccctgcccccaggcctccgctctgaatatccccgacgcgacggtaaccgaacaagcctcagttagaaaggctaagatcagagcatctccgtgtctccacaacacatcctggattcgcaattattgaggtgcctccactataaaaggccaaccatcctcaaggaatgaacacagccagccagcaagcaagcagagaacaaggataacacagcaactgaaaaccttattaccaagaacaaacaactacaagaggctttgcaagttcacagaggcagctgttcactgcgaatgaacaaccagaggaagcctggagactggaactgcaagaactgccagcatctcaacttcagccgccgtgactactgccagcgttgccgtgatccacgccctgacttgcagttcggcgacggctatagcacggttggtgtgctgacctccctggacatccgcccaggtgactggtactgcagctgcggctaccacaacttcgccagccgcagcagctgcttcaagtgcggcacgatcgtcagagacttcccagcggggcaaggcgcagccggtgctgagggtgactttgctggtggacgcgacagcgccgcagtccgtgctgggtggaaagctggcgactggatctgcacgaggcctggttgcaacgtacacaactttgcgagcaggatggagtgctataggtgcaatgcaccaagggaggcagcaggcaccgggaggtaagaggcgactggggtgataccaagagcgtgagatgtgacgagctgggccgagcagtggaacctactgccgtcacacactcaccatcaggcatccaggaaggatgagtctactacgtacacgactatattgctgattgccgcgcgtagtgccgctgctgtggtttgcgtgggtggagaagtacccaagcgcaacacctgttacgtgtgttgtttgctcctttttgaggctgttgattcagtgacagctgagttgtacggcctgatgatgtactcgcattgtgtatttgtcttaaacagcatatataattatgtaataataagtgcttgctt

SEQ ID NO: 8819 - protein, 146 aa, Zea mays subsp. mays
  peptide (1)..(146): Ceres Seq. ID no. 12401921
  misc_feature (110)..(141): Pfam Name: Zn-finger in Ran binding protein and others Pfam Description: Zn-finger in Ran binding protein and others
  misc_feature (1)..(141): Homolog of NCBI NO: 5803246 NR Description: ESTs AU077984(C62969),D41648(S4289), correspond to a region of the predicted gene.~Similar to putative
  misc_feature (1)..(141): Homolog of NCBI NO: 5679336 NR Description: putative zinc finger protein [Oryza sativa]
  misc_feature (38)..(144): Homolog of NCBI NO: 28849863 NR Description: zinc finger transcription factor ZFP30 [Oryza
  misc_feature (5)..(139): Homolog of NCBI NO: 34913970 NR Description: B1110C07.23 [Oryza sativa (japonica
  misc_feature (8)..(140): Homolog of NCBI NO: 15225776 NR Description: putative second messenger-dependent protein protein id: At2g26700.1 [Arabidopsis thaliana]
  misc_feature (39)..(140): Homolog of NCBI NO: 15232662 NR Description: putative zinc finger protein; protein id: supported by cDNA: 8265. [Arabidopsis thaliana]
  misc_feature (39)..(140): Homolog of NCBI NO: 21595771 NR Description: putative zinc finger protein [Arabidopsis
  misc_feature (5)..(120): Homolog of NCBI NO: 28849863 NR Description: zinc finger transcription factor ZFP30 [Oryza
  misc_feature (6)..(94): Homolog of NCBI NO: 15232662 NR Description: putative zinc finger protein; protein id: supported by cDNA: 8265. [Arabidopsis thaliana]
  misc_feature (6)..(94): Homolog of NCBI NO: 21595771 NR Description: putative zinc finger protein [Arabidopsis
MNNQRKPGDWNCKNCQHLNFSRRDYCQRCRDPRPDLQFGDGYSTVGVLTSLDIRPGDWYCSCGYHNFASRSSCFKCGTIVRDFPAGQGAAGAEGDFAGGRDSAAVRAGWKAGDWICTRPGCNVHNFASRMECYRCNAPREAAGTGR

SEQ ID NO: 8820 - protein, 119 aa, Zea mays subsp. mays
  peptide (1)..(119): Ceres Seq. ID no. 12401922
KKNCTQGSTRRTDRAVPRRRRCGAGAEVKSRSGLGRWGCDTPRLECELRRSAPPADGRAGPPPPPAGMRQREESRSRLPCPQASALNIPDATVTEQASVRKAKIRASPCLHNTSWIRNY

SEQ ID NO: 8821 - DNA, 1725 bp, Zea mays subsp. mays; identical to SEQ ID NO: 7622
  misc_feature (1)..(1725): Ceres Seq. ID no. 12408676
  misc_feature: MA Experiment ID: 20000492 Result: Up-regulated in Transcription
  misc_feature: MA Experiment 20000492 PARAMETER Experiment Name: Zm_Hybrid_Seed_Dev_P Parameter: DAP Value: 12
  misc_feature: MA Experiment 20000492 PARAMETER Experiment Name: Zm_Hybrid_Seed_Dev_P Parameter: Organism Value: Zea mays
  misc_feature: MA Experiment 20000492 PARAMETER Experiment Name: Zm_Hybrid_Seed_Dev_P Parameter: Plant Line Value: 35A19
  misc_feature: MA Experiment 20000492 PARAMETER Experiment Name: Zm_Hybrid_Seed_Dev_P Parameter: Tissue Value: Fert Kernel vs. Unfert Floret

SEQ ID NO: 8822 - protein, 498 aa, Zea mays subsp. mays; identical to SEQ ID NO: 7623
  peptide (1)..(498): Ceres Seq. ID no. 12408677
  misc_feature (82)..(115): Pfam Name: TPR Domain Pfam Description: TPR Domain
  misc_feature (82)..(115): Pfam Name: TPR Domain Pfam Description: TPR Domain
  misc_feature (39)..(498): Homolog of NCBI NO: 38175649 NR Description: tetratricopeptide repeat-containing protein-like
  misc_feature (147)..(498): Homolog of NCBI NO: 32352192 NR Description: hypothetical protein [Oryza sativa (japonica
  misc_feature (61)..(439): Homolog of NCBI NO: 18419996 NR Description: putative protein; protein id: At4g37210.1 thaliana] >gi|13877853|gb|AAK44004.1|AF370189_1 unknown protein thaliana] >gi|17065596|gb|AAL33778.1| unknown protein
  misc_feature (61)..(382): Homolog of NCBI NO: 25407799 NR Description: hypothetical protein AT4g37210 [imported] - thaliana >gi|4006859|emb|CAB16777.1| putative protein thaliana] >gi|7270704|emb|CAB80387.1| putative protein
  misc_feature (68)..(337): Homolog of NCBI NO: 4104353 NR Description: nuclear autoantigenic sperm protein autosomal
  misc_feature (147)..(498): Homolog of NCBI NO: 32352192 NR Description: hypothetical protein [Oryza sativa (japonica
  misc_feature (61)..(382): Homolog of NCBI NO: 25407799 NR Description: hypothetical protein AT4g37210 [imported] - thaliana >gi|4006859|emb|CAB16777.1| putative protein thaliana] >gi|7270704|emb|CAB80387.1| putative protein
  misc_feature (68)..(337): Homolog of NCBI NO: 30584691 NR Description: Homo sapiens nuclear autoantigenic sperm protein
  misc_feature (68)..(337): Homolog of NCBI NO: 27262630 NR Description: nuclear autoantigenic sperm protein isoform 3;
  misc_feature (39)..(337): Homolog of NCBI NO: 13435642 NR Description: Unknown (protein for MGC:5829) [Mus musculus]
  misc_feature (59)..(489): Homolog of NCBI NO: 123127 NR Description: HISTONE-BINDING PROTEIN N1/N2
  misc_feature (66)..(143): Homolog of NCBI NO: 18129310 NR Description: hypothetical protein [Pinus pinaster]
  misc_feature (68)..(337): Homolog of NCBI NO: 4104353 NR Description: nuclear autoantigenic sperm protein autosomal
  misc_feature (61)..(439): Homolog of NCBI NO: 18419996 NR Description: putative protein; protein id: At4g37210.1 thaliana] >gi|13877853|gb|AAK44004.1|AF370189_1 unknown protein thaliana] >gi|17065596|gb|AAL33778.1| unknown protein
  misc_feature (39)..(498): Homolog of NCBI NO: 38175649 NR Description: tetratricopeptide repeat-containing protein-like
  misc_feature (66)..(143): Homolog of NCBI NO: 18129310 NR Description: hypothetical protein [Pinus pinaster]
  misc_feature (59)..(489): Homolog of NCBI NO: 123127 NR Description: HISTONE-BINDING PROTEIN N1/N2
  misc_feature (39)..(337): Homolog of NCBI NO: 13435642 NR Description: Unknown (protein for MGC:5829) [Mus musculus]
  misc_feature (68)..(337): Homolog of NCBI NO: 27262630 NR Description: nuclear autoantigenic sperm protein isoform 3;
  misc_feature (68)..(337): Homolog of NCBI NO: 30584691 NR Description: Homo sapiens nuclear autoantigenic sperm protein

SEQ ID NO: 8823 - protein, 460 aa, Zea mays subsp. mays; identical to SEQ ID NO: 3042
  peptide (1)..(460): Ceres Seq. ID no. 12408678
  misc_feature (44)..(77): Pfam Name: TPR Domain Pfam Description: TPR Domain
  misc_feature (44)..(77): Pfam Name: TPR Domain Pfam Description: TPR Domain
  misc_feature (1)..(460): Homolog of NCBI NO: 38175649 NR Description: tetratricopeptide repeat-containing protein-like
  misc_feature (109)..(460): Homolog of NCBI NO: 32352192 NR Description: hypothetical protein [Oryza sativa (japonica
  misc_feature (23)..(401): Homolog of NCBI NO: 18419996 NR Description: putative protein; protein id: At4g37210.1 thaliana] >gi|13877853|gb|AAK44004.1|AF370189_1 unknown protein thaliana] >gi|17065596|gb|AAL33778.1| unknown protein
  misc_feature (23)..(344): Homolog of NCBI NO: 25407799 NR Description: hypothetical protein AT4g37210 [imported] - thaliana >gi|4006859|emb|CAB16777.1| putative protein thaliana] >gi|7270704|emb|CAB80387.1| putative protein
  misc_feature (30)..(299): Homolog of NCBI NO: 4104353 NR Description: nuclear autoantigenic sperm protein autosomal
  misc_feature (109)..(460): Homolog of NCBI NO: 32352192 NR Description: hypothetical protein [Oryza sativa (japonica
  misc_feature (23)..(344): Homolog of NCBI NO: 25407799 NR Description: hypothetical protein AT4g37210 [imported] - thaliana >gi|4006859|emb|CAB16777.1| putative protein thaliana] >gi|7270704|emb|CAB80387.1| putative protein
  misc_feature (30)..(299): Homolog of NCBI NO: 30584691 NR Description: Homo sapiens nuclear autoantigenic sperm protein
  misc_feature (30)..(299): Homolog of NCBI NO: 27262630 NR Description: nuclear autoantigenic sperm protein isoform 3;
  misc_feature (1)..(299): Homolog of NCBI NO: 13435642 NR Description: Unknown (protein for MGC:5829) [Mus musculus]
  misc_feature (21)..(451): Homolog of NCBI NO: 123127 NR Description: HISTONE-BINDING PROTEIN N1/N2
  misc_feature (28)..(105): Homolog of NCBI NO: 18129310 NR Description: hypothetical protein [Pinus pinaster]
  misc_feature (30)..(299): Homolog of NCBI NO: 4104353 NR Description: nuclear autoantigenic sperm protein autosomal
  misc_feature (23)..(401): Homolog of NCBI NO: 18419996 NR Description: putative protein; protein id: At4g37210.1 thaliana] >gi|13877853|gb|AAK44004.1|AF370189_1 unknown protein thaliana] >gi|17065596|gb|AAL33778.1| unknown protein
  misc_feature (1)..(460): Homolog of NCBI NO: 38175649 NR Description: tetratricopeptide repeat-containing protein-like
  misc_feature (28)..(105): Homolog of NCBI NO: 18129310 NR Description: hypothetical protein [Pinus pinaster]
  misc_feature (21)..(451): Homolog of NCBI NO: 123127 NR Description: HISTONE-BINDING PROTEIN N1/N2
  misc_feature (1)..(299): Homolog of NCBI NO: 13435642 NR Description: Unknown (protein for MGC:5829) [Mus musculus]
  misc_feature (30)..(299): Homolog of NCBI NO: 27262630 NR Description: nuclear autoantigenic sperm protein isoform 3;
  misc_feature (30)..(299): Homolog of NCBI NO: 30584691 NR Description: Homo sapiens nuclear autoantigenic sperm protein

SEQ ID NO: 8824 - protein, 280 aa, Zea mays subsp. mays; identical to SEQ ID NO: 2639
  peptide (1)..(280): Ceres Seq. ID no. 12408679
  misc_feature (1)..(221): Homolog of NCBI NO: 18419996 NR Description: putative protein; protein id: At4g37210.1 thaliana] >gi|13877853|gb|AAK44004.1|AF370189_1 unknown protein thaliana] >gi|17065596|gb|AAL33778.1| unknown protein
  misc_feature (1)..(164): Homolog of NCBI NO: 25407799 NR Description: hypothetical protein AT4g37210 [imported] - thaliana >gi|4006859|emb|CAB16777.1| putative protein thaliana] >gi|7270704|emb|CAB80387.1| putative protein
  misc_feature (1)..(119): Homolog of NCBI NO: 4104353 NR Description: nuclear autoantigenic sperm protein autosomal
  misc_feature (1)..(271): Homolog of NCBI NO: 123127 NR Description: HISTONE-BINDING PROTEIN N1/N2
  misc_feature (1)..(119): Homolog of NCBI NO: 13435642 NR Description: Unknown (protein for MGC:5829) [Mus musculus]
  misc_feature (1)..(119): Homolog of NCBI NO: 27262630 NR Description: nuclear autoantigenic sperm protein isoform 3;
  misc_feature (1)..(119): Homolog of NCBI NO: 30584691 NR Description: Homo sapiens nuclear autoantigenic sperm protein
  misc_feature (1)..(268): Homolog of NCBI NO: 28277791 NR Description: Unknown (protein for MGC:56007) [Danio rerio]
  misc_feature (1)..(280): Homolog of NCBI NO: 38175649 NR Description: tetratricopeptide repeat-containing protein-like
  misc_feature (1)..(280): Homolog of NCBI NO: 32352192 NR Description: hypothetical protein [Oryza sativa (japonica
  misc_feature (1)..(280): Homolog of NCBI NO: 38175649 NR Description: tetratricopeptide repeat-containing protein-like
  misc_feature (1)..(280): Homolog of NCBI NO: 32352192 NR Description: hypothetical protein [Oryza sativa (japonica
  misc_feature (1)..(221): Homolog of NCBI NO: 18419996 NR Description: putative protein; protein id: At4g37210.1 thaliana] >gi|13877853|gb|AAK44004.1|AF370189_1 unknown protein thaliana] >gi|17065596|gb|AAL33778.1| unknown protein
  misc_feature (1)..(164): Homolog of NCBI NO: 25407799 NR Description: hypothetical protein AT4g37210 [imported] - thaliana >gi|4006859|emb|CAB16777.1| putative protein thaliana] >gi|7270704|emb|CAB80387.1| putative protein
  misc_feature (1)..(119): Homolog of NCBI NO: 4104353 NR Description: nuclear autoantigenic sperm protein autosomal
  misc_feature (1)..(271): Homolog of NCBI NO: 123127 NR Description: HISTONE-BINDING PROTEIN N1/N2
  misc_feature (1)..(119): Homolog of NCBI NO: 13435642 NR Description: Unknown (protein for MGC:5829) [Mus musculus]
  misc_feature (1)..(119): Homolog of NCBI NO: 27262630 NR Description: nuclear autoantigenic sperm protein isoform 3;
  misc_feature (1)..(119): Homolog of NCBI NO: 30584691 NR Description: Homo sapiens nuclear autoantigenic sperm protein
  misc_feature (1)..(268): Homolog of NCBI NO: 28277791 NR Description: Unknown (protein for MGC:56007) [Danio rerio]

SEQ ID NO: 8825 - DNA, 1207 bp, Zea mays subsp. mays; identical to SEQ ID NO: 7796
  misc_feature (1)..(1207): Ceres Seq. ID no. 13492697
  misc_feature: MA Experiment ID: 108529 Result: Up-regulated in Transcription
  misc_feature: MA Experiment 108529 PARAMETER Experiment Name: Zm_Imbibed_Seeds_P Parameter: Age (day) Value: 5 vs. 2
  misc_feature: MA Experiment 108529 PARAMETER Experiment Name: Zm_Imbibed_Seeds_P Parameter: Organism Value: Zea mays
  misc_feature: MA Experiment 108529 PARAMETER Experiment Name: Zm_Imbibed_Seeds_P Parameter: Plant Line Value: 35A19
  misc_feature: MA Experiment 108529 PARAMETER Experiment Name: Zm_Imbibed_Seeds_P Parameter: Tissue Value: Roots vs. Embryo
  misc_feature: MA Experiment ID: 108530 Result: Up-regulated in Transcription
  misc_feature: MA Experiment 108530 PARAMETER Experiment Name: Zm_Imbibed_Seeds_P Parameter: Age (day) Value: 6 vs. 2
  misc_feature: MA Experiment 108530 PARAMETER Experiment Name: Zm_Imbibed_Seeds_P Parameter: Organism Value: Zea mays
  misc_feature: MA Experiment 108530 PARAMETER Experiment Name: Zm_Imbibed_Seeds_P Parameter: Plant Line Value: 35A19
  misc_feature: MA Experiment 108530 PARAMETER Experiment Name: Zm_Imbibed_Seeds_P Parameter: Tissue Value: Aerial vs. Embryo
  misc_feature: MA Experiment ID: 108535 Result: Down-regulated in Transcription
  misc_feature: MA Experiment 108535 PARAMETER Experiment Name: Zm_Meristem_P Parameter: Age (day) Value: 8
  misc_feature: MA Experiment 108535 PARAMETER Experiment Name: Zm_Meristem_P Parameter: Organism Value: Zea mays
  misc_feature: MA Experiment 108535 PARAMETER Experiment Name: Zm_Meristem_P Parameter: Plant Line Value: 35A19
  misc_feature: MA Experiment 108535 PARAMETER Experiment Name: Zm_Meristem_P Parameter: Tissue Value: Root Meristem vs. Above Root Meristem
  misc_feature: MA Experiment ID: 108559 Result: Down-regulated in Transcription
  misc_feature: MA Experiment 108559 PARAMETER Experiment Name: Zm_5mM_NO_P Parameter: Age (day) Value: 8
  misc_feature: MA Experiment 108559 PARAMETER Experiment Name: Zm_5mM_NO_P Parameter: Organism Value: Zea mays
  misc_feature: MA Experiment 108559 PARAMETER Experiment Name: Zm_5mM_NO_P Parameter: Plant Line Value: 35A19
  misc_feature: MA Experiment 108559 PARAMETER Experiment Name: Zm_5mM_NO_P Parameter: Timepoint (hr) Value: 12
  misc_feature: MA Experiment 108559 PARAMETER Experiment Name: Zm_5mM_NO_P Parameter: Tissue Value: Aerial
  misc_feature: MA Experiment 108559 PARAMETER Experiment Name: Zm_5mM_NO_P Parameter: Treatment Value: 5mM NO vs. No Treatment
  misc_feature: MA Experiment ID: 108687 Result: Up-regulated in Transcription
  misc_feature: MA Experiment 108687 PARAMETER Experiment Name: Zm_Embryos-Flowers__P Parameter: Tissue Value: Embryo vs. Aerial+

SEQ ID NO: 8826 - protein, 320 aa, Zea mays subsp. mays; identical to SEQ ID NO: 7797
  peptide (1)..(320): Ceres Seq. ID no. 13492698
  misc_feature (142)..(296): Pfam Name: Adenylylsulphate kinase Pfam Description: Adenylylsulphate kinase
  misc_feature (142)..(296): Pfam Name: Adenylylsulphate kinase Pfam Description: Adenylylsulphate kinase
  misc_feature (115)..(320): Homolog of NCBI NO: 15228666 NR Description: adenylylsulfate kinase -related [Arabidopsis >gi|6006852|gb|AAF00628.1|AC009540_5 putative adenylylsulfate
  misc_feature (64)..(320): Homolog of NCBI NO: 34393551 NR Description: putative adenosine-5'-phosphosulfate kinase
  misc_feature (112)..(319): Homolog of NCBI NO: 7387809 NR Description: Adenylylsulfate kinase, chloroplast precursor
  misc_feature (115)..(319): Homolog of NCBI NO: 15225999 NR Description: adenosine phosphosulfate kinase -related thaliana] >gi|7387811|sp|Q43295|KAP1_ARATH Adenylylsulfate kinase
  misc_feature (115)..(319): Homolog of NCBI NO: 21553403 NR Description: putative adenosine phosphosulfate kinase
  misc_feature (64)..(320): Homolog of NCBI NO: 34393551 NR Description: putative adenosine-5'-phosphosulfate kinase
  misc_feature (115)..(319): Homolog of NCBI NO: 15225999 NR Description: adenosine phosphosulfate kinase -related thaliana] >gi|7387811|sp|Q43295|KAP1_ARATH Adenylylsulfate kinase
  misc_feature (119)..(319): Homolog of NCBI NO: 15236087 NR Description: adenosine-5-phosphosulfate-kinase [Arabidopsis >gi|7387808|sp|O49196|KAP2_ARATH Adenylylsulfate kinase 2,
  misc_feature (107)..(319): Homolog of NCBI NO: 21537248 NR Description: adenylylsulfate kinase-like protein [Arabidopsis
  misc_feature (107)..(319): Homolog of NCBI NO: 18425199 NR Description: adenylylsulfate kinase-related protein thaliana] >gi|28393175|gb|AAO42019.1| putative adenylylsulfate [Arabidopsis thaliana] >gi|28827764|gb|AAO50726.1| putative
  misc_feature (107)..(319): Homolog of NCBI NO: 9757873 NR Description: adenylylsulfate kinase-like protein [Arabidopsis
  misc_feature (103)..(320): Homolog of NCBI NO: 6563285 NR Description: adenosine-5'-phosphosulfate kinase [Zea mays]
  misc_feature (115)..(319): Homolog of NCBI NO: 21553403 NR Description: putative adenosine phosphosulfate kinase
  misc_feature (112)..(319): Homolog of NCBI NO: 7387809 NR Description: Adenylylsulfate kinase, chloroplast precursor
  misc_feature (115)..(320): Homolog of NCBI NO: 15228666 NR Description: adenylylsulfate kinase -related [Arabidopsis >gi|6006852|gb|AAF00628.1|AC009540_5 putative adenylylsulfate
  misc_feature (103)..(320): Homolog of NCBI NO: 6563285 NR Description: adenosine-5'-phosphosulfate kinase [Zea mays]
  misc_feature (107)..(319): Homolog of NCBI NO: 9757873 NR Description: adenylylsulfate kinase-like protein [Arabidopsis
  misc_feature (107)..(319): Homolog of NCBI NO: 18425199 NR Description: adenylylsulfate kinase-related protein thaliana] >gi|28393175|gb|AAO42019.1| putative adenylylsulfate [Arabidopsis thaliana] >gi|28827764|gb|AAO50726.1| putative
  misc_feature (107)..(319): Homolog of NCBI NO: 21537248 NR Description: adenylylsulfate kinase-like protein [Arabidopsis
  misc_feature (119)..(319): Homolog of NCBI NO: 15236087 NR Description: adenosine-5-phosphosulfate-kinase [Arabidopsis >gi|7387808|sp|O49196|KAP2_ARATH Adenylylsulfate kinase 2,

SEQ ID NO: 8827 - DNA, 599 bp, Zea mays subsp. mays
  misc_feature (1)..(599): Ceres Seq. ID no. 12381635
  misc_feature: MA Experiment ID: 108523 Result: Down-regulated in Transcription
  misc_feature: MA Experiment 108523 PARAMETER Experiment Name: Zm_42deg_Heat_P Parameter: Age (day) Value: 8
  misc_feature: MA Experiment 108523 PARAMETER Experiment Name: Zm_42deg_Heat_P Parameter: Organism Value: Zea mays
  misc_feature: MA Experiment 108523 PARAMETER Experiment Name: Zm_42deg_Heat_P Parameter: Plant Line Value: 35A19
  misc_feature: MA Experiment 108523 PARAMETER Experiment Name: Zm_42deg_Heat_P Parameter: Temperature (deg C) Value: 42 vs. 22
  misc_feature: MA Experiment 108523 PARAMETER Experiment Name: Zm_42deg_Heat_P Parameter: Timepoint (hr) Value: 6
  misc_feature: MA Experiment 108523 PARAMETER Experiment Name: Zm_42deg_Heat_P Parameter: Tissue Value: Aerial
  misc_feature: MA Experiment ID: 108528 Result: Down-regulated in Transcription
  misc_feature: MA Experiment 108528 PARAMETER Experiment Name: Zm_Imbibed_Seeds_P Parameter: Age (day) Value: 5 vs. 2
  misc_feature: MA Experiment 108528 PARAMETER Experiment Name: Zm_Imbibed_Seeds_P Parameter: Organism Value: Zea mays
  misc_feature: MA Experiment 108528 PARAMETER Experiment Name: Zm_Imbibed_Seeds_P Parameter: Plant Line Value: 35A19
  misc_feature: MA Experiment 108528 PARAMETER Experiment Name: Zm_Imbibed_Seeds_P Parameter: Tissue Value: Aerial vs. Embryo
  misc_feature: MA Experiment ID: 108529 Result: Up-regulated in Transcription
  misc_feature: MA Experiment 108529 PARAMETER Experiment Name: Zm_Imbibed_Seeds_P Parameter: Age (day) Value: 5 vs. 2
  misc_feature: MA Experiment 108529 PARAMETER Experiment Name: Zm_Imbibed_Seeds_P Parameter: Organism Value: Zea mays
  misc_feature: MA Experiment 108529 PARAMETER Experiment Name: Zm_Imbibed_Seeds_P Parameter: Plant Line Value: 35A19
  misc_feature: MA Experiment 108529 PARAMETER Experiment Name: Zm_Imbibed_Seeds_P Parameter: Tissue Value: Roots vs. Embryo
  misc_feature: MA Experiment ID: 108530 Result: Down-regulated in Transcription
  misc_feature: MA Experiment 108530 PARAMETER Experiment Name: Zm_Imbibed_Seeds_P Parameter: Age (day) Value: 6 vs. 2
  misc_feature: MA Experiment 108530 PARAMETER Experiment Name: Zm_Imbibed_Seeds_P Parameter: Organism Value: Zea mays
  misc_feature: MA Experiment 108530 PARAMETER Experiment Name: Zm_Imbibed_Seeds_P Parameter: Plant Line Value: 35A19
  misc_feature: MA Experiment 108530 PARAMETER Experiment Name: Zm_Imbibed_Seeds_P Parameter: Tissue Value: Aerial vs. Embryo
  misc_feature: MA Experiment ID: 108535 Result: Down-regulated in Transcription
  misc_feature: MA Experiment 108535 PARAMETER Experiment Name: Zm_Meristem_P Parameter: Age (day) Value: 8
  misc_feature: MA Experiment 108535 PARAMETER Experiment Name: Zm_Meristem_P Parameter: Organism Value: Zea mays
  misc_feature: MA Experiment 108535 PARAMETER Experiment Name: Zm_Meristem_P Parameter: Plant Line Value: 35A19
  misc_feature: MA Experiment 108535 PARAMETER Experiment Name: Zm_Meristem_P Parameter: Tissue Value: Root Meristem vs. Above Root Meristem
  misc_feature: MA Experiment ID: 108543 Result: Up-regulated in Transcription
  misc_feature: MA Experiment ID: 108544 Result: Up-regulated in Transcription
  misc_feature: MA Experiment ID: 108546 Result: Up-regulated in Transcription
  misc_feature: MA Experiment 108546 PARAMETER Experiment Name: Zm_Imbibed_Seeds_P Parameter: Age (day) Value: 3 vs. 2
  misc_feature: MA Experiment 108546 PARAMETER Experiment Name: Zm_Imbibed_Seeds_P Parameter: Organism Value: Zea mays
  misc_feature: MA Experiment 108546 PARAMETER Experiment Name: Zm_Imbibed_Seeds_P Parameter: Plant Line Value: 35A19
  misc_feature: MA Experiment 108546 PARAMETER Experiment Name: Zm_Imbibed_Seeds_P Parameter: Tissue Value: Roots vs. Embryo
  misc_feature: MA Experiment ID: 108689 Result: Up-regulated in Transcription
  misc_feature: MA Experiment 108689 PARAMETER Experiment Name: Zm_Drought_Roots_P Parameter: Age (day) Value: 9
  misc_feature: MA Experiment 108689 PARAMETER Experiment Name: Zm_Drought_Roots_P Parameter: Organism Value: Zea mays
  misc_feature: MA Experiment 108689 PARAMETER Experiment Name: Zm_Drought_Roots_P Parameter: Plant Line Value: 35A19
  misc_feature: MA Experiment 108689 PARAMETER Experiment Name: Zm_Drought_Roots_P Parameter: Timepoint (hr) Value: 24
  misc_feature: MA Experiment 108689 PARAMETER Experiment Name: Zm_Drought_Roots_P Parameter: Tissue Value: Roots
  misc_feature: MA Experiment 108689 PARAMETER Experiment Name: Zm_Drought_Roots_P Parameter: Treatment Value: Drought vs. No Drought
  misc_feature: MA Experiment ID: 20000108 Result: Down-regulated in Transcription
  misc_feature: MA Experiment 20000108 PARAMETER Experiment Name: Zm_Root-Tips_P Parameter: Age (day) Value: 12
  misc_feature: MA Experiment 20000108 PARAMETER Experiment Name: Zm_Root-Tips_P Parameter: Organism Value: Zea mays
  misc_feature: MA Experiment 20000108 PARAMETER Experiment Name: Zm_Root-Tips_P Parameter: Tissue Value: Root tips vs. Root mid region    35
  misc_feature: MA Experiment 20000108 PARAMETER Experiment Name: Zm_Root-Tips_P Parameter: Tissue Value: Root tips vs. Root mid region   Sequence Listing-Misc Features (4)
  misc_feature: MA Experiment ID: 20000492 Result: Down-regulated in Transcription
  misc_feature: MA Experiment 20000492 PARAMETER Experiment Name: Zm_Hybrid_Seed_Dev_P Parameter: DAP Value: 12
  misc_feature: MA Experiment 20000492 PARAMETER Experiment Name: Zm_Hybrid_Seed_Dev_P Parameter: Organism Value: Zea mays
  misc_feature: MA Experiment 20000492 PARAMETER Experiment Name: Zm_Hybrid_Seed_Dev_P Parameter: Plant Line Value: 35A19
  misc_feature: MA Experiment 20000492 PARAMETER Experiment Name: Zm_Hybrid_Seed_Dev_P Parameter: Tissue Value: Fert Kernel vs. Unfert Floret
gtgattgggttggtcgcttggttcttccctgccggaagatacctttcgttcggtgtcgccaactcgccattcttgggaggtcttggtcgggaccggtgctgatggaggagaggtacgaggcgctgaaggagctgggggccggcaacttcggcgtggcgaggctggtcagggacaagcggaccaaggagctggtagccgtcaagtacatcgagaggggcaagaagattgatgagaacgtgcagagggagatcatcaatcaccagtcgctccggcaccctaacatcgtacggttcaaggaggtttgtctaacacccacacatcttgctattgtcatggaatatgctgctggtggagagctatttgagaaaatctgctcagcagggcgattcagtgaagatgagtccaggtatttcttccaacagctgatatcaggggtcagctactgccattctatggaaatttgtcaccgtgatcttaaacttgagaacaccctccttgatgggagtccaacacctcgtatgaaaatttgcgactttggttactcaaagtctgctttgctgcattccaaaccaaaatcaacagttggaactccagcatac

SEQ ID NO: 8828 - protein, 199 aa, Zea mays subsp. mays
  peptide (1)..(199): Ceres Seq. ID no. 12381636
  misc_feature (38)..(198): Pfam Name: Protein kinase domain Pfam Description: Protein kinase domain
  misc_feature (34)..(198): Homolog of NCBI NO: 7446429 NR Description: probable serine/threonine-specific protein kinase
  misc_feature (34)..(198): Homolog of NCBI NO: 37536914 NR Description: protein kinase REK [Oryza sativa (japonica
  misc_feature (34)..(198): Homolog of NCBI NO: 7446428 NR Description: probable serine/threonine-specific protein kinase
  misc_feature (34)..(198): Homolog of NCBI NO: 1362050 NR Description: serine/threonine-specific protein kinase SPK-1
  misc_feature (34)..(198): Homolog of NCBI NO: 3811293 NR Description: putative serine/threonine protein kinase
  misc_feature (34)..(198): Homolog of NCBI NO: 310580 NR Description: protein kinase 2
DWVGRLVLPCRKIPFVRCRQLAILGRSWSGPVLMEERYEALKELGAGNFGVARLVRDKRTKELVAVKYIERGKKIDENVQREIINHQSLRHPNIVRFKEVCLTPTHLAIVMEYAAGGELFEKICSAGRFSEDESRYFFQQLISGVSYCHSMEICHRDLKLENTLLDGSPTPRMKICDFGYSKSALLHSKPKSTVGTPAY

SEQ ID NO: 8829 - protein, 166 aa, Zea mays subsp. mays
  peptide (1)..(166): Ceres Seq. ID no. 12381637
  misc_feature (5)..(165): Pfam Name: Protein kinase domain Pfam Description: Protein kinase domain
  misc_feature (1)..(165): Homolog of NCBI NO: 7446429 NR Description: probable serine/threonine-specific protein kinase
  misc_feature (1)..(165): Homolog of NCBI NO: 37536914 NR Description: protein kinase REK [Oryza sativa (japonica
  misc_feature (1)..(165): Homolog of NCBI NO: 7446428 NR Description: probable serine/threonine-specific protein kinase
  misc_feature (1)..(165): Homolog of NCBI NO: 1362050 NR Description: serine/threonine-specific protein kinase SPK-1
  misc_feature (1)..(165): Homolog of NCBI NO: 3811293 NR Description: putative serine/threonine protein kinase
  misc_feature (1)..(165): Homolog of NCBI NO: 310580 NR Description: protein kinase 2
MEERYEALKELGAGNFGVARLVRDKRTKELVAVKYIERGKKIDENVQREIINHQSLRHPNIVRFKEVCLTPTHLAIVMEYAAGGELFEKICSAGRFSEDESRYFFQQLISGVSYCHSMEICHRDLKLENTLLDGSPTPRMKICDFGYSKSALLHSKPKSTVGTPAY

SEQ ID NO: 8830 - DNA, 600 bp, Zea mays subsp. mays
  misc_feature (1)..(600): Ceres Seq. ID no. 12350602
  misc_feature: MA Experiment ID: 108528 Result: Down-regulated in Transcription
  misc_feature: MA Experiment 108528 PARAMETER Experiment Name: Zm_Imbibed_Seeds_P Parameter: Age (day) Value: 5 vs. 2
  misc_feature: MA Experiment 108528 PARAMETER Experiment Name: Zm_Imbibed_Seeds_P Parameter: Organism Value: Zea mays
  misc_feature: MA Experiment 108528 PARAMETER Experiment Name: Zm_Imbibed_Seeds_P Parameter: Plant Line Value: 35A19
  misc_feature: MA Experiment 108528 PARAMETER Experiment Name: Zm_Imbibed_Seeds_P Parameter: Tissue Value: Aerial vs. Embryo
  misc_feature: MA Experiment ID: 108530 Result: Down-regulated in Transcription
  misc_feature: MA Experiment 108530 PARAMETER Experiment Name: Zm_Imbibed_Seeds_P Parameter: Age (day) Value: 6 vs. 2
  misc_feature: MA Experiment 108530 PARAMETER Experiment Name: Zm_Imbibed_Seeds_P Parameter: Organism Value: Zea mays
  misc_feature: MA Experiment 108530 PARAMETER Experiment Name: Zm_Imbibed_Seeds_P Parameter: Plant Line Value: 35A19
  misc_feature: MA Experiment 108530 PARAMETER Experiment Name: Zm_Imbibed_Seeds_P Parameter: Tissue Value: Aerial vs. Embryo
  misc_feature: MA Experiment ID: 108536 Result: Down-regulated in Transcription
  misc_feature: MA Experiment 108536 PARAMETER Experiment Name: Zm_Meristem_P Parameter: Age (day) Value: 8
  misc_feature: MA Experiment 108536 PARAMETER Experiment Name: Zm_Meristem_P Parameter: Organism Value: Zea mays
  misc_feature: MA Experiment 108536 PARAMETER Experiment Name: Zm_Meristem_P Parameter: Plant Line Value: 35A19
  misc_feature: MA Experiment 108536 PARAMETER Experiment Name: Zm_Meristem_P Parameter: Tissue Value: Shoot Meristem vs. Above Shoot Meristem
  misc_feature: MA Experiment ID: 108544 Result: Down-regulated in Transcription
  misc_feature: MA Experiment ID: 108545 Result: Down-regulated in Transcription
  misc_feature: MA Experiment 108545 PARAMETER Experiment Name: Zm_Imbibed_Seeds_P Parameter: Age (day) Value: 3 vs. 2
  misc_feature: MA Experiment 108545 PARAMETER Experiment Name: Zm_Imbibed_Seeds_P Parameter: Organism Value: Zea mays
  misc_feature: MA Experiment 108545 PARAMETER Experiment Name: Zm_Imbibed_Seeds_P Parameter: Plant Line Value: 35A19
  misc_feature: MA Experiment 108545 PARAMETER Experiment Name: Zm_Imbibed_Seeds_P Parameter: Tissue Value: Aerial vs. Embryo
  misc_feature: MA Experiment ID: 108547 Result: Down-regulated in Transcription
  misc_feature: MA Experiment 108547 PARAMETER Experiment Name: Zm_Imbibed_Seeds_P Parameter: Age (day) Value: 4 vs. 2
  misc_feature: MA Experiment 108547 PARAMETER Experiment Name: Zm_Imbibed_Seeds_P Parameter: Organism Value: Zea mays
  misc_feature: MA Experiment 108547 PARAMETER Experiment Name: Zm_Imbibed_Seeds_P Parameter: Plant Line Value: 35A19
  misc_feature: MA Experiment 108547 PARAMETER Experiment Name: Zm_Imbibed_Seeds_P Parameter: Tissue Value: Aerial vs. Embryo
  misc_feature: MA Experiment ID: 108687 Result: Up-regulated in Transcription
  misc_feature: MA Experiment 108687 PARAMETER Experiment Name: Zm_Embryos-Flowers__P Parameter: Tissue Value: Embryo vs. Aerial+
  misc_feature: MA Experiment ID: 108689 Result: Up-regulated in Transcription
  misc_feature: MA Experiment 108689 PARAMETER Experiment Name: Zm_Drought_Roots_P Parameter: Age (day) Value: 9
  misc_feature: MA Experiment 108689 PARAMETER Experiment Name: Zm_Drought_Roots_P Parameter: Organism Value: Zea mays
  misc_feature: MA Experiment 108689 PARAMETER Experiment Name: Zm_Drought_Roots_P Parameter: Plant Line Value: 35A19
  misc_feature: MA Experiment 108689 PARAMETER Experiment Name: Zm_Drought_Roots_P Parameter: Timepoint (hr) Value: 24
  misc_feature: MA Experiment 108689 PARAMETER Experiment Name: Zm_Drought_Roots_P Parameter: Tissue Value: Roots
  misc_feature: MA Experiment 108689 PARAMETER Experiment Name: Zm_Drought_Roots_P Parameter: Treatment Value: Drought vs. No Drought
  misc_feature: MA Experiment ID: 20000487 Result: Up-regulated in Transcription
  misc_feature: MA Experiment 20000487 PARAMETER Experiment Name: Zm_50mM_NH4NO3_L_to_H_P Parameter: Organism Value: Zea mays
  misc_feature: MA Experiment 20000487 PARAMETER Experiment Name: Zm_50mM_NH4NO3_L_to_H_P Parameter: Timepoint (hr) Value: 4
  misc_feature: MA Experiment 20000487 PARAMETER Experiment Name: Zm_50mM_NH4NO3_L_to_H_P Parameter: Tissue Value: Leaves
  misc_feature: MA Experiment 20000487 PARAMETER Experiment Name: Zm_50mM_NH4NO3_L_to_H_P Parameter: Treatment Value: 50mM NH4NO3 vs. 100mM Mannitol
  misc_feature: MA Experiment ID: 20000488 Result: Up-regulated in Transcription
  misc_feature: MA Experiment 20000488 PARAMETER Experiment Name: Zm_50mM_NH4NO3_L_to_H_P Parameter: Organism Value: Zea mays
  misc_feature: MA Experiment 20000488 PARAMETER Experiment Name: Zm_50mM_NH4NO3_L_to_H_P Parameter: Timepoint (hr) Value: 8
  misc_feature: MA Experiment 20000488 PARAMETER Experiment Name: Zm_50mM_NH4NO3_L_to_H_P Parameter: Tissue Value: Leaves
  misc_feature: MA Experiment 20000488 PARAMETER Experiment Name: Zm_50mM_NH4NO3_L_to_H_P Parameter: Treatment Value: 50mM NH4NO3 vs. 100mM Mannitol
  misc_feature: MA Experiment ID: 20000535 Result: Up-regulated in Transcription
  misc_feature: MA Experiment 20000535 PARAMETER Experiment Name: Zm_Hybrid_Seed_Dev_P Parameter: DAP Value: 30 vs. 12
  misc_feature: MA Experiment 20000535 PARAMETER Experiment Name: Zm_Hybrid_Seed_Dev_P Parameter: Organism Value: Zea mays
  misc_feature: MA Experiment 20000535 PARAMETER Experiment Name: Zm_Hybrid_Seed_Dev_P Parameter: Plant Line Value: 35A19
  misc_feature: MA Experiment 20000535 PARAMETER Experiment Name: Zm_Hybrid_Seed_Dev_P Parameter: Tissue Value: Embryo vs. Unfert Floret
  misc_feature: MA Experiment ID: 20001612 Result: Up-regulated in Transcription
  misc_feature: MA Experiment 20001612 PARAMETER Experiment Name: Zm_50ppm_KNO3_L-to-H_P Parameter: Age (day) Value: 19
  misc_feature: MA Experiment 20001612 PARAMETER Experiment Name: Zm_50ppm_KNO3_L-to-H_P Parameter: Organism Value: Zea mays
  misc_feature: MA Experiment 20001612 PARAMETER Experiment Name: Zm_50ppm_KNO3_L-to-H_P Parameter: Plant Line Value: 35A19
  misc_feature: MA Experiment 20001612 PARAMETER Experiment Name: Zm_50ppm_KNO3_L-to-H_P Parameter: Timepoint (hr) Value: 8
  misc_feature: MA Experiment 20001612 PARAMETER Experiment Name: Zm_50ppm_KNO3_L-to-H_P Parameter: Tissue Value: Roots
  misc_feature: MA Experiment 20001612 PARAMETER Experiment Name: Zm_50ppm_KNO3_L-to-H_P Parameter: Treatment Value: 50ppm KNO3 vs. 50ppm KCl
  misc_feature: MA Experiment ID: 20001613 Result: Up-regulated in Transcription
  misc_feature: MA Experiment 20001613 PARAMETER Experiment Name: Zm_50ppm_KNO3_L-to-H_P Parameter: Age (day) Value: 20
  misc_feature: MA Experiment 20001613 PARAMETER Experiment Name: Zm_50ppm_KNO3_L-to-H_P Parameter: Organism Value: Zea mays
  misc_feature: MA Experiment 20001613 PARAMETER Experiment Name: Zm_50ppm_KNO3_L-to-H_P Parameter: Plant Line Value: 35A19
  misc_feature: MA Experiment 20001613 PARAMETER Experiment Name: Zm_50ppm_KNO3_L-to-H_P Parameter: Timepoint (hr) Value: 24
  misc_feature: MA Experiment 20001613 PARAMETER Experiment Name: Zm_50ppm_KNO3_L-to-H_P Parameter: Tissue Value: Roots
  misc_feature: MA Experiment 20001613 PARAMETER Experiment Name: Zm_50ppm_KNO3_L-to-H_P Parameter: Treatment Value: 50ppm KNO3 vs. 50ppm KCl
  misc_feature: MA Experiment ID: 20001614 Result: Up-regulated in Transcription
  misc_feature: MA Experiment 20001614 PARAMETER Experiment Name: Zm_50ppm_KNO3_L-to-H_P Parameter: Age (day) Value: 21
  misc_feature: MA Experiment 20001614 PARAMETER Experiment Name: Zm_50ppm_KNO3_L-to-H_P Parameter: Organism Value: Zea mays
  misc_feature: MA Experiment 20001614 PARAMETER Experiment Name: Zm_50ppm_KNO3_L-to-H_P Parameter: Plant Line Value: 35A19
  misc_feature: MA Experiment 20001614 PARAMETER Experiment Name: Zm_50ppm_KNO3_L-to-H_P Parameter: Timepoint (hr) Value: 48
  misc_feature: MA Experiment 20001614 PARAMETER Experiment Name: Zm_50ppm_KNO3_L-to-H_P Parameter: Tissue Value: Roots
  misc_feature: MA Experiment 20001614 PARAMETER Experiment Name: Zm_50ppm_KNO3_L-to-H_P Parameter: Treatment Value: 50ppm KNO3 vs. 50ppm KCl
accagccggtgttggtttcagcttgtattcccactctgtcgcacagcgtcgcccgtcgccgctgagatcctaggaagaaatggagctctctcgcaagctcttcacggccgtcctcctcgtcatgctgctgctgctgtccgcagaggtcgggccggtggcggtggcggaggcgcggacgtgccagtcgcagagccacaggttccggggcccctgcctccgccggtccaactgcgccaacgtctgcaggaccgaggggttccccggcggcaggtgccgcggcttccgccgccgctgcttctgcaccacgcactgccactgattcgctcgcccagcggccggctggcgtcgccgtcgatcgcgtcgcgaccagtccatggctccatgcatgaataacaagggtgtgcgcggtttgtgatgccaaattgtatcgtcgtcgtgtgttgaagcgttcgatcgtcggtctagtagtgtgcctgtgagcagcggcgtgctgttgtacgtacgtctgcctctgttgttccatgtttcgggattttccatagcaaatgcatgcgtcgagatctactccgaaagaaattcgatagatttcgcataatttcc

SEQ ID NO: 8831 - protein, 130 aa, Zea mays subsp. mays
  peptide (1)..(130): Ceres Seq. ID no. 12350603
TSRCWFQLVFPLCRTASPVAAEILGRNGALSQALHGRPPRHAAAAVRRGRAGGGGGGADVPVAEPQVPGPLPPPVQLRQRLQDRGVPRRQVPRLPPPLLLHHALPLIRSPSGRLASPSIASRPVHGSMHE

SEQ ID NO: 8832 - protein, 79 aa, Zea mays subsp. mays
  peptide (1)..(79): Ceres Seq. ID no. 12350604
  misc_feature (32)..(78): Pfam Name: Gamma-thionins family Pfam Description: Gamma-thionins family
  misc_feature (1)..(78): Homolog of NCBI NO: 16225423 NR Description: putative gamma-thionin [Castanea sativa]
  misc_feature (1)..(78): Homolog of NCBI NO: 32400845 NR Description: proteinase inhibitor Rgpi9 [Triticum aestivum]
  misc_feature (1)..(78): Homolog of NCBI NO: 7939581 NR Description: thionin like protein [Nicotiana tabacum]
  misc_feature (1)..(78): Homolog of NCBI NO: 11387188 NR Description: Flower-specific gamma-thionin precursor (Defensin >gi|7672659|gb|AAF66591.1|AF141131_1 defensin [Helianthus annuus]
  misc_feature (1)..(78): Homolog of NCBI NO: 7451428 NR Description: proteinase inhibitor - rice proteinase inhibitor [Oryza sativa] >gi|2829212|gb|AAC00503.1|
  misc_feature (1)..(78): Homolog of NCBI NO: 15226872 NR Description: plant defensin protein, putative (PDF2.2); id: At2g02100.1, supported by cDNA: gi_13878184 [Arabidopsis
  misc_feature (1)..(78): Homolog of NCBI NO: 24306004 NR Description: defensin EGAD1 [Elaeis guineensis]
  misc_feature (1)..(78): Homolog of NCBI NO: 3915102 NR Description: Gamma-thionin homolog PPT precursor
MELSRKLFTAVLLVMLLLLSAEVGPVAVAEARTCQSQSHRFRGPCLRRSNCANVCRTEGFPGGRCRGFRRRCFCTTHCH

SEQ ID NO: 8833 - protein, 65 aa, Zea mays subsp. mays
  peptide (1)..(65): Ceres Seq. ID no. 12350605
  misc_feature (18)..(64): Pfam Name: Gamma-thionins family Pfam Description: Gamma-thionins family
  misc_feature (1)..(64): Homolog of NCBI NO: 16225423 NR Description: putative gamma-thionin [Castanea sativa]
  misc_feature (1)..(64): Homolog of NCBI NO: 32400845 NR Description: proteinase inhibitor Rgpi9 [Triticum aestivum]
  misc_feature (1)..(64): Homolog of NCBI NO: 7939581 NR Description: thionin like protein [Nicotiana tabacum]
  misc_feature (1)..(64): Homolog of NCBI NO: 11387188 NR Description: Flower-specific gamma-thionin precursor (Defensin >gi|7672659|gb|AAF66591.1|AF141131_1 defensin [Helianthus annuus]
  misc_feature (1)..(64): Homolog of NCBI NO: 7451428 NR Description: proteinase inhibitor - rice proteinase inhibitor [Oryza sativa] >gi|2829212|gb|AAC00503.1|
  misc_feature (1)..(64): Homolog of NCBI NO: 15226872 NR Description: plant defensin protein, putative (PDF2.2); id: At2g02100.1, supported by cDNA: gi_13878184 [Arabidopsis
  misc_feature (1)..(64): Homolog of NCBI NO: 24306004 NR Description: defensin EGAD1 [Elaeis guineensis]
  misc_feature (1)..(64): Homolog of NCBI NO: 3915102 NR Description: Gamma-thionin homolog PPT precursor
MLLLLSAEVGPVAVAEARTCQSQSHRFRGPCLRRSNCANVCRTEGFPGGRCRGFRRRCFCTTHCH

SEQ ID NO: 8834 - DNA, 881 bp, Zea mays subsp. mays
  misc_feature (1)..(881): Ceres Seq. ID no. 12356648
  misc_feature: MA Experiment ID: 108543 Result: Down-regulated in Transcription
  misc_feature: MA Experiment ID: 108544 Result: Down-regulated in Transcription
  misc_feature: MA Experiment ID: 108556 Result: Down-regulated in Transcription
  misc_feature: MA Experiment 108556 PARAMETER Experiment Name: Zm_Drought_P Parameter: Age (day) Value: 9
  misc_feature: MA Experiment 108556 PARAMETER Experiment Name: Zm_Drought_P Parameter: Organism Value: Zea mays
  misc_feature: MA Experiment 108556 PARAMETER Experiment Name: Zm_Drought_P Parameter: Plant Line Value: 35A19
  misc_feature: MA Experiment 108556 PARAMETER Experiment Name: Zm_Drought_P Parameter: Timepoint (hr) Value: 24
  misc_feature: MA Experiment 108556 PARAMETER Experiment Name: Zm_Drought_P Parameter: Tissue Value: Aerial
  misc_feature: MA Experiment 108556 PARAMETER Experiment Name: Zm_Drought_P Parameter: Treatment Value: Drought vs. No Drought
  misc_feature: MA Experiment ID: 20000487 Result: Up-regulated in Transcription
  misc_feature: MA Experiment 20000487 PARAMETER Experiment Name: Zm_50mM_NH4NO3_L_to_H_P Parameter: Organism Value: Zea mays
  misc_feature: MA Experiment 20000487 PARAMETER Experiment Name: Zm_50mM_NH4NO3_L_to_H_P Parameter: Timepoint (hr) Value: 4
  misc_feature: MA Experiment 20000487 PARAMETER Experiment Name: Zm_50mM_NH4NO3_L_to_H_P Parameter: Tissue Value: Leaves
  misc_feature: MA Experiment 20000487 PARAMETER Experiment Name: Zm_50mM_NH4NO3_L_to_H_P Parameter: Treatment Value: 50mM NH4NO3 vs. 100mM Mannitol
  misc_feature: MA Experiment ID: 20001606 Result: Up-regulated in Transcription
  misc_feature: MA Experiment 20001606 PARAMETER Experiment Name: Zm_50ppm_KNO3_L-to-H_P Parameter: Age (day) Value: 19
  misc_feature: MA Experiment 20001606 PARAMETER Experiment Name: Zm_50ppm_KNO3_L-to-H_P Parameter: Organism Value: Zea mays
  misc_feature: MA Experiment 20001606 PARAMETER Experiment Name: Zm_50ppm_KNO3_L-to-H_P Parameter: Plant Line Value: 35A19
  misc_feature: MA Experiment 20001606 PARAMETER Experiment Name: Zm_50ppm_KNO3_L-to-H_P Parameter: Timepoint (hr) Value: 8
  misc_feature: MA Experiment 20001606 PARAMETER Experiment Name: Zm_50ppm_KNO3_L-to-H_P Parameter: Tissue Value: Shoots
  misc_feature: MA Experiment 20001606 PARAMETER Experiment Name: Zm_50ppm_KNO3_L-to-H_P Parameter: Treatment Value: 50ppm KNO3 vs. 50ppm KCl
aagtttttgtattcgtccaagcccggcccatccaccatccgctgctactcttcatcacaaaccctaataaacccatctccgcctctggttcgtcctccatctcctcccaaatcgcggcaccaagcacccgaccgctttccgcatggcttcccacatcgacttccgctgcttggatgagggcctcggcggcgagcgcggcaagcgcaagcgccgcgaggatgccgaggcggcggccgcggattccatggacctcgatgccgacgcgcaccggccgtctaagctccgcgccatgccttccctctccgacccctcgaagccggcctccttcggccagcccacctacgacggcgtcatcgcagggcggttgtcgggacggcggtggaaggaggcccgcacccggcgagcgtcggccgtggcggtgtcgcggaagccgaccccgctggagcagcgcgtccgggagaagtcgctgaagcgcgcgtaccaggcccgcaaggcggagctcaaggaagagatccggcagaacaaggtggccaagcggaaggcccgcgaggagcgtgagaagcggaagcaggagaacgtgctccgcacgggcaccaaactgcaaagggtcaccaacccaaagacgatccagaagatcgccaagtccaagaagcgcaagcagctcaaggtcgtccccgacgagttcctcggcggcaagaagtcggtggccaaccggcgcatgcaggtgcctggactcgaaaattgaatctgacaggcctcgatctctctgtatctgttcggtggcggcgttgagttggcaaggttagttcgacgacgattttgtacttgtttctggttatgtagtttgaagcgtgattaaattaagcgattaaaatggcgtg

SEQ ID NO: 8835 - protein, 200 aa, Zea mays subsp. mays
  peptide (1)..(200): Ceres Seq. ID no. 12356649
  misc_feature (1)..(190): Homolog of NCBI NO: 18402657 NR Description: expressed protein; protein id: At2g31410.1, by cDNA: gi_13430697, supported by cDNA: gi_15293176 [Arabidopsis >gi|25408154|pir||D84720 hypothetical protein At2g31410
MASHIDFRCLDEGLGGERGKRKRREDAEAAAADSMDLDADAHRPSKLRAMPSLSDPSKPASFGQPTYDGVIAGRLSGRRWKEARTRRASAVAVSRKPTPLEQRVREKSLKRAYQARKAELKEEIRQNKVAKRKAREEREKRKQENVLRTGTKLQRVTNPKTIQKIAKSKKRKQLKVVPDEFLGGKKSVANRRMQVPGLEN

SEQ ID NO: 8836 - protein, 166 aa, Zea mays subsp. mays
  peptide (1)..(166): Ceres Seq. ID no. 12356650
  misc_feature (1)..(156): Homolog of NCBI NO: 18402657 NR Description: expressed protein; protein id: At2g31410.1, by cDNA: gi_13430697, supported by cDNA: gi_15293176 [Arabidopsis >gi|25408154|pir||D84720 hypothetical protein At2g31410
MDLDADAHRPSKLRAMPSLSDPSKPASFGQPTYDGVIAGRLSGRRWKEARTRRASAVAVSRKPTPLEQRVREKSLKRAYQARKAELKEEIRQNKVAKRKAREEREKRKQENVLRTGTKLQRVTNPKTIQKIAKSKKRKQLKVVPDEFLGGKKSVANRRMQVPGLEN

SEQ ID NO: 8837 - protein, 155 aa, Zea mays subsp. mays
  peptide (1)..(155): Ceres Seq. ID no. 12356651
  misc_feature (21)..(155): Homolog of NCBI NO: 13592175 NR Description: ppg3 [Leishmania major]
  misc_feature (26)..(155): Homolog of NCBI NO: 13592175 NR Description: ppg3 [Leishmania major]
  misc_feature (26)..(155): Homolog of NCBI NO: 11359723 NR Description: proteophosphoglycan, membrane-associated - Leishmania major (fragment) >gi|5420389|emb|CAB46680.1|
  misc_feature (26)..(155): Homolog of NCBI NO: 13592175 NR Description: ppg3 [Leishmania major]
  misc_feature (21)..(155): Homolog of NCBI NO: 5821145 NR Description: RNA binding protein [Homo sapiens]
  misc_feature (26)..(155): Homolog of NCBI NO: 13592175 NR Description: ppg3 [Leishmania major]
  misc_feature (21)..(155): Homolog of NCBI NO: 5821143 NR Description: RNA binding protein [Homo sapiens]
  misc_feature (19)..(155): Homolog of NCBI NO: 13592175 NR Description: ppg3 [Leishmania major]
  misc_feature (18)..(155): Homolog of NCBI NO: 32699068 NR Description: hypothetical protein FLJ35107 [Homo sapiens]
  misc_feature (21)..(155): Homolog of NCBI NO: 6649242 NR Description: splicing coactivator subunit SRm300 [Homo sapiens]
VFVFVQARPIHHPLLLFITNPNKPISASGSSSISSQIAAPSTRPLSAWLPTSTSAAWMRASAASAASASAARMPRRRPRIPWTSMPTRTGRLSSAPCLPSPTPRSRPPSASPPTTASSQGGCRDGGGRRPAPGERRPWRCRGSRPRWSSASGRSR

SEQ ID NO: 8838 - DNA, 1643 bp, Zea mays subsp. mays
  misc_feature (1)..(1643): Ceres Seq. ID no. 12347478
  misc_feature: MA Experiment ID: 108535 Result: Up-regulated in Transcription
  misc_feature: MA Experiment 108535 PARAMETER Experiment Name: Zm_Meristem_P Parameter: Age (day) Value: 8
  misc_feature: MA Experiment 108535 PARAMETER Experiment Name: Zm_Meristem_P Parameter: Organism Value: Zea mays
  misc_feature: MA Experiment 108535 PARAMETER Experiment Name: Zm_Meristem_P Parameter: Plant Line Value: 35A19
  misc_feature: MA Experiment 108535 PARAMETER Experiment Name: Zm_Meristem_P Parameter: Tissue Value: Root Meristem vs. Above Root Meristem
  misc_feature: MA Experiment ID: 20000478 Result: Down-regulated in Transcription
  misc_feature: MA Experiment 20000478 PARAMETER Experiment Name: Zm_5mM_SA_P Parameter: Age (day) Value: 11
  misc_feature: MA Experiment 20000478 PARAMETER Experiment Name: Zm_5mM_SA_P Parameter: Organism Value: Zea mays
  misc_feature: MA Experiment 20000478 PARAMETER Experiment Name: Zm_5mM_SA_P Parameter: Plant Line Value: 35A19
  misc_feature: MA Experiment 20000478 PARAMETER Experiment Name: Zm_5mM_SA_P Parameter: Timepoint (hr) Value: 72
  misc_feature: MA Experiment 20000478 PARAMETER Experiment Name: Zm_5mM_SA_P Parameter: Tissue Value: Aerial
  misc_feature: MA Experiment 20000478 PARAMETER Experiment Name: Zm_5mM_SA_P Parameter: Treatment Value: 5mM SA vs. No Treatment
  misc_feature: MA Experiment ID: 20000535 Result: Up-regulated in Transcription
  misc_feature: MA Experiment 20000535 PARAMETER Experiment Name: Zm_Hybrid_Seed_Dev_P Parameter: DAP Value: 30 vs. 12
  misc_feature: MA Experiment 20000535 PARAMETER Experiment Name: Zm_Hybrid_Seed_Dev_P Parameter: Organism Value: Zea mays
  misc_feature: MA Experiment 20000535 PARAMETER Experiment Name: Zm_Hybrid_Seed_Dev_P Parameter: Plant Line Value: 35A19
  misc_feature: MA Experiment 20000535 PARAMETER Experiment Name: Zm_Hybrid_Seed_Dev_P Parameter: Tissue Value: Embryo vs. Unfert Floret
gtgcgggcgtgttgtggtccgctgatctcgttcgcgggacgccggggggtggtggtggtggcagcggtggttggtggtgcgcggcgtgaaagaaagaaagaaaaaaaaaaaaggcccgccgctttgcgctgctctgcttccgtaggtgtcacgagatttggccctagcctttcgctttcctttttcatctcgctcacaagggaagggaccgagggacgagggagacgttggggaggggagcgagcgagccgtaacatccgagctgttccaatggcgacccctgccgttgctttcgtcgccagcgctttgttggggcggtggtagcgctaggagcggagcagtactaggttggtaggtggttgtagctttgcgcgtgacccgagcgcgcgctcgctcgctcctgtgcctctctacctcgcttgcgtgcgccgggaaggcagtgggtggctggtcggttctcgcaagaggttgctggtgctgttcctcctcccccggttgatgagcatggggcattgctccgagcagcggacggggttcgaggtgactaaggactggaacggcgccgaccagttcgcgatccggtccccgcggggggcgtccgttcgggtctgcctgcacggcgggcaggtcgtctcgtggaggaaccaccgcggcgaggagctcctcttcagcagcagcaaggcaatcttcaagccgccaagagcgacccgtggtggcattccgatatgcttcccacagtttggaaactgtggaacattggagcagcatggatttgcaaggaacaagatatggacaatagacgatgaggctccacctctaaattatggtgataataacagcaacaaagcttctgttgaccttctgctaaagccatctgaagatgacctgaagtgctggccacactgttttgagttacgtctcagagtctctctttcaatggatggagacctttcactgatatcacgggtcagaaatgttaatgggaagccattcagtttcgcatttgcttaccatacatacctttctgtttctgacatcagtgaagtgaggatagaaggtctggagacccttgattatcttgacaaccttagccagcgggaacgttttaccgaacagggagatgccataacatttgaatcagaggttgatcgagtctatgttggctgcccaggcgtaatagctgttcttgaccatggaaagaaacgcacattcatcgtgcggaaagaagggcttcctgatattgttgtgtggaacccctgggagaagaagtccaagacgatggcagacttcggcgacgacgagtacaagcagatgctgtgcgtggatgcagccgcggtcgagagggccatcacgctgaagcccggggaggagtggacggggaagctggagctctccgccgtggcgtcgaccaactgcagcgaccacctggatcgcccgggcaggctgtagagcgctgggtgggtgggttcgttcgcccctgacgaaaggcatgtactagttttttttcatgtacatgggggcgctaggtccggcccttgcaggctgcagtatcatctacctgtcaggtgtgtcatgtgtgagtttaaacttatgtcagatccaagtattgctgtgatcgacatgttcgatgttcctggactgcg

SEQ ID NO: 8839 - protein, 316 aa, Zea mays subsp. mays; identical to SEQ ID NO: 1486
  peptide (1)..(316): Ceres Seq. ID no. 12347479
  misc_feature (23)..(299): Pfam Name: Aldose 1-epimerase Pfam Description: Aldose 1-epimerase
  misc_feature (8)..(311): Homolog of NCBI NO: 15233165 NR Description: putative protein; protein id: At3g61610.1
  misc_feature (3)..(165): Homolog of NCBI NO: 34911992 NR Description: P0694A04.29 [Oryza sativa (japonica
  misc_feature (244)..(313): Homolog of NCBI NO: 34911992 NR Description: P0694A04.29 [Oryza sativa (japonica
  misc_feature (2)..(304): Homolog of NCBI NO: 15236591 NR Description: putative protein; protein id: At4g23730.1, by cDNA: 21949. [Arabidopsis thaliana] >gi|7486738|pir||T05605
  misc_feature (9)..(316): Homolog of NCBI NO: 19387263 NR Description: putative apospory-associated protein C [Oryza
  misc_feature (9)..(311): Homolog of NCBI NO: 15242099 NR Description: apospory-associated protein C; protein id:
  misc_feature (13)..(311): Homolog of NCBI NO: 40253263 NR Description: putative Aldose 1-epimerase [Oryza sativa
  misc_feature (14)..(311): Homolog of NCBI NO: 2501555 NR Description: POSSIBLE APOSPORY-ASSOCIATED PROTEIN C
  misc_feature (9)..(316): Homolog of NCBI NO: 38344152 NR Description: OSJNBa0041A02.19 [Oryza sativa (japonica
  misc_feature (18)..(311): Homolog of NCBI NO: 18395868 NR Description: expressed protein; protein id: At3g01590.1, by cDNA: 41354., supported by cDNA: gi_16612257, supported by gi_20258972 [Arabidopsis thaliana]

SEQ ID NO: 8840 - protein, 314 aa, Zea mays subsp. mays; identical to SEQ ID NO: 1487
  peptide (1)..(314): Ceres Seq. ID no. 12347480
  misc_feature (21)..(297): Pfam Name: Aldose 1-epimerase Pfam Description: Aldose 1-epimerase
  misc_feature (6)..(309): Homolog of NCBI NO: 15233165 NR Description: putative protein; protein id: At3g61610.1
  misc_feature (1)..(163): Homolog of NCBI NO: 34911992 NR Description: P0694A04.29 [Oryza sativa (japonica
  misc_feature (242)..(311): Homolog of NCBI NO: 34911992 NR Description: P0694A04.29 [Oryza sativa (japonica
  misc_feature (1)..(302): Homolog of NCBI NO: 15236591 NR Description: putative protein; protein id: At4g23730.1, by cDNA: 21949. [Arabidopsis thaliana] >gi|7486738|pir||T05605
  misc_feature (7)..(314): Homolog of NCBI NO: 19387263 NR Description: putative apospory-associated protein C [Oryza
  misc_feature (7)..(309): Homolog of NCBI NO: 15242099 NR Description: apospory-associated protein C; protein id:
  misc_feature (11)..(309): Homolog of NCBI NO: 40253263 NR Description: putative Aldose 1-epimerase [Oryza sativa
  misc_feature (12)..(309): Homolog of NCBI NO: 2501555 NR Description: POSSIBLE APOSPORY-ASSOCIATED PROTEIN C
  misc_feature (7)..(314): Homolog of NCBI NO: 38344152 NR Description: OSJNBa0041A02.19 [Oryza sativa (japonica
  misc_feature (16)..(309): Homolog of NCBI NO: 18395868 NR Description: expressed protein; protein id: At3g01590.1, by cDNA: 41354., supported by cDNA: gi_16612257, supported by gi_20258972 [Arabidopsis thaliana]

SEQ ID NO: 8841 - protein, 170 aa, Zea mays subsp. mays; identical to SEQ ID NO: 1488
  peptide (1)..(170): Ceres Seq. ID no. 12347481
  misc_feature (1)..(153): Pfam Name: Aldose 1-epimerase Pfam Description: Aldose 1-epimerase
  misc_feature (1)..(165): Homolog of NCBI NO: 15233165 NR Description: putative protein; protein id: At3g61610.1
  misc_feature (1)..(19): Homolog of NCBI NO: 34911992 NR Description: P0694A04.29 [Oryza sativa (japonica
  misc_feature (98)..(167): Homolog of NCBI NO: 34911992 NR Description: P0694A04.29 [Oryza sativa (japonica
  misc_feature (1)..(158): Homolog of NCBI NO: 15236591 NR Description: putative protein; protein id: At4g23730.1, by cDNA: 21949. [Arabidopsis thaliana] >gi|7486738|pir||T05605
  misc_feature (1)..(170): Homolog of NCBI NO: 19387263 NR Description: putative apospory-associated protein C [Oryza
  misc_feature (1)..(165): Homolog of NCBI NO: 15242099 NR Description: apospory-associated protein C; protein id:
  misc_feature (1)..(165): Homolog of NCBI NO: 40253263 NR Description: putative Aldose 1-epimerase [Oryza sativa
  misc_feature (1)..(165): Homolog of NCBI NO: 2501555 NR Description: POSSIBLE APOSPORY-ASSOCIATED PROTEIN C
  misc_feature (1)..(170): Homolog of NCBI NO: 38344152 NR Description: OSJNBa0041A02.19 [Oryza sativa (japonica
  misc_feature (1)..(165): Homolog of NCBI NO: 18395868 NR Description: expressed protein; protein id: At3g01590.1, by cDNA: 41354., supported by cDNA: gi_16612257, supported by gi_20258972 [Arabidopsis thaliana]

SEQ ID NO: 8842 - DNA, 1680 bp, Zea mays subsp. mays
  misc_feature (1)..(1680): Ceres Seq. ID no. 12349311
  misc_feature: MA Experiment ID: 108522 Result: Up-regulated in Transcription
  misc_feature: MA Experiment 108522 PARAMETER Experiment Name: Zm_42deg_Heat_P Parameter: Age (day) Value: 8
  misc_feature: MA Experiment 108522 PARAMETER Experiment Name: Zm_42deg_Heat_P Parameter: Organism Value: Zea mays
  misc_feature: MA Experiment 108522 PARAMETER Experiment Name: Zm_42deg_Heat_P Parameter: Plant Line Value: 35A19
  misc_feature: MA Experiment 108522 PARAMETER Experiment Name: Zm_42deg_Heat_P Parameter: Temperature (deg C) Value: 42 vs. 22
  misc_feature: MA Experiment 108522 PARAMETER Experiment Name: Zm_42deg_Heat_P Parameter: Timepoint (hr) Value: 1
  misc_feature: MA Experiment 108522 PARAMETER Experiment Name: Zm_42deg_Heat_P Parameter: Tissue Value: Aerial
atagccaacccttttgataaagaaacgggcctacactacacgggacacctgcctcctcttctcccatctctccctcttcccctctccctctcgtggccacgactgccgctgccgccctacgccaggtgtccaggtcatctccggcccattcgccggcgacgagcaccccactagatcgaccgagatatggacggcctgtggcatctgggggacgagctccgcgggcagcccaaggtggtggaggaccgccagtggtcgctcatgacgtccaagctggcagagatcaccaggtccaggggcgagaggacgaacgacctcgactacgccaggatgaacgccgcccccgacgccaagcggtggggcaaggcggcgtcctaccagcaccatgacgagggcaggatggaccaccacgtcggcctcagcctcaagatgaacgatctcaagatgaacgaggccgccgctgccgccgtcatgaagctccccttccgcggcgtgccctacaacgtcaacccgatgtaccccaaggggagcaacgccaacgccaatgtcaacgcgttcaagatgaatgtcggggtgaacaagtactccagcagcgcgaacgggaaagacgccggcgggaaaagcagtggcggcggcagcaacaacaacagcggcggcggaggcaacggcaatgggaccgccaacggcagttccgcggtcgacaagcgcttcaagacgttgccgacgagcgagatgctgccgaagaacgaagtccttggtgggtacatctttgtctgcaacaacgataccatgcaggaggacctcaagaggcagctttttggattgccagcaagatatcgtgattcagtccgggcaattactcctggcctgccgcttttcctctataactacaccactcaccagcttcatggggtatttgaggctgccagtttcggtgggtctaatatcgatcccactgcatgggaggataagaagtgtaaaggtgaatctagattcccagcgcaggtgaggatccgcgttaggaagctctgcaagccgttggaagaggattccttcaggccagttttgcaccactatgatggtccaaagtttcgcctcgagctctccatcgcggagaccctgtccctgctagacctatgcgagaaggaaggcatctgagctgttggctgcctcgtgaggttctagtaaatatcaatcatccttgtatgttctgtagatggtggttggcaatgttgtttatttttcaagcgcaagctgctgccggtctcgttttccctgtcctggatggaagcaaagggacctggtactttgaaggccccccctcaaacataagctgtgagcctgtcagtgcacgtgtccgccgttgtcgtcaagaaccaaaccaaatcatgaaatcttgcgccgacggagagttggagcgtgtatgttttgctatctctatctacatgtctcagtagagtggatataccctggggtccccaaaagatgggggcctcaggcctgtatgtaacactacgtgtaatggttaaggtgaatgtgccgtgaggccccccaaaagttggagtgtgtatttttgttgtcaccttgaaccgactttgcgtatgctttttttagtgctgctaccttttgcgctgtgtttggcttctggttcatgtttttgtaatataaggtggcttgcgc

SEQ ID NO: 8843 - protein, 323 aa, Zea mays subsp. mays
  peptide (1)..(323): Ceres Seq. ID no. 12349312
  misc_feature (79)..(322): Homolog of NCBI NO: 2369766 NR Description: hypothetical protein [Citrus x paradisi]
  misc_feature (79)..(322): Homolog of NCBI NO: 15232081 NR Description: gda-1, putative; protein id: At3g27090.1, by cDNA: 3049., supported by cDNA: gi_16604449 [Arabidopsis >gi|9279632|dbj|BAB01090.1| contains similarity to unknown
  misc_feature (79)..(322): Homolog of NCBI NO: 21592623 NR Description: gda-1, putative [Arabidopsis thaliana]
  misc_feature (116)..(322): Homolog of NCBI NO: 21665866 NR Description: GDA2 protein [Pisum sativum]
  misc_feature (119)..(320): Homolog of NCBI NO: 584825 NR Description: B2 PROTEIN >gi|322726|pir||S32124 B2 protein -
  misc_feature (32)..(317): Homolog of NCBI NO: 18422167 NR Description: putative protein; protein id: At5g42050.1, by cDNA: 6903., supported by cDNA: gi_19424060, supported by gi_21281017 [Arabidopsis thaliana] >gi|19424061|gb|AAL87257.1|
  misc_feature (71)..(311): Homolog of NCBI NO: 34913876 NR Description: B1156H12.22 [Oryza sativa (japonica
  misc_feature (125)..(317): Homolog of NCBI NO: 9757950 NR Description: gene_id:MJC20.15~similar to unknown
  misc_feature (202)..(286): Homolog of NCBI NO: 7488804 NR Description: gda-1 protein - garden pea
  misc_feature (176)..(317): Homolog of NCBI NO: 34896110 NR Description: P0701D05.9 [Oryza sativa (japonica
MDGLWHLGDELRGQPKVVEDRQWSLMTSKLAEITRSRGERTNDLDYARMNAAPDAKRWGKAASYQHHDEGRMDHHVGLSLKMNDLKMNEAAAAAVMKLPFRGVPYNVNPMYPKGSNANANVNAFKMNVGVNKYSSSANGKDAGGKSSGGGSNNNSGGGGNGNGTANGSSAVDKRFKTLPTSEMLPKNEVLGGYIFVCNNDTMQEDLKRQLFGLPARYRDSVRAITPGLPLFLYNYTTHQLHGVFEAASFGGSNIDPTAWEDKKCKGESRFPAQVRIRVRKLCKPLEEDSFRPVLHHYDGPKFRLELSIAETLSLLDLCEKEGI

SEQ ID NO: 8844 - protein, 298 aa, Zea mays subsp. mays
  peptide (1)..(298): Ceres Seq. ID no. 12349313
  misc_feature (54)..(297): Homolog of NCBI NO: 2369766 NR Description: hypothetical protein [Citrus x paradisi]
  misc_feature (54)..(297): Homolog of NCBI NO: 15232081 NR Description: gda-1, putative; protein id: At3g27090.1, by cDNA: 3049., supported by cDNA: gi_16604449 [Arabidopsis >gi|9279632|dbj|BAB01090.1| contains similarity to unknown
  misc_feature (54)..(297): Homolog of NCBI NO: 21592623 NR Description: gda-1, putative [Arabidopsis thaliana]
  misc_feature (91)..(297): Homolog of NCBI NO: 21665866 NR Description: GDA2 protein [Pisum sativum]
  misc_feature (94)..(295): Homolog of NCBI NO: 584825 NR Description: B2 PROTEIN >gi|322726|pir||S32124 B2 protein -
  misc_feature (7)..(292): Homolog of NCBI NO: 18422167 NR Description: putative protein; protein id: At5g42050.1, by cDNA: 6903., supported by cDNA: gi_19424060, supported by gi_21281017 [Arabidopsis thaliana] >gi|19424061|gb|AAL87257.1|
  misc_feature (46)..(286): Homolog of NCBI NO: 34913876 NR Description: B1156H12.22 [Oryza sativa (japonica
  misc_feature (100)..(292): Homolog of NCBI NO: 9757950 NR Description: gene_id:MJC20.15~similar to unknown
  misc_feature (177)..(261): Homolog of NCBI NO: 7488804 NR Description: gda-1 protein - garden pea
  misc_feature (151)..(292): Homolog of NCBI NO: 34896110 NR Description: P0701D05.9 [Oryza sativa (japonica
MTSKLAEITRSRGERTNDLDYARMNAAPDAKRWGKAASYQHHDEGRMDHHVGLSLKMNDLKMNEAAAAAVMKLPFRGVPYNVNPMYPKGSNANANVNAFKMNVGVNKYSSSANGKDAGGKSSGGGSNNNSGGGGNGNGTANGSSAVDKRFKTLPTSEMLPKNEVLGGYIFVCNNDTMQEDLKRQLFGLPARYRDSVRAITPGLPLFLYNYTTHQLHGVFEAASFGGSNIDPTAWEDKKCKGESRFPAQVRIRVRKLCKPLEEDSFRPVLHHYDGPKFRLELSIAETLSLLDLCEKEGI

SEQ ID NO: 8845 - protein, 275 aa, Zea mays subsp. mays
  peptide (1)..(275): Ceres Seq. ID no. 12349314
  misc_feature (1)..(269): Homolog of NCBI NO: 18422167 NR Description: putative protein; protein id: At5g42050.1, by cDNA: 6903., supported by cDNA: gi_19424060, supported by gi_21281017 [Arabidopsis thaliana] >gi|19424061|gb|AAL87257.1|
  misc_feature (23)..(263): Homolog of NCBI NO: 34913876 NR Description: B1156H12.22 [Oryza sativa (japonica
  misc_feature (77)..(269): Homolog of NCBI NO: 9757950 NR Description: gene_id:MJC20.15~similar to unknown
  misc_feature (154)..(238): Homolog of NCBI NO: 7488804 NR Description: gda-1 protein - garden pea
  misc_feature (128)..(269): Homolog of NCBI NO: 34896110 NR Description: P0701D05.9 [Oryza sativa (japonica
  misc_feature (31)..(274): Homolog of NCBI NO: 2369766 NR Description: hypothetical protein [Citrus x paradisi]
  misc_feature (31)..(274): Homolog of NCBI NO: 15232081 NR Description: gda-1, putative; protein id: At3g27090.1, by cDNA: 3049., supported by cDNA: gi_16604449 [Arabidopsis >gi|9279632|dbj|BAB01090.1| contains similarity to unknown
  misc_feature (31)..(274): Homolog of NCBI NO: 21592623 NR Description: gda-1, putative [Arabidopsis thaliana]
  misc_feature (68)..(274): Homolog of NCBI NO: 21665866 NR Description: GDA2 protein [Pisum sativum]
  misc_feature (71)..(272): Homolog of NCBI NO: 584825 NR Description: B2 PROTEIN >gi|322726|pir||S32124 B2 protein -
MNAAPDAKRWGKAASYQHHDEGRMDHHVGLSLKMNDLKMNEAAAAAVMKLPFRGVPYNVNPMYPKGSNANANVNAFKMNVGVNKYSSSANGKDAGGKSSGGGSNNNSGGGGNGNGTANGSSAVDKRFKTLPTSEMLPKNEVLGGYIFVCNNDTMQEDLKRQLFGLPARYRDSVRAITPGLPLFLYNYTTHQLHGVFEAASFGGSNIDPTAWEDKKCKGESRFPAQVRIRVRKLCKPLEEDSFRPVLHHYDGPKFRLELSIAETLSLLDLCEKEGI

SEQ ID NO: 8846 - DNA, 1431 bp, Zea mays subsp. mays
  misc_feature (1)..(1431): Ceres Seq. ID no. 12407603
  misc_feature: MA Experiment ID: 108527 Result: Down-regulated in Transcription
  misc_feature: MA Experiment 108527 PARAMETER Experiment Name: Zm_5mM_NO_P Parameter: Age (day) Value: 8
  misc_feature: MA Experiment 108527 PARAMETER Experiment Name: Zm_5mM_NO_P Parameter: Organism Value: Zea mays
  misc_feature: MA Experiment 108527 PARAMETER Experiment Name: Zm_5mM_NO_P Parameter: Plant Line Value: 35A19
  misc_feature: MA Experiment 108527 PARAMETER Experiment Name: Zm_5mM_NO_P Parameter: Timepoint (hr) Value: 6
  misc_feature: MA Experiment 108527 PARAMETER Experiment Name: Zm_5mM_NO_P Parameter: Tissue Value: Aerial
  misc_feature: MA Experiment 108527 PARAMETER Experiment Name: Zm_5mM_NO_P Parameter: Treatment Value: 5mM NO vs. No Treatment
  misc_feature: MA Experiment ID: 108544 Result: Up-regulated in Transcription
  misc_feature: MA Experiment ID: 108559 Result: Down-regulated in Transcription
  misc_feature: MA Experiment 108559 PARAMETER Experiment Name: Zm_5mM_NO_P Parameter: Age (day) Value: 8
  misc_feature: MA Experiment 108559 PARAMETER Experiment Name: Zm_5mM_NO_P Parameter: Organism Value: Zea mays
  misc_feature: MA Experiment 108559 PARAMETER Experiment Name: Zm_5mM_NO_P Parameter: Plant Line Value: 35A19
  misc_feature: MA Experiment 108559 PARAMETER Experiment Name: Zm_5mM_NO_P Parameter: Timepoint (hr) Value: 12
  misc_feature: MA Experiment 108559 PARAMETER Experiment Name: Zm_5mM_NO_P Parameter: Tissue Value: Aerial
  misc_feature: MA Experiment 108559 PARAMETER Experiment Name: Zm_5mM_NO_P Parameter: Treatment Value: 5mM NO vs. No Treatment
  misc_feature: MA Experiment ID: 108689 Result: Up-regulated in Transcription
  misc_feature: MA Experiment 108689 PARAMETER Experiment Name: Zm_Drought_Roots_P Parameter: Age (day) Value: 9
  misc_feature: MA Experiment 108689 PARAMETER Experiment Name: Zm_Drought_Roots_P Parameter: Organism Value: Zea mays
  misc_feature: MA Experiment 108689 PARAMETER Experiment Name: Zm_Drought_Roots_P Parameter: Plant Line Value: 35A19
  misc_feature: MA Experiment 108689 PARAMETER Experiment Name: Zm_Drought_Roots_P Parameter: Timepoint (hr) Value: 24
  misc_feature: MA Experiment 108689 PARAMETER Experiment Name: Zm_Drought_Roots_P Parameter: Tissue Value: Roots
  misc_feature: MA Experiment 108689 PARAMETER Experiment Name: Zm_Drought_Roots_P Parameter: Treatment Value: Drought vs. No Drought
  misc_feature: MA Experiment ID: 20000487 Result: Down-regulated in Transcription
  misc_feature: MA Experiment 20000487 PARAMETER Experiment Name: Zm_50mM_NH4NO3_L_to_H_P Parameter: Organism Value: Zea mays
  misc_feature: MA Experiment 20000487 PARAMETER Experiment Name: Zm_50mM_NH4NO3_L_to_H_P Parameter: Timepoint (hr) Value: 4
  misc_feature: MA Experiment 20000487 PARAMETER Experiment Name: Zm_50mM_NH4NO3_L_to_H_P Parameter: Tissue Value: Leaves
  misc_feature: MA Experiment 20000487 PARAMETER Experiment Name: Zm_50mM_NH4NO3_L_to_H_P Parameter: Treatment Value: 50mM NH4NO3 vs. 100mM Mannitol
acacttcgatcagtgtcgccaacaagtagctagacgatgagcagaggagctgagaagaagaattggccgccgtctcggtcttcttcctcctcctcttcttcaccgacgtcgtcgtgggtcgccagcaggtccatggcggggttctaccgctacccgtcctccactcgcacctccggcaaggacagaacccagccgccgccagcaccagctgcaccgacacaacaacaaggcgacaagagcagcagcaagaagaagaggaggagtatcagcatcggccggagcatcacgtgcgcgggctccatctgcagtaccaaggagagctcggtcatgagccgggaccgccgcggcgcctccagcaggtcgctcagggcaccctacgtcgacgtcgacgtcaacgacgcctctgccgccgccatctccgccacgtcgtccttcaactcggagaccaccgtggcgtcgacgaccaccgtcacgtcctcgtcctcgtcctcgtcctcgtcctcgtccgtcgggacctccttcaggggcgtgcacatcaggaagctctccggctgctacgagtgccactccgtcttcgaccccaggagcttcggcgccgccgccttcccctgcgcggactgcgacgaggtgttcgccaaggcagagtcgctacagctccacagggcaaccaggcatgcagttttggagctgggccccgaggacacgagcaggaacatcgtggagatcatcttccagtccagctggccggccgggaagcagcagcaggcgccggtctgcaagatcgagcgggtactcaaggtgcagagcagcgacaggaccctggagaggttcgagcagtacaaggagagcgtcagggagagggcgagcagcgaccggggcaggaagaacaaccctcggtgcgtcgccgacggcaacgagctcctcaggttccactgcaccaccttcacctgctccctcggcctcgccggcagcaccgcgctgtgccgggcgccgtgcaagctgtgcgccatcgtcagggacggtttcagggtcgacgacgacggcaagattgcgacgatgggcaccagcgggcgcgcccacgacatggcgcaggtgctgtcggagtcggacggtgacaagagagcaatgctcgtgtgcagggtcgtcgcggggagggtgaagaagaaggccagcgatgagaagaagccttcagaggactctggctttgactctgtcagccccagcacagaaggcgtctgctccgatttggatcaactctttgtcttcaatcagagagctatactgccctgctttgtagtcatatacagtggctattagggttgtagggacctaagttataacttattagctagttttgtttcctttcactgtcacctgctcctttaatccagttcttcttttttttatgggccagaagtgcaagttttggcg

SEQ ID NO: 8847 - protein, 426 aa, Zea mays subsp. mays
  peptide (1)..(426): Ceres Seq. ID no. 12407604
  misc_feature (16)..(161): Pfam Name: Equine herpesvirus glycoprotein gp2 Pfam Description: Equine herpesvirus glycoprotein gp2
  misc_feature (128)..(423): Homolog of NCBI NO: 5777616 NR Description: CAA30374.1 protein [Oryza sativa]
  misc_feature (128)..(423): Homolog of NCBI NO: 38345520 NR Description: OSJNBa0039K24.23 [Oryza sativa (japonica
  misc_feature (38)..(423): Homolog of NCBI NO: 9802582 NR Description: T2E6.3 [Arabidopsis thaliana]
  misc_feature (38)..(426): Homolog of NCBI NO: 15220992 NR Description: hypothetical protein; protein id: At1g47860.1
  misc_feature (215)..(423): Homolog of NCBI NO: 38346001 NR Description: OSJNBa0073L13.11 [Oryza sativa (japonica
  misc_feature (11)..(215): Homolog of NCBI NO: 38346001 NR Description: OSJNBa0073L13.11 [Oryza sativa (japonica
  misc_feature (66)..(396): Homolog of NCBI NO: 15222333 NR Description: unknown protein; protein id: At1g75710.1 thaliana] >gi|9369383|gb|AAF87132.1|AC006434_28 F10A5.10
  misc_feature (190)..(424): Homolog of NCBI NO: 18402112 NR Description: expressed protein; protein id: At2g29660.1, by cDNA: 106148. [Arabidopsis thaliana] >gi|25408039|pir||A84699
  misc_feature (94)..(422): Homolog of NCBI NO: 18416951 NR Description: expressed protein; protein id: At4g27240.1, by cDNA: 2944. [Arabidopsis thaliana] >gi|7486806|pir||T05748
  misc_feature (183)..(422): Homolog of NCBI NO: 34910152 NR Description: B1070A12.19 [Oryza sativa (japonica
MSRGAEKKNWPPSRSSSSSSSSPTSSWVASRSMAGFYRYPSSTRTSGKDRTQPPPAPAAPTQQQGDKSSSKKKRRSISIGRSITCAGSICSTKESSVMSRDRRGASSRSLRAPYVDVDVNDASAAAISATSSFNSETTVASTTTVTSSSSSSSSSSSVGTSFRGVHIRKLSGCYECHSVFDPRSFGAAAFPCADCDEVFAKAESLQLHRATRHAVLELGPEDTSRNIVEIIFQSSWPAGKQQQAPVCKIERVLKVQSSDRTLERFEQYKESVRERASSDRGRKNNPRCVADGNELLRFHCTTFTCSLGLAGSTALCRAPCKLCAIVRDGFRVDDDGKIATMGTSGRAHDMAQVLSESDGDKRAMLVCRVVAGRVKKKASDEKKPSEDSGFDSVSPSTEGVCSDLDQLFVFNQRAILPCFVVIYSGY

SEQ ID NO: 8848 - protein, 394 aa, Zea mays subsp. mays
  peptide (1)..(394): Ceres Seq. ID no. 12407605
  misc_feature (1)..(129): Pfam Name: Equine herpesvirus glycoprotein gp2 Pfam Description: Equine herpesvirus glycoprotein gp2
  misc_feature (96)..(391): Homolog of NCBI NO: 5777616 NR Description: CAA30374.1 protein [Oryza sativa]
  misc_feature (96)..(391): Homolog of NCBI NO: 38345520 NR Description: OSJNBa0039K24.23 [Oryza sativa (japonica
  misc_feature (6)..(391): Homolog of NCBI NO: 9802582 NR Description: T2E6.3 [Arabidopsis thaliana]
  misc_feature (6)..(394): Homolog of NCBI NO: 15220992 NR Description: hypothetical protein; protein id: At1g47860.1
  misc_feature (183)..(391): Homolog of NCBI NO: 38346001 NR Description: OSJNBa0073L13.11 [Oryza sativa (japonica
  misc_feature (1)..(183): Homolog of NCBI NO: 38346001 NR Description: OSJNBa0073L13.11 [Oryza sativa (japonica
  misc_feature (34)..(364): Homolog of NCBI NO: 15222333 NR Description: unknown protein; protein id: At1g75710.1 thaliana] >gi|9369383|gb|AAF87132.1|AC006434_28 F10A5.10
  misc_feature (158)..(392): Homolog of NCBI NO: 18402112 NR Description: expressed protein; protein id: At2g29660.1, by cDNA: 106148. [Arabidopsis thaliana] >gi|25408039|pir||A84699
  misc_feature (62)..(390): Homolog of NCBI NO: 18416951 NR Description: expressed protein; protein id: At4g27240.1, by cDNA: 2944. [Arabidopsis thaliana] >gi|7486806|pir||T05748
  misc_feature (151)..(390): Homolog of NCBI NO: 34910152 NR Description: B1070A12.19 [Oryza sativa (japonica
MAGFYRYPSSTRTSGKDRTQPPPAPAAPTQQQGDKSSSKKKRRSISIGRSITCAGSICSTKESSVMSRDRRGASSRSLRAPYVDVDVNDASAAAISATSSFNSETTVASTTTVTSSSSSSSSSSSVGTSFRGVHIRKLSGCYECHSVFDPRSFGAAAFPCADCDEVFAKAESLQLHRATRHAVLELGPEDTSRNIVEIIFQSSWPAGKQQQAPVCKIERVLKVQSSDRTLERFEQYKESVRERASSDRGRKNNPRCVADGNELLRFHCTTFTCSLGLAGSTALCRAPCKLCAIVRDGFRVDDDGKIATMGTSGRAHDMAQVLSESDGDKRAMLVCRVVAGRVKKKASDEKKPSEDSGFDSVSPSTEGVCSDLDQLFVFNQRAILPCFVVIYSGY

SEQ ID NO: 8849 - protein, 329 aa, Zea mays subsp. mays
  peptide (1)..(329): Ceres Seq. ID no. 12407606
  misc_feature (1)..(64): Pfam Name: Equine herpesvirus glycoprotein gp2 Pfam Description: Equine herpesvirus glycoprotein gp2
  misc_feature (31)..(326): Homolog of NCBI NO: 5777616 NR Description: CAA30374.1 protein [Oryza sativa]
  misc_feature (31)..(326): Homolog of NCBI NO: 38345520 NR Description: OSJNBa0039K24.23 [Oryza sativa (japonica
  misc_feature (1)..(326): Homolog of NCBI NO: 9802582 NR Description: T2E6.3 [Arabidopsis thaliana]
  misc_feature (1)..(329): Homolog of NCBI NO: 15220992 NR Description: hypothetical protein; protein id: At1g47860.1
  misc_feature (118)..(326): Homolog of NCBI NO: 38346001 NR Description: OSJNBa0073L13.11 [Oryza sativa (japonica
  misc_feature (1)..(118): Homolog of NCBI NO: 38346001 NR Description: OSJNBa0073L13.11 [Oryza sativa (japonica
  misc_feature (1)..(299): Homolog of NCBI NO: 15222333 NR Description: unknown protein; protein id: At1g75710.1 thaliana] >gi|9369383|gb|AAF87132.1|AC006434_28 F10A5.10
  misc_feature (93)..(327): Homolog of NCBI NO: 18402112 NR Description: expressed protein; protein id: At2g29660.1, by cDNA: 106148. [Arabidopsis thaliana] >gi|25408039|pir||A84699
  misc_feature (1)..(325): Homolog of NCBI NO: 18416951 NR Description: expressed protein; protein id: At4g27240.1, by cDNA: 2944. [Arabidopsis thaliana] >gi|7486806|pir||T05748
  misc_feature (86)..(325): Homolog of NCBI NO: 34910152 NR Description: B1070A12.19 [Oryza sativa (japonica
MSRDRRGASSRSLRAPYVDVDVNDASAAAISATSSFNSETTVASTTTVTSSSSSSSSSSSVGTSFRGVHIRKLSGCYECHSVFDPRSFGAAAFPCADCDEVFAKAESLQLHRATRHAVLELGPEDTSRNIVEIIFQSSWPAGKQQQAPVCKIERVLKVQSSDRTLERFEQYKESVRERASSDRGRKNNPRCVADGNELLRFHCTTFTCSLGLAGSTALCRAPCKLCAIVRDGFRVDDDGKIATMGTSGRAHDMAQVLSESDGDKRAMLVCRVVAGRVKKKASDEKKPSEDSGFDSVSPSTEGVCSDLDQLFVFNQRAILPCFVVIYSGY

SEQ ID NO: 8850 - DNA, 2052 bp, Zea mays subsp. mays
  misc_feature (1)..(2052): Ceres Seq. ID no. 12354033
  misc_feature: MA Experiment ID: 108504 Result: Down-regulated in Transcription
  misc_feature: MA Experiment 108504 PARAMETER Experiment Name: Zm_Drought_P Parameter: Age (day) Value: 8
  misc_feature: MA Experiment 108504 PARAMETER Experiment Name: Zm_Drought_P Parameter: Organism Value: Zea mays
  misc_feature: MA Experiment 108504 PARAMETER Experiment Name: Zm_Drought_P Parameter: Plant Line Value: 35A19
  misc_feature: MA Experiment 108504 PARAMETER Experiment Name: Zm_Drought_P Parameter: Timepoint (hr) Value: 12
  misc_feature: MA Experiment 108504 PARAMETER Experiment Name: Zm_Drought_P Parameter: Tissue Value: Aerial
  misc_feature: MA Experiment 108504 PARAMETER Experiment Name: Zm_Drought_P Parameter: Treatment Value: Drought vs. No Drought
  misc_feature: MA Experiment ID: 108535 Result: Down-regulated in Transcription
  misc_feature: MA Experiment 108535 PARAMETER Experiment Name: Zm_Meristem_P Parameter: Age (day) Value: 8
  misc_feature: MA Experiment 108535 PARAMETER Experiment Name: Zm_Meristem_P Parameter: Organism Value: Zea mays
  misc_feature: MA Experiment 108535 PARAMETER Experiment Name: Zm_Meristem_P Parameter: Plant Line Value: 35A19
  misc_feature: MA Experiment 108535 PARAMETER Experiment Name: Zm_Meristem_P Parameter: Tissue Value: Root Meristem vs. Above Root Meristem
  misc_feature: MA Experiment ID: 108543 Result: Down-regulated in Transcription
  misc_feature: MA Experiment ID: 108556 Result: Down-regulated in Transcription
  misc_feature: MA Experiment 108556 PARAMETER Experiment Name: Zm_Drought_P Parameter: Age (day) Value: 9
  misc_feature: MA Experiment 108556 PARAMETER Experiment Name: Zm_Drought_P Parameter: Organism Value: Zea mays
  misc_feature: MA Experiment 108556 PARAMETER Experiment Name: Zm_Drought_P Parameter: Plant Line Value: 35A19
  misc_feature: MA Experiment 108556 PARAMETER Experiment Name: Zm_Drought_P Parameter: Timepoint (hr) Value: 24
  misc_feature: MA Experiment 108556 PARAMETER Experiment Name: Zm_Drought_P Parameter: Tissue Value: Aerial
  misc_feature: MA Experiment 108556 PARAMETER Experiment Name: Zm_Drought_P Parameter: Treatment Value: Drought vs. No Drought
  misc_feature: MA Experiment ID: 108687 Result: Up-regulated in Transcription
  misc_feature: MA Experiment 108687 PARAMETER Experiment Name: Zm_Embryos-Flowers__P Parameter: Tissue Value: Embryo vs. Aerial+
  misc_feature: MA Experiment ID: 108688 Result: Down-regulated in Transcription
  misc_feature: MA Experiment 108688 PARAMETER Experiment Name: Zm_Embryos-Flowers__P Parameter: Tissue Value: Immature Flowers vs. Aerial+
  misc_feature: MA Experiment ID: 108689 Result: Down-regulated in Transcription
  misc_feature: MA Experiment 108689 PARAMETER Experiment Name: Zm_Drought_Roots_P Parameter: Age (day) Value: 9
  misc_feature: MA Experiment 108689 PARAMETER Experiment Name: Zm_Drought_Roots_P Parameter: Organism Value: Zea mays
  misc_feature: MA Experiment 108689 PARAMETER Experiment Name: Zm_Drought_Roots_P Parameter: Plant Line Value: 35A19
  misc_feature: MA Experiment 108689 PARAMETER Experiment Name: Zm_Drought_Roots_P Parameter: Timepoint (hr) Value: 24
  misc_feature: MA Experiment 108689 PARAMETER Experiment Name: Zm_Drought_Roots_P Parameter: Tissue Value: Roots
  misc_feature: MA Experiment 108689 PARAMETER Experiment Name: Zm_Drought_Roots_P Parameter: Treatment Value: Drought vs. No Drought
  misc_feature: MA Experiment ID: 20000477 Result: Down-regulated in Transcription
  misc_feature: MA Experiment 20000477 PARAMETER Experiment Name: Zm_5mM_SA_P Parameter: Age (day) Value: 10
  misc_feature: MA Experiment 20000477 PARAMETER Experiment Name: Zm_5mM_SA_P Parameter: Organism Value: Zea mays
  misc_feature: MA Experiment 20000477 PARAMETER Experiment Name: Zm_5mM_SA_P Parameter: Plant Line Value: 35A19
  misc_feature: MA Experiment 20000477 PARAMETER Experiment Name: Zm_5mM_SA_P Parameter: Timepoint (hr) Value: 48
  misc_feature: MA Experiment 20000477 PARAMETER Experiment Name: Zm_5mM_SA_P Parameter: Tissue Value: Aerial
  misc_feature: MA Experiment 20000477 PARAMETER Experiment Name: Zm_5mM_SA_P Parameter: Treatment Value: 5mM SA vs. No Treatment
agactctctctcgcgtcgggcacgcagtcgcacaagtagtgaactcaaacgggatctcctgctctgcctccctcgtcttcctctgcccgtgcgcgtttcagagcacgtacggagagggcgagcagcagcttgcggccgggcaccatcatggaggacgtcgcgccgggtgcggagccgtgggaggggtacgtggactggaggaaccggccggcgaccaggtcccggcacggcggcatggccgccgcctccttcgtgctcgtggtggaggtgctggagaacctggcgttcctggcgaacgccagcaacctggtgacctacctgatggggttcatgcactactcgccgtcgcagtcggccacggcggtcaccaacttcatgggcacggccttcctgctcgcgctcctcggcggcttcctctccgacgccttcttcaccacctacaccatctacatcgccagcgccttcatcgagctcatggggctggtgatcctgacggtccaggcgcggacgcagtcgctgatgccaccgcagtgcgccaagccagcggctccgtgcgagcccgtgtcgggcgccaagaaggcgatgctgttcgcggggctgtacctcacggcgctgggcgtgggcgggatcaagggctccctcccctcccacggcgcggagcagttcgacgagcatgcggcgcgggggcgcaagggccgctccaccttcttcaactacttcgtcttctgcctctcctgcggcgccctcgtcgccgtcaccttcgccgtctgggtcgaggacaacaagggctggcagtgggggttcggcatctccaccatcgccatcctgctctccatcccgctcttcgtcgccggctccagccgctaccggaacaaggtgcccacggggagcccgctcaccaccatcgccaaggtcctcatcgccgccgcgctcgcgcgccgcggctgcgcgccgagctccagcaacggcgccgtcatcgaccgcgcgcccagccccacggggagcaccgacatgaaagagtactgcaagcccggggacatggaggagatcacggtctccggcgccgcgatcgtggcgtcgtcgcccgccgagccgtcccgcgaactcgcgttcctcaaccgcgcggtgcagtgccagccgccgcggcacggccgcctggcgtgcacggtccaggaggtggaggacgtcaagatcgtgctcatggtgctgcccatcttcttgtccaccatcatgctcaactgctgcctggcgcagctgtccaccttctcggtcgagcaagcggccaccatggacacgcgcgtgggcagcctcaccgtgccgccggcgtcgctccccgtcttccctgtcacgttcatcatcatcctcgcgcccgtctacgatcacgtcatcgtcccgttcgcgcgccgcgtcacggggaccgagatgggcatcacacacctccagcgtatcggcaccgggctggtgctgtccatcgtcgcgatggccgtggccgccgtcgtcgaggtcaagcgcaagaacgtggcgtcccacaacgggatgctggactccaccaagccgctgcccatcaccttcttctggatcgcgttccagtacctgttcctgggttccgcggacctgttcacgttggcggggctgctcgagttcttcttcagcgaggcgccggcgcggatgagatccctggcgacgtcgctgtcgtgggcgtcgctggcgctgggttattacctcagctcggtgctggtgtccatcgtcaacagcgtgacagggcgcggcgaccaccggccgtggctgcagggtgccagcctgaaccattaccacctcgagaggttctactgggtcatgtgcgtgctcagcaccatcaactacctcttcttcctgttcttggccgtcaggtacaagtacagaaacgcgggggtcatcaaaggctaatgccatcttcatatggccagtcggcgttgccattaatccccgtggtcttgagcaatgctgggtgtaactaactgtttatataggtggaaaacagagggttgaagaaaatgtaggttaattttctgc

SEQ ID NO: 8851 - protein, 664 aa, Zea mays subsp. mays
  peptide (1)..(664): Ceres Seq. ID no. 12354034
TLSRVGHAVAQVVNSNGISCSASLVFLCPCAFQSTYGEGEQQLAAGHHHGGRRAGCGAVGGVRGLEEPAGDQVPARRHGRRLLRARGGGAGEPGVPGERQQPGDLPDGVHALLAVAVGHGGHQLHGHGLPARAPRRLPLRRLLHHLHHLHRQRLHRAHGAGDPDGPGADAVADATAVRQASGSVRARVGRQEGDAVRGAVPHGAGRGRDQGLPPLPRRGAVRRACGAGAQGPLHLLQLLRLLPLLRRPRRRHLRRLGRGQQGLAVGVRHLHHRHPALHPALRRRLQPLPEQGAHGEPAHHHRQGPHRRRARAPRLRAELQQRRRHRPRAQPHGEHRHERVLQARGHGGDHGLRRRDRGVVARRAVPRTRVPQPRGAVPAAAARPPGVHGPGGGGRQDRAHGAAHLLVHHHAQLLPGAAVHLLGRASGHHGHARGQPHRAAGVAPRLPCHVHHHPRARLRSRHRPVRAPRHGDRDGHHTPPAYRHRAGAVHRRDGRGRRRRGQAQERGVPQRDAGLHQAAAHHLLLDRVPVPVPGFRGPVHVGGAARVLLQRGAGADEIPGDVAVVGVAGAGLLPQLGAGVHRQQRDRARRPPAVAAGCQPEPLPPREVLLGHVRAQHHQLPLLPVLGRQVQVQKRGGHQRLMPSSYGQSALPLIPVVLSNAGCN

SEQ ID NO: 8852 - protein, 592 aa, Zea mays subsp. mays
  peptide (1)..(592): Ceres Seq. ID no. 12354035
  misc_feature (98)..(520): Pfam Name: POT family Pfam Description: POT family
  misc_feature (1)..(588): Homolog of NCBI NO: 25404844 NR Description: nitrate transporter (NTL1), 53025-56402 - Arabidopsis thaliana >gi|12325224|gb|AAG52554.1|AC010675_2
  misc_feature (11)..(588): Homolog of NCBI NO: 18409382 NR Description: nitrate transporter (NTL1); protein id: supported by cDNA: gi_17064753, supported by cDNA: gi_3377516 thaliana] >gi|23397158|gb|AAN31862.1| putative nitrate
  misc_feature (11)..(588): Homolog of NCBI NO: 17064754 NR Description: nitrate transporter (NTL1) [Arabidopsis thaliana]
  misc_feature (11)..(588): Homolog of NCBI NO: 11358579 NR Description: nitrate transporter NTL1 [validated] - thaliana >gi|3377517|gb|AAC28086.1| nitrate transporter NTL1
  misc_feature (312)..(590): Homolog of NCBI NO: 22329803 NR Description: nitrate transporter, putative; protein id: supported by cDNA: gi_18175947, supported by cDNA: gi_20465362 thaliana] >gi|18175948|gb|AAL59956.1| putative nitrate
  misc_feature (312)..(590): Homolog of NCBI NO: 25403281 NR Description: protein T7N9.10 [imported] - Arabidopsis thaliana
  misc_feature (11)..(279): Homolog of NCBI NO: 22329803 NR Description: nitrate transporter, putative; protein id: supported by cDNA: gi_18175947, supported by cDNA: gi_20465362 thaliana] >gi|18175948|gb|AAL59956.1| putative nitrate
  misc_feature (11)..(279): Homolog of NCBI NO: 25403281 NR Description: protein T7N9.10 [imported] - Arabidopsis thaliana
  misc_feature (321)..(588): Homolog of NCBI NO: 10177451 NR Description: nitrate transporter NTL1 [Arabidopsis thaliana]
  misc_feature (321)..(588): Homolog of NCBI NO: 15241938 NR Description: nitrate transporter NTL1 - like protein; protein
MEDVAPGAEPWEGYVDWRNRPATRSRHGGMAAASFVLVVEVLENLAFLANASNLVTYLMGFMHYSPSQSATAVTNFMGTAFLLALLGGFLSDAFFTTYTIYIASAFIELMGLVILTVQARTQSLMPPQCAKPAAPCEPVSGAKKAMLFAGLYLTALGVGGIKGSLPSHGAEQFDEHAARGRKGRSTFFNYFVFCLSCGALVAVTFAVWVEDNKGWQWGFGISTIAILLSIPLFVAGSSRYRNKVPTGSPLTTIAKVLIAAALARRGCAPSSSNGAVIDRAPSPTGSTDMKEYCKPGDMEEITVSGAAIVASSPAEPSRELAFLNRAVQCQPPRHGRLACTVQEVEDVKIVLMVLPIFLSTIMLNCCLAQLSTFSVEQAATMDTRVGSLTVPPASLPVFPVTFIIILAPVYDHVIVPFARRVTGTEMGITHLQRIGTGLVLSIVAMAVAAVVEVKRKNVASHNGMLDSTKPLPITFFWIAFQYLFLGSADLFTLAGLLEFFFSEAPARMRSLATSLSWASLALGYYLSSVLVSIVNSVTGRGDHRPWLQGASLNHYHLERFYWVMCVLSTINYLFFLFLAVRYKYRNAGVIKG

SEQ ID NO: 8853 - protein, 563 aa, Zea mays subsp. mays
  peptide (1)..(563): Ceres Seq. ID no. 12354036
  misc_feature (69)..(491): Pfam Name: POT family Pfam Description: POT family
  misc_feature (1)..(559): Homolog of NCBI NO: 25404844 NR Description: nitrate transporter (NTL1), 53025-56402 - Arabidopsis thaliana >gi|12325224|gb|AAG52554.1|AC010675_2
  misc_feature (1)..(559): Homolog of NCBI NO: 18409382 NR Description: nitrate transporter (NTL1); protein id: supported by cDNA: gi_17064753, supported by cDNA: gi_3377516 thaliana] >gi|23397158|gb|AAN31862.1| putative nitrate
  misc_feature (1)..(559): Homolog of NCBI NO: 17064754 NR Description: nitrate transporter (NTL1) [Arabidopsis thaliana]
  misc_feature (1)..(559): Homolog of NCBI NO: 11358579 NR Description: nitrate transporter NTL1 [validated] - thaliana >gi|3377517|gb|AAC28086.1| nitrate transporter NTL1
  misc_feature (283)..(561): Homolog of NCBI NO: 22329803 NR Description: nitrate transporter, putative; protein id: supported by cDNA: gi_18175947, supported by cDNA: gi_20465362 thaliana] >gi|18175948|gb|AAL59956.1| putative nitrate
  misc_feature (283)..(561): Homolog of NCBI NO: 25403281 NR Description: protein T7N9.10 [imported] - Arabidopsis thaliana
  misc_feature (1)..(250): Homolog of NCBI NO: 22329803 NR Description: nitrate transporter, putative; protein id: supported by cDNA: gi_18175947, supported by cDNA: gi_20465362 thaliana] >gi|18175948|gb|AAL59956.1| putative nitrate
  misc_feature (1)..(250): Homolog of NCBI NO: 25403281 NR Description: protein T7N9.10 [imported] - Arabidopsis thaliana
  misc_feature (292)..(559): Homolog of NCBI NO: 10177451 NR Description: nitrate transporter NTL1 [Arabidopsis thaliana]
  misc_feature (292)..(559): Homolog of NCBI NO: 15241938 NR Description: nitrate transporter NTL1 - like protein; protein
MAAASFVLVVEVLENLAFLANASNLVTYLMGFMHYSPSQSATAVTNFMGTAFLLALLGGFLSDAFFTTYTIYIASAFIELMGLVILTVQARTQSLMPPQCAKPAAPCEPVSGAKKAMLFAGLYLTALGVGGIKGSLPSHGAEQFDEHAARGRKGRSTFFNYFVFCLSCGALVAVTFAVWVEDNKGWQWGFGISTIAILLSIPLFVAGSSRYRNKVPTGSPLTTIAKVLIAAALARRGCAPSSSNGAVIDRAPSPTGSTDMKEYCKPGDMEEITVSGAAIVASSPAEPSRELAFLNRAVQCQPPRHGRLACTVQEVEDVKIVLMVLPIFLSTIMLNCCLAQLSTFSVEQAATMDTRVGSLTVPPASLPVFPVTFIIILAPVYDHVIVPFARRVTGTEMGITHLQRIGTGLVLSIVAMAVAAVVEVKRKNVASHNGMLDSTKPLPITFFWIAFQYLFLGSADLFTLAGLLEFFFSEAPARMRSLATSLSWASLALGYYLSSVLVSIVNSVTGRGDHRPWLQGASLNHYHLERFYWVMCVLSTINYLFFLFLAVRYKYRNAGVIKG

SEQ ID NO: 8854 - DNA, 1838 bp, Zea mays subsp. mays
  misc_feature (1)..(1838): Ceres Seq. ID no. 12372855
  misc_feature: MA Experiment ID: 108535 Result: Down-regulated in Transcription
  misc_feature: MA Experiment 108535 PARAMETER Experiment Name: Zm_Meristem_P Parameter: Age (day) Value: 8
  misc_feature: MA Experiment 108535 PARAMETER Experiment Name: Zm_Meristem_P Parameter: Organism Value: Zea mays
  misc_feature: MA Experiment 108535 PARAMETER Experiment Name: Zm_Meristem_P Parameter: Plant Line Value: 35A19
  misc_feature: MA Experiment 108535 PARAMETER Experiment Name: Zm_Meristem_P Parameter: Tissue Value: Root Meristem vs. Above Root Meristem
  misc_feature: MA Experiment ID: 108687 Result: Up-regulated in Transcription
  misc_feature: MA Experiment 108687 PARAMETER Experiment Name: Zm_Embryos-Flowers__P Parameter: Tissue Value: Embryo vs. Aerial+
  misc_feature: MA Experiment ID: 20000534 Result: Down-regulated in Transcription
  misc_feature: MA Experiment 20000534 PARAMETER Experiment Name: Zm_Hybrid_Pollen_P Parameter: Age (day) Value: 8
  misc_feature: MA Experiment 20000534 PARAMETER Experiment Name: Zm_Hybrid_Pollen_P Parameter: Organism Value: Zea mays
  misc_feature: MA Experiment 20000534 PARAMETER Experiment Name: Zm_Hybrid_Pollen_P Parameter: Plant Line Value: 35A19
  misc_feature: MA Experiment 20000534 PARAMETER Experiment Name: Zm_Hybrid_Pollen_P Parameter: Tissue Value: Pollen vs. Aerial
accaacccgacgcaaagccgccggctttccccgatggcgacgacgatgtcagtttcggcggtgtccccgcccgccgcggctgtcacgcggccgcggacgatggtctgcgtgccggcgacggcgcgggcgccgcgggagatggcggcggagctggccgccgccgccgcgctcggcgccgacgtggcggagcttcgcctcgactgcctcgccgggttcacgccgcgcagggacctgcccgtcatcctcgccaagccccgcccgctccccgctctcgtcacctacaggcccaagtgggaaggaggcgaatacgaaggcgatgacgattcacggtttgaggctctgctattagcaatggagctgggagctgaatatgtggatgtcgagcttaaggtggctgacaaatttatgaaacttatttctgggaggaaacctgataactgtaaacttatagtttcatcccacaactatgagaccactccatcgtccgaggaacttgcaaatttggtggctcagattcaagcaacgggggctgatatcgtgaaaatagctacaaccgctactgaaattgttgatgtggcaaaaatgtttcaaatacttgttcactgccaggtgccaatcattgggctgctgatgaacgacagaggttttatttctcgggttctttgcccaaaatatggtggattccttacttttgggtcactcaagaaaggaaaagagtctgcacctgcacagccaactgctgcagacttgataaatctgtacaatattaggcagatagggccagacactaaggtctttggtataattggtaaaccagttggccatagcaaaagcccaattttgcataatgaagctttcagatcagtgggtttcaacgctgtgtatgttccatttttggtggatgacttggctaaatttcttgatacatactcttcaccagactttgctggcttcagttgcacaattccacacaaagaagctgctgttaggtgctgtgacgaggtcgatcccattgccagggacattggagctgttaacacaattgttagaagacctgatggaaagcttgttggctataatactgactatgttggtgctatatctgctattgaggatggaataaaagcatcagaatcagaaccaacagatccagacaaatcaccactggctggaaggctttttgttgttataggggctggtggtgcgggaaaagcactagcatatggggcaaaagagaaaggagcaagagttgtaattgcaaaccgtacctttgcacgagcacaagaacttgccaacttaattggtgggcctgcattgactcttgcggatttggaaaactaccatccagaggaagggatgattcttgcaaatacaacagccattggaatgcatccaaatgtgaatgaaactcctctatctaagcaagcactcagatcttatgctgttgtgtttgatgcggtctacacaccaaaagagaccagacttctccgagaagctgcagaatgtggagccacagttgttagtggtctggagatgtttatacggcaagctatgggccagtttgagcatttcacgggcatgccagtggatgattacaaattccgagcaattgcaagttcattggacaatcctaacaccatgaagcctcgtctgtgagagattcatccatgcccacaaacttccttgtttttcctttttagattcggattcagtgatcagtttgcctctcagccattgtaaattaatttgatgttccgagctgaaacattttggtgtgccttatttgtatcagcatgaacagcagtgggtttgaatcagtctcttcatatttgcgttcc

SEQ ID NO: 8855 - protein, 551 aa, Zea mays subsp. mays
  peptide (1)..(551): Ceres Seq. ID no. 12372856
  misc_feature (281)..(526): Pfam Name: Shikimate / quinate 5-dehydrogenase Pfam Description: Shikimate / quinate 5-dehydrogenase
  misc_feature (94)..(539): Homolog of NCBI NO: 34914824 NR Description: putative 3-dehydroquinate dehydratase [Oryza
  misc_feature (33)..(95): Homolog of NCBI NO: 34914824 NR Description: putative 3-dehydroquinate dehydratase [Oryza
  misc_feature (33)..(525): Homolog of NCBI NO: 34914828 NR Description: putative 3-dehydroquinate dehydratase / shikimate
  misc_feature (28)..(528): Homolog of NCBI NO: 15230703 NR Description: dehydroquinate dehydratase/shikimate putative; protein id: At3g06350.1 [Arabidopsis thaliana] putative dehydroquinase shikimate dehydrogenase [Arabidopsis
  misc_feature (96)..(540): Homolog of NCBI NO: 7436862 NR Description: 3-dehydroquinate dehydratase (EC 4.2.1.10) /
  misc_feature (27)..(94): Homolog of NCBI NO: 7436862 NR Description: 3-dehydroquinate dehydratase (EC 4.2.1.10) /
  misc_feature (27)..(527): Homolog of NCBI NO: 629688 NR Description: 3-dehydroquinate dehydratase (EC 4.2.1.10) /
  misc_feature (33)..(352): Homolog of NCBI NO: 7488788 NR Description: 3-dehydroquinate dehydratase (EC 4.2.1.10) /
  misc_feature (264)..(551): Homolog of NCBI NO: 21402380 NR Description: Shikimate_DH, Shikimate / quinate 5-dehydrogenase
  misc_feature (264)..(526): Homolog of NCBI NO: 30022412 NR Description: Shikimate 5-dehydrogenase [Bacillus cereus ATCC
TNPTQSRRLSPMATTMSVSAVSPPAAAVTRPRTMVCVPATARAPREMAAELAAAAALGADVAELRLDCLAGFTPRRDLPVILAKPRPLPALVTYRPKWEGGEYEGDDDSRFEALLLAMELGAEYVDVELKVADKFMKLISGRKPDNCKLIVSSHNYETTPSSEELANLVAQIQATGADIVKIATTATEIVDVAKMFQILVHCQVPIIGLLMNDRGFISRVLCPKYGGFLTFGSLKKGKESAPAQPTAADLINLYNIRQIGPDTKVFGIIGKPVGHSKSPILHNEAFRSVGFNAVYVPFLVDDLAKFLDTYSSPDFAGFSCTIPHKEAAVRCCDEVDPIARDIGAVNTIVRRPDGKLVGYNTDYVGAISAIEDGIKASESEPTDPDKSPLAGRLFVVIGAGGAGKALAYGAKEKGARVVIANRTFARAQELANLIGGPALTLADLENYHPEEGMILANTTAIGMHPNVNETPLSKQALRSYAVVFDAVYTPKETRLLREAAECGATVVSGLEMFIRQAMGQFEHFTGMPVDDYKFRAIASSLDNPNTMKPRL

SEQ ID NO: 8856 - protein, 540 aa, Zea mays subsp. mays
  peptide (1)..(540): Ceres Seq. ID no. 12372857
  misc_feature (270)..(515): Pfam Name: Shikimate / quinate 5-dehydrogenase Pfam Description: Shikimate / quinate 5-dehydrogenase
  misc_feature (83)..(528): Homolog of NCBI NO: 34914824 NR Description: putative 3-dehydroquinate dehydratase [Oryza
  misc_feature (22)..(84): Homolog of NCBI NO: 34914824 NR Description: putative 3-dehydroquinate dehydratase [Oryza
  misc_feature (22)..(514): Homolog of NCBI NO: 34914828 NR Description: putative 3-dehydroquinate dehydratase / shikimate
  misc_feature (17)..(517): Homolog of NCBI NO: 15230703 NR Description: dehydroquinate dehydratase/shikimate putative; protein id: At3g06350.1 [Arabidopsis thaliana] putative dehydroquinase shikimate dehydrogenase [Arabidopsis
  misc_feature (85)..(529): Homolog of NCBI NO: 7436862 NR Description: 3-dehydroquinate dehydratase (EC 4.2.1.10) /
  misc_feature (16)..(83): Homolog of NCBI NO: 7436862 NR Description: 3-dehydroquinate dehydratase (EC 4.2.1.10) /
  misc_feature (16)..(516): Homolog of NCBI NO: 629688 NR Description: 3-dehydroquinate dehydratase (EC 4.2.1.10) /
  misc_feature (22)..(341): Homolog of NCBI NO: 7488788 NR Description: 3-dehydroquinate dehydratase (EC 4.2.1.10) /
  misc_feature (253)..(540): Homolog of NCBI NO: 21402380 NR Description: Shikimate_DH, Shikimate / quinate 5-dehydrogenase
  misc_feature (253)..(515): Homolog of NCBI NO: 30022412 NR Description: Shikimate 5-dehydrogenase [Bacillus cereus ATCC
MATTMSVSAVSPPAAAVTRPRTMVCVPATARAPREMAAELAAAAALGADVAELRLDCLAGFTPRRDLPVILAKPRPLPALVTYRPKWEGGEYEGDDDSRFEALLLAMELGAEYVDVELKVADKFMKLISGRKPDNCKLIVSSHNYETTPSSEELANLVAQIQATGADIVKIATTATEIVDVAKMFQILVHCQVPIIGLLMNDRGFISRVLCPKYGGFLTFGSLKKGKESAPAQPTAADLINLYNIRQIGPDTKVFGIIGKPVGHSKSPILHNEAFRSVGFNAVYVPFLVDDLAKFLDTYSSPDFAGFSCTIPHKEAAVRCCDEVDPIARDIGAVNTIVRRPDGKLVGYNTDYVGAISAIEDGIKASESEPTDPDKSPLAGRLFVVIGAGGAGKALAYGAKEKGARVVIANRTFARAQELANLIGGPALTLADLENYHPEEGMILANTTAIGMHPNVNETPLSKQALRSYAVVFDAVYTPKETRLLREAAECGATVVSGLEMFIRQAMGQFEHFTGMPVDDYKFRAIASSLDNPNTMKPRL

SEQ ID NO: 8857 - protein, 536 aa, Zea mays subsp. mays
  peptide (1)..(536): Ceres Seq. ID no. 12372858
  misc_feature (266)..(511): Pfam Name: Shikimate / quinate 5-dehydrogenase Pfam Description: Shikimate / quinate 5-dehydrogenase
  misc_feature (79)..(524): Homolog of NCBI NO: 34914824 NR Description: putative 3-dehydroquinate dehydratase [Oryza
  misc_feature (18)..(80): Homolog of NCBI NO: 34914824 NR Description: putative 3-dehydroquinate dehydratase [Oryza
  misc_feature (18)..(510): Homolog of NCBI NO: 34914828 NR Description: putative 3-dehydroquinate dehydratase / shikimate
  misc_feature (13)..(513): Homolog of NCBI NO: 15230703 NR Description: dehydroquinate dehydratase/shikimate putative; protein id: At3g06350.1 [Arabidopsis thaliana] putative dehydroquinase shikimate dehydrogenase [Arabidopsis
  misc_feature (81)..(525): Homolog of NCBI NO: 7436862 NR Description: 3-dehydroquinate dehydratase (EC 4.2.1.10) /
  misc_feature (12)..(79): Homolog of NCBI NO: 7436862 NR Description: 3-dehydroquinate dehydratase (EC 4.2.1.10) /
  misc_feature (12)..(512): Homolog of NCBI NO: 629688 NR Description: 3-dehydroquinate dehydratase (EC 4.2.1.10) /
  misc_feature (18)..(337): Homolog of NCBI NO: 7488788 NR Description: 3-dehydroquinate dehydratase (EC 4.2.1.10) /
  misc_feature (249)..(536): Homolog of NCBI NO: 21402380 NR Description: Shikimate_DH, Shikimate / quinate 5-dehydrogenase
  misc_feature (249)..(511): Homolog of NCBI NO: 30022412 NR Description: Shikimate 5-dehydrogenase [Bacillus cereus ATCC
MSVSAVSPPAAAVTRPRTMVCVPATARAPREMAAELAAAAALGADVAELRLDCLAGFTPRRDLPVILAKPRPLPALVTYRPKWEGGEYEGDDDSRFEALLLAMELGAEYVDVELKVADKFMKLISGRKPDNCKLIVSSHNYETTPSSEELANLVAQIQATGADIVKIATTATEIVDVAKMFQILVHCQVPIIGLLMNDRGFISRVLCPKYGGFLTFGSLKKGKESAPAQPTAADLINLYNIRQIGPDTKVFGIIGKPVGHSKSPILHNEAFRSVGFNAVYVPFLVDDLAKFLDTYSSPDFAGFSCTIPHKEAAVRCCDEVDPIARDIGAVNTIVRRPDGKLVGYNTDYVGAISAIEDGIKASESEPTDPDKSPLAGRLFVVIGAGGAGKALAYGAKEKGARVVIANRTFARAQELANLIGGPALTLADLENYHPEEGMILANTTAIGMHPNVNETPLSKQALRSYAVVFDAVYTPKETRLLREAAECGATVVSGLEMFIRQAMGQFEHFTGMPVDDYKFRAIASSLDNPNTMKPRL

SEQ ID NO: 8858 - DNA, 1266 bp, Zea mays subsp. mays
  misc_feature (1)..(1266): Ceres Seq. ID no. 12358430
  misc_feature: MA Experiment ID: 108556 Result: Down-regulated in Transcription
  misc_feature: MA Experiment 108556 PARAMETER Experiment Name: Zm_Drought_P Parameter: Age (day) Value: 9
  misc_feature: MA Experiment 108556 PARAMETER Experiment Name: Zm_Drought_P Parameter: Organism Value: Zea mays
  misc_feature: MA Experiment 108556 PARAMETER Experiment Name: Zm_Drought_P Parameter: Plant Line Value: 35A19
  misc_feature: MA Experiment 108556 PARAMETER Experiment Name: Zm_Drought_P Parameter: Timepoint (hr) Value: 24
  misc_feature: MA Experiment 108556 PARAMETER Experiment Name: Zm_Drought_P Parameter: Tissue Value: Aerial
  misc_feature: MA Experiment 108556 PARAMETER Experiment Name: Zm_Drought_P Parameter: Treatment Value: Drought vs. No Drought
gtcaaagcagagtctgcccctccccgcgccgttctttttggttccccactccccagtccccgccgccgccgaaacccgcagatggaggtcgtcgtcgccgcgaagcagaaggcgaagaaacacatacacctcttctactgctcagaatgcgaggagctcgcccttaagatcgccgccagctccgacgccatcgagctccaatccatcaactggcggagcttcgacgacgggttcccgaacctgttcatcaacaaggcgcacgacatccgtgggcagcacgtggcgttcctggcctccttcagctcgccgtcggtcatattcgagcagatctccgtcatcttcgcgctgcccaagctattcattgcctcattcactctcgtgctgcctttcttccccacgggctcattcgagcgcgttgaggaggagggcgatgtcgccaccgcgttcaccctcgcgcgcattctctcgatgatccccaagtcgcgcggcgggcctaccagcgtcgtcatctacgacatccacgcgctccaggagaggttctacttcggggacgacgtcctgccatgcttcgagacagggatcccgctcctgctgcagcgcctccgccagctcccggacgcagaaaatatcaccattgcctttccagatgacggtgcgtggaagcggttccacaagctgttacagcactttccaatgatagtctgtaacaaggttcgggaaggtgacaagagaatagttcgtataaaggaaggactacctgaaggccgtcatgttgttattgttgatgatttagtgcaatctgggggaactcttagagaatgccagaaagttctagctttgcatggcgctgcaaaagtcagtgcttatgtgactcatgctgtgtttcctaagcagtcatatgaacgtttcatggcgtctagttctgctgggccaggtgacagatttgcttacttctggatcacggactcatgcccacacacagtaaaagctattgggcaaagacctccatttgaggttctgagcctcgctggctcaattgcagatgctcttcagatatgagcgtacactggtagatgggcatgggcttggattgttgatgcccaccagattgaaacttgtactatgaggtggaatgctcccgcttttcctaaatgtaagagttggtttccagttcctggaaaagcaaataatgtgtagtaagttaagtacctgaaggttccataaacagccctgtggtttgtaataaaatcaggcattggatactcg

SEQ ID NO: 8859 - protein, 352 aa, Zea mays subsp. mays
  peptide (1)..(352): Ceres Seq. ID no. 12358431
  misc_feature (28)..(352): Homolog of NCBI NO: 22671730 NR Description: phosphoribosyl pyrophosphate synthetase
  misc_feature (29)..(352): Homolog of NCBI NO: 15228027 NR Description: putative ribose phosphate pyrophosphokinase;
  misc_feature (40)..(352): Homolog of NCBI NO: 4902879 NR Description: phosphoribosyl pyrophosphate synthase isozyme 4
  misc_feature (38)..(352): Homolog of NCBI NO: 34910736 NR Description: putative phosphoribosyl pyrophosphate synthase
  misc_feature (20)..(352): Homolog of NCBI NO: 4902877 NR Description: phosphoribosyl pyrophosphate synthase isozyme 3
  misc_feature (37)..(352): Homolog of NCBI NO: 15220191 NR Description: phosphoribosyl diphosphate synthase; protein id: supported by cDNA: gi_16604385, supported by cDNA: gi_19699209 thaliana] >gi|16604386|gb|AAL24199.1| At1g10700/F20B24.13
  misc_feature (37)..(352): Homolog of NCBI NO: 25529012 NR Description: ribose-phosphate diphosphokinase (EC 2.7.6.1)
  misc_feature (37)..(352): Homolog of NCBI NO: 25402614 NR Description: hypothetical protein [imported] - Arabidopsis >gi|4874278|gb|AAD31343.1|AC007354_16 Strong similarity to
  misc_feature (37)..(210): Homolog of NCBI NO: 6573738 NR Description: F20B24.13 [Arabidopsis thaliana]
  misc_feature (210)..(303): Homolog of NCBI NO: 6573738 NR Description: F20B24.13 [Arabidopsis thaliana]
VKAESAPPRAVLFGSPLPSPRRRRNPQMEVVVAAKQKAKKHIHLFYCSECEELALKIAASSDAIELQSINWRSFDDGFPNLFINKAHDIRGQHVAFLASFSSPSVIFEQISVIFALPKLFIASFTLVLPFFPTGSFERVEEEGDVATAFTLARILSMIPKSRGGPTSVVIYDIHALQERFYFGDDVLPCFETGIPLLLQRLRQLPDAENITIAFPDDGAWKRFHKLLQHFPMIVCNKVREGDKRIVRIKEGLPEGRHVVIVDDLVQSGGTLRECQKVLALHGAAKVSAYVTHAVFPKQSYERFMASSSAGPGDRFAYFWITDSCPHTVKAIGQRPPFEVLSLAGSIADALQI

SEQ ID NO: 8860 - protein, 325 aa, Zea mays subsp. mays
  peptide (1)..(325): Ceres Seq. ID no. 12358432
  misc_feature (1)..(325): Homolog of NCBI NO: 22671730 NR Description: phosphoribosyl pyrophosphate synthetase
  misc_feature (2)..(325): Homolog of NCBI NO: 15228027 NR Description: putative ribose phosphate pyrophosphokinase;
  misc_feature (13)..(325): Homolog of NCBI NO: 4902879 NR Description: phosphoribosyl pyrophosphate synthase isozyme 4
  misc_feature (11)..(325): Homolog of NCBI NO: 34910736 NR Description: putative phosphoribosyl pyrophosphate synthase
  misc_feature (1)..(325): Homolog of NCBI NO: 4902877 NR Description: phosphoribosyl pyrophosphate synthase isozyme 3
  misc_feature (10)..(325): Homolog of NCBI NO: 15220191 NR Description: phosphoribosyl diphosphate synthase; protein id: supported by cDNA: gi_16604385, supported by cDNA: gi_19699209 thaliana] >gi|16604386|gb|AAL24199.1| At1g10700/F20B24.13
  misc_feature (10)..(325): Homolog of NCBI NO: 25529012 NR Description: ribose-phosphate diphosphokinase (EC 2.7.6.1)
  misc_feature (10)..(325): Homolog of NCBI NO: 25402614 NR Description: hypothetical protein [imported] - Arabidopsis >gi|4874278|gb|AAD31343.1|AC007354_16 Strong similarity to
  misc_feature (10)..(183): Homolog of NCBI NO: 6573738 NR Description: F20B24.13 [Arabidopsis thaliana]
  misc_feature (183)..(276): Homolog of NCBI NO: 6573738 NR Description: F20B24.13 [Arabidopsis thaliana]
MEVVVAAKQKAKKHIHLFYCSECEELALKIAASSDAIELQSINWRSFDDGFPNLFINKAHDIRGQHVAFLASFSSPSVIFEQISVIFALPKLFIASFTLVLPFFPTGSFERVEEEGDVATAFTLARILSMIPKSRGGPTSVVIYDIHALQERFYFGDDVLPCFETGIPLLLQRLRQLPDAENITIAFPDDGAWKRFHKLLQHFPMIVCNKVREGDKRIVRIKEGLPEGRHVVIVDDLVQSGGTLRECQKVLALHGAAKVSAYVTHAVFPKQSYERFMASSSAGPGDRFAYFWITDSCPHTVKAIGQRPPFEVLSLAGSIADALQI

SEQ ID NO: 8861 - protein, 196 aa, Zea mays subsp. mays
  peptide (1)..(196): Ceres Seq. ID no. 12358433
  misc_feature (1)..(196): Homolog of NCBI NO: 15228027 NR Description: putative ribose phosphate pyrophosphokinase;
  misc_feature (1)..(196): Homolog of NCBI NO: 4902879 NR Description: phosphoribosyl pyrophosphate synthase isozyme 4
  misc_feature (1)..(196): Homolog of NCBI NO: 34910736 NR Description: putative phosphoribosyl pyrophosphate synthase
  misc_feature (1)..(196): Homolog of NCBI NO: 4902877 NR Description: phosphoribosyl pyrophosphate synthase isozyme 3
  misc_feature (1)..(196): Homolog of NCBI NO: 15220191 NR Description: phosphoribosyl diphosphate synthase; protein id: supported by cDNA: gi_16604385, supported by cDNA: gi_19699209 thaliana] >gi|16604386|gb|AAL24199.1| At1g10700/F20B24.13
  misc_feature (1)..(196): Homolog of NCBI NO: 25529012 NR Description: ribose-phosphate diphosphokinase (EC 2.7.6.1)
  misc_feature (1)..(196): Homolog of NCBI NO: 25402614 NR Description: hypothetical protein [imported] - Arabidopsis >gi|4874278|gb|AAD31343.1|AC007354_16 Strong similarity to
  misc_feature (1)..(54): Homolog of NCBI NO: 6573738 NR Description: F20B24.13 [Arabidopsis thaliana]
  misc_feature (54)..(147): Homolog of NCBI NO: 6573738 NR Description: F20B24.13 [Arabidopsis thaliana]
  misc_feature (1)..(196): Homolog of NCBI NO: 22671730 NR Description: phosphoribosyl pyrophosphate synthetase
MIPKSRGGPTSVVIYDIHALQERFYFGDDVLPCFETGIPLLLQRLRQLPDAENITIAFPDDGAWKRFHKLLQHFPMIVCNKVREGDKRIVRIKEGLPEGRHVVIVDDLVQSGGTLRECQKVLALHGAAKVSAYVTHAVFPKQSYERFMASSSAGPGDRFAYFWITDSCPHTVKAIGQRPPFEVLSLAGSIADALQI

SEQ ID NO: 8862 - DNA, 1095 bp, Zea mays subsp. mays
  misc_feature (1)..(1095): Ceres Seq. ID no. 12386489
  misc_feature: MA Experiment ID: 108530 Result: Up-regulated in Transcription
  misc_feature: MA Experiment 108530 PARAMETER Experiment Name: Zm_Imbibed_Seeds_P Parameter: Age (day) Value: 6 vs. 2
  misc_feature: MA Experiment 108530 PARAMETER Experiment Name: Zm_Imbibed_Seeds_P Parameter: Organism Value: Zea mays
  misc_feature: MA Experiment 108530 PARAMETER Experiment Name: Zm_Imbibed_Seeds_P Parameter: Plant Line Value: 35A19
  misc_feature: MA Experiment 108530 PARAMETER Experiment Name: Zm_Imbibed_Seeds_P Parameter: Tissue Value: Aerial vs. Embryo
  misc_feature: MA Experiment ID: 108535 Result: Down-regulated in Transcription
  misc_feature: MA Experiment 108535 PARAMETER Experiment Name: Zm_Meristem_P Parameter: Age (day) Value: 8
  misc_feature: MA Experiment 108535 PARAMETER Experiment Name: Zm_Meristem_P Parameter: Organism Value: Zea mays
  misc_feature: MA Experiment 108535 PARAMETER Experiment Name: Zm_Meristem_P Parameter: Plant Line Value: 35A19
  misc_feature: MA Experiment 108535 PARAMETER Experiment Name: Zm_Meristem_P Parameter: Tissue Value: Root Meristem vs. Above Root Meristem
  misc_feature: MA Experiment ID: 108543 Result: Up-regulated in Transcription
  misc_feature: MA Experiment ID: 108559 Result: Down-regulated in Transcription
  misc_feature: MA Experiment 108559 PARAMETER Experiment Name: Zm_5mM_NO_P Parameter: Age (day) Value: 8
  misc_feature: MA Experiment 108559 PARAMETER Experiment Name: Zm_5mM_NO_P Parameter: Organism Value: Zea mays
  misc_feature: MA Experiment 108559 PARAMETER Experiment Name: Zm_5mM_NO_P Parameter: Plant Line Value: 35A19
  misc_feature: MA Experiment 108559 PARAMETER Experiment Name: Zm_5mM_NO_P Parameter: Timepoint (hr) Value: 12
  misc_feature: MA Experiment 108559 PARAMETER Experiment Name: Zm_5mM_NO_P Parameter: Tissue Value: Aerial
  misc_feature: MA Experiment 108559 PARAMETER Experiment Name: Zm_5mM_NO_P Parameter: Treatment Value: 5mM NO vs. No Treatment
  misc_feature: MA Experiment ID: 20000477 Result: Down-regulated in Transcription
  misc_feature: MA Experiment 20000477 PARAMETER Experiment Name: Zm_5mM_SA_P Parameter: Age (day) Value: 10
  misc_feature: MA Experiment 20000477 PARAMETER Experiment Name: Zm_5mM_SA_P Parameter: Organism Value: Zea mays
  misc_feature: MA Experiment 20000477 PARAMETER Experiment Name: Zm_5mM_SA_P Parameter: Plant Line Value: 35A19
  misc_feature: MA Experiment 20000477 PARAMETER Experiment Name: Zm_5mM_SA_P Parameter: Timepoint (hr) Value: 48
  misc_feature: MA Experiment 20000477 PARAMETER Experiment Name: Zm_5mM_SA_P Parameter: Tissue Value: Aerial
  misc_feature: MA Experiment 20000477 PARAMETER Experiment Name: Zm_5mM_SA_P Parameter: Treatment Value: 5mM SA vs. No Treatment
  misc_feature: MA Experiment ID: 20000534 Result: Down-regulated in Transcription
  misc_feature: MA Experiment 20000534 PARAMETER Experiment Name: Zm_Hybrid_Pollen_P Parameter: Age (day) Value: 8
  misc_feature: MA Experiment 20000534 PARAMETER Experiment Name: Zm_Hybrid_Pollen_P Parameter: Organism Value: Zea mays
  misc_feature: MA Experiment 20000534 PARAMETER Experiment Name: Zm_Hybrid_Pollen_P Parameter: Plant Line Value: 35A19
  misc_feature: MA Experiment 20000534 PARAMETER Experiment Name: Zm_Hybrid_Pollen_P Parameter: Tissue Value: Pollen vs. Aerial
  misc_feature: MA Experiment ID: 20000629 Result: Up-regulated in Transcription
  misc_feature: MA Experiment 20000629 PARAMETER Experiment Name: Zm_Herbicide-Treatments_P Parameter: Timepoint (hr) Value: 12
  misc_feature: MA Experiment 20000629 PARAMETER Experiment Name: Zm_Herbicide-Treatments_P Parameter: Tissue Value: Aerial
  misc_feature: MA Experiment 20000629 PARAMETER Experiment Name: Zm_Herbicide-Treatments_P Parameter: Treatment Value: Trimec vs. No Treatment
  misc_feature: MA Experiment ID: 20000633 Result: Up-regulated in Transcription
  misc_feature: MA Experiment 20000633 PARAMETER Experiment Name: Zm_Herbicide-Treatments_P Parameter: Timepoint (hr) Value: 4
  misc_feature: MA Experiment 20000633 PARAMETER Experiment Name: Zm_Herbicide-Treatments_P Parameter: Tissue Value: Aerial
  misc_feature: MA Experiment 20000633 PARAMETER Experiment Name: Zm_Herbicide-Treatments_P Parameter: Treatment Value: Trimec vs. No Treatment
gcactctttccccttcccttcccttcccactcccaggctcccactctcaccccttccgcctacccacgcaaacggcacacgaactaacagccacctctcacgtcccccaccctctggttcatgtcctgctgctccccatgtcgcctccactcgagctcgactacataggcctctcgccgccggcggcagccgccgccgctgaaaacgacgaactgaagggtactgagctccgcctcgggctgccagggtccgggtcgccggaccgccgtgtcgtggctgccaccgcgaccaccctggacctgctcccggccaagggcgccaagcgcgggttttctgacgaggcgcccccgccatcgcctgttgccgctgccggaaagggaaagaaggtggcagaagaggagtacgacgagaagaaggtggcagcgaccccgcagccggccgccaaagcacaagtggtgggatggccaccagtctgcaactaccgcaagaacacgatgactgccacccagctgaagggcagcaaggaggatggtgatgccaagcagggtcaggggttcctgtacgtcaaggtcagcatggatggcgcgccgtacctcaggaagatcgacctcaagacttacaagaactacaaggacctgtcgaccgcgcttgagaagatgttcagtggcttcagtactggcaaggacggctcatctgagtaccgcaaggatggtgaatatgttctgacttacgaggacaaggatggagattggatgcttgtcggcgacgtaccatgggactgccacatcgtctttcgctccaattgtaggatgttcgccggctcctgccgcaggctcaggatcatgaaaggctcagatgcgattggactcgctccaagggcagccgataagtccaagaaccgcaactagaacggtggcttcctatccttacacagtccggtacgagggaggagatgcagtgacttgtagggatctttacgaaaaccgaaaaagtctactaacagctatgacttgtgagaagaattctggcttatggtattggtctgcactagaatggcttggtacatcgtctatggacaaaacacgctattcgatt

SEQ ID NO: 8863 - protein, 301 aa, Zea mays subsp. mays
  peptide (1)..(301): Ceres Seq. ID no. 12386490
  misc_feature (70)..(293): Pfam Name: AUX/IAA family Pfam Description: AUX/IAA family
  misc_feature (19)..(301): Homolog of NCBI NO: 34904314 NR Description: unnamed protein product [Oryza sativa (japonica group)] >gi|7340910|dbj|BAA92982.1| unnamed protein product
  misc_feature (46)..(297): Homolog of NCBI NO: 34911088 NR Description: OJ1117_G01.11 [Oryza sativa (japonica
  misc_feature (145)..(301): Homolog of NCBI NO: 20257219 NR Description: auxin-regulated protein [Zinnia elegans]
  misc_feature (51)..(138): Homolog of NCBI NO: 20257219 NR Description: auxin-regulated protein [Zinnia elegans]
  misc_feature (136)..(301): Homolog of NCBI NO: 15235556 NR Description: phytochrome-associated protein PAP2; protein id: supported by cDNA: gi_12083213, supported by cDNA: gi_15450724, by cDNA: gi_4093156 [Arabidopsis thaliana]
  misc_feature (44)..(112): Homolog of NCBI NO: 15235556 NR Description: phytochrome-associated protein PAP2; protein id: supported by cDNA: gi_12083213, supported by cDNA: gi_15450724, by cDNA: gi_4093156 [Arabidopsis thaliana]
  misc_feature (145)..(301): Homolog of NCBI NO: 20269051 NR Description: aux/IAA protein [Populus tremula x Populus
  misc_feature (51)..(88): Homolog of NCBI NO: 20269051 NR Description: aux/IAA protein [Populus tremula x Populus
  misc_feature (73)..(301): Homolog of NCBI NO: 30962267 NR Description: Aux/IAA protein [Oryza sativa (indica
  misc_feature (73)..(301): Homolog of NCBI NO: 17154533 NR Description: putative IAA1 protein [Oryza sativa (indica
TLSPSLPFPLPGSHSHPFRLPTQTAHELTATSHVPHPLVHVLLLPMSPPLELDYIGLSPPAAAAAAENDELKGTELRLGLPGSGSPDRRVVAATATTLDLLPAKGAKRGFSDEAPPPSPVAAAGKGKKVAEEEYDEKKVAATPQPAAKAQVVGWPPVCNYRKNTMTATQLKGSKEDGDAKQGQGFLYVKVSMDGAPYLRKIDLKTYKNYKDLSTALEKMFSGFSTGKDGSSEYRKDGEYVLTYEDKDGDWMLVGDVPWDCHIVFRSNCRMFAGSCRRLRIMKGSDAIGLAPRAADKSKNRN

SEQ ID NO: 8864 - protein, 256 aa, Zea mays subsp. mays
  peptide (1)..(256): Ceres Seq. ID no. 12386491
  misc_feature (25)..(248): Pfam Name: AUX/IAA family Pfam Description: AUX/IAA family
  misc_feature (1)..(256): Homolog of NCBI NO: 34904314 NR Description: unnamed protein product [Oryza sativa (japonica group)] >gi|7340910|dbj|BAA92982.1| unnamed protein product
  misc_feature (1)..(252): Homolog of NCBI NO: 34911088 NR Description: OJ1117_G01.11 [Oryza sativa (japonica
  misc_feature (100)..(256): Homolog of NCBI NO: 20257219 NR Description: auxin-regulated protein [Zinnia elegans]
  misc_feature (6)..(93): Homolog of NCBI NO: 20257219 NR Description: auxin-regulated protein [Zinnia elegans]
  misc_feature (91)..(256): Homolog of NCBI NO: 15235556 NR Description: phytochrome-associated protein PAP2; protein id: supported by cDNA: gi_12083213, supported by cDNA: gi_15450724, by cDNA: gi_4093156 [Arabidopsis thaliana]
  misc_feature (1)..(67): Homolog of NCBI NO: 15235556 NR Description: phytochrome-associated protein PAP2; protein id: supported by cDNA: gi_12083213, supported by cDNA: gi_15450724, by cDNA: gi_4093156 [Arabidopsis thaliana]
  misc_feature (100)..(256): Homolog of NCBI NO: 20269051 NR Description: aux/IAA protein [Populus tremula x Populus
  misc_feature (6)..(43): Homolog of NCBI NO: 20269051 NR Description: aux/IAA protein [Populus tremula x Populus
  misc_feature (28)..(256): Homolog of NCBI NO: 30962267 NR Description: Aux/IAA protein [Oryza sativa (indica
  misc_feature (28)..(256): Homolog of NCBI NO: 17154533 NR Description: putative IAA1 protein [Oryza sativa (indica
MSPPLELDYIGLSPPAAAAAAENDELKGTELRLGLPGSGSPDRRVVAATATTLDLLPAKGAKRGFSDEAPPPSPVAAAGKGKKVAEEEYDEKKVAATPQPAAKAQVVGWPPVCNYRKNTMTATQLKGSKEDGDAKQGQGFLYVKVSMDGAPYLRKIDLKTYKNYKDLSTALEKMFSGFSTGKDGSSEYRKDGEYVLTYEDKDGDWMLVGDVPWDCHIVFRSNCRMFAGSCRRLRIMKGSDAIGLAPRAADKSKNRN

SEQ ID NO: 8865 - DNA, 1763 bp, Zea mays subsp. mays; identical to SEQ ID NO: 2255
  misc_feature (1)..(1763): Ceres Seq. ID no. 12410839
  misc_feature: MA Experiment ID: 108523 Result: Up-regulated in Transcription
  misc_feature: MA Experiment 108523 PARAMETER Experiment Name: Zm_42deg_Heat_P Parameter: Age (day) Value: 8
  misc_feature: MA Experiment 108523 PARAMETER Experiment Name: Zm_42deg_Heat_P Parameter: Organism Value: Zea mays
  misc_feature: MA Experiment 108523 PARAMETER Experiment Name: Zm_42deg_Heat_P Parameter: Plant Line Value: 35A19
  misc_feature: MA Experiment 108523 PARAMETER Experiment Name: Zm_42deg_Heat_P Parameter: Temperature (deg C) Value: 42 vs. 22
  misc_feature: MA Experiment 108523 PARAMETER Experiment Name: Zm_42deg_Heat_P Parameter: Timepoint (hr) Value: 6
  misc_feature: MA Experiment 108523 PARAMETER Experiment Name: Zm_42deg_Heat_P Parameter: Tissue Value: Aerial
  misc_feature: MA Experiment ID: 108689 Result: Up-regulated in Transcription
  misc_feature: MA Experiment 108689 PARAMETER Experiment Name: Zm_Drought_Roots_P Parameter: Age (day) Value: 9
  misc_feature: MA Experiment 108689 PARAMETER Experiment Name: Zm_Drought_Roots_P Parameter: Organism Value: Zea mays
  misc_feature: MA Experiment 108689 PARAMETER Experiment Name: Zm_Drought_Roots_P Parameter: Plant Line Value: 35A19
  misc_feature: MA Experiment 108689 PARAMETER Experiment Name: Zm_Drought_Roots_P Parameter: Timepoint (hr) Value: 24
  misc_feature: MA Experiment 108689 PARAMETER Experiment Name: Zm_Drought_Roots_P Parameter: Tissue Value: Roots
  misc_feature: MA Experiment 108689 PARAMETER Experiment Name: Zm_Drought_Roots_P Parameter: Treatment Value: Drought vs. No Drought
  misc_feature: MA Experiment ID: 20000535 Result: Down-regulated in Transcription
  misc_feature: MA Experiment 20000535 PARAMETER Experiment Name: Zm_Hybrid_Seed_Dev_P Parameter: DAP Value: 30 vs. 12
  misc_feature: MA Experiment 20000535 PARAMETER Experiment Name: Zm_Hybrid_Seed_Dev_P Parameter: Organism Value: Zea mays
  misc_feature: MA Experiment 20000535 PARAMETER Experiment Name: Zm_Hybrid_Seed_Dev_P Parameter: Plant Line Value: 35A19
  misc_feature: MA Experiment 20000535 PARAMETER Experiment Name: Zm_Hybrid_Seed_Dev_P Parameter: Tissue Value: Embryo vs. Unfert Floret

SEQ ID NO: 8866 - protein, 401 aa, Zea mays subsp. mays; identical to SEQ ID NO: 2256
  peptide (1)..(401): Ceres Seq. ID no. 12410840
  misc_feature (94)..(387): Pfam Name: Protein of unknown function (DUF707) Pfam Description: Protein of unknown function (DUF707)
  misc_feature (1)..(401): Homolog of NCBI NO: 14719314 NR Description: putative protein [Oryza sativa]
  misc_feature (45)..(401): Homolog of NCBI NO: 34905994 NR Description: P0518C01.8 [Oryza sativa (japonica
  misc_feature (1)..(397): Homolog of NCBI NO: 34906848 NR Description: P0470A12.1 [Oryza sativa (japonica
  misc_feature (10)..(399): Homolog of NCBI NO: 18408876 NR Description: F12A21.2; protein id: At1g67850.1, supported by gi_14326581 [Arabidopsis thaliana] At1g67850/F12A21_2 [Arabidopsis thaliana]
  misc_feature (13)..(387): Homolog of NCBI NO: 18390845 NR Description: storage protein, putative; protein id: supported by cDNA: gi_15810566, supported by cDNA: gi_20259568 thaliana] >gi|15810567|gb|AAL07171.1| putative storage protein
  misc_feature (12)..(389): Homolog of NCBI NO: 22331371 NR Description: unknown protein; protein id: At3g27470.1, by cDNA: gi_19698930 [Arabidopsis thaliana] unknown protein [Arabidopsis thaliana]
  misc_feature (93)..(387): Homolog of NCBI NO: 25407018 NR Description: protein T6D22.12 [imported] - Arabidopsis >gi|8778842|gb|AAF79841.1|AC026875_21 T6D22.12 [Arabidopsis
  misc_feature (1)..(48): Homolog of NCBI NO: 25407018 NR Description: protein T6D22.12 [imported] - Arabidopsis >gi|8778842|gb|AAF79841.1|AC026875_21 T6D22.12 [Arabidopsis
  misc_feature (15)..(389): Homolog of NCBI NO: 22329525 NR Description: unknown protein; protein id: At1g13000.1, by cDNA: gi_18175818, supported by cDNA: gi_20465546 [Arabidopsis >gi|18175819|gb|AAL59933.1| unknown protein [Arabidopsis
  misc_feature (85)..(292): Homolog of NCBI NO: 7939519 NR Description: gb|AAD31054.1~gene_id:K1G2.18~strong similarity

SEQ ID NO: 8867 - protein, 391 aa, Zea mays subsp. mays; identical to SEQ ID NO: 2257
  peptide (1)..(391): Ceres Seq. ID no. 12410841
  misc_feature (84)..(377): Pfam Name: Protein of unknown function (DUF707) Pfam Description: Protein of unknown function (DUF707)
  misc_feature (1)..(391): Homolog of NCBI NO: 14719314 NR Description: putative protein [Oryza sativa]
  misc_feature (35)..(391): Homolog of NCBI NO: 34905994 NR Description: P0518C01.8 [Oryza sativa (japonica
  misc_feature (1)..(387): Homolog of NCBI NO: 34906848 NR Description: P0470A12.1 [Oryza sativa (japonica
  misc_feature (1)..(389): Homolog of NCBI NO: 18408876 NR Description: F12A21.2; protein id: At1g67850.1, supported by gi_14326581 [Arabidopsis thaliana] At1g67850/F12A21_2 [Arabidopsis thaliana]
  misc_feature (3)..(377): Homolog of NCBI NO: 18390845 NR Description: storage protein, putative; protein id: supported by cDNA: gi_15810566, supported by cDNA: gi_20259568 thaliana] >gi|15810567|gb|AAL07171.1| putative storage protein
  misc_feature (2)..(379): Homolog of NCBI NO: 22331371 NR Description: unknown protein; protein id: At3g27470.1, by cDNA: gi_19698930 [Arabidopsis thaliana] unknown protein [Arabidopsis thaliana]
  misc_feature (83)..(377): Homolog of NCBI NO: 25407018 NR Description: protein T6D22.12 [imported] - Arabidopsis >gi|8778842|gb|AAF79841.1|AC026875_21 T6D22.12 [Arabidopsis
  misc_feature (1)..(38): Homolog of NCBI NO: 25407018 NR Description: protein T6D22.12 [imported] - Arabidopsis >gi|8778842|gb|AAF79841.1|AC026875_21 T6D22.12 [Arabidopsis
  misc_feature (5)..(379): Homolog of NCBI NO: 22329525 NR Description: unknown protein; protein id: At1g13000.1, by cDNA: gi_18175818, supported by cDNA: gi_20465546 [Arabidopsis >gi|18175819|gb|AAL59933.1| unknown protein [Arabidopsis
  misc_feature (75)..(282): Homolog of NCBI NO: 7939519 NR Description: gb|AAD31054.1~gene_id:K1G2.18~strong similarity

SEQ ID NO: 8868 - protein, 383 aa, Zea mays subsp. mays; identical to SEQ ID NO: 2258
  peptide (1)..(383): Ceres Seq. ID no. 12410842
  misc_feature (76)..(369): Pfam Name: Protein of unknown function (DUF707) Pfam Description: Protein of unknown function (DUF707)
  misc_feature (1)..(383): Homolog of NCBI NO: 14719314 NR Description: putative protein [Oryza sativa]
  misc_feature (27)..(383): Homolog of NCBI NO: 34905994 NR Description: P0518C01.8 [Oryza sativa (japonica
  misc_feature (1)..(379): Homolog of NCBI NO: 34906848 NR Description: P0470A12.1 [Oryza sativa (japonica
  misc_feature (1)..(381): Homolog of NCBI NO: 18408876 NR Description: F12A21.2; protein id: At1g67850.1, supported by gi_14326581 [Arabidopsis thaliana] At1g67850/F12A21_2 [Arabidopsis thaliana]
  misc_feature (1)..(369): Homolog of NCBI NO: 18390845 NR Description: storage protein, putative; protein id: supported by cDNA: gi_15810566, supported by cDNA: gi_20259568 thaliana] >gi|15810567|gb|AAL07171.1| putative storage protein
  misc_feature (1)..(371): Homolog of NCBI NO: 22331371 NR Description: unknown protein; protein id: At3g27470.1, by cDNA: gi_19698930 [Arabidopsis thaliana] unknown protein [Arabidopsis thaliana]
  misc_feature (75)..(369): Homolog of NCBI NO: 25407018 NR Description: protein T6D22.12 [imported] - Arabidopsis >gi|8778842|gb|AAF79841.1|AC026875_21 T6D22.12 [Arabidopsis
  misc_feature (1)..(30): Homolog of NCBI NO: 25407018 NR Description: protein T6D22.12 [imported] - Arabidopsis >gi|8778842|gb|AAF79841.1|AC026875_21 T6D22.12 [Arabidopsis
  misc_feature (1)..(371): Homolog of NCBI NO: 22329525 NR Description: unknown protein; protein id: At1g13000.1, by cDNA: gi_18175818, supported by cDNA: gi_20465546 [Arabidopsis >gi|18175819|gb|AAL59933.1| unknown protein [Arabidopsis
  misc_feature (67)..(274): Homolog of NCBI NO: 7939519 NR Description: gb|AAD31054.1~gene_id:K1G2.18~strong similarity

SEQ ID NO: 8869 - DNA, 766 bp, Zea mays subsp. mays
  misc_feature (1)..(766): Ceres Seq. ID no. 12346859
  misc_feature: MA Experiment ID: 108528 Result: Up-regulated in Transcription
  misc_feature: MA Experiment 108528 PARAMETER Experiment Name: Zm_Imbibed_Seeds_P Parameter: Age (day) Value: 5 vs. 2
  misc_feature: MA Experiment 108528 PARAMETER Experiment Name: Zm_Imbibed_Seeds_P Parameter: Organism Value: Zea mays
  misc_feature: MA Experiment 108528 PARAMETER Experiment Name: Zm_Imbibed_Seeds_P Parameter: Plant Line Value: 35A19
  misc_feature: MA Experiment 108528 PARAMETER Experiment Name: Zm_Imbibed_Seeds_P Parameter: Tissue Value: Aerial vs. Embryo
  misc_feature: MA Experiment ID: 108530 Result: Up-regulated in Transcription
  misc_feature: MA Experiment 108530 PARAMETER Experiment Name: Zm_Imbibed_Seeds_P Parameter: Age (day) Value: 6 vs. 2
  misc_feature: MA Experiment 108530 PARAMETER Experiment Name: Zm_Imbibed_Seeds_P Parameter: Organism Value: Zea mays
  misc_feature: MA Experiment 108530 PARAMETER Experiment Name: Zm_Imbibed_Seeds_P Parameter: Plant Line Value: 35A19
  misc_feature: MA Experiment 108530 PARAMETER Experiment Name: Zm_Imbibed_Seeds_P Parameter: Tissue Value: Aerial vs. Embryo
  misc_feature: MA Experiment ID: 108547 Result: Up-regulated in Transcription
  misc_feature: MA Experiment 108547 PARAMETER Experiment Name: Zm_Imbibed_Seeds_P Parameter: Age (day) Value: 4 vs. 2
  misc_feature: MA Experiment 108547 PARAMETER Experiment Name: Zm_Imbibed_Seeds_P Parameter: Organism Value: Zea mays
  misc_feature: MA Experiment 108547 PARAMETER Experiment Name: Zm_Imbibed_Seeds_P Parameter: Plant Line Value: 35A19
  misc_feature: MA Experiment 108547 PARAMETER Experiment Name: Zm_Imbibed_Seeds_P Parameter: Tissue Value: Aerial vs. Embryo
acccaacaccccagtatcctgatgcggcttagcgcaccgaggtagaccgagcgagacagccagccagcggggcaagctgaaaaacctatcttctatcaccacctcggagcccgagtggaaggggaaggcaggaatcgccccgcacgcgcccccatccgcctgccggcgacggcccacatgccgaccgcctacagcctccgcgcgccgccctccaccgcgcagcagcgcctcaggctgcccccgccaccgctgccgctttgcccggcgggtggaggggccgcccgccggaggagggttgtcggggtagcgtccgcgtccgcgtcgcccttcgacgagctgtacgcgcgggggaggcccgcacatggaccctccaagaaatccatgctctggaacttgatccaggacatagagcctctggaccttagtgtcattcagaaagatgttgctcctgaaacggtagatgcaatgaagaggactatttcgggcatgttgggtctgcttccatctgatcagttccgtgtcattgtagaagctctttggaatcccttcttcaagttattggtatcttcaattatgactgggtatactctgcgaaatgctgaatacaggctttcttttgaaagaaatcttggactgtctgaagaagttgcagaatgcccaaaaagtgatgtcattgaagataatcatcatgacatcaatttgggtacacctgtcactatttttagattagcagaagaagacatgccccaggaccctgcggcacgag

SEQ ID NO: 8870 - protein, 196 aa, Zea mays subsp. mays
  peptide (1)..(196): Ceres Seq. ID no. 12346860
  misc_feature (2)..(192): Homolog of NCBI NO: 40538958 NR Description: expressed protein [Oryza sativa (japonica
MPTAYSLRAPPSTAQQRLRLPPPPLPLCPAGGGAARRRRVVGVASASASPFDELYARGRPAHGPSKKSMLWNLIQDIEPLDLSVIQKDVAPETVDAMKRTISGMLGLLPSDQFRVIVEALWNPFFKLLVSSIMTGYTLRNAEYRLSFERNLGLSEEVAECPKSDVIEDNHHDINLGTPVTIFRLAEEDMPQDPAAR

SEQ ID NO: 8871 - protein, 128 aa, Zea mays subsp. mays
  peptide (1)..(128): Ceres Seq. ID no. 12346861
  misc_feature (1)..(124): Homolog of NCBI NO: 40538958 NR Description: expressed protein [Oryza sativa (japonica
MLWNLIQDIEPLDLSVIQKDVAPETVDAMKRTISGMLGLLPSDQFRVIVEALWNPFFKLLVSSIMTGYTLRNAEYRLSFERNLGLSEEVAECPKSDVIEDNHHDINLGTPVTIFRLAEEDMPQDPAAR

SEQ ID NO: 8872 - protein, 100 aa, Zea mays subsp. mays
  peptide (1)..(100): Ceres Seq. ID no. 12346862
  misc_feature (1)..(96): Homolog of NCBI NO: 40538958 NR Description: expressed protein [Oryza sativa (japonica
MKRTISGMLGLLPSDQFRVIVEALWNPFFKLLVSSIMTGYTLRNAEYRLSFERNLGLSEEVAECPKSDVIEDNHHDINLGTPVTIFRLAEEDMPQDPAAR

SEQ ID NO: 8873 - DNA, 751 bp, Zea mays subsp. mays
  misc_feature (1)..(751): Ceres Seq. ID no. 12403104
  misc_feature: MA Experiment ID: 108535 Result: Up-regulated in Transcription
  misc_feature: MA Experiment 108535 PARAMETER Experiment Name: Zm_Meristem_P Parameter: Age (day) Value: 8
  misc_feature: MA Experiment 108535 PARAMETER Experiment Name: Zm_Meristem_P Parameter: Organism Value: Zea mays
  misc_feature: MA Experiment 108535 PARAMETER Experiment Name: Zm_Meristem_P Parameter: Plant Line Value: 35A19
  misc_feature: MA Experiment 108535 PARAMETER Experiment Name: Zm_Meristem_P Parameter: Tissue Value: Root Meristem vs. Above Root Meristem
acagccccgactgggctatattcgttctcccggcgtgctccgtctctcctctcagcgcgacgattacggtaacgccgtcgccgccctacggctcagatcttcgtcgtcatcttctccggcaacgagcacccaaagatggtggtccttcaaccagatcggttcctgagcgagctgacgagcatgtacgagcggagcacgggagaagggctccgtctgggtcaccatgaagcgatcaactctcaagggcaaggcacagttgcggaagatggagaataaggggcaggaggtagagcacaggtgcctcgtccgcgcctccaatggcaagaagaacatctccacctcggtttctctaaaggagtacacaaagtttcaagcttcatacgcaacagttcttaaggcccatatgcatgctctgaagaaaagggagaggaaagacaagaagaagactgcagatgctgagaaggcaattgagaccgcacccaagaagcagaagaaagcatnttcaaagaaatnttcagggtccaagtcataaggcgctcacagaactcagtgtgtcttctcctttatgttgtttaccgccagactaattagagtgtcgtgaagttttacttatctggtttttattcgaattcgtgtctggaagatgaaagcctgtgaatacacctttatagagccgtgtcatcgatgctaacattttttgaagcagagttttgaggtgaatgtgaggcgctgtgctgccctgattggcatt

SEQ ID NO: 8874 - protein, 102 aa, Zea mays subsp. mays
  peptide (1)..(102): Ceres Seq. ID no. 12403105
  misc_feature (1)..(64): Pfam Name: Signal recognition particle 14kD protein Pfam Description: Signal recognition particle 14kD protein
  misc_feature (1)..(102): Homolog of NCBI NO: 6094345 NR Description: SIGNAL RECOGNITION PARTICLE 14 KD PROTEIN (SRP14)
  misc_feature (1)..(91): Homolog of NCBI NO: 6175053 NR Description: Signal recognition particle 14 kDa protein >gi|2208946|emb|CAA71202.1| signal recognition particle subunit
  misc_feature (1)..(91): Homolog of NCBI NO: 15224325 NR Description: putative signal recognition particle protein ATSRP14; protein id: At2g43640.1, supported by cDNA: 97249.
  misc_feature (1)..(86): Homolog of NCBI NO: 1082198 NR Description: Alu RNA-binding protein - human to signal recognition particle 14kDa (homologous Alu RNA binding
  misc_feature (1)..(79): Homolog of NCBI NO: 5107800 NR Description: Signal Recognition Particle Alu Rna Binding
  misc_feature (1)..(79): Homolog of NCBI NO: 6678133 NR Description: signal recognition particle (homologous Alu RNA
  misc_feature (1)..(75): Homolog of NCBI NO: 11513833 NR Description: Chain B, Core Of The Alu Domain Of The Mammalian >gi|11513835|pdb|1E8O|D Chain D, Core Of The Alu Domain Of The Srp >gi|11513839|pdb|1E8S|B Chain B, Alu Domain Of The Mammalian
  misc_feature (1)..(79): Homolog of NCBI NO: 2507409 NR Description: SIGNAL RECOGNITION PARTICLE 14 KD PROTEIN (SRP14)
  misc_feature (1)..(84): Homolog of NCBI NO: 34877748 NR Description: similar to Chain , Signal Recognition Particle
  misc_feature (1)..(74): Homolog of NCBI NO: 37543970 NR Description: similar to signal recognition particle 14kD [Homo
  misc_feature (93)..(93): Xaa is any aa, unknown or other
  misc_feature (97)..(97): Xaa is any aa, unknown or other
MKRSTLKGKAQLRKMENKGQEVEHRCLVRASNGKKNISTSVSLKEYTKFQASYATVLKAHMHALKKRERKDKKKTADAEKAIETAPKKQKKAXSKKXSGSKS

SEQ ID NO: 8875 - protein, 88 aa, Zea mays subsp. mays
  peptide (1)..(88): Ceres Seq. ID no. 12403106
  misc_feature (1)..(88): Homolog of NCBI NO: 6094345 NR Description: SIGNAL RECOGNITION PARTICLE 14 KD PROTEIN (SRP14)
  misc_feature (1)..(77): Homolog of NCBI NO: 6175053 NR Description: Signal recognition particle 14 kDa protein >gi|2208946|emb|CAA71202.1| signal recognition particle subunit
  misc_feature (1)..(77): Homolog of NCBI NO: 15224325 NR Description: putative signal recognition particle protein ATSRP14; protein id: At2g43640.1, supported by cDNA: 97249.
  misc_feature (1)..(72): Homolog of NCBI NO: 1082198 NR Description: Alu RNA-binding protein - human to signal recognition particle 14kDa (homologous Alu RNA binding
  misc_feature (1)..(65): Homolog of NCBI NO: 5107800 NR Description: Signal Recognition Particle Alu Rna Binding
  misc_feature (1)..(65): Homolog of NCBI NO: 6678133 NR Description: signal recognition particle (homologous Alu RNA
  misc_feature (1)..(61): Homolog of NCBI NO: 11513833 NR Description: Chain B, Core Of The Alu Domain Of The Mammalian >gi|11513835|pdb|1E8O|D Chain D, Core Of The Alu Domain Of The Srp >gi|11513839|pdb|1E8S|B Chain B, Alu Domain Of The Mammalian
  misc_feature (1)..(65): Homolog of NCBI NO: 2507409 NR Description: SIGNAL RECOGNITION PARTICLE 14 KD PROTEIN (SRP14)
  misc_feature (1)..(70): Homolog of NCBI NO: 34877748 NR Description: similar to Chain , Signal Recognition Particle
  misc_feature (1)..(60): Homolog of NCBI NO: 37543970 NR Description: similar to signal recognition particle 14kD [Homo
  misc_feature (79)..(79): Xaa is any aa, unknown or other
  misc_feature (83)..(83): Xaa is any aa, unknown or other
MENKGQEVEHRCLVRASNGKKNISTSVSLKEYTKFQASYATVLKAHMHALKKRERKDKKKTADAEKAIETAPKKQKKAXSKKXSGSKS

SEQ ID NO: 8876 - protein, 74 aa, Zea mays subsp. mays
  peptide (1)..(74): Ceres Seq. ID no. 12403107
SPDWAIFVLPACSVSPLSATITVTPSPPYGSDLRRHLLRQRAPKDGGPSTRSVPERADEHVRAEHGRRAPSGSP

SEQ ID NO: 8877 - DNA, 988 bp, Zea mays subsp. mays
  misc_feature (1)..(988): Ceres Seq. ID no. 12349284
  misc_feature: MA Experiment ID: 108522 Result: Down-regulated in Transcription
  misc_feature: MA Experiment 108522 PARAMETER Experiment Name: Zm_42deg_Heat_P Parameter: Age (day) Value: 8
  misc_feature: MA Experiment 108522 PARAMETER Experiment Name: Zm_42deg_Heat_P Parameter: Organism Value: Zea mays
  misc_feature: MA Experiment 108522 PARAMETER Experiment Name: Zm_42deg_Heat_P Parameter: Plant Line Value: 35A19
  misc_feature: MA Experiment 108522 PARAMETER Experiment Name: Zm_42deg_Heat_P Parameter: Temperature (deg C) Value: 42 vs. 22
  misc_feature: MA Experiment 108522 PARAMETER Experiment Name: Zm_42deg_Heat_P Parameter: Timepoint (hr) Value: 1
  misc_feature: MA Experiment 108522 PARAMETER Experiment Name: Zm_42deg_Heat_P Parameter: Tissue Value: Aerial
  misc_feature: MA Experiment ID: 20000477 Result: Down-regulated in Transcription
  misc_feature: MA Experiment 20000477 PARAMETER Experiment Name: Zm_5mM_SA_P Parameter: Age (day) Value: 10
  misc_feature: MA Experiment 20000477 PARAMETER Experiment Name: Zm_5mM_SA_P Parameter: Organism Value: Zea mays
  misc_feature: MA Experiment 20000477 PARAMETER Experiment Name: Zm_5mM_SA_P Parameter: Plant Line Value: 35A19
  misc_feature: MA Experiment 20000477 PARAMETER Experiment Name: Zm_5mM_SA_P Parameter: Timepoint (hr) Value: 48
  misc_feature: MA Experiment 20000477 PARAMETER Experiment Name: Zm_5mM_SA_P Parameter: Tissue Value: Aerial
  misc_feature: MA Experiment 20000477 PARAMETER Experiment Name: Zm_5mM_SA_P Parameter: Treatment Value: 5mM SA vs. No Treatment
gacaagctcccccaaaatctccactctcggagtgagctccccaccaccacctccgtccccaaatgtcccgtcaccatcaccacgccgccgccatcgctgctgccgtgctcttcctcctcacagcgcctccttgcgccgccgaccctaacgacgagcgttgcctgactcacctccaccagtccctctccgattcctccggaaggctcaactggaccaaggcggcgatctcggcgccgtgcgacggcttcttctcgcacctccaaggcgtgacctgcaacaacgggcgcgtgtacaagctagccctcccggatctctcgcttgggggcaccgtcccgccggagctctccaactgcaccaacctccagtcgctggacctgtccgcgaacgcgctgtccggcgccataccgacggagctctccgcgctgctgaacctcgccgtgctcaacctctccgcgaacgcgctctctggcgccatcccgcgggagctcgctagctgcgcctacctcaacgtcatagatctccatggcaaccagctgtccggccccatccccgaggaactcggcctcctcgtccggctctcgaccttcgacgtctcctacaaccgcctctctggccccatccccgtgctcctcgccaaccgctccggcgccggcacggcagccgtcgggacggcgaggttcaacgccagctccttcgtagggaacaagggcttgtacgggtacccgctgccgccgatgcggacgcgggggctctccgtgctcgccatcgttggcatcggccttggcagcgggctgctcagccttgtgctcagcttctccgccgtgtgtctgtggctccgcgccacggaccggcggactcccaccaccactggcgaggagggcaagatctcccagctcatgccgaactactgaatccatcaaaggttgcatctttggacatataattcctcgtaattgaactaaacacgagatttttcagctgggcttgg

SEQ ID NO: 8878 - protein, 282 aa, Zea mays subsp. mays
  peptide (1)..(282): Ceres Seq. ID no. 12349285
  misc_feature (7)..(282): Homolog of NCBI NO: 15229606 NR Description: leucine rich repeat protein family; protein id:
  misc_feature (27)..(282): Homolog of NCBI NO: 7486525 NR Description: hypothetical protein F6H11.60 - Arabidopsis
  misc_feature (27)..(282): Homolog of NCBI NO: 21553823 NR Description: unknown [Arabidopsis thaliana]
  misc_feature (27)..(282): Homolog of NCBI NO: 15239162 NR Description: leucine rich repeat protein family; protein id: supported by cDNA: 17160. [Arabidopsis thaliana]
  misc_feature (15)..(278): Homolog of NCBI NO: 15233004 NR Description: leucine-rich repeat transmembrane protein kinase, protein id: At3g28450.1 [Arabidopsis thaliana]
  misc_feature (18)..(263): Homolog of NCBI NO: 38344230 NR Description: OJ991113_30.7 [Oryza sativa (japonica
  misc_feature (15)..(228): Homolog of NCBI NO: 34907548 NR Description: B1078G07.14 [Oryza sativa (japonica
  misc_feature (29)..(249): Homolog of NCBI NO: 15223445 NR Description: leucine-rich repeat transmembrane protein kinase, protein id: At1g27190.1 [Arabidopsis thaliana]
  misc_feature (8)..(188): Homolog of NCBI NO: 34896972 NR Description: putative leucine-rich repeat protein [Oryza
  misc_feature (14)..(270): Homolog of NCBI NO: 15222519 NR Description: leucine-rich repeat transmembrane protein kinase,
MSRHHHHAAAIAAAVLFLLTAPPCAADPNDERCLTHLHQSLSDSSGRLNWTKAAISAPCDGFFSHLQGVTCNNGRVYKLALPDLSLGGTVPPELSNCTNLQSLDLSANALSGAIPTELSALLNLAVLNLSANALSGAIPRELASCAYLNVIDLHGNQLSGPIPEELGLLVRLSTFDVSYNRLSGPIPVLLANRSGAGTAAVGTARFNASSFVGNKGLYGYPLPPMRTRGLSVLAIVGIGLGSGLLSLVLSFSAVCLWLRATDRRTPTTTGEEGKISQLMPNY

SEQ ID NO: 8879 - DNA, 509 bp, Zea mays subsp. mays
  misc_feature (1)..(509): Ceres Seq. ID no. 13635129
  misc_feature: MA Experiment ID: 108527 Result: Down-regulated in Transcription
  misc_feature: MA Experiment 108527 PARAMETER Experiment Name: Zm_5mM_NO_P Parameter: Age (day) Value: 8
  misc_feature: MA Experiment 108527 PARAMETER Experiment Name: Zm_5mM_NO_P Parameter: Organism Value: Zea mays
  misc_feature: MA Experiment 108527 PARAMETER Experiment Name: Zm_5mM_NO_P Parameter: Plant Line Value: 35A19
  misc_feature: MA Experiment 108527 PARAMETER Experiment Name: Zm_5mM_NO_P Parameter: Timepoint (hr) Value: 6
  misc_feature: MA Experiment 108527 PARAMETER Experiment Name: Zm_5mM_NO_P Parameter: Tissue Value: Aerial
  misc_feature: MA Experiment 108527 PARAMETER Experiment Name: Zm_5mM_NO_P Parameter: Treatment Value: 5mM NO vs. No Treatment
  misc_feature: MA Experiment ID: 20000479 Result: Down-regulated in Transcription
  misc_feature: MA Experiment 20000479 PARAMETER Experiment Name: Zm_Drought_P Parameter: Age (day) Value: 10
  misc_feature: MA Experiment 20000479 PARAMETER Experiment Name: Zm_Drought_P Parameter: Organism Value: Zea mays
  misc_feature: MA Experiment 20000479 PARAMETER Experiment Name: Zm_Drought_P Parameter: Plant Line Value: 35A19
  misc_feature: MA Experiment 20000479 PARAMETER Experiment Name: Zm_Drought_P Parameter: Timepoint (hr) Value: 48
  misc_feature: MA Experiment 20000479 PARAMETER Experiment Name: Zm_Drought_P Parameter: Tissue Value: Aerial
  misc_feature: MA Experiment 20000479 PARAMETER Experiment Name: Zm_Drought_P Parameter: Treatment Value: Drought vs. No Drought
  misc_feature: MA Experiment ID: 20000626 Result: Down-regulated in Transcription
  misc_feature: MA Experiment 20000626 PARAMETER Experiment Name: Zm_Herbicide-Treatments_P Parameter: Timepoint (hr) Value: 12
  misc_feature: MA Experiment 20000626 PARAMETER Experiment Name: Zm_Herbicide-Treatments_P Parameter: Tissue Value: Aerial
  misc_feature: MA Experiment 20000626 PARAMETER Experiment Name: Zm_Herbicide-Treatments_P Parameter: Treatment Value: Roundup vs. No Treatment
aatatccattccaccttggtccatcagcagcgagcgaacaggcaaaaaggaaaggccgagaagcgctttatccggccgtacgtagcgataagagtggtgcacccgtagcggcacggcatggcggccacggcgtactccgtggcgctcctcggcggcgcacgctgccggccgccttcctccctcgacgcagcagcgtgtgccaccaccagcttcgcctccaagacgcaccgaggctgatctccctgcaccgtgccagggccgcttccgaggacacgtcggcctccggcggcgacgagctcatcgaagacctcaaggcaaagtgggacgccgttgaggacaagcccaccgtcctcctgtacggcggcggcgntccgtncgcgctatggttgacgtccgttgtcgtcggcgccatcaacgccgtgccgctgctccccaagatcctggagctcgttggcctcggctacaccggctggttcgtctaccgctacctcctcttcaagcaaagcagg

SEQ ID NO: 8880 - protein, 169 aa, Zea mays subsp. mays
  peptide (1)..(169): Ceres Seq. ID no. 13635130
  misc_feature (85)..(168): Homolog of NCBI NO: 18420175 NR Description: expressed protein [Arabidopsis thaliana]
  misc_feature (36)..(168): Homolog of NCBI NO: 37536446 NR Description: hypothetical protein [Oryza sativa (japonica group)] >gi|18057096|gb|AAL58119.1| hypothetical protein [Oryza
  misc_feature (44)..(168): Homolog of NCBI NO: 34393236 NR Description: unknown protein [Oryza sativa (japonica
  misc_feature (84)..(168): Homolog of NCBI NO: 18407178 NR Description: expressed protein [Arabidopsis thaliana]
  misc_feature (84)..(168): Homolog of NCBI NO: 21555057 NR Description: unknown [Arabidopsis thaliana]
  misc_feature (70)..(168): Homolog of NCBI NO: 18403896 NR Description: expressed protein [Arabidopsis thaliana]
  misc_feature (79)..(168): Homolog of NCBI NO: 18411555 NR Description: expressed protein [Arabidopsis thaliana]
  misc_feature (79)..(168): Homolog of NCBI NO: 687677 NR Description: unknown
  misc_feature (31)..(168): Homolog of NCBI NO: 38175474 NR Description: unknown protein [Oryza sativa (japonica
  misc_feature (85)..(168): Homolog of NCBI NO: 7485852 NR Description: hypothetical protein F20D10.220 - Arabidopsis >gi|4467116|emb|CAB37550.1| hypothetical protein [Arabidopsis >gi|7270793|emb|CAB80475.1| hypothetical protein [Arabidopsis
  misc_feature (123)..(123): Xaa is any aa, unknown or other
  misc_feature (125)..(125): Xaa is any aa, unknown or other
YPFHLGPSAASEQAKRKGREALYPAVRSDKSGAPVAARHGGHGVLRGAPRRRTLPAAFLPRRSSVCHHQLRLQDAPRLISLHRARAASEDTSASGGDELIEDLKAKWDAVEDKPTVLLYGGGXPXALWLTSVVVGAINAVPLLPKILELVGLGYTGWFVYRYLLFKQSR

SEQ ID NO: 8881 - DNA, 870 bp, Zea mays subsp. mays
  misc_feature (1)..(870): Ceres Seq. ID no. 12376501
  misc_feature: MA Experiment ID: 108504 Result: Up-regulated in Transcription
  misc_feature: MA Experiment 108504 PARAMETER Experiment Name: Zm_Drought_P Parameter: Age (day) Value: 8
  misc_feature: MA Experiment 108504 PARAMETER Experiment Name: Zm_Drought_P Parameter: Organism Value: Zea mays
  misc_feature: MA Experiment 108504 PARAMETER Experiment Name: Zm_Drought_P Parameter: Plant Line Value: 35A19
  misc_feature: MA Experiment 108504 PARAMETER Experiment Name: Zm_Drought_P Parameter: Timepoint (hr) Value: 12
  misc_feature: MA Experiment 108504 PARAMETER Experiment Name: Zm_Drought_P Parameter: Tissue Value: Aerial
  misc_feature: MA Experiment 108504 PARAMETER Experiment Name: Zm_Drought_P Parameter: Treatment Value: Drought vs. No Drought
  misc_feature: MA Experiment ID: 108528 Result: Down-regulated in Transcription
  misc_feature: MA Experiment 108528 PARAMETER Experiment Name: Zm_Imbibed_Seeds_P Parameter: Age (day) Value: 5 vs. 2
  misc_feature: MA Experiment 108528 PARAMETER Experiment Name: Zm_Imbibed_Seeds_P Parameter: Organism Value: Zea mays
  misc_feature: MA Experiment 108528 PARAMETER Experiment Name: Zm_Imbibed_Seeds_P Parameter: Plant Line Value: 35A19
  misc_feature: MA Experiment 108528 PARAMETER Experiment Name: Zm_Imbibed_Seeds_P Parameter: Tissue Value: Aerial vs. Embryo
  misc_feature: MA Experiment ID: 108530 Result: Down-regulated in Transcription
  misc_feature: MA Experiment 108530 PARAMETER Experiment Name: Zm_Imbibed_Seeds_P Parameter: Age (day) Value: 6 vs. 2
  misc_feature: MA Experiment 108530 PARAMETER Experiment Name: Zm_Imbibed_Seeds_P Parameter: Organism Value: Zea mays
  misc_feature: MA Experiment 108530 PARAMETER Experiment Name: Zm_Imbibed_Seeds_P Parameter: Plant Line Value: 35A19
  misc_feature: MA Experiment 108530 PARAMETER Experiment Name: Zm_Imbibed_Seeds_P Parameter: Tissue Value: Aerial vs. Embryo
  misc_feature: MA Experiment ID: 108532 Result: Up-regulated in Transcription
  misc_feature: MA Experiment 108532 PARAMETER Experiment Name: Zm_20uM_KNO3_H-to-L_P Parameter: Age (day) Value: 11
  misc_feature: MA Experiment 108532 PARAMETER Experiment Name: Zm_20uM_KNO3_H-to-L_P Parameter: Organism Value: Zea mays
  misc_feature: MA Experiment 108532 PARAMETER Experiment Name: Zm_20uM_KNO3_H-to-L_P Parameter: Plant Line Value: 35A19
  misc_feature: MA Experiment 108532 PARAMETER Experiment Name: Zm_20uM_KNO3_H-to-L_P Parameter: Timepoint (hr) Value: 16
  misc_feature: MA Experiment 108532 PARAMETER Experiment Name: Zm_20uM_KNO3_H-to-L_P Parameter: Tissue Value: Roots
  misc_feature: MA Experiment 108532 PARAMETER Experiment Name: Zm_20uM_KNO3_H-to-L_P Parameter: Treatment Value: 20uM KNO3 vs. 60mM KNO3
  misc_feature: MA Experiment ID: 108533 Result: Down-regulated in Transcription
  misc_feature: MA Experiment 108533 PARAMETER Experiment Name: Zm_4deg_Cold_P Parameter: Age (hr) Value: 8
  misc_feature: MA Experiment 108533 PARAMETER Experiment Name: Zm_4deg_Cold_P Parameter: Organism Value: Zea mays
  misc_feature: MA Experiment 108533 PARAMETER Experiment Name: Zm_4deg_Cold_P Parameter: Plant Line Value: 35A19
  misc_feature: MA Experiment 108533 PARAMETER Experiment Name: Zm_4deg_Cold_P Parameter: Temperature (deg C) Value: 4 vs. 22
  misc_feature: MA Experiment 108533 PARAMETER Experiment Name: Zm_4deg_Cold_P Parameter: Timepoint (hr) Value: 1
  misc_feature: MA Experiment 108533 PARAMETER Experiment Name: Zm_4deg_Cold_P Parameter: Tissue Value: Aerial
  misc_feature: MA Experiment ID: 108534 Result: Down-regulated in Transcription
  misc_feature: MA Experiment 108534 PARAMETER Experiment Name: Zm_4deg_Cold_P Parameter: Age (hr) Value: 8
  misc_feature: MA Experiment 108534 PARAMETER Experiment Name: Zm_4deg_Cold_P Parameter: Organism Value: Zea mays
  misc_feature: MA Experiment 108534 PARAMETER Experiment Name: Zm_4deg_Cold_P Parameter: Plant Line Value: 35A19
  misc_feature: MA Experiment 108534 PARAMETER Experiment Name: Zm_4deg_Cold_P Parameter: Temperature (deg C) Value: 4 vs. 22
  misc_feature: MA Experiment 108534 PARAMETER Experiment Name: Zm_4deg_Cold_P Parameter: Timepoint (hr) Value: 6
  misc_feature: MA Experiment 108534 PARAMETER Experiment Name: Zm_4deg_Cold_P Parameter: Tissue Value: Aerial
  misc_feature: MA Experiment ID: 108535 Result: Up-regulated in Transcription
  misc_feature: MA Experiment 108535 PARAMETER Experiment Name: Zm_Meristem_P Parameter: Age (day) Value: 8
  misc_feature: MA Experiment 108535 PARAMETER Experiment Name: Zm_Meristem_P Parameter: Organism Value: Zea mays
  misc_feature: MA Experiment 108535 PARAMETER Experiment Name: Zm_Meristem_P Parameter: Plant Line Value: 35A19
  misc_feature: MA Experiment 108535 PARAMETER Experiment Name: Zm_Meristem_P Parameter: Tissue Value: Root Meristem vs. Above Root Meristem
  misc_feature: MA Experiment ID: 108542 Result: Up-regulated in Transcription
  misc_feature: MA Experiment 108542 PARAMETER Experiment Name: Zm_150mM_NaCl_P Parameter: Age (day) Value: 8
  misc_feature: MA Experiment 108542 PARAMETER Experiment Name: Zm_150mM_NaCl_P Parameter: Organism Value: Zea mays
  misc_feature: MA Experiment 108542 PARAMETER Experiment Name: Zm_150mM_NaCl_P Parameter: Plant Line Value: 35A19
  misc_feature: MA Experiment 108542 PARAMETER Experiment Name: Zm_150mM_NaCl_P Parameter: Timepoint (hr) Value: 6
  misc_feature: MA Experiment 108542 PARAMETER Experiment Name: Zm_150mM_NaCl_P Parameter: Tissue Value: Aerial
  misc_feature: MA Experiment 108542 PARAMETER Experiment Name: Zm_150mM_NaCl_P Parameter: Treatment Value: 150mM NaCl vs. No Treatment
  misc_feature: MA Experiment ID: 108543 Result: Down-regulated in Transcription
  misc_feature: MA Experiment ID: 108544 Result: Down-regulated in Transcription
  misc_feature: MA Experiment ID: 108545 Result: Down-regulated in Transcription
  misc_feature: MA Experiment 108545 PARAMETER Experiment Name: Zm_Imbibed_Seeds_P Parameter: Age (day) Value: 3 vs. 2
  misc_feature: MA Experiment 108545 PARAMETER Experiment Name: Zm_Imbibed_Seeds_P Parameter: Organism Value: Zea mays
  misc_feature: MA Experiment 108545 PARAMETER Experiment Name: Zm_Imbibed_Seeds_P Parameter: Plant Line Value: 35A19
  misc_feature: MA Experiment 108545 PARAMETER Experiment Name: Zm_Imbibed_Seeds_P Parameter: Tissue Value: Aerial vs. Embryo
  misc_feature: MA Experiment ID: 108546 Result: Down-regulated in Transcription
  misc_feature: MA Experiment 108546 PARAMETER Experiment Name: Zm_Imbibed_Seeds_P Parameter: Age (day) Value: 3 vs. 2
  misc_feature: MA Experiment 108546 PARAMETER Experiment Name: Zm_Imbibed_Seeds_P Parameter: Organism Value: Zea mays
  misc_feature: MA Experiment 108546 PARAMETER Experiment Name: Zm_Imbibed_Seeds_P Parameter: Plant Line Value: 35A19
  misc_feature: MA Experiment 108546 PARAMETER Experiment Name: Zm_Imbibed_Seeds_P Parameter: Tissue Value: Roots vs. Embryo
  misc_feature: MA Experiment ID: 108547 Result: Down-regulated in Transcription
  misc_feature: MA Experiment 108547 PARAMETER Experiment Name: Zm_Imbibed_Seeds_P Parameter: Age (day) Value: 4 vs. 2
  misc_feature: MA Experiment 108547 PARAMETER Experiment Name: Zm_Imbibed_Seeds_P Parameter: Organism Value: Zea mays
  misc_feature: MA Experiment 108547 PARAMETER Experiment Name: Zm_Imbibed_Seeds_P Parameter: Plant Line Value: 35A19
  misc_feature: MA Experiment 108547 PARAMETER Experiment Name: Zm_Imbibed_Seeds_P Parameter: Tissue Value: Aerial vs. Embryo
  misc_feature: MA Experiment ID: 108556 Result: Up-regulated in Transcription
  misc_feature: MA Experiment 108556 PARAMETER Experiment Name: Zm_Drought_P Parameter: Age (day) Value: 9
  misc_feature: MA Experiment 108556 PARAMETER Experiment Name: Zm_Drought_P Parameter: Organism Value: Zea mays
  misc_feature: MA Experiment 108556 PARAMETER Experiment Name: Zm_Drought_P Parameter: Plant Line Value: 35A19
  misc_feature: MA Experiment 108556 PARAMETER Experiment Name: Zm_Drought_P Parameter: Timepoint (hr) Value: 24
  misc_feature: MA Experiment 108556 PARAMETER Experiment Name: Zm_Drought_P Parameter: Tissue Value: Aerial
  misc_feature: MA Experiment 108556 PARAMETER Experiment Name: Zm_Drought_P Parameter: Treatment Value: Drought vs. No Drought
  misc_feature: MA Experiment ID: 108689 Result: Down-regulated in Transcription
  misc_feature: MA Experiment 108689 PARAMETER Experiment Name: Zm_Drought_Roots_P Parameter: Age (day) Value: 9
  misc_feature: MA Experiment 108689 PARAMETER Experiment Name: Zm_Drought_Roots_P Parameter: Organism Value: Zea mays
  misc_feature: MA Experiment 108689 PARAMETER Experiment Name: Zm_Drought_Roots_P Parameter: Plant Line Value: 35A19
  misc_feature: MA Experiment 108689 PARAMETER Experiment Name: Zm_Drought_Roots_P Parameter: Timepoint (hr) Value: 24
  misc_feature: MA Experiment 108689 PARAMETER Experiment Name: Zm_Drought_Roots_P Parameter: Tissue Value: Roots
  misc_feature: MA Experiment 108689 PARAMETER Experiment Name: Zm_Drought_Roots_P Parameter: Treatment Value: Drought vs. No Drought
  misc_feature: MA Experiment ID: 20000535 Result: Down-regulated in Transcription
  misc_feature: MA Experiment 20000535 PARAMETER Experiment Name: Zm_Hybrid_Seed_Dev_P Parameter: DAP Value: 30 vs. 12
  misc_feature: MA Experiment 20000535 PARAMETER Experiment Name: Zm_Hybrid_Seed_Dev_P Parameter: Organism Value: Zea mays
  misc_feature: MA Experiment 20000535 PARAMETER Experiment Name: Zm_Hybrid_Seed_Dev_P Parameter: Plant Line Value: 35A19
  misc_feature: MA Experiment 20000535 PARAMETER Experiment Name: Zm_Hybrid_Seed_Dev_P Parameter: Tissue Value: Embryo vs. Unfert Floret
  misc_feature: MA Experiment ID: 20000633 Result: Up-regulated in Transcription
  misc_feature: MA Experiment 20000633 PARAMETER Experiment Name: Zm_Herbicide-Treatments_P Parameter: Timepoint (hr) Value: 4
  misc_feature: MA Experiment 20000633 PARAMETER Experiment Name: Zm_Herbicide-Treatments_P Parameter: Tissue Value: Aerial
  misc_feature: MA Experiment 20000633 PARAMETER Experiment Name: Zm_Herbicide-Treatments_P Parameter: Treatment Value: Trimec vs. No Treatment
atggcgaatgtctcgcacacactcccctgccgctgtgccgcacccgcacccctccagcgcgcgggggcacgagcacgagtacgaggctccatcgccggacgaccaggtagttgcactgccgccgccgtcgacgacgaccgacggcgacgatggcccggccgcagcaacggtaccgcggcgtgcggcagcgccactggggctcctgggtctccgagatccgccaccctctcctgaaggcgcggatatggctgggcaccttcgagacggcagaggacgcggcgcgcgcctacgacgaggcggcgcggatcatgtgcgggccccgcgcgcgcaccaacttccccgccgacgccaacggcccgccgccgtcgttcctctccgcggcgctcgtcgacaagctgcaccggttcaacctggcgtccgtgcaggccgcgcagcggcagagagaggctgcggcggcggcggcggcagcagcagcagcagcaacttccgcgccggcgacgccaccggccgcgcagtggggcggcggtaggtccctggaggagcagcacgtggagcagatgatcgaggaactgctggactccgacttctccatggagatttgctgctagtgctaggctagccgcgacgcgacctgcctagcgactagctagcgcccccggccggcccgtcaccgccgcgctccgctccaactctcctctgttcttgcacttgcaccatgcgtcgcgctcgcgctcttctttgtactcgtgccgacgtgcgtagtatcgctcagccgctgcagcgtgcgtaggagcctgatttgtgtacgccacgtgtatagctgtagctgtacgtataagtatatatgtaatcgagcattctcattcttgc

SEQ ID NO: 8882 - protein, 175 aa, Zea mays subsp. mays
  peptide (1)..(175): Ceres Seq. ID no. 12376502
WRMSRTHSPAAVPHPHPSSARGHEHEYEAPSPDDQVVALPPPSTTTDGDDGPAAATVPRRAAAPLGLLGLRDPPPSPEGADMAGHLRDGRGRGARLRRGGADHVRAPRAHQLPRRRQRPAAVVPLRGARRQAAPVQPGVRAGRAAAERGCGGGGGSSSSSNFRAGDATGRAVGRR

SEQ ID NO: 8883 - protein, 173 aa, Zea mays subsp. mays
  peptide (1)..(173): Ceres Seq. ID no. 12376503
MSRTHSPAAVPHPHPSSARGHEHEYEAPSPDDQVVALPPPSTTTDGDDGPAAATVPRRAAAPLGLLGLRDPPPSPEGADMAGHLRDGRGRGARLRRGGADHVRAPRAHQLPRRRQRPAAVVPLRGARRQAAPVQPGVRAGRAAAERGCGGGGGSSSSSNFRAGDATGRAVGRR

SEQ ID NO: 8884 - protein, 152 aa, Zea mays subsp. mays
  peptide (1)..(152): Ceres Seq. ID no. 12376504
  misc_feature (5)..(68): Pfam Name: AP2 domain Pfam Description: AP2 domain
  misc_feature (1)..(117): Homolog of NCBI NO: 15238727 NR Description: ethylene-responsive element - like protein; id: At5g25190.1, supported by cDNA: gi_15010715, supported by gi_16974344 [Arabidopsis thaliana] >gi|15010716|gb|AAK74017.1|
  misc_feature (1)..(107): Homolog of NCBI NO: 18650662 NR Description: ethylene response factor 1 [Lycopersicon
  misc_feature (1)..(92): Homolog of NCBI NO: 131754 NR Description: PPLZ02 PROTEIN >gi|99973|pir||S11881 hypothetical
  misc_feature (7)..(141): Homolog of NCBI NO: 38343976 NR Description: OSJNBb0022F16.15 [Oryza sativa (japonica
  misc_feature (6)..(68): Homolog of NCBI NO: 15218134 NR Description: putative ethylene responsive element; protein id:
  misc_feature (6)..(68): Homolog of NCBI NO: 21553845 NR Description: putative ethylene responsive element [Arabidopsis
  misc_feature (1)..(147): Homolog of NCBI NO: 37572971 NR Description: AP2-domain DRE binding factor DBF1 [Oryza sativa
  misc_feature (6)..(79): Homolog of NCBI NO: 15239413 NR Description: AP2 domain containing protein; protein id:
  misc_feature (8)..(126): Homolog of NCBI NO: 4099921 NR Description: EREBP-3 homolog [Stylosanthes hamata]
  misc_feature (5)..(118): Homolog of NCBI NO: 38345793 NR Description: OSJNBa0085I10.10 [Oryza sativa (japonica
MARPQQRYRGVRQRHWGSWVSEIRHPLLKARIWLGTFETAEDAARAYDEAARIMCGPRARTNFPADANGPPPSFLSAALVDKLHRFNLASVQAAQRQREAAAAAAAAAAAATSAPATPPAAQWGGGRSLEEQHVEQMIEELLDSDFSMEICC

SEQ ID NO: 8885 - DNA, 1061 bp, Zea mays subsp. mays
  misc_feature (1)..(1061): Ceres Seq. ID no. 12377591
  misc_feature: MA Experiment ID: 108515 Result: Up-regulated in Transcription
  misc_feature: MA Experiment 108515 PARAMETER Experiment Name: Zm_2mM_SA_P Parameter: Age (day) Value: 8
  misc_feature: MA Experiment 108515 PARAMETER Experiment Name: Zm_2mM_SA_P Parameter: Organism Value: Zea mays
  misc_feature: MA Experiment 108515 PARAMETER Experiment Name: Zm_2mM_SA_P Parameter: Plant Line Value: 35A19
  misc_feature: MA Experiment 108515 PARAMETER Experiment Name: Zm_2mM_SA_P Parameter: Timepoint (hr) Value: 12
  misc_feature: MA Experiment 108515 PARAMETER Experiment Name: Zm_2mM_SA_P Parameter: Tissue Value: Aerial
  misc_feature: MA Experiment 108515 PARAMETER Experiment Name: Zm_2mM_SA_P Parameter: Treatment Value: 2mM SA vs. No Treatment
  misc_feature: MA Experiment ID: 108527 Result: Up-regulated in Transcription
  misc_feature: MA Experiment 108527 PARAMETER Experiment Name: Zm_5mM_NO_P Parameter: Age (day) Value: 8
  misc_feature: MA Experiment 108527 PARAMETER Experiment Name: Zm_5mM_NO_P Parameter: Organism Value: Zea mays
  misc_feature: MA Experiment 108527 PARAMETER Experiment Name: Zm_5mM_NO_P Parameter: Plant Line Value: 35A19
  misc_feature: MA Experiment 108527 PARAMETER Experiment Name: Zm_5mM_NO_P Parameter: Timepoint (hr) Value: 6
  misc_feature: MA Experiment 108527 PARAMETER Experiment Name: Zm_5mM_NO_P Parameter: Tissue Value: Aerial
  misc_feature: MA Experiment 108527 PARAMETER Experiment Name: Zm_5mM_NO_P Parameter: Treatment Value: 5mM NO vs. No Treatment
  misc_feature: MA Experiment ID: 108534 Result: Up-regulated in Transcription
  misc_feature: MA Experiment 108534 PARAMETER Experiment Name: Zm_4deg_Cold_P Parameter: Age (hr) Value: 8
  misc_feature: MA Experiment 108534 PARAMETER Experiment Name: Zm_4deg_Cold_P Parameter: Organism Value: Zea mays
  misc_feature: MA Experiment 108534 PARAMETER Experiment Name: Zm_4deg_Cold_P Parameter: Plant Line Value: 35A19
  misc_feature: MA Experiment 108534 PARAMETER Experiment Name: Zm_4deg_Cold_P Parameter: Temperature (deg C) Value: 4 vs. 22
  misc_feature: MA Experiment 108534 PARAMETER Experiment Name: Zm_4deg_Cold_P Parameter: Timepoint (hr) Value: 6
  misc_feature: MA Experiment 108534 PARAMETER Experiment Name: Zm_4deg_Cold_P Parameter: Tissue Value: Aerial
  misc_feature: MA Experiment ID: 108535 Result: Down-regulated in Transcription
  misc_feature: MA Experiment 108535 PARAMETER Experiment Name: Zm_Meristem_P Parameter: Age (day) Value: 8
  misc_feature: MA Experiment 108535 PARAMETER Experiment Name: Zm_Meristem_P Parameter: Organism Value: Zea mays
  misc_feature: MA Experiment 108535 PARAMETER Experiment Name: Zm_Meristem_P Parameter: Plant Line Value: 35A19
  misc_feature: MA Experiment 108535 PARAMETER Experiment Name: Zm_Meristem_P Parameter: Tissue Value: Root Meristem vs. Above Root Meristem
  misc_feature: MA Experiment ID: 108544 Result: Up-regulated in Transcription
  misc_feature: MA Experiment ID: 108689 Result: Down-regulated in Transcription
  misc_feature: MA Experiment 108689 PARAMETER Experiment Name: Zm_Drought_Roots_P Parameter: Age (day) Value: 9
  misc_feature: MA Experiment 108689 PARAMETER Experiment Name: Zm_Drought_Roots_P Parameter: Organism Value: Zea mays
  misc_feature: MA Experiment 108689 PARAMETER Experiment Name: Zm_Drought_Roots_P Parameter: Plant Line Value: 35A19
  misc_feature: MA Experiment 108689 PARAMETER Experiment Name: Zm_Drought_Roots_P Parameter: Timepoint (hr) Value: 24
  misc_feature: MA Experiment 108689 PARAMETER Experiment Name: Zm_Drought_Roots_P Parameter: Tissue Value: Roots
  misc_feature: MA Experiment 108689 PARAMETER Experiment Name: Zm_Drought_Roots_P Parameter: Treatment Value: Drought vs. No Drought
  misc_feature: MA Experiment ID: 20000477 Result: Up-regulated in Transcription
  misc_feature: MA Experiment 20000477 PARAMETER Experiment Name: Zm_5mM_SA_P Parameter: Age (day) Value: 10
  misc_feature: MA Experiment 20000477 PARAMETER Experiment Name: Zm_5mM_SA_P Parameter: Organism Value: Zea mays
  misc_feature: MA Experiment 20000477 PARAMETER Experiment Name: Zm_5mM_SA_P Parameter: Plant Line Value: 35A19
  misc_feature: MA Experiment 20000477 PARAMETER Experiment Name: Zm_5mM_SA_P Parameter: Timepoint (hr) Value: 48
  misc_feature: MA Experiment 20000477 PARAMETER Experiment Name: Zm_5mM_SA_P Parameter: Tissue Value: Aerial
  misc_feature: MA Experiment 20000477 PARAMETER Experiment Name: Zm_5mM_SA_P Parameter: Treatment Value: 5mM SA vs. No Treatment
  misc_feature: MA Experiment ID: 20000478 Result: Up-regulated in Transcription
  misc_feature: MA Experiment 20000478 PARAMETER Experiment Name: Zm_5mM_SA_P Parameter: Age (day) Value: 11
  misc_feature: MA Experiment 20000478 PARAMETER Experiment Name: Zm_5mM_SA_P Parameter: Organism Value: Zea mays
  misc_feature: MA Experiment 20000478 PARAMETER Experiment Name: Zm_5mM_SA_P Parameter: Plant Line Value: 35A19
  misc_feature: MA Experiment 20000478 PARAMETER Experiment Name: Zm_5mM_SA_P Parameter: Timepoint (hr) Value: 72
  misc_feature: MA Experiment 20000478 PARAMETER Experiment Name: Zm_5mM_SA_P Parameter: Tissue Value: Aerial
  misc_feature: MA Experiment 20000478 PARAMETER Experiment Name: Zm_5mM_SA_P Parameter: Treatment Value: 5mM SA vs. No Treatment
  misc_feature: MA Experiment ID: 20000492 Result: Down-regulated in Transcription
  misc_feature: MA Experiment 20000492 PARAMETER Experiment Name: Zm_Hybrid_Seed_Dev_P Parameter: DAP Value: 12
  misc_feature: MA Experiment 20000492 PARAMETER Experiment Name: Zm_Hybrid_Seed_Dev_P Parameter: Organism Value: Zea mays
  misc_feature: MA Experiment 20000492 PARAMETER Experiment Name: Zm_Hybrid_Seed_Dev_P Parameter: Plant Line Value: 35A19
  misc_feature: MA Experiment 20000492 PARAMETER Experiment Name: Zm_Hybrid_Seed_Dev_P Parameter: Tissue Value: Fert Kernel vs. Unfert Floret
  misc_feature: MA Experiment ID: 20000535 Result: Up-regulated in Transcription
  misc_feature: MA Experiment 20000535 PARAMETER Experiment Name: Zm_Hybrid_Seed_Dev_P Parameter: DAP Value: 30 vs. 12
  misc_feature: MA Experiment 20000535 PARAMETER Experiment Name: Zm_Hybrid_Seed_Dev_P Parameter: Organism Value: Zea mays
  misc_feature: MA Experiment 20000535 PARAMETER Experiment Name: Zm_Hybrid_Seed_Dev_P Parameter: Plant Line Value: 35A19
  misc_feature: MA Experiment 20000535 PARAMETER Experiment Name: Zm_Hybrid_Seed_Dev_P Parameter: Tissue Value: Embryo vs. Unfert Floret
  misc_feature: MA Experiment ID: 20000626 Result: Down-regulated in Transcription
  misc_feature: MA Experiment 20000626 PARAMETER Experiment Name: Zm_Herbicide-Treatments_P Parameter: Timepoint (hr) Value: 12
  misc_feature: MA Experiment 20000626 PARAMETER Experiment Name: Zm_Herbicide-Treatments_P Parameter: Tissue Value: Aerial
  misc_feature: MA Experiment 20000626 PARAMETER Experiment Name: Zm_Herbicide-Treatments_P Parameter: Treatment Value: Roundup vs. No Treatment
  misc_feature: MA Experiment ID: 20000630 Result: Up-regulated in Transcription
  misc_feature: MA Experiment 20000630 PARAMETER Experiment Name: Zm_Herbicide-Treatments_P Parameter: Timepoint (hr) Value: 4
  misc_feature: MA Experiment 20000630 PARAMETER Experiment Name: Zm_Herbicide-Treatments_P Parameter: Tissue Value: Aerial
  misc_feature: MA Experiment 20000630 PARAMETER Experiment Name: Zm_Herbicide-Treatments_P Parameter: Treatment Value: Roundup vs. No Treatment
cgcaattaaccctcactaaagggaacaaaagctggagctccaccgcggtggcggccgctctagaactagtggatcccccgggctgcaggaattcgcacgagaccattacctagaacatcctaatcgaaaagaaactcactcgccatcgccgggcatcgcgggcatcgcacacaaacgcaacctgcagccatggcacagaagctcgcgccaccgacggcggcggtcgtcgtcgtcctgctggcgctcgccttgtcggccgccgcgcagaactgcgggtgcgcgtcgggcctgtgctgcagccggttcgggtactgcgggacgggcgaggactactgcggcgccgggtgccagtcgggcccctgcgacgtgccggagaccaacaacgcgtccgtggccagcatcgtgacgccggccttcttcgacgcgctcctcgcgcaggccgccgcctcgtgcgaggccaacggcttctacacccgcgacgccttcctcgccgccgccggctactacccggcgttcggccgcaccggcaccgtcgacgactccaagcgcgagatcgccgccttcttcggcaacgccaaccacgagaccataaagttctgctacatcaacgagatcgacgggccgagcaagaactactgcgaccggaacaacacgcagtggccgtgccaggcggggaaggggtactacggccgcggcccgctgcagatctcctggaacttcaactacgggcccgcggggcagagcatcggcttcgacgggctgggcgaccccgacgcggtggcgcgcagcgccgtgctcgcgttccgctccgcgctctggtactggatgaacaacgtgcacggggccatcgtctccggccagggcttcggcgccaccatccgggccatcaacggcgcgctcgagtgcgacggcaagaaccccaactccgtcaacaaccgcgtcgcctactacaagcagttctgccaggatttcggcgtcgacccgggcaacaacctcacctgctgaatgatctctctctcattgggttgttgtcctgtacttacacatgtgttggttgatgg

SEQ ID NO: 8886 - protein, 271 aa, Zea mays subsp. mays
  peptide (1)..(271): Ceres Seq. ID no. 12377592
  misc_feature (71)..(271): Pfam Name: Chitinase class I Pfam Description: Chitinase class I
  misc_feature (10)..(271): Homolog of NCBI NO: 33329392 NR Description: class IV chitinase [Vitis vinifera]
  misc_feature (10)..(271): Homolog of NCBI NO: 2306811 NR Description: class IV endochitinase [Vitis vinifera]
  misc_feature (12)..(271): Homolog of NCBI NO: 15232509 NR Description: glycosyl hydrolase family 19 (class IV protein id: At3g54420.1 [Arabidopsis thaliana]
  misc_feature (14)..(271): Homolog of NCBI NO: 1076693 NR Description: chitinase (EC 3.2.1.14) class I - European elder
  misc_feature (12)..(271): Homolog of NCBI NO: 2597826 NR Description: class IV chitinase [Arabidopsis thaliana]
  misc_feature (10)..(271): Homolog of NCBI NO: 2306813 NR Description: class IV endochitinase [Vitis vinifera]
  misc_feature (10)..(271): Homolog of NCBI NO: 40557195 NR Description: class IV chitinase precursor [Medicago truncatula]
  misc_feature (13)..(271): Homolog of NCBI NO: 30793457 NR Description: chitinase [Oryza sativa (japonica cultivar-group)]
  misc_feature (13)..(271): Homolog of NCBI NO: 15529117 NR Description: chitinase-B [Sorghum bicolor]
  misc_feature (13)..(271): Homolog of NCBI NO: 15213850 NR Description: chitinase-B [Sorghum arundinaceum]
MAQKLAPPTAAVVVVLLALALSAAAQNCGCASGLCCSRFGYCGTGEDYCGAGCQSGPCDVPETNNASVASIVTPAFFDALLAQAAASCEANGFYTRDAFLAAAGYYPAFGRTGTVDDSKREIAAFFGNANHETIKFCYINEIDGPSKNYCDRNNTQWPCQAGKGYYGRGPLQISWNFNYGPAGQSIGFDGLGDPDAVARSAVLAFRSALWYWMNNVHGAIVSGQGFGATIRAINGALECDGKNPNSVNNRVAYYKQFCQDFGVDPGNNLTC

SEQ ID NO: 8887 - DNA, 699 bp, Zea mays subsp. mays
  misc_feature (1)..(699): Ceres Seq. ID no. 12346268
  misc_feature: MA Experiment ID: 108515 Result: Down-regulated in Transcription
  misc_feature: MA Experiment 108515 PARAMETER Experiment Name: Zm_2mM_SA_P Parameter: Age (day) Value: 8
  misc_feature: MA Experiment 108515 PARAMETER Experiment Name: Zm_2mM_SA_P Parameter: Organism Value: Zea mays
  misc_feature: MA Experiment 108515 PARAMETER Experiment Name: Zm_2mM_SA_P Parameter: Plant Line Value: 35A19
  misc_feature: MA Experiment 108515 PARAMETER Experiment Name: Zm_2mM_SA_P Parameter: Timepoint (hr) Value: 12
  misc_feature: MA Experiment 108515 PARAMETER Experiment Name: Zm_2mM_SA_P Parameter: Tissue Value: Aerial
  misc_feature: MA Experiment 108515 PARAMETER Experiment Name: Zm_2mM_SA_P Parameter: Treatment Value: 2mM SA vs. No Treatment
  misc_feature: MA Experiment ID: 108522 Result: Up-regulated in Transcription
  misc_feature: MA Experiment 108522 PARAMETER Experiment Name: Zm_42deg_Heat_P Parameter: Age (day) Value: 8
  misc_feature: MA Experiment 108522 PARAMETER Experiment Name: Zm_42deg_Heat_P Parameter: Organism Value: Zea mays
  misc_feature: MA Experiment 108522 PARAMETER Experiment Name: Zm_42deg_Heat_P Parameter: Plant Line Value: 35A19
  misc_feature: MA Experiment 108522 PARAMETER Experiment Name: Zm_42deg_Heat_P Parameter: Temperature (deg C) Value: 42 vs. 22
  misc_feature: MA Experiment 108522 PARAMETER Experiment Name: Zm_42deg_Heat_P Parameter: Timepoint (hr) Value: 1
  misc_feature: MA Experiment 108522 PARAMETER Experiment Name: Zm_42deg_Heat_P Parameter: Tissue Value: Aerial
  misc_feature: MA Experiment ID: 108528 Result: Up-regulated in Transcription
  misc_feature: MA Experiment 108528 PARAMETER Experiment Name: Zm_Imbibed_Seeds_P Parameter: Age (day) Value: 5 vs. 2
  misc_feature: MA Experiment 108528 PARAMETER Experiment Name: Zm_Imbibed_Seeds_P Parameter: Organism Value: Zea mays
  misc_feature: MA Experiment 108528 PARAMETER Experiment Name: Zm_Imbibed_Seeds_P Parameter: Plant Line Value: 35A19
  misc_feature: MA Experiment 108528 PARAMETER Experiment Name: Zm_Imbibed_Seeds_P Parameter: Tissue Value: Aerial vs. Embryo
  misc_feature: MA Experiment ID: 108529 Result: Up-regulated in Transcription
  misc_feature: MA Experiment 108529 PARAMETER Experiment Name: Zm_Imbibed_Seeds_P Parameter: Age (day) Value: 5 vs. 2
  misc_feature: MA Experiment 108529 PARAMETER Experiment Name: Zm_Imbibed_Seeds_P Parameter: Organism Value: Zea mays
  misc_feature: MA Experiment 108529 PARAMETER Experiment Name: Zm_Imbibed_Seeds_P Parameter: Plant Line Value: 35A19
  misc_feature: MA Experiment 108529 PARAMETER Experiment Name: Zm_Imbibed_Seeds_P Parameter: Tissue Value: Roots vs. Embryo
  misc_feature: MA Experiment ID: 108530 Result: Up-regulated in Transcription
  misc_feature: MA Experiment 108530 PARAMETER Experiment Name: Zm_Imbibed_Seeds_P Parameter: Age (day) Value: 6 vs. 2
  misc_feature: MA Experiment 108530 PARAMETER Experiment Name: Zm_Imbibed_Seeds_P Parameter: Organism Value: Zea mays
  misc_feature: MA Experiment 108530 PARAMETER Experiment Name: Zm_Imbibed_Seeds_P Parameter: Plant Line Value: 35A19
  misc_feature: MA Experiment 108530 PARAMETER Experiment Name: Zm_Imbibed_Seeds_P Parameter: Tissue Value: Aerial vs. Embryo
  misc_feature: MA Experiment ID: 108536 Result: Down-regulated in Transcription
  misc_feature: MA Experiment 108536 PARAMETER Experiment Name: Zm_Meristem_P Parameter: Age (day) Value: 8
  misc_feature: MA Experiment 108536 PARAMETER Experiment Name: Zm_Meristem_P Parameter: Organism Value: Zea mays
  misc_feature: MA Experiment 108536 PARAMETER Experiment Name: Zm_Meristem_P Parameter: Plant Line Value: 35A19
  misc_feature: MA Experiment 108536 PARAMETER Experiment Name: Zm_Meristem_P Parameter: Tissue Value: Shoot Meristem vs. Above Shoot Meristem
  misc_feature: MA Experiment ID: 108543 Result: Up-regulated in Transcription
  misc_feature: MA Experiment ID: 108545 Result: Up-regulated in Transcription
  misc_feature: MA Experiment 108545 PARAMETER Experiment Name: Zm_Imbibed_Seeds_P Parameter: Age (day) Value: 3 vs. 2
  misc_feature: MA Experiment 108545 PARAMETER Experiment Name: Zm_Imbibed_Seeds_P Parameter: Organism Value: Zea mays
  misc_feature: MA Experiment 108545 PARAMETER Experiment Name: Zm_Imbibed_Seeds_P Parameter: Plant Line Value: 35A19
  misc_feature: MA Experiment 108545 PARAMETER Experiment Name: Zm_Imbibed_Seeds_P Parameter: Tissue Value: Aerial vs. Embryo
  misc_feature: MA Experiment ID: 108546 Result: Down-regulated in Transcription
  misc_feature: MA Experiment 108546 PARAMETER Experiment Name: Zm_Imbibed_Seeds_P Parameter: Age (day) Value: 3 vs. 2
  misc_feature: MA Experiment 108546 PARAMETER Experiment Name: Zm_Imbibed_Seeds_P Parameter: Organism Value: Zea mays
  misc_feature: MA Experiment 108546 PARAMETER Experiment Name: Zm_Imbibed_Seeds_P Parameter: Plant Line Value: 35A19
  misc_feature: MA Experiment 108546 PARAMETER Experiment Name: Zm_Imbibed_Seeds_P Parameter: Tissue Value: Roots vs. Embryo
  misc_feature: MA Experiment ID: 108547 Result: Up-regulated in Transcription
  misc_feature: MA Experiment 108547 PARAMETER Experiment Name: Zm_Imbibed_Seeds_P Parameter: Age (day) Value: 4 vs. 2
  misc_feature: MA Experiment 108547 PARAMETER Experiment Name: Zm_Imbibed_Seeds_P Parameter: Organism Value: Zea mays
  misc_feature: MA Experiment 108547 PARAMETER Experiment Name: Zm_Imbibed_Seeds_P Parameter: Plant Line Value: 35A19
  misc_feature: MA Experiment 108547 PARAMETER Experiment Name: Zm_Imbibed_Seeds_P Parameter: Tissue Value: Aerial vs. Embryo
  misc_feature: MA Experiment ID: 20000535 Result: Down-regulated in Transcription
  misc_feature: MA Experiment 20000535 PARAMETER Experiment Name: Zm_Hybrid_Seed_Dev_P Parameter: DAP Value: 30 vs. 12
  misc_feature: MA Experiment 20000535 PARAMETER Experiment Name: Zm_Hybrid_Seed_Dev_P Parameter: Organism Value: Zea mays
  misc_feature: MA Experiment 20000535 PARAMETER Experiment Name: Zm_Hybrid_Seed_Dev_P Parameter: Plant Line Value: 35A19
  misc_feature: MA Experiment 20000535 PARAMETER Experiment Name: Zm_Hybrid_Seed_Dev_P Parameter: Tissue Value: Embryo vs. Unfert Floret
ctcactctccctgctgcaacccaaccaagcccgcacgacacgacaccaagtcgaggagctcgagagggcaccaataatggccggcgtgaactccagcgtcgtcgggctcaagcccgccgcggcagtgccgcaggccgccgccgcctcatcgccggcgaagcgggtgcagctggccgcgcccgagggccgccgcgccgctctgctcggcctggnggncgtnttcgccgtcncggccaccaccgggtcggccaaggccacgatcttcgatgagtacctcgagaagagcaaggccaacaaggagctgaacgacaagaagaggctggccaccagtggagccaactttgcgcgcgcctacaccgtggagttcggcagctgccagttcccctacaacttcactgggtgccaggacctcgccaagcagaagaaagtccccttcatcagcgacgacctcgagattgagtgcgaggggaaggagaagttcaagtgcggctccaacgttttctggaagtggtgaagcagctagcagcagcgtctgatgggaatggaggagatcatcacctgtcttgtcgaccctagatatgtccaaactgcagggaaattaaatcttcatgtgtaattgtgctcattctgtttcaatcatctcaacatccgatcatgaacctcttgcattattaactggctcgatcgtcttctcagttc

SEQ ID NO: 8888 - protein, 170 aa, Zea mays subsp. mays
  peptide (1)..(170): Ceres Seq. ID no. 12346269
  misc_feature (33)..(170): Pfam Name: Photosystem I reaction centre subunit N (PSAN or PSI-N) Pfam Description: Photosystem I reaction centre subunit N (PSAN
  misc_feature (26)..(170): Homolog of NCBI NO: 400879 NR Description: Photosystem I reaction centre subunit N,
  misc_feature (79)..(170): Homolog of NCBI NO: 3914466 NR Description: Photosystem I reaction centre subunit N,
  misc_feature (29)..(170): Homolog of NCBI NO: 28629385 NR Description: photosystem I-N subunit [Phaseolus vulgaris]
  misc_feature (29)..(170): Homolog of NCBI NO: 15237593 NR Description: photosystem I reaction center subunit PSI-N (PSI- N); protein id: At5g64040.1, supported by cDNA: gi_1237123, by cDNA: gi_17065517, supported by cDNA: gi_20148530 [Arabidopsis
  misc_feature (34)..(164): Homolog of NCBI NO: 11134150 NR Description: Photosystem I reaction centre subunit N,
  misc_feature (34)..(164): Homolog of NCBI NO: 12744797 NR Description: PsaN precursor [Chlamydomonas reinhardtii]
  misc_feature (87)..(135): Homolog of NCBI NO: 485082 NR Description: photosystem I 9K protein - rice (strain
  misc_feature (71)..(71): Xaa is any aa, unknown or other
  misc_feature (72)..(72): Xaa is any aa, unknown or other
  misc_feature (73)..(73): Xaa is any aa, unknown or other
  misc_feature (77)..(77): Xaa is any aa, unknown or other
SLSLLQPNQARTTRHQVEELERAPIMAGVNSSVVGLKPAAAVPQAAAASSPAKRVQLAAPEGRRAALLGLXXXFAVXATTGSAKATIFDEYLEKSKANKELNDKKRLATSGANFARAYTVEFGSCQFPYNFTGCQDLAKQKKVPFISDDLEIECEGKEKFKCGSNVFWKW

SEQ ID NO: 8889 - protein, 145 aa, Zea mays subsp. mays
  peptide (1)..(145): Ceres Seq. ID no. 12346270
  misc_feature (8)..(145): Pfam Name: Photosystem I reaction centre subunit N (PSAN or PSI-N) Pfam Description: Photosystem I reaction centre subunit N (PSAN
  misc_feature (1)..(145): Homolog of NCBI NO: 400879 NR Description: Photosystem I reaction centre subunit N,
  misc_feature (54)..(145): Homolog of NCBI NO: 3914466 NR Description: Photosystem I reaction centre subunit N,
  misc_feature (4)..(145): Homolog of NCBI NO: 28629385 NR Description: photosystem I-N subunit [Phaseolus vulgaris]
  misc_feature (4)..(145): Homolog of NCBI NO: 15237593 NR Description: photosystem I reaction center subunit PSI-N (PSI- N); protein id: At5g64040.1, supported by cDNA: gi_1237123, by cDNA: gi_17065517, supported by cDNA: gi_20148530 [Arabidopsis
  misc_feature (9)..(139): Homolog of NCBI NO: 11134150 NR Description: Photosystem I reaction centre subunit N,
  misc_feature (9)..(139): Homolog of NCBI NO: 12744797 NR Description: PsaN precursor [Chlamydomonas reinhardtii]
  misc_feature (62)..(110): Homolog of NCBI NO: 485082 NR Description: photosystem I 9K protein - rice (strain
  misc_feature (46)..(46): Xaa is any aa, unknown or other
  misc_feature (47)..(47): Xaa is any aa, unknown or other
  misc_feature (48)..(48): Xaa is any aa, unknown or other
  misc_feature (52)..(52): Xaa is any aa, unknown or other
MAGVNSSVVGLKPAAAVPQAAAASSPAKRVQLAAPEGRRAALLGLXXXFAVXATTGSAKATIFDEYLEKSKANKELNDKKRLATSGANFARAYTVEFGSCQFPYNFTGCQDLAKQKKVPFISDDLEIECEGKEKFKCGSNVFWKW

SEQ ID NO: 8890 - protein, 89 aa, Zea mays subsp. mays
  peptide (1)..(89): Ceres Seq. ID no. 12346271
  misc_feature (71)..(71): Xaa is any aa, unknown or other
  misc_feature (72)..(72): Xaa is any aa, unknown or other
  misc_feature (74)..(74): Xaa is any aa, unknown or other
  misc_feature (77)..(77): Xaa is any aa, unknown or other
LTLPAATQPSPHDTTPSRGAREGTNNGRRELQRRRAQARRGSAAGRRRLIAGEAGAAGRARGPPRRSARPXXRXRRXGHHRVGQGHDLR

SEQ ID NO: 8891 - DNA, 1111 bp, Zea mays subsp. mays
  misc_feature (1)..(1111): Ceres Seq. ID no. 12401978
  misc_feature: MA Experiment ID: 108504 Result: Down-regulated in Transcription
  misc_feature: MA Experiment 108504 PARAMETER Experiment Name: Zm_Drought_P Parameter: Age (day) Value: 8
  misc_feature: MA Experiment 108504 PARAMETER Experiment Name: Zm_Drought_P Parameter: Organism Value: Zea mays
  misc_feature: MA Experiment 108504 PARAMETER Experiment Name: Zm_Drought_P Parameter: Plant Line Value: 35A19
  misc_feature: MA Experiment 108504 PARAMETER Experiment Name: Zm_Drought_P Parameter: Timepoint (hr) Value: 12
  misc_feature: MA Experiment 108504 PARAMETER Experiment Name: Zm_Drought_P Parameter: Tissue Value: Aerial
  misc_feature: MA Experiment 108504 PARAMETER Experiment Name: Zm_Drought_P Parameter: Treatment Value: Drought vs. No Drought
  misc_feature: MA Experiment ID: 108527 Result: Down-regulated in Transcription
  misc_feature: MA Experiment 108527 PARAMETER Experiment Name: Zm_5mM_NO_P Parameter: Age (day) Value: 8
  misc_feature: MA Experiment 108527 PARAMETER Experiment Name: Zm_5mM_NO_P Parameter: Organism Value: Zea mays
  misc_feature: MA Experiment 108527 PARAMETER Experiment Name: Zm_5mM_NO_P Parameter: Plant Line Value: 35A19
  misc_feature: MA Experiment 108527 PARAMETER Experiment Name: Zm_5mM_NO_P Parameter: Timepoint (hr) Value: 6
  misc_feature: MA Experiment 108527 PARAMETER Experiment Name: Zm_5mM_NO_P Parameter: Tissue Value: Aerial
  misc_feature: MA Experiment 108527 PARAMETER Experiment Name: Zm_5mM_NO_P Parameter: Treatment Value: 5mM NO vs. No Treatment
  misc_feature: MA Experiment ID: 108534 Result: Up-regulated in Transcription
  misc_feature: MA Experiment 108534 PARAMETER Experiment Name: Zm_4deg_Cold_P Parameter: Age (hr) Value: 8
  misc_feature: MA Experiment 108534 PARAMETER Experiment Name: Zm_4deg_Cold_P Parameter: Organism Value: Zea mays
  misc_feature: MA Experiment 108534 PARAMETER Experiment Name: Zm_4deg_Cold_P Parameter: Plant Line Value: 35A19
  misc_feature: MA Experiment 108534 PARAMETER Experiment Name: Zm_4deg_Cold_P Parameter: Temperature (deg C) Value: 4 vs. 22
  misc_feature: MA Experiment 108534 PARAMETER Experiment Name: Zm_4deg_Cold_P Parameter: Timepoint (hr) Value: 6
  misc_feature: MA Experiment 108534 PARAMETER Experiment Name: Zm_4deg_Cold_P Parameter: Tissue Value: Aerial
  misc_feature: MA Experiment ID: 108535 Result: Up-regulated in Transcription
  misc_feature: MA Experiment 108535 PARAMETER Experiment Name: Zm_Meristem_P Parameter: Age (day) Value: 8
  misc_feature: MA Experiment 108535 PARAMETER Experiment Name: Zm_Meristem_P Parameter: Organism Value: Zea mays
  misc_feature: MA Experiment 108535 PARAMETER Experiment Name: Zm_Meristem_P Parameter: Plant Line Value: 35A19
  misc_feature: MA Experiment 108535 PARAMETER Experiment Name: Zm_Meristem_P Parameter: Tissue Value: Root Meristem vs. Above Root Meristem
  misc_feature: MA Experiment ID: 108536 Result: Down-regulated in Transcription
  misc_feature: MA Experiment 108536 PARAMETER Experiment Name: Zm_Meristem_P Parameter: Age (day) Value: 8
  misc_feature: MA Experiment 108536 PARAMETER Experiment Name: Zm_Meristem_P Parameter: Organism Value: Zea mays
  misc_feature: MA Experiment 108536 PARAMETER Experiment Name: Zm_Meristem_P Parameter: Plant Line Value: 35A19
  misc_feature: MA Experiment 108536 PARAMETER Experiment Name: Zm_Meristem_P Parameter: Tissue Value: Shoot Meristem vs. Above Shoot Meristem
  misc_feature: MA Experiment ID: 108543 Result: Up-regulated in Transcription
  misc_feature: MA Experiment ID: 108548 Result: Down-regulated in Transcription
  misc_feature: MA Experiment 108548 PARAMETER Experiment Name: Zm_20uM_KNO3_H-to-L_P Parameter: Age (day) Value: 11
  misc_feature: MA Experiment 108548 PARAMETER Experiment Name: Zm_20uM_KNO3_H-to-L_P Parameter: Organism Value: Zea mays
  misc_feature: MA Experiment 108548 PARAMETER Experiment Name: Zm_20uM_KNO3_H-to-L_P Parameter: Plant Line Value: 35A19
  misc_feature: MA Experiment 108548 PARAMETER Experiment Name: Zm_20uM_KNO3_H-to-L_P Parameter: Timepoint (hr) Value: 4
  misc_feature: MA Experiment 108548 PARAMETER Experiment Name: Zm_20uM_KNO3_H-to-L_P Parameter: Tissue Value: Roots
  misc_feature: MA Experiment 108548 PARAMETER Experiment Name: Zm_20uM_KNO3_H-to-L_P Parameter: Treatment Value: 20uM KNO3 vs. 60mM KNO3
  misc_feature: MA Experiment ID: 108556 Result: Down-regulated in Transcription
  misc_feature: MA Experiment 108556 PARAMETER Experiment Name: Zm_Drought_P Parameter: Age (day) Value: 9
  misc_feature: MA Experiment 108556 PARAMETER Experiment Name: Zm_Drought_P Parameter: Organism Value: Zea mays
  misc_feature: MA Experiment 108556 PARAMETER Experiment Name: Zm_Drought_P Parameter: Plant Line Value: 35A19
  misc_feature: MA Experiment 108556 PARAMETER Experiment Name: Zm_Drought_P Parameter: Timepoint (hr) Value: 24
  misc_feature: MA Experiment 108556 PARAMETER Experiment Name: Zm_Drought_P Parameter: Tissue Value: Aerial
  misc_feature: MA Experiment 108556 PARAMETER Experiment Name: Zm_Drought_P Parameter: Treatment Value: Drought vs. No Drought
  misc_feature: MA Experiment ID: 108597 Result: Down-regulated in Transcription
  misc_feature: MA Experiment 108597 PARAMETER Experiment Name: Zm_100uM_ABA_P Parameter: Age (day) Value: 9
  misc_feature: MA Experiment 108597 PARAMETER Experiment Name: Zm_100uM_ABA_P Parameter: Organism Value: Zea mays
  misc_feature: MA Experiment 108597 PARAMETER Experiment Name: Zm_100uM_ABA_P Parameter: Plant Line Value: 35A19
  misc_feature: MA Experiment 108597 PARAMETER Experiment Name: Zm_100uM_ABA_P Parameter: Timepoint (hr) Value: 24
  misc_feature: MA Experiment 108597 PARAMETER Experiment Name: Zm_100uM_ABA_P Parameter: Tissue Value: Aerial
  misc_feature: MA Experiment 108597 PARAMETER Experiment Name: Zm_100uM_ABA_P Parameter: Treatment Value: 100uM ABA vs. No Treatment
  misc_feature: MA Experiment ID: 108687 Result: Down-regulated in Transcription
  misc_feature: MA Experiment 108687 PARAMETER Experiment Name: Zm_Embryos-Flowers__P Parameter: Tissue Value: Embryo vs. Aerial+
  misc_feature: MA Experiment ID: 108689 Result: Down-regulated in Transcription
  misc_feature: MA Experiment 108689 PARAMETER Experiment Name: Zm_Drought_Roots_P Parameter: Age (day) Value: 9
  misc_feature: MA Experiment 108689 PARAMETER Experiment Name: Zm_Drought_Roots_P Parameter: Organism Value: Zea mays
  misc_feature: MA Experiment 108689 PARAMETER Experiment Name: Zm_Drought_Roots_P Parameter: Plant Line Value: 35A19
  misc_feature: MA Experiment 108689 PARAMETER Experiment Name: Zm_Drought_Roots_P Parameter: Timepoint (hr) Value: 24
  misc_feature: MA Experiment 108689 PARAMETER Experiment Name: Zm_Drought_Roots_P Parameter: Tissue Value: Roots
  misc_feature: MA Experiment 108689 PARAMETER Experiment Name: Zm_Drought_Roots_P Parameter: Treatment Value: Drought vs. No Drought
  misc_feature: MA Experiment ID: 20000480 Result: Down-regulated in Transcription
  misc_feature: MA Experiment 20000480 PARAMETER Experiment Name: Zm_Drought_P Parameter: Age (day) Value: 11
  misc_feature: MA Experiment 20000480 PARAMETER Experiment Name: Zm_Drought_P Parameter: Organism Value: Zea mays
  misc_feature: MA Experiment 20000480 PARAMETER Experiment Name: Zm_Drought_P Parameter: Plant Line Value: 35A19
  misc_feature: MA Experiment 20000480 PARAMETER Experiment Name: Zm_Drought_P Parameter: Timepoint (hr) Value: 72
  misc_feature: MA Experiment 20000480 PARAMETER Experiment Name: Zm_Drought_P Parameter: Tissue Value: Aerial
  misc_feature: MA Experiment 20000480 PARAMETER Experiment Name: Zm_Drought_P Parameter: Treatment Value: Drought vs. No Drought
  misc_feature: MA Experiment ID: 20000626 Result: Down-regulated in Transcription
  misc_feature: MA Experiment 20000626 PARAMETER Experiment Name: Zm_Herbicide-Treatments_P Parameter: Timepoint (hr) Value: 12
  misc_feature: MA Experiment 20000626 PARAMETER Experiment Name: Zm_Herbicide-Treatments_P Parameter: Tissue Value: Aerial
  misc_feature: MA Experiment 20000626 PARAMETER Experiment Name: Zm_Herbicide-Treatments_P Parameter: Treatment Value: Roundup vs. No Treatment
  misc_feature: MA Experiment ID: 20000630 Result: Down-regulated in Transcription
  misc_feature: MA Experiment 20000630 PARAMETER Experiment Name: Zm_Herbicide-Treatments_P Parameter: Timepoint (hr) Value: 4
  misc_feature: MA Experiment 20000630 PARAMETER Experiment Name: Zm_Herbicide-Treatments_P Parameter: Tissue Value: Aerial
  misc_feature: MA Experiment 20000630 PARAMETER Experiment Name: Zm_Herbicide-Treatments_P Parameter: Treatment Value: Roundup vs. No Treatment
accaactccggcggccggtgcagcagctagcagtggacgtacttatacgtcttcccccagcttacctctaccttaggtagcatagtggtgcggccgcttggtttaaactagacacatggcgcctcaaagcttggatcttgggctgagtctcggcctgggcgtggcggcgttccagcccagcagcttctgccaccccggcaatgccgtcgtcgtccccgcggcggcggagcgggaggccagcccggccgcggcggaggagagggagcggaggtgctcgcccgccggcagcccggtgtcgagcggcagcggcagcgggaataagcgcgccgcggcggagaggtcgnccggcgccggcgccggtagcggcgacgaggacgacgacggtgccgcacgcaagaagctgcggctgtccaaagaccaggccgccgtgctcgaggagtgcttcaagacgcaccacacgctcactccgaagcagaaggtggcgctggccagcagcctgggcctccggccgcggcaggtggaggtgtggttccagaaccggcgcgcccggaccaagctgaagcagacggaggtggactgcgagtacctcaagcgctggtgcgagcagctcgccgaggagaaccgccgcctgggcaaggaggtcgccgagctcagggcgctcagcgccgcgccggcggccccgctcaccaccctcacgatgtgcctctcctgccggcgcgtcgcctcctcgtccccgtcgtcgtcgtcgtcgcccaggcctagcatccccggcgccgcagctgccagtggcgggagcatggcctctccggcggcggcggcgacgttgcccgcccacaggcagttcttctgcgggttcagagacgccggggcggcggccgcggcgtacgggacagcctcggcggggctcgcgaagcctgtcagggctgccagataggcttagttggcgtcgatgccatggaaatgcatgggtccgtttaagttacaactgcaaagcaagtgttgtggctgaaactgaaactgaaagctgaaagctgaaatttttttatgtatctttagagggaaaggaatgcatgcatgcaatgcaaatgtcttctttttaacaaggttaatt

SEQ ID NO: 8892 - protein, 272 aa, Zea mays subsp. mays
  peptide (1)..(272): Ceres Seq. ID no. 12401979
  misc_feature (94)..(148): Pfam Name: Homeobox domain Pfam Description: Homeobox domain
  misc_feature (35)..(255): Homolog of NCBI NO: 5006849 NR Description: homeodomain leucine zipper protein [Oryza sativa]
  misc_feature (35)..(255): Homolog of NCBI NO: 28848940 NR Description: homeodomain leucine zipper protein [Oryza sativa
  misc_feature (47)..(212): Homolog of NCBI NO: 25457630 NR Description: homeobox protein THOM1 [imported] - tomato
  misc_feature (41)..(237): Homolog of NCBI NO: 15232311 NR Description: homeobox-leucine zipper protein HAT3; protein id:
  misc_feature (54)..(231): Homolog of NCBI NO: 18034437 NR Description: homeodomain leucine zipper protein CPHB-3
  misc_feature (60)..(237): Homolog of NCBI NO: 15225368 NR Description: homeobox-leucine zipper protein, Athb-4; protein
  misc_feature (43)..(220): Homolog of NCBI NO: 25487872 NR Description: homeobox-leucine zipper protein PHZ2 [imported] -
  misc_feature (43)..(218): Homolog of NCBI NO: 6634483 NR Description: DNA-binding protein [Oryza sativa (indica
  misc_feature (43)..(218): Homolog of NCBI NO: 7446297 NR Description: DNA-binding homeotic protein - rice (fragment)
  misc_feature (43)..(218): Homolog of NCBI NO: 37536862 NR Description: homeodomain leucine zipper protein hox1 [Oryza
  misc_feature (77)..(77): Xaa is any aa, unknown or other
MAPQSLDLGLSLGLGVAAFQPSSFCHPGNAVVVPAAAEREASPAAAEERERRCSPAGSPVSSGSGSGNKRAAAERSXGAGAGSGDEDDDGAARKKLRLSKDQAAVLEECFKTHHTLTPKQKVALASSLGLRPRQVEVWFQNRRARTKLKQTEVDCEYLKRWCEQLAEENRRLGKEVAELRALSAAPAAPLTTLTMCLSCRRVASSSPSSSSSPRPSIPGAAAASGGSMASPAAAATLPAHRQFFCGFRDAGAAAAAYGTASAGLAKPVRAAR

SEQ ID NO: 8893 - DNA, 1737 bp, Zea mays subsp. mays
  misc_feature (1)..(1737): Ceres Seq. ID no. 12365824
  misc_feature: MA Experiment ID: 108522 Result: Up-regulated in Transcription
  misc_feature: MA Experiment 108522 PARAMETER Experiment Name: Zm_42deg_Heat_P Parameter: Age (day) Value: 8
  misc_feature: MA Experiment 108522 PARAMETER Experiment Name: Zm_42deg_Heat_P Parameter: Organism Value: Zea mays
  misc_feature: MA Experiment 108522 PARAMETER Experiment Name: Zm_42deg_Heat_P Parameter: Plant Line Value: 35A19
  misc_feature: MA Experiment 108522 PARAMETER Experiment Name: Zm_42deg_Heat_P Parameter: Temperature (deg C) Value: 42 vs. 22
  misc_feature: MA Experiment 108522 PARAMETER Experiment Name: Zm_42deg_Heat_P Parameter: Timepoint (hr) Value: 1
  misc_feature: MA Experiment 108522 PARAMETER Experiment Name: Zm_42deg_Heat_P Parameter: Tissue Value: Aerial
  misc_feature: MA Experiment ID: 108527 Result: Up-regulated in Transcription
  misc_feature: MA Experiment 108527 PARAMETER Experiment Name: Zm_5mM_NO_P Parameter: Age (day) Value: 8
  misc_feature: MA Experiment 108527 PARAMETER Experiment Name: Zm_5mM_NO_P Parameter: Organism Value: Zea mays
  misc_feature: MA Experiment 108527 PARAMETER Experiment Name: Zm_5mM_NO_P Parameter: Plant Line Value: 35A19
  misc_feature: MA Experiment 108527 PARAMETER Experiment Name: Zm_5mM_NO_P Parameter: Timepoint (hr) Value: 6
  misc_feature: MA Experiment 108527 PARAMETER Experiment Name: Zm_5mM_NO_P Parameter: Tissue Value: Aerial
  misc_feature: MA Experiment 108527 PARAMETER Experiment Name: Zm_5mM_NO_P Parameter: Treatment Value: 5mM NO vs. No Treatment
agtgtcggtgtcggcgttggcgagtggcgactggcgacttctctgcctcgtcctccccgttttcccctccgcgtccagcccggcgcgacgccaccacgcacctagccgcggatccgaggcgcagatccaatccagcgatggcgtccacggcggcgaggcggttgcgggagctgcaggcccagacggggaacaagacctgcgtggactgcgcgcagcggaacccgcagtgggcgagcgtctcctacggcgtgttcatgtgcctcgagtgctccggcaagcaccggggcctcggcgtgcacatcagtttcgtgcgctcggtcaccatggactcctggaccgaggcgcagctccgcaagatggaggccggcggcaacgaccgcctcaacgccttcctcacagcgcggggcgttcccaaggagacgtcccacgtcgcgaagtacaactccaacgccgcggccgcctaccgcgaccgcatcgccgcgctcgctgagggcaagccttggaccgacccgcccgtagtcaaggagacgcccggatctggcgcgcccgccccggctaggaagccacccttgcacgcctccggaggcggcggcgggtgggacgactgggacgatgattttcggtcggacatgaggcggaatcagtcggttggatcattcgccgccgcgggggcgcagtcagggaggcagccgccgaggtccaaatcaacacaggacatctacactaggcagcagctggaggcgtcggcggctaataaggatgatttcttcgccaggaggatggcggagaacgagtccaagcctgagggtatcccgccatcccagggcggcaagtacgttgggttcggatccagcccagcgccatcggctaataggaacggcggtgctgctcagggcgatgtcttgcaggtcgtctctcagggatttggacgcctttcattagttgcagcctctgctgcccagtctgctgccagtgttgtccaagtcggcacaaaagaaatccaatcaaagatgagggatgggggctatgaccagaaggtgaatgaaactgtcagtgttgttgccaataaaactgcagagattggaagcaagacctgggggatcatgagaggagttatggcaatggcctcacaaaaggtcgaggaatatgccaaggaaggaggaatgagtggctggggagaggattggcaacgcagcgagcagaacggtgagccttaccaaaggtttgagcacgcgaccaacagcaacagttggaattcctcccaaaattcttcatcgaagaacaacaattccagttcttgggacgattgggacgaccaaggcaagaagggtgaacctgcgaaaccgcaccaaagcagtgactcctgggctggctgggatgatgggaaggacgatggttttgatagtcctggttacaacaaccacaacagctctaacaaggggagcaaccacaacgggacttccggtggctcattttggagggaaggcggcttccgctgaaaccgttctcttctccatagagttatactttcagagttgttacattggcaggtaaccagggtccagtggttggtattatccgggatactgaaaccgtcgagtgaaaggggttgtgttttgtaccacatctgttattatatctactgagatatattcctatggtcaatgcccattcaaaagtgcccaaattgactaggaaatgtcgagttgaaactgtaatttacccaactttgtcgcc

SEQ ID NO: 8894 - protein, 498 aa, Zea mays subsp. mays
  peptide (1)..(498): Ceres Seq. ID no. 12365825
  misc_feature (51)..(167): Pfam Name: Putative GTPase activating protein for Arf Pfam Description: Putative GTPase activating protein for Arf
  misc_feature (50)..(497): Homolog of NCBI NO: 15231865 NR Description: putative protein; protein id: At3g53710.1
  misc_feature (50)..(493): Homolog of NCBI NO: 10441356 NR Description: ARF GAP-like zinc finger-containing protein ZIGA2
  misc_feature (194)..(498): Homolog of NCBI NO: 29367415 NR Description: ADP ribosylation GTPase-like protein [Oryza
  misc_feature (50)..(497): Homolog of NCBI NO: 15224315 NR Description: putative ADP ribosylation factor 1 GTPase protein; protein id: At2g37550.1, supported by cDNA: gi_14334619, by cDNA: gi_16930688, supported by cDNA: gi_17104724, supported
  misc_feature (46)..(460): Homolog of NCBI NO: 21489979 NR Description: ADP-ribosylation factor 1 GTPase activating
  misc_feature (213)..(362): Homolog of NCBI NO: 6319975 NR Description: Zn-finger-containing protein that functions as
  misc_feature (52)..(165): Homolog of NCBI NO: 6319975 NR Description: Zn-finger-containing protein that functions as
  misc_feature (46)..(280): Homolog of NCBI NO: 26326517 NR Description: unnamed protein product [Mus musculus]
  misc_feature (46)..(331): Homolog of NCBI NO: 8922652 NR Description: ADP-ribosylation factor GTPase activating protein
  misc_feature (46)..(280): Homolog of NCBI NO: 37604182 NR Description: Unknown (protein for MGC:69580) [Mus musculus]
CRCRRWRVATGDFSASSSPFSPPRPARRDATTHLAADPRRRSNPAMASTAARRLRELQAQTGNKTCVDCAQRNPQWASVSYGVFMCLECSGKHRGLGVHISFVRSVTMDSWTEAQLRKMEAGGNDRLNAFLTARGVPKETSHVAKYNSNAAAAYRDRIAALAEGKPWTDPPVVKETPGSGAPAPARKPPLHASGGGGGWDDWDDDFRSDMRRNQSVGSFAAAGAQSGRQPPRSKSTQDIYTRQQLEASAANKDDFFARRMAENESKPEGIPPSQGGKYVGFGSSPAPSANRNGGAAQGDVLQVVSQGFGRLSLVAASAAQSAASVVQVGTKEIQSKMRDGGYDQKVNETVSVVANKTAEIGSKTWGIMRGVMAMASQKVEEYAKEGGMSGWGEDWQRSEQNGEPYQRFEHATNSNSWNSSQNSSSKNNNSSSWDDWDDQGKKGEPAKPHQSSDSWAGWDDGKDDGFDSPGYNNHNSSNKGSNHNGTSGGSFWREGGFR

SEQ ID NO: 8895 - protein, 453 aa, Zea mays subsp. mays
  peptide (1)..(453): Ceres Seq. ID no. 12365826
  misc_feature (6)..(122): Pfam Name: Putative GTPase activating protein for Arf Pfam Description: Putative GTPase activating protein for Arf
  misc_feature (5)..(452): Homolog of NCBI NO: 15231865 NR Description: putative protein; protein id: At3g53710.1
  misc_feature (5)..(448): Homolog of NCBI NO: 10441356 NR Description: ARF GAP-like zinc finger-containing protein ZIGA2
  misc_feature (149)..(453): Homolog of NCBI NO: 29367415 NR Description: ADP ribosylation GTPase-like protein [Oryza
  misc_feature (5)..(452): Homolog of NCBI NO: 15224315 NR Description: putative ADP ribosylation factor 1 GTPase protein; protein id: At2g37550.1, supported by cDNA: gi_14334619, by cDNA: gi_16930688, supported by cDNA: gi_17104724, supported
  misc_feature (1)..(415): Homolog of NCBI NO: 21489979 NR Description: ADP-ribosylation factor 1 GTPase activating
  misc_feature (168)..(317): Homolog of NCBI NO: 6319975 NR Description: Zn-finger-containing protein that functions as
  misc_feature (7)..(120): Homolog of NCBI NO: 6319975 NR Description: Zn-finger-containing protein that functions as
  misc_feature (1)..(235): Homolog of NCBI NO: 26326517 NR Description: unnamed protein product [Mus musculus]
  misc_feature (1)..(286): Homolog of NCBI NO: 8922652 NR Description: ADP-ribosylation factor GTPase activating protein
  misc_feature (1)..(235): Homolog of NCBI NO: 37604182 NR Description: Unknown (protein for MGC:69580) [Mus musculus]
MASTAARRLRELQAQTGNKTCVDCAQRNPQWASVSYGVFMCLECSGKHRGLGVHISFVRSVTMDSWTEAQLRKMEAGGNDRLNAFLTARGVPKETSHVAKYNSNAAAAYRDRIAALAEGKPWTDPPVVKETPGSGAPAPARKPPLHASGGGGGWDDWDDDFRSDMRRNQSVGSFAAAGAQSGRQPPRSKSTQDIYTRQQLEASAANKDDFFARRMAENESKPEGIPPSQGGKYVGFGSSPAPSANRNGGAAQGDVLQVVSQGFGRLSLVAASAAQSAASVVQVGTKEIQSKMRDGGYDQKVNETVSVVANKTAEIGSKTWGIMRGVMAMASQKVEEYAKEGGMSGWGEDWQRSEQNGEPYQRFEHATNSNSWNSSQNSSSKNNNSSSWDDWDDQGKKGEPAKPHQSSDSWAGWDDGKDDGFDSPGYNNHNSSNKGSNHNGTSGGSFWREGGFR

SEQ ID NO: 8896 - protein, 414 aa, Zea mays subsp. mays
  peptide (1)..(414): Ceres Seq. ID no. 12365827
  misc_feature (1)..(83): Pfam Name: Putative GTPase activating protein for Arf Pfam Description: Putative GTPase activating protein for Arf
  misc_feature (1)..(413): Homolog of NCBI NO: 15231865 NR Description: putative protein; protein id: At3g53710.1
  misc_feature (1)..(409): Homolog of NCBI NO: 10441356 NR Description: ARF GAP-like zinc finger-containing protein ZIGA2
  misc_feature (110)..(414): Homolog of NCBI NO: 29367415 NR Description: ADP ribosylation GTPase-like protein [Oryza
  misc_feature (1)..(413): Homolog of NCBI NO: 15224315 NR Description: putative ADP ribosylation factor 1 GTPase protein; protein id: At2g37550.1, supported by cDNA: gi_14334619, by cDNA: gi_16930688, supported by cDNA: gi_17104724, supported
  misc_feature (1)..(376): Homolog of NCBI NO: 21489979 NR Description: ADP-ribosylation factor 1 GTPase activating
  misc_feature (129)..(278): Homolog of NCBI NO: 6319975 NR Description: Zn-finger-containing protein that functions as
  misc_feature (1)..(81): Homolog of NCBI NO: 6319975 NR Description: Zn-finger-containing protein that functions as
  misc_feature (1)..(196): Homolog of NCBI NO: 26326517 NR Description: unnamed protein product [Mus musculus]
  misc_feature (1)..(247): Homolog of NCBI NO: 8922652 NR Description: ADP-ribosylation factor GTPase activating protein
  misc_feature (1)..(196): Homolog of NCBI NO: 37604182 NR Description: Unknown (protein for MGC:69580) [Mus musculus]
MCLECSGKHRGLGVHISFVRSVTMDSWTEAQLRKMEAGGNDRLNAFLTARGVPKETSHVAKYNSNAAAAYRDRIAALAEGKPWTDPPVVKETPGSGAPAPARKPPLHASGGGGGWDDWDDDFRSDMRRNQSVGSFAAAGAQSGRQPPRSKSTQDIYTRQQLEASAANKDDFFARRMAENESKPEGIPPSQGGKYVGFGSSPAPSANRNGGAAQGDVLQVVSQGFGRLSLVAASAAQSAASVVQVGTKEIQSKMRDGGYDQKVNETVSVVANKTAEIGSKTWGIMRGVMAMASQKVEEYAKEGGMSGWGEDWQRSEQNGEPYQRFEHATNSNSWNSSQNSSSKNNNSSSWDDWDDQGKKGEPAKPHQSSDSWAGWDDGKDDGFDSPGYNNHNSSNKGSNHNGTSGGSFWREGGFR

SEQ ID NO: 8897 - DNA, 495 bp, Zea mays subsp. mays
  misc_feature (1)..(495): Ceres Seq. ID no. 4611687
  misc_feature: MA Experiment ID: 20001614 Result: Up-regulated in Transcription
  misc_feature: MA Experiment 20001614 PARAMETER Experiment Name: Zm_50ppm_KNO3_L-to-H_P Parameter: Age (day) Value: 21
  misc_feature: MA Experiment 20001614 PARAMETER Experiment Name: Zm_50ppm_KNO3_L-to-H_P Parameter: Organism Value: Zea mays
  misc_feature: MA Experiment 20001614 PARAMETER Experiment Name: Zm_50ppm_KNO3_L-to-H_P Parameter: Plant Line Value: 35A19
  misc_feature: MA Experiment 20001614 PARAMETER Experiment Name: Zm_50ppm_KNO3_L-to-H_P Parameter: Timepoint (hr) Value: 48
  misc_feature: MA Experiment 20001614 PARAMETER Experiment Name: Zm_50ppm_KNO3_L-to-H_P Parameter: Tissue Value: Roots
  misc_feature: MA Experiment 20001614 PARAMETER Experiment Name: Zm_50ppm_KNO3_L-to-H_P Parameter: Treatment Value: 50ppm KNO3 vs. 50ppm KCl
aaagcagagtctgcccctccccgcgccgttctttttggttccccagtccccgccgccgccgaaacccgcagatggaggtcgtcgtcgccgcgamssagaaggcgaagaaacacatacacctcttctactgctcagaatgcgaggagctcgccctcaagatcgccgccagctccgacgccatcgagctccaatccatcaactggcggassttcgacgacgggttcccgaacctattcatcgcctcattcacgctcgtgctgccattcttccccacgggctcattcgagcgcgttgaggaggagggcgatgtcgccaccgcgttcaccctcgcgcgcattctctcgatgatccccaagtcgcgcggcgggcctaccagcgtcgtcatctacgacatccacgcgctccaggagaggttttacttcggggacgatgtctgccatgcttcgagacagggatcccgctcctgctgcagcgcctccgccagctcccggacgc

SEQ ID NO: 8898 - protein, 164 aa, Zea mays subsp. mays
  peptide (1)..(164): Ceres Seq. ID no. 4611688
  misc_feature (75)..(151): Homolog of NCBI NO: 4902877 NR Description: phosphoribosyl pyrophosphate synthase isozyme 3
  misc_feature (16)..(81): Homolog of NCBI NO: 4902877 NR Description: phosphoribosyl pyrophosphate synthase isozyme 3
  misc_feature (75)..(151): Homolog of NCBI NO: 15220191 NR Description: phosphoribosyl diphosphate synthase; protein id: supported by cDNA: gi_16604385, supported by cDNA: gi_19699209 thaliana] >gi|16604386|gb|AAL24199.1| At1g10700/F20B24.13
  misc_feature (75)..(151): Homolog of NCBI NO: 25529012 NR Description: ribose-phosphate diphosphokinase (EC 2.7.6.1)
  misc_feature (75)..(151): Homolog of NCBI NO: 25402614 NR Description: hypothetical protein [imported] - Arabidopsis >gi|4874278|gb|AAD31343.1|AC007354_16 Strong similarity to
  misc_feature (33)..(79): Homolog of NCBI NO: 15220191 NR Description: phosphoribosyl diphosphate synthase; protein id: supported by cDNA: gi_16604385, supported by cDNA: gi_19699209 thaliana] >gi|16604386|gb|AAL24199.1| At1g10700/F20B24.13
  misc_feature (33)..(79): Homolog of NCBI NO: 25529012 NR Description: ribose-phosphate diphosphokinase (EC 2.7.6.1)
  misc_feature (33)..(79): Homolog of NCBI NO: 25402614 NR Description: hypothetical protein [imported] - Arabidopsis >gi|4874278|gb|AAD31343.1|AC007354_16 Strong similarity to
  misc_feature (75)..(151): Homolog of NCBI NO: 34910736 NR Description: putative phosphoribosyl pyrophosphate synthase
  misc_feature (34)..(81): Homolog of NCBI NO: 34910736 NR Description: putative phosphoribosyl pyrophosphate synthase
  misc_feature (31)..(31): Xaa is any aa, unknown or other
  misc_feature (32)..(32): Xaa is any aa, unknown or other
  misc_feature (69)..(69): Xaa is any aa, unknown or other
SRVCPSPRRSFWFPSPRRRRNPQMEVVVAAXXKAKKHIHLFYCSECEELALKIAASSDAIELQSINWRXFDDGFPNLFIASFTLVLPFFPTGSFERVEEEGDVATAFTLARILSMIPKSRGGPTSVVIYDIHALQERFYFGDDVCHASRQGSRSCCSASASSRT

SEQ ID NO: 8899 - protein, 141 aa, Zea mays subsp. mays
  peptide (1)..(141): Ceres Seq. ID no. 4611689
  misc_feature (52)..(128): Homolog of NCBI NO: 4902877 NR Description: phosphoribosyl pyrophosphate synthase isozyme 3
  misc_feature (1)..(58): Homolog of NCBI NO: 4902877 NR Description: phosphoribosyl pyrophosphate synthase isozyme 3
  misc_feature (52)..(128): Homolog of NCBI NO: 15220191 NR Description: phosphoribosyl diphosphate synthase; protein id: supported by cDNA: gi_16604385, supported by cDNA: gi_19699209 thaliana] >gi|16604386|gb|AAL24199.1| At1g10700/F20B24.13
  misc_feature (52)..(128): Homolog of NCBI NO: 25402614 NR Description: hypothetical protein [imported] - Arabidopsis >gi|4874278|gb|AAD31343.1|AC007354_16 Strong similarity to
  misc_feature (52)..(128): Homolog of NCBI NO: 25529012 NR Description: ribose-phosphate diphosphokinase (EC 2.7.6.1)
  misc_feature (10)..(56): Homolog of NCBI NO: 15220191 NR Description: phosphoribosyl diphosphate synthase; protein id: supported by cDNA: gi_16604385, supported by cDNA: gi_19699209 thaliana] >gi|16604386|gb|AAL24199.1| At1g10700/F20B24.13
  misc_feature (10)..(56): Homolog of NCBI NO: 25402614 NR Description: hypothetical protein [imported] - Arabidopsis >gi|4874278|gb|AAD31343.1|AC007354_16 Strong similarity to
  misc_feature (10)..(56): Homolog of NCBI NO: 25529012 NR Description: ribose-phosphate diphosphokinase (EC 2.7.6.1)
  misc_feature (52)..(128): Homolog of NCBI NO: 34910736 NR Description: putative phosphoribosyl pyrophosphate synthase
  misc_feature (11)..(58): Homolog of NCBI NO: 34910736 NR Description: putative phosphoribosyl pyrophosphate synthase
  misc_feature (8)..(8): Xaa is any aa, unknown or other
  misc_feature (9)..(9): Xaa is any aa, unknown or other
  misc_feature (46)..(46): Xaa is any aa, unknown or other
MEVVVAAXXKAKKHIHLFYCSECEELALKIAASSDAIELQSINWRXFDDGFPNLFIASFTLVLPFFPTGSFERVEEEGDVATAFTLARILSMIPKSRGGPTSVVIYDIHALQERFYFGDDVCHASRQGSRSCCSASASSRT

SEQ ID NO: 8900 - protein, 115 aa, Zea mays subsp. mays
  peptide (1)..(115): Ceres Seq. ID no. 4611690
  misc_feature (2)..(115): Homolog of NCBI NO: 13592175 NR Description: ppg3 [Leishmania major]
  misc_feature (2)..(115): Homolog of NCBI NO: 13592175 NR Description: ppg3 [Leishmania major]
  misc_feature (6)..(115): Homolog of NCBI NO: 11360318 NR Description: probable mucin DKFZp434C196.1 - human (fragment)
  misc_feature (27)..(115): Homolog of NCBI NO: 11359723 NR Description: proteophosphoglycan, membrane-associated - Leishmania major (fragment) >gi|5420389|emb|CAB46680.1|
  misc_feature (20)..(115): Homolog of NCBI NO: 9843651 NR Description: SRM102 [Arabidopsis thaliana]
  misc_feature (4)..(115): Homolog of NCBI NO: 2911555 NR Description: E2 protein [Human papillomavirus type 76]
  misc_feature (6)..(115): Homolog of NCBI NO: 15238868 NR Description: putative protein; protein id: At5g53870.1 thaliana] >gi|10177249|dbj|BAB10717.1| contains similarity to
  misc_feature (2)..(115): Homolog of NCBI NO: 13592175 NR Description: ppg3 [Leishmania major]
  misc_feature (2)..(115): Homolog of NCBI NO: 11359723 NR Description: proteophosphoglycan, membrane-associated - Leishmania major (fragment) >gi|5420389|emb|CAB46680.1|
  misc_feature (27)..(115): Homolog of NCBI NO: 11359723 NR Description: proteophosphoglycan, membrane-associated - Leishmania major (fragment) >gi|5420389|emb|CAB46680.1|
  misc_feature (32)..(32): Xaa is any aa, unknown or other
  misc_feature (70)..(70): Xaa is any aa, unknown or other
KAESAPPRAVLFGSPVPAAAETRRWRSSSPRXRRRRNTYTSSTAQNARSSPSRSPPAPTPSSSNPSTGGXSTTGSRTYSSPHSRSCCHSSPRAHSSALRRRAMSPPRSPSRAFSR

SEQ ID NO: 8901 - DNA, 986 bp, Zea mays subsp. mays
  misc_feature (1)..(986): Ceres Seq. ID no. 12369222
  misc_feature: MA Experiment ID: 108527 Result: Up-regulated in Transcription
  misc_feature: MA Experiment 108527 PARAMETER Experiment Name: Zm_5mM_NO_P Parameter: Age (day) Value: 8
  misc_feature: MA Experiment 108527 PARAMETER Experiment Name: Zm_5mM_NO_P Parameter: Organism Value: Zea mays
  misc_feature: MA Experiment 108527 PARAMETER Experiment Name: Zm_5mM_NO_P Parameter: Plant Line Value: 35A19
  misc_feature: MA Experiment 108527 PARAMETER Experiment Name: Zm_5mM_NO_P Parameter: Timepoint (hr) Value: 6
  misc_feature: MA Experiment 108527 PARAMETER Experiment Name: Zm_5mM_NO_P Parameter: Tissue Value: Aerial
  misc_feature: MA Experiment 108527 PARAMETER Experiment Name: Zm_5mM_NO_P Parameter: Treatment Value: 5mM NO vs. No Treatment
  misc_feature: MA Experiment ID: 108528 Result: Down-regulated in Transcription
  misc_feature: MA Experiment 108528 PARAMETER Experiment Name: Zm_Imbibed_Seeds_P Parameter: Age (day) Value: 5 vs. 2
  misc_feature: MA Experiment 108528 PARAMETER Experiment Name: Zm_Imbibed_Seeds_P Parameter: Organism Value: Zea mays
  misc_feature: MA Experiment 108528 PARAMETER Experiment Name: Zm_Imbibed_Seeds_P Parameter: Plant Line Value: 35A19
  misc_feature: MA Experiment 108528 PARAMETER Experiment Name: Zm_Imbibed_Seeds_P Parameter: Tissue Value: Aerial vs. Embryo
  misc_feature: MA Experiment ID: 108529 Result: Up-regulated in Transcription
  misc_feature: MA Experiment 108529 PARAMETER Experiment Name: Zm_Imbibed_Seeds_P Parameter: Age (day) Value: 5 vs. 2
  misc_feature: MA Experiment 108529 PARAMETER Experiment Name: Zm_Imbibed_Seeds_P Parameter: Organism Value: Zea mays
  misc_feature: MA Experiment 108529 PARAMETER Experiment Name: Zm_Imbibed_Seeds_P Parameter: Plant Line Value: 35A19
  misc_feature: MA Experiment 108529 PARAMETER Experiment Name: Zm_Imbibed_Seeds_P Parameter: Tissue Value: Roots vs. Embryo
  misc_feature: MA Experiment ID: 108530 Result: Down-regulated in Transcription
  misc_feature: MA Experiment 108530 PARAMETER Experiment Name: Zm_Imbibed_Seeds_P Parameter: Age (day) Value: 6 vs. 2
  misc_feature: MA Experiment 108530 PARAMETER Experiment Name: Zm_Imbibed_Seeds_P Parameter: Organism Value: Zea mays
  misc_feature: MA Experiment 108530 PARAMETER Experiment Name: Zm_Imbibed_Seeds_P Parameter: Plant Line Value: 35A19
  misc_feature: MA Experiment 108530 PARAMETER Experiment Name: Zm_Imbibed_Seeds_P Parameter: Tissue Value: Aerial vs. Embryo
  misc_feature: MA Experiment ID: 108535 Result: Down-regulated in Transcription
  misc_feature: MA Experiment 108535 PARAMETER Experiment Name: Zm_Meristem_P Parameter: Age (day) Value: 8
  misc_feature: MA Experiment 108535 PARAMETER Experiment Name: Zm_Meristem_P Parameter: Organism Value: Zea mays
  misc_feature: MA Experiment 108535 PARAMETER Experiment Name: Zm_Meristem_P Parameter: Plant Line Value: 35A19
  misc_feature: MA Experiment 108535 PARAMETER Experiment Name: Zm_Meristem_P Parameter: Tissue Value: Root Meristem vs. Above Root Meristem
  misc_feature: MA Experiment ID: 108545 Result: Down-regulated in Transcription
  misc_feature: MA Experiment 108545 PARAMETER Experiment Name: Zm_Imbibed_Seeds_P Parameter: Age (day) Value: 3 vs. 2
  misc_feature: MA Experiment 108545 PARAMETER Experiment Name: Zm_Imbibed_Seeds_P Parameter: Organism Value: Zea mays
  misc_feature: MA Experiment 108545 PARAMETER Experiment Name: Zm_Imbibed_Seeds_P Parameter: Plant Line Value: 35A19
  misc_feature: MA Experiment 108545 PARAMETER Experiment Name: Zm_Imbibed_Seeds_P Parameter: Tissue Value: Aerial vs. Embryo
  misc_feature: MA Experiment ID: 108547 Result: Down-regulated in Transcription
  misc_feature: MA Experiment 108547 PARAMETER Experiment Name: Zm_Imbibed_Seeds_P Parameter: Age (day) Value: 4 vs. 2
  misc_feature: MA Experiment 108547 PARAMETER Experiment Name: Zm_Imbibed_Seeds_P Parameter: Organism Value: Zea mays
  misc_feature: MA Experiment 108547 PARAMETER Experiment Name: Zm_Imbibed_Seeds_P Parameter: Plant Line Value: 35A19
  misc_feature: MA Experiment 108547 PARAMETER Experiment Name: Zm_Imbibed_Seeds_P Parameter: Tissue Value: Aerial vs. Embryo
  misc_feature: MA Experiment ID: 108559 Result: Up-regulated in Transcription
  misc_feature: MA Experiment 108559 PARAMETER Experiment Name: Zm_5mM_NO_P Parameter: Age (day) Value: 8
  misc_feature: MA Experiment 108559 PARAMETER Experiment Name: Zm_5mM_NO_P Parameter: Organism Value: Zea mays
  misc_feature: MA Experiment 108559 PARAMETER Experiment Name: Zm_5mM_NO_P Parameter: Plant Line Value: 35A19
  misc_feature: MA Experiment 108559 PARAMETER Experiment Name: Zm_5mM_NO_P Parameter: Timepoint (hr) Value: 12
  misc_feature: MA Experiment 108559 PARAMETER Experiment Name: Zm_5mM_NO_P Parameter: Tissue Value: Aerial
  misc_feature: MA Experiment 108559 PARAMETER Experiment Name: Zm_5mM_NO_P Parameter: Treatment Value: 5mM NO vs. No Treatment
  misc_feature: MA Experiment ID: 20000108 Result: Down-regulated in Transcription
  misc_feature: MA Experiment 20000108 PARAMETER Experiment Name: Zm_Root-Tips_P Parameter: Age (day) Value: 12
  misc_feature: MA Experiment 20000108 PARAMETER Experiment Name: Zm_Root-Tips_P Parameter: Organism Value: Zea mays
  misc_feature: MA Experiment 20000108 PARAMETER Experiment Name: Zm_Root-Tips_P Parameter: Tissue Value: Root tips vs. Root mid region    35
  misc_feature: MA Experiment 20000108 PARAMETER Experiment Name: Zm_Root-Tips_P Parameter: Tissue Value: Root tips vs. Root mid region   Sequence Listing-Misc Features (4)
  misc_feature: MA Experiment ID: 20000477 Result: Up-regulated in Transcription
  misc_feature: MA Experiment 20000477 PARAMETER Experiment Name: Zm_5mM_SA_P Parameter: Age (day) Value: 10
  misc_feature: MA Experiment 20000477 PARAMETER Experiment Name: Zm_5mM_SA_P Parameter: Organism Value: Zea mays
  misc_feature: MA Experiment 20000477 PARAMETER Experiment Name: Zm_5mM_SA_P Parameter: Plant Line Value: 35A19
  misc_feature: MA Experiment 20000477 PARAMETER Experiment Name: Zm_5mM_SA_P Parameter: Timepoint (hr) Value: 48
  misc_feature: MA Experiment 20000477 PARAMETER Experiment Name: Zm_5mM_SA_P Parameter: Tissue Value: Aerial
  misc_feature: MA Experiment 20000477 PARAMETER Experiment Name: Zm_5mM_SA_P Parameter: Treatment Value: 5mM SA vs. No Treatment
  misc_feature: MA Experiment ID: 20000478 Result: Up-regulated in Transcription
  misc_feature: MA Experiment 20000478 PARAMETER Experiment Name: Zm_5mM_SA_P Parameter: Age (day) Value: 11
  misc_feature: MA Experiment 20000478 PARAMETER Experiment Name: Zm_5mM_SA_P Parameter: Organism Value: Zea mays
  misc_feature: MA Experiment 20000478 PARAMETER Experiment Name: Zm_5mM_SA_P Parameter: Plant Line Value: 35A19
  misc_feature: MA Experiment 20000478 PARAMETER Experiment Name: Zm_5mM_SA_P Parameter: Timepoint (hr) Value: 72
  misc_feature: MA Experiment 20000478 PARAMETER Experiment Name: Zm_5mM_SA_P Parameter: Tissue Value: Aerial
  misc_feature: MA Experiment 20000478 PARAMETER Experiment Name: Zm_5mM_SA_P Parameter: Treatment Value: 5mM SA vs. No Treatment
  misc_feature: MA Experiment ID: 20000480 Result: Up-regulated in Transcription
  misc_feature: MA Experiment 20000480 PARAMETER Experiment Name: Zm_Drought_P Parameter: Age (day) Value: 11
  misc_feature: MA Experiment 20000480 PARAMETER Experiment Name: Zm_Drought_P Parameter: Organism Value: Zea mays
  misc_feature: MA Experiment 20000480 PARAMETER Experiment Name: Zm_Drought_P Parameter: Plant Line Value: 35A19
  misc_feature: MA Experiment 20000480 PARAMETER Experiment Name: Zm_Drought_P Parameter: Timepoint (hr) Value: 72
  misc_feature: MA Experiment 20000480 PARAMETER Experiment Name: Zm_Drought_P Parameter: Tissue Value: Aerial
  misc_feature: MA Experiment 20000480 PARAMETER Experiment Name: Zm_Drought_P Parameter: Treatment Value: Drought vs. No Drought
  misc_feature: MA Experiment ID: 20000487 Result: Down-regulated in Transcription
  misc_feature: MA Experiment 20000487 PARAMETER Experiment Name: Zm_50mM_NH4NO3_L_to_H_P Parameter: Organism Value: Zea mays
  misc_feature: MA Experiment 20000487 PARAMETER Experiment Name: Zm_50mM_NH4NO3_L_to_H_P Parameter: Timepoint (hr) Value: 4
  misc_feature: MA Experiment 20000487 PARAMETER Experiment Name: Zm_50mM_NH4NO3_L_to_H_P Parameter: Tissue Value: Leaves
  misc_feature: MA Experiment 20000487 PARAMETER Experiment Name: Zm_50mM_NH4NO3_L_to_H_P Parameter: Treatment Value: 50mM NH4NO3 vs. 100mM Mannitol
  misc_feature: MA Experiment ID: 20000488 Result: Down-regulated in Transcription
  misc_feature: MA Experiment 20000488 PARAMETER Experiment Name: Zm_50mM_NH4NO3_L_to_H_P Parameter: Organism Value: Zea mays
  misc_feature: MA Experiment 20000488 PARAMETER Experiment Name: Zm_50mM_NH4NO3_L_to_H_P Parameter: Timepoint (hr) Value: 8
  misc_feature: MA Experiment 20000488 PARAMETER Experiment Name: Zm_50mM_NH4NO3_L_to_H_P Parameter: Tissue Value: Leaves
  misc_feature: MA Experiment 20000488 PARAMETER Experiment Name: Zm_50mM_NH4NO3_L_to_H_P Parameter: Treatment Value: 50mM NH4NO3 vs. 100mM Mannitol
  misc_feature: MA Experiment ID: 20000532 Result: Up-regulated in Transcription
  misc_feature: MA Experiment 20000532 PARAMETER Experiment Name: Zm_0.001percent_MeJA_P Parameter: Age (day) Value: 10
  misc_feature: MA Experiment 20000532 PARAMETER Experiment Name: Zm_0.001percent_MeJA_P Parameter: Organism Value: Zea mays
  misc_feature: MA Experiment 20000532 PARAMETER Experiment Name: Zm_0.001percent_MeJA_P Parameter: Plant Line Value: 35A19
  misc_feature: MA Experiment 20000532 PARAMETER Experiment Name: Zm_0.001percent_MeJA_P Parameter: Timepoint (hr) Value: 48
  misc_feature: MA Experiment 20000532 PARAMETER Experiment Name: Zm_0.001percent_MeJA_P Parameter: Tissue Value: Aerial
  misc_feature: MA Experiment 20000532 PARAMETER Experiment Name: Zm_0.001percent_MeJA_P Parameter: Treatment Value: 0.001percent MeJA vs. No Treatment
  misc_feature: MA Experiment ID: 20000533 Result: Up-regulated in Transcription
  misc_feature: MA Experiment 20000533 PARAMETER Experiment Name: Zm_0.001percent_MeJA_P Parameter: Age (day) Value: 11
  misc_feature: MA Experiment 20000533 PARAMETER Experiment Name: Zm_0.001percent_MeJA_P Parameter: Organism Value: Zea mays
  misc_feature: MA Experiment 20000533 PARAMETER Experiment Name: Zm_0.001percent_MeJA_P Parameter: Plant Line Value: 35A19
  misc_feature: MA Experiment 20000533 PARAMETER Experiment Name: Zm_0.001percent_MeJA_P Parameter: Timepoint (hr) Value: 72
  misc_feature: MA Experiment 20000533 PARAMETER Experiment Name: Zm_0.001percent_MeJA_P Parameter: Tissue Value: Aerial
  misc_feature: MA Experiment 20000533 PARAMETER Experiment Name: Zm_0.001percent_MeJA_P Parameter: Treatment Value: 0.001percent MeJA vs. No Treatment
  misc_feature: MA Experiment ID: 20000535 Result: Down-regulated in Transcription
  misc_feature: MA Experiment 20000535 PARAMETER Experiment Name: Zm_Hybrid_Seed_Dev_P Parameter: DAP Value: 30 vs. 12
  misc_feature: MA Experiment 20000535 PARAMETER Experiment Name: Zm_Hybrid_Seed_Dev_P Parameter: Organism Value: Zea mays
  misc_feature: MA Experiment 20000535 PARAMETER Experiment Name: Zm_Hybrid_Seed_Dev_P Parameter: Plant Line Value: 35A19
  misc_feature: MA Experiment 20000535 PARAMETER Experiment Name: Zm_Hybrid_Seed_Dev_P Parameter: Tissue Value: Embryo vs. Unfert Floret
  misc_feature: MA Experiment ID: 20000626 Result: Up-regulated in Transcription
  misc_feature: MA Experiment 20000626 PARAMETER Experiment Name: Zm_Herbicide-Treatments_P Parameter: Timepoint (hr) Value: 12
  misc_feature: MA Experiment 20000626 PARAMETER Experiment Name: Zm_Herbicide-Treatments_P Parameter: Tissue Value: Aerial
  misc_feature: MA Experiment 20000626 PARAMETER Experiment Name: Zm_Herbicide-Treatments_P Parameter: Treatment Value: Roundup vs. No Treatment
  misc_feature: MA Experiment ID: 20000627 Result: Up-regulated in Transcription
  misc_feature: MA Experiment 20000627 PARAMETER Experiment Name: Zm_Herbicide-Treatments_P Parameter: Timepoint (hr) Value: 12
  misc_feature: MA Experiment 20000627 PARAMETER Experiment Name: Zm_Herbicide-Treatments_P Parameter: Tissue Value: Aerial
  misc_feature: MA Experiment 20000627 PARAMETER Experiment Name: Zm_Herbicide-Treatments_P Parameter: Treatment Value: Finale vs. No Treatment
  misc_feature: MA Experiment ID: 20000629 Result: Up-regulated in Transcription
  misc_feature: MA Experiment 20000629 PARAMETER Experiment Name: Zm_Herbicide-Treatments_P Parameter: Timepoint (hr) Value: 12
  misc_feature: MA Experiment 20000629 PARAMETER Experiment Name: Zm_Herbicide-Treatments_P Parameter: Tissue Value: Aerial
  misc_feature: MA Experiment 20000629 PARAMETER Experiment Name: Zm_Herbicide-Treatments_P Parameter: Treatment Value: Trimec vs. No Treatment
  misc_feature: MA Experiment ID: 20000633 Result: Up-regulated in Transcription
  misc_feature: MA Experiment 20000633 PARAMETER Experiment Name: Zm_Herbicide-Treatments_P Parameter: Timepoint (hr) Value: 4
  misc_feature: MA Experiment 20000633 PARAMETER Experiment Name: Zm_Herbicide-Treatments_P Parameter: Tissue Value: Aerial
  misc_feature: MA Experiment 20000633 PARAMETER Experiment Name: Zm_Herbicide-Treatments_P Parameter: Treatment Value: Trimec vs. No Treatment
attcgagaggaaaggaagaagaactggagaggaaaaaaagtgtaggatcgagggagatggagagcggccaagcgtggaccaacgactcctcttctccgatcctcccgcagctgcaggccgtagctagctctataaaaagctaagggagcctgcctgccatcgtcgtgcatcgtcatccaccacgatcgataaagctaattaagctgctactgctacgctagcctcgatcgatcaagcaagcagctcacagacccaccggcccacccacccacccacatggcggcgtcccgttccgctctgatcacgctgctcgtccttgtgagctccgtcgcggcggcctcggcgaccacgttcaccgtcggcgacagtagcggctggagtcgtagcgtcaactacgacaactgggccagtggcaagaccttcacggatggagatcagctagtgttcaacttcgccaccgggaaccacgacgtggtggaggtggacaagagcggatacgacggctgctccaccaccaacgccgccaacacaatccaaaacggcccggccaccgtcaacctcacctccggcacccactactacatctgcggcttcaccggccactgcagcgccgggatgaagctcgctgtcaccgtcggctccggctccggctccgggtcccccacccccggcggcggctcgcccagcacacccacaccaaccaccccgagcgcccccacccccgacactccggccagcgcgtccgtgcgcctcacggccggcccagcgctcgccgtggccgccaccgtgctcgtcgccctcttctgatctgatctgatctgatactgcatgcatgcaccgtgccaggaccaggatagaggcagtgcaggatcatagtattcttgtgtacgtacgtacatactttgttgttgagctagcgttttcattctgacgacggcggattattgtactctcgtacgtttttatttccacatgtactactgtct

SEQ ID NO: 8902 - protein, 176 aa, Zea mays subsp. mays
  peptide (1)..(176): Ceres Seq. ID no. 12369223
  misc_feature (39)..(113): Pfam Name: Plastocyanin-like domain Pfam Description: Plastocyanin-like domain
  misc_feature (5)..(176): Homolog of NCBI NO: 10798754 NR Description: elicitor inducible gene Nt-SA1-1 [Nicotiana
  misc_feature (1)..(174): Homolog of NCBI NO: 4104058 NR Description: blue copper-binding protein homolog [Triticum
  misc_feature (1)..(175): Homolog of NCBI NO: 7670832 NR Description: dicyanin [Lycopersicon esculentum]
  misc_feature (2)..(175): Homolog of NCBI NO: 38636763 NR Description: putative blue copper binding protein [Oryza
  misc_feature (1)..(174): Homolog of NCBI NO: 37651973 NR Description: blue copper binding protein [Hordeum vulgare
  misc_feature (3)..(158): Homolog of NCBI NO: 38636760 NR Description: putative blue copper binding protein [Oryza
  misc_feature (3)..(171): Homolog of NCBI NO: 38636761 NR Description: putative blue copper binding protein [Oryza
  misc_feature (11)..(154): Homolog of NCBI NO: 14140127 NR Description: uclacyanin 3-like protein [Oryza sativa]
  misc_feature (1)..(169): Homolog of NCBI NO: 38346158 NR Description: OSJNBa0079A21.5 [Oryza sativa (japonica
  misc_feature (1)..(173): Homolog of NCBI NO: 38636764 NR Description: putative blue copper binding protein [Oryza
MAASRSALITLLVLVSSVAAASATTFTVGDSSGWSRSVNYDNWASGKTFTDGDQLVFNFATGNHDVVEVDKSGYDGCSTTNAANTIQNGPATVNLTSGTHYYICGFTGHCSAGMKLAVTVGSGSGSGSPTPGGGSPSTPTPTTPSAPTPDTPASASVRLTAGPALAVAATVLVALF

SEQ ID NO: 8903 - DNA, 927 bp, Zea mays subsp. mays
  misc_feature (1)..(927): Ceres Seq. ID no. 12355214
  misc_feature: MA Experiment ID: 108556 Result: Down-regulated in Transcription
  misc_feature: MA Experiment 108556 PARAMETER Experiment Name: Zm_Drought_P Parameter: Age (day) Value: 9
  misc_feature: MA Experiment 108556 PARAMETER Experiment Name: Zm_Drought_P Parameter: Organism Value: Zea mays
  misc_feature: MA Experiment 108556 PARAMETER Experiment Name: Zm_Drought_P Parameter: Plant Line Value: 35A19
  misc_feature: MA Experiment 108556 PARAMETER Experiment Name: Zm_Drought_P Parameter: Timepoint (hr) Value: 24
  misc_feature: MA Experiment 108556 PARAMETER Experiment Name: Zm_Drought_P Parameter: Tissue Value: Aerial
  misc_feature: MA Experiment 108556 PARAMETER Experiment Name: Zm_Drought_P Parameter: Treatment Value: Drought vs. No Drought
agcagtccagcagagtttccgtctccccgactcccgagtcccgactgccggccctgacctgccctgcgccgcgcggagccgcggaccgcccgcccaccaccgaaaccctagagcaagcagggatgcacagtccggtcccgctcctcctcctcctgctcctctgcacggccgcggcggcctccgacggctcccagccccaggcgcaggcgcaggcacctggcgcggcacggcgggggatggtgccggtggcccccgcggaggcggagctcggcgccgtgaaggcgctcgccctcaacggcacgcggcgccggctcgggggcagcttccagctctgcgcgccctgcacctgctgcggcggggccagcggcgcctgcatcctcgcgccctgctgctactccatcaactgcaacatccccaaccgccccttcgggtactgctccttcacgcccaagtcctgccagtgcgtcggatgcaacctctgagctccgtggccgcgggattcattggattggattggtcagagtgtgtttgtgtgtgtgtgtgtgagagagagagagagtggggtggtaacgaatctgtataaaaaattccccacatccttagttaagtggcgattgctattacttctacctagtagtattttgctgtgatcactgctacgctcgacttagttgagggaaaaaaaagagaaaggggtctgggttgatctagaggtcactactctggggttttgcttttctgtcgccacacattggatgtctgattaggatgctacttgttcatagtggtttgttgttgatagctggaataaatatacctgtttaggtgcatggatctagtcatctagtgcattttagtggatgccatctcttccgtcctgatcagtgcctactgccctggaatgtgaatatgtgatagctctagctc

SEQ ID NO: 8904 - protein, 193 aa, Zea mays subsp. mays
  peptide (1)..(193): Ceres Seq. ID no. 12355215
  misc_feature (46)..(108): Pfam Name: TT viral ORF2 Pfam Description: TT viral ORF2
AVQQSFRLPDSRVPTAGPDLPCAARSRGPPAHHRNPRASRDAQSGPAPPPPAPLHGRGGLRRLPAPGAGAGTWRGTAGDGAGGPRGGGARRREGARPQRHAAPARGQLPALRALHLLRRGQRRLHPRALLLLHQLQHPQPPLRVLLLHAQVLPVRRMQPLSSVAAGFIGLDWSECVCVCVCEREREWGGNESV

SEQ ID NO: 8905 - protein, 159 aa, Zea mays subsp. mays
  peptide (1)..(159): Ceres Seq. ID no. 12355216
  misc_feature (47)..(159): Homolog of NCBI NO: 34906984 NR Description: P0413C03.15 [Oryza sativa (japonica
  misc_feature (35)..(159): Homolog of NCBI NO: 18408246 NR Description: Expressed protein; protein id: At1g65295.1, by cDNA: 5586. [Arabidopsis thaliana] >gi|24030191|gb|AAN41276.1|
  misc_feature (47)..(159): Homolog of NCBI NO: 21954063 NR Description: unknown protein [Arabidopsis thaliana]
  misc_feature (35)..(159): Homolog of NCBI NO: 21593890 NR Description: unknown [Arabidopsis thaliana]
  misc_feature (101)..(159): Homolog of NCBI NO: 18412619 NR Description: Expressed protein; protein id: At5g01015.1, by cDNA: 32396. [Arabidopsis thaliana]
QSSRVSVSPTPESRLPALTCPAPRGAADRPPTTETLEQAGMHSPVPLLLLLLLCTAAAASDGSQPQAQAQAPGAARRGMVPVAPAEAELGAVKALALNGTRRRLGGSFQLCAPCTCCGGASGACILAPCCYSINCNIPNRPFGYCSFTPKSCQCVGCNL

SEQ ID NO: 8906 - protein, 119 aa, Zea mays subsp. mays
  peptide (1)..(119): Ceres Seq. ID no. 12355217
  misc_feature (7)..(119): Homolog of NCBI NO: 34906984 NR Description: P0413C03.15 [Oryza sativa (japonica
  misc_feature (1)..(119): Homolog of NCBI NO: 18408246 NR Description: Expressed protein; protein id: At1g65295.1, by cDNA: 5586. [Arabidopsis thaliana] >gi|24030191|gb|AAN41276.1|
  misc_feature (7)..(119): Homolog of NCBI NO: 21954063 NR Description: unknown protein [Arabidopsis thaliana]
  misc_feature (1)..(119): Homolog of NCBI NO: 21593890 NR Description: unknown [Arabidopsis thaliana]
  misc_feature (61)..(119): Homolog of NCBI NO: 18412619 NR Description: Expressed protein; protein id: At5g01015.1, by cDNA: 32396. [Arabidopsis thaliana]
MHSPVPLLLLLLLCTAAAASDGSQPQAQAQAPGAARRGMVPVAPAEAELGAVKALALNGTRRRLGGSFQLCAPCTCCGGASGACILAPCCYSINCNIPNRPFGYCSFTPKSCQCVGCNL

SEQ ID NO: 8907 - DNA, 876 bp, Zea mays subsp. mays
  misc_feature (1)..(876): Ceres Seq. ID no. 12359909
  misc_feature: MA Experiment ID: 108535 Result: Up-regulated in Transcription
  misc_feature: MA Experiment 108535 PARAMETER Experiment Name: Zm_Meristem_P Parameter: Age (day) Value: 8
  misc_feature: MA Experiment 108535 PARAMETER Experiment Name: Zm_Meristem_P Parameter: Organism Value: Zea mays
  misc_feature: MA Experiment 108535 PARAMETER Experiment Name: Zm_Meristem_P Parameter: Plant Line Value: 35A19
  misc_feature: MA Experiment 108535 PARAMETER Experiment Name: Zm_Meristem_P Parameter: Tissue Value: Root Meristem vs. Above Root Meristem
aaatcgctctctgcccccgatcaccggtcgcctcccttccgctcccctgcctgcctaatccctccggccaccccgaaaccgctcgctcgctcgctcgctccccgcgcccagagacaagcccggagaccatggcggaccagctcactgacgaccaaatcgccgagttcaaggaggccttcagcctcttcgataaggacggcgacggttgcatcacaaccaaggagcttggaactgtcatgcgttcactgggtcagaacccaacggaggctgaactccaggacatgatcaatgaggtggatgccgacggcatggcacgatcgacttccccgagttcctcaacctcatggcccgcaagatgaaggacaccgactccgaggaggagctcaaggaggcgttcagggtgttcgacaaggaccagaacggcttcatctctgccgcggagctccgccacgtgatgaccaacctaggcgagaagctgaccgacgaggaggtcgacgagatgatccgcgaggccgacgttgatggcgatggccagatcaactacgaggagttcgtcaaggtcatgatggccaagtgagtaaagcctgcggtaatggtatagtaaccccgctcggaaggaggaaaccgtgcgttgcatattagtaaggcaatgcaatgcagctcttgtttccttcttcccgtgaagaaaccgtactagctgtagctgctgaacgtttgagtccctctgctgccacccttatctccattgtgccgtcgaacctccttgcttcccctgtgtgaatctgtacggattttcgtgttctgaacactgattgcagttgaatccagtttgtagttctatttgttcatcgaattcgaatctgcccgattcctttc

SEQ ID NO: 8908 - protein, 118 aa, Zea mays subsp. mays
  peptide (1)..(118): Ceres Seq. ID no. 12359910
  misc_feature (54)..(82): Pfam Name: EF hand Pfam Description: EF hand
  misc_feature (43)..(102): Homolog of NCBI NO: 34903134 NR Description: unnamed protein product [Oryza sativa (japonica
  misc_feature (43)..(102): Homolog of NCBI NO: 100665 NR Description: calmodulin 2 (clone lambda DASH) - rice
  misc_feature (43)..(102): Homolog of NCBI NO: 15229784 NR Description: calmodulin 7; protein id: At3g43810.1, supported cDNA: 7008., supported by cDNA: gi_5825597 [Arabidopsis thaliana]
  misc_feature (43)..(102): Homolog of NCBI NO: 34304715 NR Description: calmodulin 4 [Daucus carota]
  misc_feature (43)..(102): Homolog of NCBI NO: 20186 NR Description: calmodulin [Oryza sativa] calmodulin [Zea mays] >gi|4103961|gb|AAD10246.1| calmodulin
  misc_feature (43)..(102): Homolog of NCBI NO: 1754999 NR Description: calmodulin TaCaM2-2 >gi|1755001|gb|AAC49583.1|
  misc_feature (43)..(102): Homolog of NCBI NO: 3121848 NR Description: CALMODULIN >gi|1835521|gb|AAB46588.1| calmodulin annuum] >gi|7643792|gb|AAF65511.1| calmodulin [Capsicum annuum]
  misc_feature (43)..(102): Homolog of NCBI NO: 15225840 NR Description: calmodulin; protein id: At2g27030.1, supported by gi_166650 [Arabidopsis thaliana] >gi|15226835|ref|NP_181644.1|
  misc_feature (43)..(102): Homolog of NCBI NO: 30683369 NR Description: calmodulin [Arabidopsis thaliana]
  misc_feature (43)..(102): Homolog of NCBI NO: 115515 NR Description: Calmodulin >gi|71683|pir||MCAA calmodulin -
IALCPRSPVASLPLPCLPNPSGHPETARSLARSPRPETSPETMADQLTDDQIAEFKEAFSLFDKDGDGCITTKELGTVMRSLGQNPTEAELQDMINEVDADGMARSTSPSSSTSWPAR

SEQ ID NO: 8909 - protein, 94 aa, Zea mays subsp. mays
  peptide (1)..(94): Ceres Seq. ID no. 12359911
KSLSAPDHRSPPFRSPACLIPPATPKPLARSLAPRAQRQARRPWRTSSLTTKSPSSRRPSASSIRTATVASQPRSLELSCVHWVRTQRRLNSRT

SEQ ID NO: 8910 - protein, 77 aa, Zea mays subsp. mays
  peptide (1)..(77): Ceres Seq. ID no. 12359912
  misc_feature (1)..(77): Homolog of NCBI NO: 34903134 NR Description: unnamed protein product [Oryza sativa (japonica
  misc_feature (1)..(77): Homolog of NCBI NO: 100665 NR Description: calmodulin 2 (clone lambda DASH) - rice
  misc_feature (1)..(77): Homolog of NCBI NO: 15229784 NR Description: calmodulin 7; protein id: At3g43810.1, supported cDNA: 7008., supported by cDNA: gi_5825597 [Arabidopsis thaliana]
  misc_feature (1)..(77): Homolog of NCBI NO: 34304715 NR Description: calmodulin 4 [Daucus carota]
  misc_feature (1)..(77): Homolog of NCBI NO: 20186 NR Description: calmodulin [Oryza sativa] calmodulin [Zea mays] >gi|4103961|gb|AAD10246.1| calmodulin
  misc_feature (1)..(77): Homolog of NCBI NO: 1754999 NR Description: calmodulin TaCaM2-2 >gi|1755001|gb|AAC49583.1|
  misc_feature (1)..(77): Homolog of NCBI NO: 3121848 NR Description: CALMODULIN >gi|1835521|gb|AAB46588.1| calmodulin annuum] >gi|7643792|gb|AAF65511.1| calmodulin [Capsicum annuum]
  misc_feature (1)..(77): Homolog of NCBI NO: 15225840 NR Description: calmodulin; protein id: At2g27030.1, supported by gi_166650 [Arabidopsis thaliana] >gi|15226835|ref|NP_181644.1|
  misc_feature (1)..(77): Homolog of NCBI NO: 30683369 NR Description: calmodulin [Arabidopsis thaliana]
  misc_feature (1)..(77): Homolog of NCBI NO: 115515 NR Description: Calmodulin >gi|71683|pir||MCAA calmodulin -
MARKMKDTDSEEELKEAFRVFDKDQNGFISAAELRHVMTNLGEKLTDEEVDEMIREADVDGDGQINYEEFVKVMMAK

SEQ ID NO: 8911 - protein, 76 aa, Zea mays subsp. mays
  peptide (1)..(76): Ceres Seq. ID no. 12359913
  misc_feature (12)..(40): Pfam Name: EF hand Pfam Description: EF hand
  misc_feature (1)..(60): Homolog of NCBI NO: 34903134 NR Description: unnamed protein product [Oryza sativa (japonica
  misc_feature (1)..(60): Homolog of NCBI NO: 100665 NR Description: calmodulin 2 (clone lambda DASH) - rice
  misc_feature (1)..(60): Homolog of NCBI NO: 15229784 NR Description: calmodulin 7; protein id: At3g43810.1, supported cDNA: 7008., supported by cDNA: gi_5825597 [Arabidopsis thaliana]
  misc_feature (1)..(60): Homolog of NCBI NO: 34304715 NR Description: calmodulin 4 [Daucus carota]
  misc_feature (1)..(60): Homolog of NCBI NO: 20186 NR Description: calmodulin [Oryza sativa] calmodulin [Zea mays] >gi|4103961|gb|AAD10246.1| calmodulin
  misc_feature (1)..(60): Homolog of NCBI NO: 1754999 NR Description: calmodulin TaCaM2-2 >gi|1755001|gb|AAC49583.1|
  misc_feature (1)..(60): Homolog of NCBI NO: 3121848 NR Description: CALMODULIN >gi|1835521|gb|AAB46588.1| calmodulin annuum] >gi|7643792|gb|AAF65511.1| calmodulin [Capsicum annuum]
  misc_feature (1)..(60): Homolog of NCBI NO: 15225840 NR Description: calmodulin; protein id: At2g27030.1, supported by gi_166650 [Arabidopsis thaliana] >gi|15226835|ref|NP_181644.1|
  misc_feature (1)..(60): Homolog of NCBI NO: 30683369 NR Description: calmodulin [Arabidopsis thaliana]
  misc_feature (1)..(60): Homolog of NCBI NO: 115515 NR Description: Calmodulin >gi|71683|pir||MCAA calmodulin -
MADQLTDDQIAEFKEAFSLFDKDGDGCITTKELGTVMRSLGQNPTEAELQDMINEVDADGMARSTSPSSSTSWPAR

SEQ ID NO: 8912 - DNA, 1008 bp, Zea mays subsp. mays
  misc_feature (1)..(1008): Ceres Seq. ID no. 12360007
  misc_feature: MA Experiment ID: 108529 Result: Down-regulated in Transcription
  misc_feature: MA Experiment 108529 PARAMETER Experiment Name: Zm_Imbibed_Seeds_P Parameter: Age (day) Value: 5 vs. 2
  misc_feature: MA Experiment 108529 PARAMETER Experiment Name: Zm_Imbibed_Seeds_P Parameter: Organism Value: Zea mays
  misc_feature: MA Experiment 108529 PARAMETER Experiment Name: Zm_Imbibed_Seeds_P Parameter: Plant Line Value: 35A19
  misc_feature: MA Experiment 108529 PARAMETER Experiment Name: Zm_Imbibed_Seeds_P Parameter: Tissue Value: Roots vs. Embryo
  misc_feature: MA Experiment ID: 108544 Result: Down-regulated in Transcription
  misc_feature: MA Experiment ID: 108546 Result: Down-regulated in Transcription
  misc_feature: MA Experiment 108546 PARAMETER Experiment Name: Zm_Imbibed_Seeds_P Parameter: Age (day) Value: 3 vs. 2
  misc_feature: MA Experiment 108546 PARAMETER Experiment Name: Zm_Imbibed_Seeds_P Parameter: Organism Value: Zea mays
  misc_feature: MA Experiment 108546 PARAMETER Experiment Name: Zm_Imbibed_Seeds_P Parameter: Plant Line Value: 35A19
  misc_feature: MA Experiment 108546 PARAMETER Experiment Name: Zm_Imbibed_Seeds_P Parameter: Tissue Value: Roots vs. Embryo
  misc_feature: MA Experiment ID: 108687 Result: Down-regulated in Transcription
  misc_feature: MA Experiment 108687 PARAMETER Experiment Name: Zm_Embryos-Flowers__P Parameter: Tissue Value: Embryo vs. Aerial+
  misc_feature: MA Experiment ID: 20000477 Result: Down-regulated in Transcription
  misc_feature: MA Experiment 20000477 PARAMETER Experiment Name: Zm_5mM_SA_P Parameter: Age (day) Value: 10
  misc_feature: MA Experiment 20000477 PARAMETER Experiment Name: Zm_5mM_SA_P Parameter: Organism Value: Zea mays
  misc_feature: MA Experiment 20000477 PARAMETER Experiment Name: Zm_5mM_SA_P Parameter: Plant Line Value: 35A19
  misc_feature: MA Experiment 20000477 PARAMETER Experiment Name: Zm_5mM_SA_P Parameter: Timepoint (hr) Value: 48
  misc_feature: MA Experiment 20000477 PARAMETER Experiment Name: Zm_5mM_SA_P Parameter: Tissue Value: Aerial
  misc_feature: MA Experiment 20000477 PARAMETER Experiment Name: Zm_5mM_SA_P Parameter: Treatment Value: 5mM SA vs. No Treatment
  misc_feature: MA Experiment ID: 20000478 Result: Down-regulated in Transcription
  misc_feature: MA Experiment 20000478 PARAMETER Experiment Name: Zm_5mM_SA_P Parameter: Age (day) Value: 11
  misc_feature: MA Experiment 20000478 PARAMETER Experiment Name: Zm_5mM_SA_P Parameter: Organism Value: Zea mays
  misc_feature: MA Experiment 20000478 PARAMETER Experiment Name: Zm_5mM_SA_P Parameter: Plant Line Value: 35A19
  misc_feature: MA Experiment 20000478 PARAMETER Experiment Name: Zm_5mM_SA_P Parameter: Timepoint (hr) Value: 72
  misc_feature: MA Experiment 20000478 PARAMETER Experiment Name: Zm_5mM_SA_P Parameter: Tissue Value: Aerial
  misc_feature: MA Experiment 20000478 PARAMETER Experiment Name: Zm_5mM_SA_P Parameter: Treatment Value: 5mM SA vs. No Treatment
  misc_feature: MA Experiment ID: 20000479 Result: Down-regulated in Transcription
  misc_feature: MA Experiment 20000479 PARAMETER Experiment Name: Zm_Drought_P Parameter: Age (day) Value: 10
  misc_feature: MA Experiment 20000479 PARAMETER Experiment Name: Zm_Drought_P Parameter: Organism Value: Zea mays
  misc_feature: MA Experiment 20000479 PARAMETER Experiment Name: Zm_Drought_P Parameter: Plant Line Value: 35A19
  misc_feature: MA Experiment 20000479 PARAMETER Experiment Name: Zm_Drought_P Parameter: Timepoint (hr) Value: 48
  misc_feature: MA Experiment 20000479 PARAMETER Experiment Name: Zm_Drought_P Parameter: Tissue Value: Aerial
  misc_feature: MA Experiment 20000479 PARAMETER Experiment Name: Zm_Drought_P Parameter: Treatment Value: Drought vs. No Drought
  misc_feature: MA Experiment ID: 20000535 Result: Up-regulated in Transcription
  misc_feature: MA Experiment 20000535 PARAMETER Experiment Name: Zm_Hybrid_Seed_Dev_P Parameter: DAP Value: 30 vs. 12
  misc_feature: MA Experiment 20000535 PARAMETER Experiment Name: Zm_Hybrid_Seed_Dev_P Parameter: Organism Value: Zea mays
  misc_feature: MA Experiment 20000535 PARAMETER Experiment Name: Zm_Hybrid_Seed_Dev_P Parameter: Plant Line Value: 35A19
  misc_feature: MA Experiment 20000535 PARAMETER Experiment Name: Zm_Hybrid_Seed_Dev_P Parameter: Tissue Value: Embryo vs. Unfert Floret
  misc_feature: MA Experiment ID: 20000632 Result: Down-regulated in Transcription
  misc_feature: MA Experiment 20000632 PARAMETER Experiment Name: Zm_Herbicide-Treatments_P Parameter: Timepoint (hr) Value: 4
  misc_feature: MA Experiment 20000632 PARAMETER Experiment Name: Zm_Herbicide-Treatments_P Parameter: Tissue Value: Aerial
  misc_feature: MA Experiment 20000632 PARAMETER Experiment Name: Zm_Herbicide-Treatments_P Parameter: Treatment Value: Glean vs. No Treatment
gcttgccagcccagccctcaagcaacacgacgcattgcactagctagaccttgggctcgcaaacctcacacacccttccgcttaacctgcagcccttcggtcatcatcagcactcagcagtagcataggcaccaaggtagcgacccccgacacaatgcagtacggcgcggcggcggcggagcaggcgtggtcgtacatgccggtggtggcaccgtcgtcggccgtggagacggcggcggagcgcgtggagcggctggcgtcggagagcgcggtggtggtgttcagcgtgagcacctgctgcatgtgccacgccgtgaagcgcctcttctgcggcatgggcgtgcacccgacggtgcacgagctggaccacgacccgcggggccgcgagctggagcgcgccctcgcctgcctcctcggcgcctccggagcctcggcggcgggcgcgccggtcgtgcccgtcgtgttcatcggcggcaggctggtcggcgccatggaccgcgtcatggccgcgcacatcaacggcaccctcgtgccgctgctcaaggacgccggcgcgctctggctgtgatctcatcgccggccgctagctactagccattgccgccgttgcagctgttcgatcggggggctagctgatagtaaggcaggttacttattaattaatacacccaaagtagtgagttattaatcatagagtgcgtgcgcttgtgtgtttgtgtgtgtgttagtgggtgtgagagagagaggtcggtgattctttttactgatgctgcctccgtcttgtgtgtgggagctagctagttagatcgtgcttgcatgcccacgcgcgtatgtacgagtgtgtgtgcactgctactgctactgctagctaggtttggtcggtgctagaagagatcgatcggtttagtgttcttctcttccatgcatcttattaatcagtttggcttggggttccggcccctcgtctttgtgttttcatatcagagccatgcgtgcgtgcatctgggc

SEQ ID NO: 8913 - protein, 137 aa, Zea mays subsp. mays
  peptide (1)..(137): Ceres Seq. ID no. 12360008
  misc_feature (39)..(129): Pfam Name: Glutaredoxin Pfam Description: Glutaredoxin
  misc_feature (1)..(137): Homolog of NCBI NO: 21740746 NR Description: OSJNBa0072K14.11 [Oryza sativa (japonica
  misc_feature (25)..(137): Homolog of NCBI NO: 15232836 NR Description: putative glutaredoxin; protein id: At3g02000.1 thaliana] >gi|6091738|gb|AAF03450.1|AC010797_26 putative [Arabidopsis thaliana] >gi|6513931|gb|AAF14835.1|AC011664_17
  misc_feature (25)..(137): Homolog of NCBI NO: 15241297 NR Description: glutaredoxin-like protein; protein id: supported by cDNA: 123496., supported by cDNA: gi_13605642,
  misc_feature (34)..(135): Homolog of NCBI NO: 1532163 NR Description: similar to glutaredoxin encoded by GenBank Number Z49699; localized according to blastn similarity to EST therefore, the coding span corresponds only to an area of
  misc_feature (34)..(137): Homolog of NCBI NO: 21537203 NR Description: glutaredoxin-like protein [Arabidopsis thaliana]
  misc_feature (29)..(137): Homolog of NCBI NO: 34914726 NR Description: P0560B06.28 [Oryza sativa (japonica >gi|14091834|gb|AAK53837.1| Putative glutaredoxin [Oryza sativa]
  misc_feature (21)..(137): Homolog of NCBI NO: 33146704 NR Description: glutaredoxin-like protein [Oryza sativa (japonica
  misc_feature (28)..(137): Homolog of NCBI NO: 34907208 NR Description: putative glutaredoxin [Oryza sativa (japonica group)] >gi|15408806|dbj|BAB64202.1| putative glutaredoxin [Oryza
  misc_feature (29)..(137): Homolog of NCBI NO: 15234680 NR Description: glutaredoxin homolog; protein id: At4g15700.1
  misc_feature (29)..(137): Homolog of NCBI NO: 15234673 NR Description: glutaredoxin; protein id: At4g15670.1
MQYGAAAAEQAWSYMPVVAPSSAVETAAERVERLASESAVVVFSVSTCCMCHAVKRLFCGMGVHPTVHELDHDPRGRELERALACLLGASGASAAGAPVVPVVFIGGRLVGAMDRVMAAHINGTLVPLLKDAGALWL

SEQ ID NO: 8914 - protein, 123 aa, Zea mays subsp. mays
  peptide (1)..(123): Ceres Seq. ID no. 12360009
  misc_feature (25)..(115): Pfam Name: Glutaredoxin Pfam Description: Glutaredoxin
  misc_feature (1)..(123): Homolog of NCBI NO: 21740746 NR Description: OSJNBa0072K14.11 [Oryza sativa (japonica
  misc_feature (11)..(123): Homolog of NCBI NO: 15232836 NR Description: putative glutaredoxin; protein id: At3g02000.1 thaliana] >gi|6091738|gb|AAF03450.1|AC010797_26 putative [Arabidopsis thaliana] >gi|6513931|gb|AAF14835.1|AC011664_17
  misc_feature (11)..(123): Homolog of NCBI NO: 15241297 NR Description: glutaredoxin-like protein; protein id: supported by cDNA: 123496., supported by cDNA: gi_13605642,
  misc_feature (20)..(121): Homolog of NCBI NO: 1532163 NR Description: similar to glutaredoxin encoded by GenBank Number Z49699; localized according to blastn similarity to EST therefore, the coding span corresponds only to an area of
  misc_feature (20)..(123): Homolog of NCBI NO: 21537203 NR Description: glutaredoxin-like protein [Arabidopsis thaliana]
  misc_feature (15)..(123): Homolog of NCBI NO: 34914726 NR Description: P0560B06.28 [Oryza sativa (japonica >gi|14091834|gb|AAK53837.1| Putative glutaredoxin [Oryza sativa]
  misc_feature (7)..(123): Homolog of NCBI NO: 33146704 NR Description: glutaredoxin-like protein [Oryza sativa (japonica
  misc_feature (14)..(123): Homolog of NCBI NO: 34907208 NR Description: putative glutaredoxin [Oryza sativa (japonica group)] >gi|15408806|dbj|BAB64202.1| putative glutaredoxin [Oryza
  misc_feature (15)..(123): Homolog of NCBI NO: 15234680 NR Description: glutaredoxin homolog; protein id: At4g15700.1
  misc_feature (15)..(123): Homolog of NCBI NO: 15234673 NR Description: glutaredoxin; protein id: At4g15670.1
MPVVAPSSAVETAAERVERLASESAVVVFSVSTCCMCHAVKRLFCGMGVHPTVHELDHDPRGRELERALACLLGASGASAAGAPVVPVVFIGGRLVGAMDRVMAAHINGTLVPLLKDAGALWL

SEQ ID NO: 8915 - protein, 88 aa, Zea mays subsp. mays
  peptide (1)..(88): Ceres Seq. ID no. 12360010
  misc_feature (1)..(80): Pfam Name: Glutaredoxin Pfam Description: Glutaredoxin
  misc_feature (1)..(88): Homolog of NCBI NO: 21740746 NR Description: OSJNBa0072K14.11 [Oryza sativa (japonica
  misc_feature (1)..(88): Homolog of NCBI NO: 15232836 NR Description: putative glutaredoxin; protein id: At3g02000.1 thaliana] >gi|6091738|gb|AAF03450.1|AC010797_26 putative [Arabidopsis thaliana] >gi|6513931|gb|AAF14835.1|AC011664_17
  misc_feature (1)..(88): Homolog of NCBI NO: 15241297 NR Description: glutaredoxin-like protein; protein id: supported by cDNA: 123496., supported by cDNA: gi_13605642,
  misc_feature (1)..(86): Homolog of NCBI NO: 1532163 NR Description: similar to glutaredoxin encoded by GenBank Number Z49699; localized according to blastn similarity to EST therefore, the coding span corresponds only to an area of
  misc_feature (1)..(88): Homolog of NCBI NO: 21537203 NR Description: glutaredoxin-like protein [Arabidopsis thaliana]
  misc_feature (1)..(88): Homolog of NCBI NO: 34914726 NR Description: P0560B06.28 [Oryza sativa (japonica >gi|14091834|gb|AAK53837.1| Putative glutaredoxin [Oryza sativa]
  misc_feature (1)..(88): Homolog of NCBI NO: 33146704 NR Description: glutaredoxin-like protein [Oryza sativa (japonica
  misc_feature (1)..(88): Homolog of NCBI NO: 34907208 NR Description: putative glutaredoxin [Oryza sativa (japonica group)] >gi|15408806|dbj|BAB64202.1| putative glutaredoxin [Oryza
  misc_feature (1)..(88): Homolog of NCBI NO: 15234680 NR Description: glutaredoxin homolog; protein id: At4g15700.1
  misc_feature (1)..(88): Homolog of NCBI NO: 15234673 NR Description: glutaredoxin; protein id: At4g15670.1
MCHAVKRLFCGMGVHPTVHELDHDPRGRELERALACLLGASGASAAGAPVVPVVFIGGRLVGAMDRVMAAHINGTLVPLLKDAGALWL

SEQ ID NO: 8916 - DNA, 920 bp, Zea mays subsp. mays
  misc_feature (1)..(920): Ceres Seq. ID no. 12436141
  misc_feature: MA Experiment ID: 108523 Result: Down-regulated in Transcription
  misc_feature: MA Experiment 108523 PARAMETER Experiment Name: Zm_42deg_Heat_P Parameter: Age (day) Value: 8
  misc_feature: MA Experiment 108523 PARAMETER Experiment Name: Zm_42deg_Heat_P Parameter: Organism Value: Zea mays
  misc_feature: MA Experiment 108523 PARAMETER Experiment Name: Zm_42deg_Heat_P Parameter: Plant Line Value: 35A19
  misc_feature: MA Experiment 108523 PARAMETER Experiment Name: Zm_42deg_Heat_P Parameter: Temperature (deg C) Value: 42 vs. 22
  misc_feature: MA Experiment 108523 PARAMETER Experiment Name: Zm_42deg_Heat_P Parameter: Timepoint (hr) Value: 6
  misc_feature: MA Experiment 108523 PARAMETER Experiment Name: Zm_42deg_Heat_P Parameter: Tissue Value: Aerial
  misc_feature: MA Experiment ID: 108527 Result: Down-regulated in Transcription
  misc_feature: MA Experiment 108527 PARAMETER Experiment Name: Zm_5mM_NO_P Parameter: Age (day) Value: 8
  misc_feature: MA Experiment 108527 PARAMETER Experiment Name: Zm_5mM_NO_P Parameter: Organism Value: Zea mays
  misc_feature: MA Experiment 108527 PARAMETER Experiment Name: Zm_5mM_NO_P Parameter: Plant Line Value: 35A19
  misc_feature: MA Experiment 108527 PARAMETER Experiment Name: Zm_5mM_NO_P Parameter: Timepoint (hr) Value: 6
  misc_feature: MA Experiment 108527 PARAMETER Experiment Name: Zm_5mM_NO_P Parameter: Tissue Value: Aerial
  misc_feature: MA Experiment 108527 PARAMETER Experiment Name: Zm_5mM_NO_P Parameter: Treatment Value: 5mM NO vs. No Treatment
  misc_feature: MA Experiment ID: 108528 Result: Up-regulated in Transcription
  misc_feature: MA Experiment 108528 PARAMETER Experiment Name: Zm_Imbibed_Seeds_P Parameter: Age (day) Value: 5 vs. 2
  misc_feature: MA Experiment 108528 PARAMETER Experiment Name: Zm_Imbibed_Seeds_P Parameter: Organism Value: Zea mays
  misc_feature: MA Experiment 108528 PARAMETER Experiment Name: Zm_Imbibed_Seeds_P Parameter: Plant Line Value: 35A19
  misc_feature: MA Experiment 108528 PARAMETER Experiment Name: Zm_Imbibed_Seeds_P Parameter: Tissue Value: Aerial vs. Embryo
  misc_feature: MA Experiment ID: 108530 Result: Up-regulated in Transcription
  misc_feature: MA Experiment 108530 PARAMETER Experiment Name: Zm_Imbibed_Seeds_P Parameter: Age (day) Value: 6 vs. 2
  misc_feature: MA Experiment 108530 PARAMETER Experiment Name: Zm_Imbibed_Seeds_P Parameter: Organism Value: Zea mays
  misc_feature: MA Experiment 108530 PARAMETER Experiment Name: Zm_Imbibed_Seeds_P Parameter: Plant Line Value: 35A19
  misc_feature: MA Experiment 108530 PARAMETER Experiment Name: Zm_Imbibed_Seeds_P Parameter: Tissue Value: Aerial vs. Embryo
  misc_feature: MA Experiment ID: 108534 Result: Down-regulated in Transcription
  misc_feature: MA Experiment 108534 PARAMETER Experiment Name: Zm_4deg_Cold_P Parameter: Age (hr) Value: 8
  misc_feature: MA Experiment 108534 PARAMETER Experiment Name: Zm_4deg_Cold_P Parameter: Organism Value: Zea mays
  misc_feature: MA Experiment 108534 PARAMETER Experiment Name: Zm_4deg_Cold_P Parameter: Plant Line Value: 35A19
  misc_feature: MA Experiment 108534 PARAMETER Experiment Name: Zm_4deg_Cold_P Parameter: Temperature (deg C) Value: 4 vs. 22
  misc_feature: MA Experiment 108534 PARAMETER Experiment Name: Zm_4deg_Cold_P Parameter: Timepoint (hr) Value: 6
  misc_feature: MA Experiment 108534 PARAMETER Experiment Name: Zm_4deg_Cold_P Parameter: Tissue Value: Aerial
  misc_feature: MA Experiment ID: 108545 Result: Up-regulated in Transcription
  misc_feature: MA Experiment 108545 PARAMETER Experiment Name: Zm_Imbibed_Seeds_P Parameter: Age (day) Value: 3 vs. 2
  misc_feature: MA Experiment 108545 PARAMETER Experiment Name: Zm_Imbibed_Seeds_P Parameter: Organism Value: Zea mays
  misc_feature: MA Experiment 108545 PARAMETER Experiment Name: Zm_Imbibed_Seeds_P Parameter: Plant Line Value: 35A19
  misc_feature: MA Experiment 108545 PARAMETER Experiment Name: Zm_Imbibed_Seeds_P Parameter: Tissue Value: Aerial vs. Embryo
  misc_feature: MA Experiment ID: 108559 Result: Down-regulated in Transcription
  misc_feature: MA Experiment 108559 PARAMETER Experiment Name: Zm_5mM_NO_P Parameter: Age (day) Value: 8
  misc_feature: MA Experiment 108559 PARAMETER Experiment Name: Zm_5mM_NO_P Parameter: Organism Value: Zea mays
  misc_feature: MA Experiment 108559 PARAMETER Experiment Name: Zm_5mM_NO_P Parameter: Plant Line Value: 35A19
  misc_feature: MA Experiment 108559 PARAMETER Experiment Name: Zm_5mM_NO_P Parameter: Timepoint (hr) Value: 12
  misc_feature: MA Experiment 108559 PARAMETER Experiment Name: Zm_5mM_NO_P Parameter: Tissue Value: Aerial
  misc_feature: MA Experiment 108559 PARAMETER Experiment Name: Zm_5mM_NO_P Parameter: Treatment Value: 5mM NO vs. No Treatment
  misc_feature: MA Experiment ID: 108597 Result: Down-regulated in Transcription
  misc_feature: MA Experiment 108597 PARAMETER Experiment Name: Zm_100uM_ABA_P Parameter: Age (day) Value: 9
  misc_feature: MA Experiment 108597 PARAMETER Experiment Name: Zm_100uM_ABA_P Parameter: Organism Value: Zea mays
  misc_feature: MA Experiment 108597 PARAMETER Experiment Name: Zm_100uM_ABA_P Parameter: Plant Line Value: 35A19
  misc_feature: MA Experiment 108597 PARAMETER Experiment Name: Zm_100uM_ABA_P Parameter: Timepoint (hr) Value: 24
  misc_feature: MA Experiment 108597 PARAMETER Experiment Name: Zm_100uM_ABA_P Parameter: Tissue Value: Aerial
  misc_feature: MA Experiment 108597 PARAMETER Experiment Name: Zm_100uM_ABA_P Parameter: Treatment Value: 100uM ABA vs. No Treatment
  misc_feature: MA Experiment ID: 20000478 Result: Down-regulated in Transcription
  misc_feature: MA Experiment 20000478 PARAMETER Experiment Name: Zm_5mM_SA_P Parameter: Age (day) Value: 11
  misc_feature: MA Experiment 20000478 PARAMETER Experiment Name: Zm_5mM_SA_P Parameter: Organism Value: Zea mays
  misc_feature: MA Experiment 20000478 PARAMETER Experiment Name: Zm_5mM_SA_P Parameter: Plant Line Value: 35A19
  misc_feature: MA Experiment 20000478 PARAMETER Experiment Name: Zm_5mM_SA_P Parameter: Timepoint (hr) Value: 72
  misc_feature: MA Experiment 20000478 PARAMETER Experiment Name: Zm_5mM_SA_P Parameter: Tissue Value: Aerial
  misc_feature: MA Experiment 20000478 PARAMETER Experiment Name: Zm_5mM_SA_P Parameter: Treatment Value: 5mM SA vs. No Treatment
  misc_feature: MA Experiment ID: 20000479 Result: Down-regulated in Transcription
  misc_feature: MA Experiment 20000479 PARAMETER Experiment Name: Zm_Drought_P Parameter: Age (day) Value: 10
  misc_feature: MA Experiment 20000479 PARAMETER Experiment Name: Zm_Drought_P Parameter: Organism Value: Zea mays
  misc_feature: MA Experiment 20000479 PARAMETER Experiment Name: Zm_Drought_P Parameter: Plant Line Value: 35A19
  misc_feature: MA Experiment 20000479 PARAMETER Experiment Name: Zm_Drought_P Parameter: Timepoint (hr) Value: 48
  misc_feature: MA Experiment 20000479 PARAMETER Experiment Name: Zm_Drought_P Parameter: Tissue Value: Aerial
  misc_feature: MA Experiment 20000479 PARAMETER Experiment Name: Zm_Drought_P Parameter: Treatment Value: Drought vs. No Drought
  misc_feature: MA Experiment ID: 20000480 Result: Down-regulated in Transcription
  misc_feature: MA Experiment 20000480 PARAMETER Experiment Name: Zm_Drought_P Parameter: Age (day) Value: 11
  misc_feature: MA Experiment 20000480 PARAMETER Experiment Name: Zm_Drought_P Parameter: Organism Value: Zea mays
  misc_feature: MA Experiment 20000480 PARAMETER Experiment Name: Zm_Drought_P Parameter: Plant Line Value: 35A19
  misc_feature: MA Experiment 20000480 PARAMETER Experiment Name: Zm_Drought_P Parameter: Timepoint (hr) Value: 72
  misc_feature: MA Experiment 20000480 PARAMETER Experiment Name: Zm_Drought_P Parameter: Tissue Value: Aerial
  misc_feature: MA Experiment 20000480 PARAMETER Experiment Name: Zm_Drought_P Parameter: Treatment Value: Drought vs. No Drought
  misc_feature: MA Experiment ID: 20000630 Result: Down-regulated in Transcription
  misc_feature: MA Experiment 20000630 PARAMETER Experiment Name: Zm_Herbicide-Treatments_P Parameter: Timepoint (hr) Value: 4
  misc_feature: MA Experiment 20000630 PARAMETER Experiment Name: Zm_Herbicide-Treatments_P Parameter: Tissue Value: Aerial
  misc_feature: MA Experiment 20000630 PARAMETER Experiment Name: Zm_Herbicide-Treatments_P Parameter: Treatment Value: Roundup vs. No Treatment
acagacaactcagatcgtttctaatcattccatctcaaagacaggagttcgtctccttgttaggcaaagaccggtagcaaaatgatcagctccaagaagctagctcagttgtccaagaagatgcagggaatgggtgcagttgggcgaagaagggtcacagtagtgagaaaggaaatcaacccatcttgcagcagcatagttgcagggaagggcaactgcatcgtctactcttctgatgggaagcggtttgagatccccctttcttacctccacacggcagtgtttgtagagctcctgaagctgtcgcaggaagagtttgggttcacaagtgatgggaggatcacactgccttgcgataaagcagtgatggagtatgtgatgtgtttgctaaggagagaagcctccgaggatgttgagaaggcgctcctcagttccatagtgatgtcttgccaccacacaaacaggatggtgcaaccaccaagtggagtgaaccaccacttcgctgtgtgcagctcctgaagatgaagatatccatggcttggagcttgtttcagcacttccctgtgtgcagctcctgaagatgaagatatccatgtcctggagcttgtttcccttctttttttcgcttccatcttttttcccagaagtaccttggagcacggtttttgtgcgatgtttttccaatggtacactgaggatgtacagatggatgcgtgattagaaaagaaggaatcaagattgccactgagacaataaagtagtgttgatttagaacctacgaaagaagataccatgatgtttgcactgtaaaaccagagctgccaaatggtctagtactgtagcgaatagcatctttcctttttccttagccctctacatgcaagggcaacagtaaattaaactatttacatggggtgctc

SEQ ID NO: 8917 - protein, 145 aa, Zea mays subsp. mays
  peptide (1)..(145): Ceres Seq. ID no. 12436142
  misc_feature (1)..(104): Pfam Name: Auxin responsive protein Pfam Description: Auxin responsive protein
  misc_feature (1)..(119): Homolog of NCBI NO: 26452075 NR Description: putative auxin-induced protein [Arabidopsis
  misc_feature (1)..(119): Homolog of NCBI NO: 15218924 NR Description: auxin-induced protein, putative; protein id: supported by cDNA: 4119. [Arabidopsis thaliana]
  misc_feature (1)..(119): Homolog of NCBI NO: 21593671 NR Description: auxin-induced protein, putative [Arabidopsis
  misc_feature (1)..(119): Homolog of NCBI NO: 21592571 NR Description: auxin-induced protein, putative [Arabidopsis
  misc_feature (1)..(119): Homolog of NCBI NO: 18397123 NR Description: auxin-induced protein, putative; protein id:
  misc_feature (1)..(143): Homolog of NCBI NO: 20149052 NR Description: auxin-induced SAUR-like protein [Capsicum annuum]
  misc_feature (1)..(119): Homolog of NCBI NO: 15241052 NR Description: putative protein; protein id: At5g27780.1
  misc_feature (1)..(119): Homolog of NCBI NO: 18397101 NR Description: auxin-induced protein, putative; protein id:
  misc_feature (1)..(119): Homolog of NCBI NO: 38603942 NR Description: At1g29420 [Arabidopsis thaliana]
  misc_feature (1)..(119): Homolog of NCBI NO: 26452170 NR Description: putative auxin-induced protein [Arabidopsis
MISSKKLAQLSKKMQGMGAVGRRRVTVVRKEINPSCSSIVAGKGNCIVYSSDGKRFEIPLSYLHTAVFVELLKLSQEEFGFTSDGRITLPCDKAVMEYVMCLLRREASEDVEKALLSSIVMSCHHTNRMVQPPSGVNHHFAVCSS

SEQ ID NO: 8918 - protein, 132 aa, Zea mays subsp. mays
  peptide (1)..(132): Ceres Seq. ID no. 12436143
  misc_feature (1)..(91): Pfam Name: Auxin responsive protein Pfam Description: Auxin responsive protein
  misc_feature (1)..(106): Homolog of NCBI NO: 26452075 NR Description: putative auxin-induced protein [Arabidopsis
  misc_feature (1)..(106): Homolog of NCBI NO: 15218924 NR Description: auxin-induced protein, putative; protein id: supported by cDNA: 4119. [Arabidopsis thaliana]
  misc_feature (1)..(106): Homolog of NCBI NO: 21593671 NR Description: auxin-induced protein, putative [Arabidopsis
  misc_feature (1)..(106): Homolog of NCBI NO: 21592571 NR Description: auxin-induced protein, putative [Arabidopsis
  misc_feature (1)..(106): Homolog of NCBI NO: 18397123 NR Description: auxin-induced protein, putative; protein id:
  misc_feature (1)..(130): Homolog of NCBI NO: 20149052 NR Description: auxin-induced SAUR-like protein [Capsicum annuum]
  misc_feature (1)..(106): Homolog of NCBI NO: 15241052 NR Description: putative protein; protein id: At5g27780.1
  misc_feature (1)..(106): Homolog of NCBI NO: 18397101 NR Description: auxin-induced protein, putative; protein id:
  misc_feature (1)..(106): Homolog of NCBI NO: 38603942 NR Description: At1g29420 [Arabidopsis thaliana]
  misc_feature (1)..(106): Homolog of NCBI NO: 26452170 NR Description: putative auxin-induced protein [Arabidopsis
MQGMGAVGRRRVTVVRKEINPSCSSIVAGKGNCIVYSSDGKRFEIPLSYLHTAVFVELLKLSQEEFGFTSDGRITLPCDKAVMEYVMCLLRREASEDVEKALLSSIVMSCHHTNRMVQPPSGVNHHFAVCSS

SEQ ID NO: 8919 - protein, 129 aa, Zea mays subsp. mays
  peptide (1)..(129): Ceres Seq. ID no. 12436144
  misc_feature (1)..(88): Pfam Name: Auxin responsive protein Pfam Description: Auxin responsive protein
  misc_feature (1)..(103): Homolog of NCBI NO: 26452075 NR Description: putative auxin-induced protein [Arabidopsis
  misc_feature (1)..(103): Homolog of NCBI NO: 15218924 NR Description: auxin-induced protein, putative; protein id: supported by cDNA: 4119. [Arabidopsis thaliana]
  misc_feature (1)..(103): Homolog of NCBI NO: 21593671 NR Description: auxin-induced protein, putative [Arabidopsis
  misc_feature (1)..(103): Homolog of NCBI NO: 21592571 NR Description: auxin-induced protein, putative [Arabidopsis
  misc_feature (1)..(103): Homolog of NCBI NO: 18397123 NR Description: auxin-induced protein, putative; protein id:
  misc_feature (1)..(127): Homolog of NCBI NO: 20149052 NR Description: auxin-induced SAUR-like protein [Capsicum annuum]
  misc_feature (1)..(103): Homolog of NCBI NO: 15241052 NR Description: putative protein; protein id: At5g27780.1
  misc_feature (1)..(103): Homolog of NCBI NO: 18397101 NR Description: auxin-induced protein, putative; protein id:
  misc_feature (1)..(103): Homolog of NCBI NO: 38603942 NR Description: At1g29420 [Arabidopsis thaliana]
  misc_feature (1)..(103): Homolog of NCBI NO: 26452170 NR Description: putative auxin-induced protein [Arabidopsis
MGAVGRRRVTVVRKEINPSCSSIVAGKGNCIVYSSDGKRFEIPLSYLHTAVFVELLKLSQEEFGFTSDGRITLPCDKAVMEYVMCLLRREASEDVEKALLSSIVMSCHHTNRMVQPPSGVNHHFAVCSS

SEQ ID NO: 8920 - DNA, 1162 bp, Zea mays subsp. mays
  misc_feature (1)..(1162): Ceres Seq. ID no. 12349689
  misc_feature: MA Experiment ID: 108523 Result: Up-regulated in Transcription
  misc_feature: MA Experiment 108523 PARAMETER Experiment Name: Zm_42deg_Heat_P Parameter: Age (day) Value: 8
  misc_feature: MA Experiment 108523 PARAMETER Experiment Name: Zm_42deg_Heat_P Parameter: Organism Value: Zea mays
  misc_feature: MA Experiment 108523 PARAMETER Experiment Name: Zm_42deg_Heat_P Parameter: Plant Line Value: 35A19
  misc_feature: MA Experiment 108523 PARAMETER Experiment Name: Zm_42deg_Heat_P Parameter: Temperature (deg C) Value: 42 vs. 22
  misc_feature: MA Experiment 108523 PARAMETER Experiment Name: Zm_42deg_Heat_P Parameter: Timepoint (hr) Value: 6
  misc_feature: MA Experiment 108523 PARAMETER Experiment Name: Zm_42deg_Heat_P Parameter: Tissue Value: Aerial
  misc_feature: MA Experiment ID: 108543 Result: Up-regulated in Transcription
  misc_feature: MA Experiment ID: 108687 Result: Down-regulated in Transcription
  misc_feature: MA Experiment 108687 PARAMETER Experiment Name: Zm_Embryos-Flowers__P Parameter: Tissue Value: Embryo vs. Aerial+
  misc_feature: MA Experiment ID: 20000492 Result: Down-regulated in Transcription
  misc_feature: MA Experiment 20000492 PARAMETER Experiment Name: Zm_Hybrid_Seed_Dev_P Parameter: DAP Value: 12
  misc_feature: MA Experiment 20000492 PARAMETER Experiment Name: Zm_Hybrid_Seed_Dev_P Parameter: Organism Value: Zea mays
  misc_feature: MA Experiment 20000492 PARAMETER Experiment Name: Zm_Hybrid_Seed_Dev_P Parameter: Plant Line Value: 35A19
  misc_feature: MA Experiment 20000492 PARAMETER Experiment Name: Zm_Hybrid_Seed_Dev_P Parameter: Tissue Value: Fert Kernel vs. Unfert Floret
  misc_feature: MA Experiment ID: 20000535 Result: Down-regulated in Transcription
  misc_feature: MA Experiment 20000535 PARAMETER Experiment Name: Zm_Hybrid_Seed_Dev_P Parameter: DAP Value: 30 vs. 12
  misc_feature: MA Experiment 20000535 PARAMETER Experiment Name: Zm_Hybrid_Seed_Dev_P Parameter: Organism Value: Zea mays
  misc_feature: MA Experiment 20000535 PARAMETER Experiment Name: Zm_Hybrid_Seed_Dev_P Parameter: Plant Line Value: 35A19
  misc_feature: MA Experiment 20000535 PARAMETER Experiment Name: Zm_Hybrid_Seed_Dev_P Parameter: Tissue Value: Embryo vs. Unfert Floret
  misc_feature: MA Experiment ID: 20000626 Result: Down-regulated in Transcription
  misc_feature: MA Experiment 20000626 PARAMETER Experiment Name: Zm_Herbicide-Treatments_P Parameter: Timepoint (hr) Value: 12
  misc_feature: MA Experiment 20000626 PARAMETER Experiment Name: Zm_Herbicide-Treatments_P Parameter: Tissue Value: Aerial
  misc_feature: MA Experiment 20000626 PARAMETER Experiment Name: Zm_Herbicide-Treatments_P Parameter: Treatment Value: Roundup vs. No Treatment
accgcacccagaggaggcaaggagcccatccacatccacctggtcctgctctcaccacaccgccgcgccaatggcggctcgccggcagcaccgccgcggcttcccgctggtcccgctcctgctctccctcctggccgccgccgcgtacggccgcctcatctccgacggcggcccgtccgcgcagctcctctcggtgatccgcctctcggggtcctcgccggccgcgggggcggccgccaaggccgaggagaagtgcgagcagtcctacgggttcctcccctgcaccaccaccgtgctcgggaacctcttcctcgtgctgacgtacggctacctcatgtacaaggcggccacgtacctgtcggcggggagcgagctgctgctcgagatcatggggcccggcctcgtcggcggcctcctcctccccatcctcggcgccctccccgacgcgctcctcgtgctcgtatctggcctgtccgggagtaaagaggaggcacagagtcaggtactgatcggaatggggctgcttgctggttccaccgtcttcctcctcaccctgctttgggggacctgtgtcgttgttggcaaatgtgaccttgggccaaaccgtgaggcagttgatgtaacagacgccaagggcttcagcttgactggcactggtattacaaccgacgtgcagaccagctatgcagcgcggatcatggggctatctgttatccccttcatcatcgctcagttcccaaagatgttgaagacccaccacgagcagcgtctagctatgttgctggccctcattgtgtcattcttgctcgtgctttcctactgtctgtatcaggttttccagccttggattcagaggaggaagcttgcatacgcaaagcacaagcacgtgatctctgggatactgaggcacgcccagatgcagtcactcggccgtctgctaaacgatgatggcacgcccaatgacgacgtcatcagaaagctgttccgcaagatcgacatggaccagagcgaatccctgtcccgtgctgagctgcacgccctcatcgtcggtatcaacttcgaggaggttgactttgacaggacggatgcggtggacaaggtcatggacgacttcgacacgtcccgcaacgatgtcgttgagcaggaggagtttgtgcagggg

SEQ ID NO: 8921 - protein, 387 aa, Zea mays subsp. mays
  peptide (1)..(387): Ceres Seq. ID no. 12349690
  misc_feature (323)..(351): Pfam Name: EF hand Pfam Description: EF hand
  misc_feature (162)..(386): Homolog of NCBI NO: 34903912 NR Description: unnamed protein product [Oryza sativa (japonica group)] >gi|8096597|dbj|BAA96170.1| unnamed protein product
  misc_feature (24)..(153): Homolog of NCBI NO: 34903912 NR Description: unnamed protein product [Oryza sativa (japonica group)] >gi|8096597|dbj|BAA96170.1| unnamed protein product
  misc_feature (36)..(386): Homolog of NCBI NO: 30695448 NR Description: expressed protein [Arabidopsis thaliana]
  misc_feature (36)..(386): Homolog of NCBI NO: 25405975 NR Description: protein F12M16.12 [imported] - Arabidopsis >gi|7769854|gb|AAF69532.1|AC008007_7 F12M16.12 [Arabidopsis
  misc_feature (112)..(386): Homolog of NCBI NO: 13605639 NR Description: At1g53210/F12M16_12 [Arabidopsis thaliana]
  misc_feature (81)..(386): Homolog of NCBI NO: 15218787 NR Description: unknown protein; protein id: At1g29020.1 thaliana] >gi|10764849|gb|AAF24539.2|AC007508_2 F1K23.2
  misc_feature (111)..(250): Homolog of NCBI NO: 16930749 NR Description: drought-induced protein RDI [Retama raetam]
  misc_feature (52)..(386): Homolog of NCBI NO: 26449859 NR Description: unknown protein [Arabidopsis thaliana]
  misc_feature (85)..(247): Homolog of NCBI NO: 15218787 NR Description: unknown protein; protein id: At1g29020.1 thaliana] >gi|10764849|gb|AAF24539.2|AC007508_2 F1K23.2
  misc_feature (85)..(192): Homolog of NCBI NO: 15226193 NR Description: unknown protein; protein id: At2g34030.1
PHPEEARSPSTSTWSCSHHTAAPMAARRQHRRGFPLVPLLLSLLAAAAYGRLISDGGPSAQLLSVIRLSGSSPAAGAAAKAEEKCEQSYGFLPCTTTVLGNLFLVLTYGYLMYKAATYLSAGSELLLEIMGPGLVGGLLLPILGALPDALLVLVSGLSGSKEEAQSQVLIGMGLLAGSTVFLLTLLWGTCVVVGKCDLGPNREAVDVTDAKGFSLTGTGITTDVQTSYAARIMGLSVIPFIIAQFPKMLKTHHEQRLAMLLALIVSFLLVLSYCLYQVFQPWIQRRKLAYAKHKHVISGILRHAQMQSLGRLLNDDGTPNDDVIRKLFRKIDMDQSESLSRAELHALIVGINFEEVDFDRTDAVDKVMDDFDTSRNDVVEQEEFVQG

SEQ ID NO: 8922 - protein, 364 aa, Zea mays subsp. mays
  peptide (1)..(364): Ceres Seq. ID no. 12349691
  misc_feature (300)..(328): Pfam Name: EF hand Pfam Description: EF hand
  misc_feature (139)..(363): Homolog of NCBI NO: 34903912 NR Description: unnamed protein product [Oryza sativa (japonica group)] >gi|8096597|dbj|BAA96170.1| unnamed protein product
  misc_feature (1)..(130): Homolog of NCBI NO: 34903912 NR Description: unnamed protein product [Oryza sativa (japonica group)] >gi|8096597|dbj|BAA96170.1| unnamed protein product
  misc_feature (13)..(363): Homolog of NCBI NO: 30695448 NR Description: expressed protein [Arabidopsis thaliana]
  misc_feature (13)..(363): Homolog of NCBI NO: 25405975 NR Description: protein F12M16.12 [imported] - Arabidopsis >gi|7769854|gb|AAF69532.1|AC008007_7 F12M16.12 [Arabidopsis
  misc_feature (89)..(363): Homolog of NCBI NO: 13605639 NR Description: At1g53210/F12M16_12 [Arabidopsis thaliana]
  misc_feature (58)..(363): Homolog of NCBI NO: 15218787 NR Description: unknown protein; protein id: At1g29020.1 thaliana] >gi|10764849|gb|AAF24539.2|AC007508_2 F1K23.2
  misc_feature (88)..(227): Homolog of NCBI NO: 16930749 NR Description: drought-induced protein RDI [Retama raetam]
  misc_feature (29)..(363): Homolog of NCBI NO: 26449859 NR Description: unknown protein [Arabidopsis thaliana]
  misc_feature (62)..(224): Homolog of NCBI NO: 15218787 NR Description: unknown protein; protein id: At1g29020.1 thaliana] >gi|10764849|gb|AAF24539.2|AC007508_2 F1K23.2
  misc_feature (62)..(169): Homolog of NCBI NO: 15226193 NR Description: unknown protein; protein id: At2g34030.1
MAARRQHRRGFPLVPLLLSLLAAAAYGRLISDGGPSAQLLSVIRLSGSSPAAGAAAKAEEKCEQSYGFLPCTTTVLGNLFLVLTYGYLMYKAATYLSAGSELLLEIMGPGLVGGLLLPILGALPDALLVLVSGLSGSKEEAQSQVLIGMGLLAGSTVFLLTLLWGTCVVVGKCDLGPNREAVDVTDAKGFSLTGTGITTDVQTSYAARIMGLSVIPFIIAQFPKMLKTHHEQRLAMLLALIVSFLLVLSYCLYQVFQPWIQRRKLAYAKHKHVISGILRHAQMQSLGRLLNDDGTPNDDVIRKLFRKIDMDQSESLSRAELHALIVGINFEEVDFDRTDAVDKVMDDFDTSRNDVVEQEEFVQG

SEQ ID NO: 8923 - protein, 276 aa, Zea mays subsp. mays
  peptide (1)..(276): Ceres Seq. ID no. 12349692
  misc_feature (212)..(240): Pfam Name: EF hand Pfam Description: EF hand
  misc_feature (51)..(275): Homolog of NCBI NO: 34903912 NR Description: unnamed protein product [Oryza sativa (japonica group)] >gi|8096597|dbj|BAA96170.1| unnamed protein product
  misc_feature (1)..(42): Homolog of NCBI NO: 34903912 NR Description: unnamed protein product [Oryza sativa (japonica group)] >gi|8096597|dbj|BAA96170.1| unnamed protein product
  misc_feature (1)..(275): Homolog of NCBI NO: 30695448 NR Description: expressed protein [Arabidopsis thaliana]
  misc_feature (1)..(275): Homolog of NCBI NO: 25405975 NR Description: protein F12M16.12 [imported] - Arabidopsis >gi|7769854|gb|AAF69532.1|AC008007_7 F12M16.12 [Arabidopsis
  misc_feature (1)..(275): Homolog of NCBI NO: 13605639 NR Description: At1g53210/F12M16_12 [Arabidopsis thaliana]
  misc_feature (1)..(275): Homolog of NCBI NO: 15218787 NR Description: unknown protein; protein id: At1g29020.1 thaliana] >gi|10764849|gb|AAF24539.2|AC007508_2 F1K23.2
  misc_feature (1)..(139): Homolog of NCBI NO: 16930749 NR Description: drought-induced protein RDI [Retama raetam]
  misc_feature (1)..(275): Homolog of NCBI NO: 26449859 NR Description: unknown protein [Arabidopsis thaliana]
  misc_feature (1)..(136): Homolog of NCBI NO: 15218787 NR Description: unknown protein; protein id: At1g29020.1 thaliana] >gi|10764849|gb|AAF24539.2|AC007508_2 F1K23.2
  misc_feature (1)..(81): Homolog of NCBI NO: 15226193 NR Description: unknown protein; protein id: At2g34030.1
MYKAATYLSAGSELLLEIMGPGLVGGLLLPILGALPDALLVLVSGLSGSKEEAQSQVLIGMGLLAGSTVFLLTLLWGTCVVVGKCDLGPNREAVDVTDAKGFSLTGTGITTDVQTSYAARIMGLSVIPFIIAQFPKMLKTHHEQRLAMLLALIVSFLLVLSYCLYQVFQPWIQRRKLAYAKHKHVISGILRHAQMQSLGRLLNDDGTPNDDVIRKLFRKIDMDQSESLSRAELHALIVGINFEEVDFDRTDAVDKVMDDFDTSRNDVVEQEEFVQG

SEQ ID NO: 8924 - DNA, 935 bp, Zea mays subsp. mays
  misc_feature (1)..(935): Ceres Seq. ID no. 12363238
  misc_feature: MA Experiment ID: 108529 Result: Up-regulated in Transcription
  misc_feature: MA Experiment 108529 PARAMETER Experiment Name: Zm_Imbibed_Seeds_P Parameter: Age (day) Value: 5 vs. 2
  misc_feature: MA Experiment 108529 PARAMETER Experiment Name: Zm_Imbibed_Seeds_P Parameter: Organism Value: Zea mays
  misc_feature: MA Experiment 108529 PARAMETER Experiment Name: Zm_Imbibed_Seeds_P Parameter: Plant Line Value: 35A19
  misc_feature: MA Experiment 108529 PARAMETER Experiment Name: Zm_Imbibed_Seeds_P Parameter: Tissue Value: Roots vs. Embryo
  misc_feature: MA Experiment ID: 20000492 Result: Down-regulated in Transcription
  misc_feature: MA Experiment 20000492 PARAMETER Experiment Name: Zm_Hybrid_Seed_Dev_P Parameter: DAP Value: 12
  misc_feature: MA Experiment 20000492 PARAMETER Experiment Name: Zm_Hybrid_Seed_Dev_P Parameter: Organism Value: Zea mays
  misc_feature: MA Experiment 20000492 PARAMETER Experiment Name: Zm_Hybrid_Seed_Dev_P Parameter: Plant Line Value: 35A19
  misc_feature: MA Experiment 20000492 PARAMETER Experiment Name: Zm_Hybrid_Seed_Dev_P Parameter: Tissue Value: Fert Kernel vs. Unfert Floret
gcacgagaccattacctagaacatcctaatcgaaaaatctatatctaaggcctatagctaactagctcggtccggcgatagaggccgccatggcgtccatcatcgtcatcgccgccgtgctcgtcctggacgtcctcgccttcgtgctcgccatcggcgccgagcgccgccggagctacgtgaactacgtgagcgtggacccggccggggggtcctactgcgtgtacagctccgacgcgtcgacggcgtacggcgtgagcgcgctgctgctgctgctcgccgcgcaggccgtggccatggtcgccacccgctgcttctgctgcggccgcgcgctctcgccgggccgctggcgggcgtggtccggcatctgcttcatcgtctgctgggtgacgttcgtgatcgcggagctgtgcctgctggccgggtcggtccggaacgcgtatcacaccaagtacttccccaagggcgacggcccgccgccgtgcgccatgctgcgcaagggcgtcttcgccgccggcgccgccttcaccttcctcaccgcgctgttcaccgagctgcactacctcttctacgccagggcgcgcgacgccgccgccgtggccccgcccatcgtcggcggcatcggcatgacccgcatgtgatgtggaggatatagctgcatgtgatagtactgtactactgtgactacagcgtgctggaactgttgggtttgtaattctgttattgttagccatcgcaacatagctgcattgttagccatcgcccatcggcattcagcagcagactggactagtttttttttccctctccctgcgcgtacattcaccacaaatcagcagaggtggatctgtcccagtccggcgcttgacgagaagcacaacgcacaaaggtgatcaaaagccagaaaatgttcagaatggtgacaacattattgc

SEQ ID NO: 8925 - protein, 183 aa, Zea mays subsp. mays
  peptide (1)..(183): Ceres Seq. ID no. 12363239
  misc_feature (1)..(183): Homolog of NCBI NO: 38344206 NR Description: OSJNBa0064G10.22 [Oryza sativa (japonica
  misc_feature (1)..(180): Homolog of NCBI NO: 34394069 NR Description: unknown protein [Oryza sativa (japonica
  misc_feature (1)..(180): Homolog of NCBI NO: 38016521 NR Description: fiber protein Fb34 [Gossypium barbadense]
  misc_feature (1)..(167): Homolog of NCBI NO: 18400781 NR Description: expressed protein; protein id: At3g15480.1, by cDNA: 22328., supported by cDNA: gi_15982922, supported by gi_19699225 [Arabidopsis thaliana] >gi|7021733|gb|AAF35414.1|
  misc_feature (1)..(166): Homolog of NCBI NO: 18404242 NR Description: expressed protein; protein id: At1g52910.1, by cDNA: 21921. [Arabidopsis thaliana] >gi|25405613|pir||D96570
  misc_feature (1)..(168): Homolog of NCBI NO: 18416991 NR Description: Expressed protein; protein id: At4g27435.1, by cDNA: gi_15809977, supported by cDNA: gi_17981656 [Arabidopsis >gi|15809978|gb|AAL06916.1| At4g27438 [Arabidopsis thaliana]
  misc_feature (1)..(183): Homolog of NCBI NO: 18407003 NR Description: Expressed protein; protein id: At1g61065.1, by cDNA: 25888., supported by cDNA: gi_16930460, supported by gi_19310518 [Arabidopsis thaliana]
  misc_feature (1)..(183): Homolog of NCBI NO: 21554630 NR Description: unknown [Arabidopsis thaliana]
  misc_feature (6)..(176): Homolog of NCBI NO: 22748411 NR Description: hypothetical protein [Oryza sativa (japonica
  misc_feature (1)..(99): Homolog of NCBI NO: 38344205 NR Description: OSJNBa0064G10.21 [Oryza sativa (japonica
MASIIVIAAVLVLDVLAFVLAIGAERRRSYVNYVSVDPAGGSYCVYSSDASTAYGVSALLLLLAAQAVAMVATRCFCCGRALSPGRWRAWSGICFIVCWVTFVIAELCLLAGSVRNAYHTKYFPKGDGPPPCAMLRKGVFAAGAAFTFLTALFTELHYLFYARARDAAAVAPPIVGGIGMTRM

SEQ ID NO: 8926 - protein, 114 aa, Zea mays subsp. mays
  peptide (1)..(114): Ceres Seq. ID no. 12363240
  misc_feature (1)..(114): Homolog of NCBI NO: 38344206 NR Description: OSJNBa0064G10.22 [Oryza sativa (japonica
  misc_feature (1)..(111): Homolog of NCBI NO: 34394069 NR Description: unknown protein [Oryza sativa (japonica
  misc_feature (1)..(111): Homolog of NCBI NO: 38016521 NR Description: fiber protein Fb34 [Gossypium barbadense]
  misc_feature (1)..(98): Homolog of NCBI NO: 18400781 NR Description: expressed protein; protein id: At3g15480.1, by cDNA: 22328., supported by cDNA: gi_15982922, supported by gi_19699225 [Arabidopsis thaliana] >gi|7021733|gb|AAF35414.1|
  misc_feature (1)..(97): Homolog of NCBI NO: 18404242 NR Description: expressed protein; protein id: At1g52910.1, by cDNA: 21921. [Arabidopsis thaliana] >gi|25405613|pir||D96570
  misc_feature (1)..(99): Homolog of NCBI NO: 18416991 NR Description: Expressed protein; protein id: At4g27435.1, by cDNA: gi_15809977, supported by cDNA: gi_17981656 [Arabidopsis >gi|15809978|gb|AAL06916.1| At4g27438 [Arabidopsis thaliana]
  misc_feature (1)..(114): Homolog of NCBI NO: 18407003 NR Description: Expressed protein; protein id: At1g61065.1, by cDNA: 25888., supported by cDNA: gi_16930460, supported by gi_19310518 [Arabidopsis thaliana]
  misc_feature (1)..(114): Homolog of NCBI NO: 21554630 NR Description: unknown [Arabidopsis thaliana]
  misc_feature (1)..(107): Homolog of NCBI NO: 22748411 NR Description: hypothetical protein [Oryza sativa (japonica
  misc_feature (1)..(30): Homolog of NCBI NO: 38344205 NR Description: OSJNBa0064G10.21 [Oryza sativa (japonica
MVATRCFCCGRALSPGRWRAWSGICFIVCWVTFVIAELCLLAGSVRNAYHTKYFPKGDGPPPCAMLRKGVFAAGAAFTFLTALFTELHYLFYARARDAAAVAPPIVGGIGMTRM

SEQ ID NO: 8927 - DNA, 1067 bp, Zea mays subsp. mays
  misc_feature (1)..(1067): Ceres Seq. ID no. 12354075
  misc_feature: MA Experiment ID: 108556 Result: Down-regulated in Transcription
  misc_feature: MA Experiment 108556 PARAMETER Experiment Name: Zm_Drought_P Parameter: Age (day) Value: 9
  misc_feature: MA Experiment 108556 PARAMETER Experiment Name: Zm_Drought_P Parameter: Organism Value: Zea mays
  misc_feature: MA Experiment 108556 PARAMETER Experiment Name: Zm_Drought_P Parameter: Plant Line Value: 35A19
  misc_feature: MA Experiment 108556 PARAMETER Experiment Name: Zm_Drought_P Parameter: Timepoint (hr) Value: 24
  misc_feature: MA Experiment 108556 PARAMETER Experiment Name: Zm_Drought_P Parameter: Tissue Value: Aerial
  misc_feature: MA Experiment 108556 PARAMETER Experiment Name: Zm_Drought_P Parameter: Treatment Value: Drought vs. No Drought
  misc_feature: MA Experiment ID: 108597 Result: Down-regulated in Transcription
  misc_feature: MA Experiment 108597 PARAMETER Experiment Name: Zm_100uM_ABA_P Parameter: Age (day) Value: 9
  misc_feature: MA Experiment 108597 PARAMETER Experiment Name: Zm_100uM_ABA_P Parameter: Organism Value: Zea mays
  misc_feature: MA Experiment 108597 PARAMETER Experiment Name: Zm_100uM_ABA_P Parameter: Plant Line Value: 35A19
  misc_feature: MA Experiment 108597 PARAMETER Experiment Name: Zm_100uM_ABA_P Parameter: Timepoint (hr) Value: 24
  misc_feature: MA Experiment 108597 PARAMETER Experiment Name: Zm_100uM_ABA_P Parameter: Tissue Value: Aerial
  misc_feature: MA Experiment 108597 PARAMETER Experiment Name: Zm_100uM_ABA_P Parameter: Treatment Value: 100uM ABA vs. No Treatment
  misc_feature: MA Experiment ID: 108687 Result: Down-regulated in Transcription
  misc_feature: MA Experiment 108687 PARAMETER Experiment Name: Zm_Embryos-Flowers__P Parameter: Tissue Value: Embryo vs. Aerial+
  misc_feature: MA Experiment ID: 108689 Result: Down-regulated in Transcription
  misc_feature: MA Experiment 108689 PARAMETER Experiment Name: Zm_Drought_Roots_P Parameter: Age (day) Value: 9
  misc_feature: MA Experiment 108689 PARAMETER Experiment Name: Zm_Drought_Roots_P Parameter: Organism Value: Zea mays
  misc_feature: MA Experiment 108689 PARAMETER Experiment Name: Zm_Drought_Roots_P Parameter: Plant Line Value: 35A19
  misc_feature: MA Experiment 108689 PARAMETER Experiment Name: Zm_Drought_Roots_P Parameter: Timepoint (hr) Value: 24
  misc_feature: MA Experiment 108689 PARAMETER Experiment Name: Zm_Drought_Roots_P Parameter: Tissue Value: Roots
  misc_feature: MA Experiment 108689 PARAMETER Experiment Name: Zm_Drought_Roots_P Parameter: Treatment Value: Drought vs. No Drought
  misc_feature: MA Experiment ID: 20000480 Result: Down-regulated in Transcription
  misc_feature: MA Experiment 20000480 PARAMETER Experiment Name: Zm_Drought_P Parameter: Age (day) Value: 11
  misc_feature: MA Experiment 20000480 PARAMETER Experiment Name: Zm_Drought_P Parameter: Organism Value: Zea mays
  misc_feature: MA Experiment 20000480 PARAMETER Experiment Name: Zm_Drought_P Parameter: Plant Line Value: 35A19
  misc_feature: MA Experiment 20000480 PARAMETER Experiment Name: Zm_Drought_P Parameter: Timepoint (hr) Value: 72
  misc_feature: MA Experiment 20000480 PARAMETER Experiment Name: Zm_Drought_P Parameter: Tissue Value: Aerial
  misc_feature: MA Experiment 20000480 PARAMETER Experiment Name: Zm_Drought_P Parameter: Treatment Value: Drought vs. No Drought
atatagatagataggagtacactgcgtaggagacagcaagagggcgaggctgtgtgtgagagagggagaggcagagaacattcggcagtgtgagaatcggaatcggagtcggagatggcttggaatggccgcttcggcaacgacgaggaggggagcggccttgagctcagccttagcctcccgggctacttctccggatcaccaacccaagctgcagcaggtttcgaggacaaagcagacggcggctctgctgctgctgctgctgctgcgcgagcaaagggaagcaatggcttcaaggccaggccggcggcagctgctccggtcgtgggatggccgccagtgcgcgcgttccggcggaacctcgcctcggcgtcctccaagccgtcccgcgatccgccaccaagccacagaggaaacgagtccgcgagcgtcggcgccggcggcaaggccgtcgagggcggcaacaagggcctgttcgtcaaggtcaacatggacggcgtgcccatcggccggaagctcgacctgggcggccacgccggctacgacacgctaaccgccgccgtcgaccacctcttccgcggcctcctctccgctcaaacgtcgggaccaggcggcgagcggcaggcggtcgcggggatcctgaacggtggcggcgagtacacgctggtgtacgaggacgacgagggagaccagatgctggtcggggacgtgccgtggcagatgttcgccgccaccgccaggcgtctgcgcgtgctgcggagctccgatctcaacccctcgtcgctaagggcagctaccaggaagagagctgcagcttagtgcttcgctggcgtaccctggagtctcaactctgaacattttgcggccttttcggagggccaccaatgtaaaattgaagcggtttttcgtggattttagttaccattaccatcatgtatgtgatcaagtagggaagcaggaatctagaggtgatgagcggtgttggtagaatcacgtaatttagtgctaggaccagcagtgtctcaacttttctgaaagtctaacaaggtgtcttggcgctggagtgt

SEQ ID NO: 8928 - protein, 234 aa, Zea mays subsp. mays
  peptide (1)..(234): Ceres Seq. ID no. 12354076
  misc_feature (17)..(219): Pfam Name: AUX/IAA family Pfam Description: AUX/IAA family
  misc_feature (1)..(234): Homolog of NCBI NO: 34906394 NR Description: P0710E05.9 [Oryza sativa (japonica
  misc_feature (66)..(231): Homolog of NCBI NO: 4093155 NR Description: phytochrome-associated protein 1 [Arabidopsis
  misc_feature (66)..(231): Homolog of NCBI NO: 15228226 NR Description: phytochrome-associated protein 1 (PAP1); protein At3g16500.1, supported by cDNA: 38146., supported by cDNA: supported by cDNA: gi_14423421, supported by cDNA: gi_18377501,
  misc_feature (66)..(231): Homolog of NCBI NO: 21593333 NR Description: phytochrome-associated protein 1 (PAP1)
  misc_feature (4)..(231): Homolog of NCBI NO: 15218080 NR Description: auxin regulated protein IAA18, putative; protein At1g51950.1, supported by cDNA: 6493., supported by cDNA: supported by cDNA: gi_15810072 [Arabidopsis thaliana]
  misc_feature (4)..(231): Homolog of NCBI NO: 25296228 NR Description: auxin-induced protein IAA18 [imported] - thaliana (fragment) >gi|2618725|gb|AAB84355.1| IAA18 [Arabidopsis
  misc_feature (4)..(231): Homolog of NCBI NO: 21594025 NR Description: auxin regulated protein IAA18, putative
  misc_feature (49)..(229): Homolog of NCBI NO: 34909384 NR Description: putative phytochrome-associated protein [Oryza
  misc_feature (8)..(218): Homolog of NCBI NO: 15235385 NR Description: early auxin-inducible protein 11 (IAA11); protein At4g28640.1, supported by cDNA: gi_12083203, supported by cDNA:
  misc_feature (8)..(218): Homolog of NCBI NO: 20466408 NR Description: early auxin-inducible protein 11 [Arabidopsis
MAWNGRFGNDEEGSGLELSLSLPGYFSGSPTQAAAGFEDKADGGSAAAAAAARAKGSNGFKARPAAAAPVVGWPPVRAFRRNLASASSKPSRDPPPSHRGNESASVGAGGKAVEGGNKGLFVKVNMDGVPIGRKLDLGGHAGYDTLTAAVDHLFRGLLSAQTSGPGGERQAVAGILNGGGEYTLVYEDDEGDQMLVGDVPWQMFAATARRLRVLRSSDLNPSSLRAATRKRAAA

SEQ ID NO: 8929 - protein, 174 aa, Zea mays subsp. mays
  peptide (1)..(174): Ceres Seq. ID no. 12354077
MAASARVPAEPRLGVLQAVPRSATKPQRKRVRERRRRRQGRRGRQQGPVRQGQHGRRAHRPEARPGRPRRLRHANRRRRPPLPRPPLRSNVGTRRRAAGGRGDPERWRRVHAGVRGRRGRPDAGRGRAVADVRRHRQASARAAELRSQPLVAKGSYQEESCSLVLRWRTLESQL

SEQ ID NO: 8930 - protein, 142 aa, Zea mays subsp. mays
  peptide (1)..(142): Ceres Seq. ID no. 12354078
MAASATTRRGAALSSALASRATSPDHQPKLQQVSRTKQTAALLLLLLLREQREAMASRPGRRQLLRSWDGRQCARSGGTSPRRPPSRPAIRHQATEETSPRASAPAARPSRAATRACSSRSTWTACPSAGSSTWAATPATTR

SEQ ID NO: 8931 - DNA, 711 bp, Zea mays subsp. mays
  misc_feature (1)..(711): Ceres Seq. ID no. 12346855
  misc_feature: MA Experiment ID: 108543 Result: Up-regulated in Transcription
  misc_feature: MA Experiment ID: 20000492 Result: Down-regulated in Transcription
  misc_feature: MA Experiment 20000492 PARAMETER Experiment Name: Zm_Hybrid_Seed_Dev_P Parameter: DAP Value: 12
  misc_feature: MA Experiment 20000492 PARAMETER Experiment Name: Zm_Hybrid_Seed_Dev_P Parameter: Organism Value: Zea mays
  misc_feature: MA Experiment 20000492 PARAMETER Experiment Name: Zm_Hybrid_Seed_Dev_P Parameter: Plant Line Value: 35A19
  misc_feature: MA Experiment 20000492 PARAMETER Experiment Name: Zm_Hybrid_Seed_Dev_P Parameter: Tissue Value: Fert Kernel vs. Unfert Floret
  misc_feature: MA Experiment ID: 20000535 Result: Down-regulated in Transcription
  misc_feature: MA Experiment 20000535 PARAMETER Experiment Name: Zm_Hybrid_Seed_Dev_P Parameter: DAP Value: 30 vs. 12
  misc_feature: MA Experiment 20000535 PARAMETER Experiment Name: Zm_Hybrid_Seed_Dev_P Parameter: Organism Value: Zea mays
  misc_feature: MA Experiment 20000535 PARAMETER Experiment Name: Zm_Hybrid_Seed_Dev_P Parameter: Plant Line Value: 35A19
  misc_feature: MA Experiment 20000535 PARAMETER Experiment Name: Zm_Hybrid_Seed_Dev_P Parameter: Tissue Value: Embryo vs. Unfert Floret
gaagcgacggacgagacgaggcacggaacggagcgagccagactacccacctaggcccagcggcatgaggggcagcgagatgttgaccgccgcggggggcgccggcacggccccgtccacggtctcctcgggggcggccgcggccgcggacctggttgctggagccgggggcacgggcgctatcggcgcgggcggaggacgcggcaacttccccctcgccgtcgccctcctcgccttcgccttcgcaaacttcgttaacctcgtctccatctggttaaaagagaagaggtgggatgcaaggaaatttcttacttcagctggagtcatgtcatctctttctgcaactgtggggagcttggccgttgctgtgggtcaacaagaaggcgcagatagctctgcatttgcccttgcattgatttttgctgccgttgtaatgtatgatgcatcaggaattagatggcacacaggtcgccaagctgcgttgttgaatcaaatagtctgtgatttcccaccagaacatccaatcatttcaacctttcggccactacgggaacctcttggacacagcccacttcaggtttttgcaggagcacttgttggttgtgcagctgcttatttcatgggaaaatctgtataaggaataggaatgtatagggtttggcttgtacacgaattccattgacttatttttgtaaaaaaatatcattgatc

SEQ ID NO: 8932 - protein, 211 aa, Zea mays subsp. mays
  peptide (1)..(211): Ceres Seq. ID no. 12346856
  misc_feature (69)..(210): Pfam Name: Divergent PAP2 family Pfam Description: Divergent PAP2 family
  misc_feature (48)..(210): Homolog of NCBI NO: 30686309 NR Description: expressed protein [Arabidopsis thaliana] unknown protein [Arabidopsis thaliana]
  misc_feature (48)..(194): Homolog of NCBI NO: 11994397 NR Description: gb|AAB61516.1~gene_id:MIL23.18~similar to unknown
  misc_feature (69)..(204): Homolog of NCBI NO: 15220480 NR Description: F12A21.27; protein id: At1g67600.1, supported by
  misc_feature (69)..(204): Homolog of NCBI NO: 21555270 NR Description: unknown [Arabidopsis thaliana]
  misc_feature (69)..(204): Homolog of NCBI NO: 18395459 NR Description: expressed protein; protein id: At1g24350.1,
  misc_feature (69)..(207): Homolog of NCBI NO: 38344227 NR Description: OJ991113_30.3 [Oryza sativa (japonica
  misc_feature (69)..(193): Homolog of NCBI NO: 12324675 NR Description: unknown protein [Arabidopsis thaliana]
  misc_feature (69)..(193): Homolog of NCBI NO: 9743358 NR Description: F21J9.1 [Arabidopsis thaliana]
  misc_feature (69)..(204): Homolog of NCBI NO: 7486375 NR Description: hypothetical protein F3I6.29 - Arabidopsis >gi|2829889|gb|AAC00597.1| Hypothetical protein [Arabidopsis
  misc_feature (75)..(206): Homolog of NCBI NO: 18412127 NR Description: putative protein; protein id: At3g61770.1, by cDNA: 29280., supported by cDNA: gi_19347770 [Arabidopsis >gi|19347771|gb|AAL86337.1| unknown protein [Arabidopsis
KRRTRRGTERSEPDYPPRPSGMRGSEMLTAAGGAGTAPSTVSSGAAAAADLVAGAGGTGAIGAGGGRGNFPLAVALLAFAFANFVNLVSIWLKEKRWDARKFLTSAGVMSSLSATVGSLAVAVGQQEGADSSAFALALIFAAVVMYDASGIRWHTGRQAALLNQIVCDFPPEHPIISTFRPLREPLGHSPLQVFAGALVGCAAAYFMGKSV

SEQ ID NO: 8933 - protein, 190 aa, Zea mays subsp. mays
  peptide (1)..(190): Ceres Seq. ID no. 12346857
  misc_feature (48)..(189): Pfam Name: Divergent PAP2 family Pfam Description: Divergent PAP2 family
  misc_feature (27)..(189): Homolog of NCBI NO: 30686309 NR Description: expressed protein [Arabidopsis thaliana] unknown protein [Arabidopsis thaliana]
  misc_feature (27)..(173): Homolog of NCBI NO: 11994397 NR Description: gb|AAB61516.1~gene_id:MIL23.18~similar to unknown
  misc_feature (48)..(183): Homolog of NCBI NO: 15220480 NR Description: F12A21.27; protein id: At1g67600.1, supported by
  misc_feature (48)..(183): Homolog of NCBI NO: 21555270 NR Description: unknown [Arabidopsis thaliana]
  misc_feature (48)..(183): Homolog of NCBI NO: 18395459 NR Description: expressed protein; protein id: At1g24350.1,
  misc_feature (48)..(186): Homolog of NCBI NO: 38344227 NR Description: OJ991113_30.3 [Oryza sativa (japonica
  misc_feature (48)..(172): Homolog of NCBI NO: 12324675 NR Description: unknown protein [Arabidopsis thaliana]
  misc_feature (48)..(172): Homolog of NCBI NO: 9743358 NR Description: F21J9.1 [Arabidopsis thaliana]
  misc_feature (48)..(183): Homolog of NCBI NO: 7486375 NR Description: hypothetical protein F3I6.29 - Arabidopsis >gi|2829889|gb|AAC00597.1| Hypothetical protein [Arabidopsis
  misc_feature (54)..(185): Homolog of NCBI NO: 18412127 NR Description: putative protein; protein id: At3g61770.1, by cDNA: 29280., supported by cDNA: gi_19347770 [Arabidopsis >gi|19347771|gb|AAL86337.1| unknown protein [Arabidopsis
MRGSEMLTAAGGAGTAPSTVSSGAAAAADLVAGAGGTGAIGAGGGRGNFPLAVALLAFAFANFVNLVSIWLKEKRWDARKFLTSAGVMSSLSATVGSLAVAVGQQEGADSSAFALALIFAAVVMYDASGIRWHTGRQAALLNQIVCDFPPEHPIISTFRPLREPLGHSPLQVFAGALVGCAAAYFMGKSV

SEQ ID NO: 8934 - protein, 185 aa, Zea mays subsp. mays
  peptide (1)..(185): Ceres Seq. ID no. 12346858
  misc_feature (43)..(184): Pfam Name: Divergent PAP2 family Pfam Description: Divergent PAP2 family
  misc_feature (22)..(184): Homolog of NCBI NO: 30686309 NR Description: expressed protein [Arabidopsis thaliana] unknown protein [Arabidopsis thaliana]
  misc_feature (22)..(168): Homolog of NCBI NO: 11994397 NR Description: gb|AAB61516.1~gene_id:MIL23.18~similar to unknown
  misc_feature (43)..(178): Homolog of NCBI NO: 15220480 NR Description: F12A21.27; protein id: At1g67600.1, supported by
  misc_feature (43)..(178): Homolog of NCBI NO: 18395459 NR Description: expressed protein; protein id: At1g24350.1,
  misc_feature (43)..(178): Homolog of NCBI NO: 21555270 NR Description: unknown [Arabidopsis thaliana]
  misc_feature (43)..(181): Homolog of NCBI NO: 38344227 NR Description: OJ991113_30.3 [Oryza sativa (japonica
  misc_feature (43)..(167): Homolog of NCBI NO: 12324675 NR Description: unknown protein [Arabidopsis thaliana]
  misc_feature (43)..(167): Homolog of NCBI NO: 9743358 NR Description: F21J9.1 [Arabidopsis thaliana]
  misc_feature (43)..(178): Homolog of NCBI NO: 7486375 NR Description: hypothetical protein F3I6.29 - Arabidopsis >gi|2829889|gb|AAC00597.1| Hypothetical protein [Arabidopsis
  misc_feature (49)..(180): Homolog of NCBI NO: 18412127 NR Description: putative protein; protein id: At3g61770.1, by cDNA: 29280., supported by cDNA: gi_19347770 [Arabidopsis >gi|19347771|gb|AAL86337.1| unknown protein [Arabidopsis
MLTAAGGAGTAPSTVSSGAAAAADLVAGAGGTGAIGAGGGRGNFPLAVALLAFAFANFVNLVSIWLKEKRWDARKFLTSAGVMSSLSATVGSLAVAVGQQEGADSSAFALALIFAAVVMYDASGIRWHTGRQAALLNQIVCDFPPEHPIISTFRPLREPLGHSPLQVFAGALVGCAAAYFMGKSV

SEQ ID NO: 8935 - DNA, 852 bp, Zea mays subsp. mays
  misc_feature (1)..(852): Ceres Seq. ID no. 12372297
  misc_feature: MA Experiment ID: 108529 Result: Up-regulated in Transcription
  misc_feature: MA Experiment 108529 PARAMETER Experiment Name: Zm_Imbibed_Seeds_P Parameter: Age (day) Value: 5 vs. 2
  misc_feature: MA Experiment 108529 PARAMETER Experiment Name: Zm_Imbibed_Seeds_P Parameter: Organism Value: Zea mays
  misc_feature: MA Experiment 108529 PARAMETER Experiment Name: Zm_Imbibed_Seeds_P Parameter: Plant Line Value: 35A19
  misc_feature: MA Experiment 108529 PARAMETER Experiment Name: Zm_Imbibed_Seeds_P Parameter: Tissue Value: Roots vs. Embryo
  misc_feature: MA Experiment ID: 108536 Result: Down-regulated in Transcription
  misc_feature: MA Experiment 108536 PARAMETER Experiment Name: Zm_Meristem_P Parameter: Age (day) Value: 8
  misc_feature: MA Experiment 108536 PARAMETER Experiment Name: Zm_Meristem_P Parameter: Organism Value: Zea mays
  misc_feature: MA Experiment 108536 PARAMETER Experiment Name: Zm_Meristem_P Parameter: Plant Line Value: 35A19
  misc_feature: MA Experiment 108536 PARAMETER Experiment Name: Zm_Meristem_P Parameter: Tissue Value: Shoot Meristem vs. Above Shoot Meristem
  misc_feature: MA Experiment ID: 20000535 Result: Down-regulated in Transcription
  misc_feature: MA Experiment 20000535 PARAMETER Experiment Name: Zm_Hybrid_Seed_Dev_P Parameter: DAP Value: 30 vs. 12
  misc_feature: MA Experiment 20000535 PARAMETER Experiment Name: Zm_Hybrid_Seed_Dev_P Parameter: Organism Value: Zea mays
  misc_feature: MA Experiment 20000535 PARAMETER Experiment Name: Zm_Hybrid_Seed_Dev_P Parameter: Plant Line Value: 35A19
  misc_feature: MA Experiment 20000535 PARAMETER Experiment Name: Zm_Hybrid_Seed_Dev_P Parameter: Tissue Value: Embryo vs. Unfert Floret
atcggcccctcccttccttctctagttcccttcccttatagtattaactacgacgatggtggtggatgctggtgttggtgttggcggcggcggcggcgccgggacatgtgccgtcggaggattcgcagtctgggacgtgctgctgtggcgccggggccgcgccgacgtgagcgcctgcctgctggcgggcaccgtctcctcctggctgctcttgtacggcggctacaccttggtgtccctcgcctccaacgtgctgctcctgctcctcaccgtgctcttcctgtgggccaaagcggcgcgcctcctgaacaggccgcagcctcccgtcccggagctgcgcgttccgcagcaggccgtggacgaggcggcggcgctgctgcgctctgctctggacgccgcctcggacgccttccgggacatcgcgctgggcagggactcgctgctcttctacagagtcttcctctgcctgtggagcgtgtccatcgtcggcagcgttacagatttcccgaccgcctgctacgcaagtgtggtggctgctctgaccatcccggcgctgtaccacaggcaccaagagtgcatcgccacctacatgagcttcgcctacatgaacctccggatgtacgagatggcgtacgagaggctgtccatgaaatgcttcctcaaggtcagggactggacaatggagctactcaaggatccatgatcccttggttgtttgcgagtgagtgcttcaggtatagagttgattgattggtagatagaatagtggtggttttgattgatgctgactcttgttgtttgatcgatcagtgtgctctggtagatatagtagtggttttgattgtttggtcc

SEQ ID NO: 8936 - protein, 249 aa, Zea mays subsp. mays
  peptide (1)..(249): Ceres Seq. ID no. 12372298
IGPSLPSLVPFPYSINYDDGGGCWCWCWRRRRRRDMCRRRIRSLGRAAVAPGPRRRERLPAGGHRLLLAALVRRLHLGVPRLQRAAPAPHRALPVGQSGAPPEQAAASRPGAARSAAGRGRGGGAAALCSGRRLGRLPGHRAGQGLAALLQSLPLPVERVHRRQRYRFPDRLLRKCGGCSDHPGAVPQAPRVHRHLHELRLHEPPDVRDGVREAVHEMLPQGQGLDNGATQGSMIPWLFASECFRYRVD

SEQ ID NO: 8937 - protein, 215 aa, Zea mays subsp. mays
  peptide (1)..(215): Ceres Seq. ID no. 12372299
  misc_feature (30)..(155): Homolog of NCBI NO: 38344513 NR Description: OSJNBa0016N04.6 [Oryza sativa (japonica
  misc_feature (158)..(215): Homolog of NCBI NO: 38344513 NR Description: OSJNBa0016N04.6 [Oryza sativa (japonica
  misc_feature (20)..(181): Homolog of NCBI NO: 15232423 NR Description: putative protein; protein id: At3g54120.1
  misc_feature (20)..(183): Homolog of NCBI NO: 38345298 NR Description: OSJNBa0043A12.26 [Oryza sativa (japonica
  misc_feature (19)..(175): Homolog of NCBI NO: 18402246 NR Description: expressed protein; protein id: At3g19460.1, by cDNA: 37065. [Arabidopsis thaliana] gb|AAD26905.1~gene_id:MLD14.20~similar to unknown protein
  misc_feature (19)..(175): Homolog of NCBI NO: 21593206 NR Description: unknown [Arabidopsis thaliana]
  misc_feature (24)..(203): Homolog of NCBI NO: 30679374 NR Description: expressed protein [Arabidopsis thaliana]
  misc_feature (20)..(204): Homolog of NCBI NO: 34909318 NR Description: OSJNBb0021A09.5 [Oryza sativa (japonica
  misc_feature (30)..(203): Homolog of NCBI NO: 25411624 NR Description: hypothetical protein At2g15280 [imported] - thaliana >gi|4662633|gb|AAD26905.1| hypothetical protein
  misc_feature (20)..(199): Homolog of NCBI NO: 18406991 NR Description: expressed protein; protein id: At2g46170.1, by cDNA: gi_15450758, supported by cDNA: gi_18491130 [Arabidopsis >gi|25408969|pir||E84899 hypothetical protein At2g46170
MVVDAGVGVGGGGGAGTCAVGGFAVWDVLLWRRGRADVSACLLAGTVSSWLLLYGGYTLVSLASNVLLLLLTVLFLWAKAARLLNRPQPPVPELRVPQQAVDEAAALLRSALDAASDAFRDIALGRDSLLFYRVFLCLWSVSIVGSVTDFPTACYASVVAALTIPALYHRHQECIATYMSFAYMNLRMYEMAYERLSMKCFLKVRDWTMELLKDP

SEQ ID NO: 8938 - protein, 214 aa, Zea mays subsp. mays
  peptide (1)..(214): Ceres Seq. ID no. 12372300
MCRRRIRSLGRAAVAPGPRRRERLPAGGHRLLLAALVRRLHLGVPRLQRAAPAPHRALPVGQSGAPPEQAAASRPGAARSAAGRGRGGGAAALCSGRRLGRLPGHRAGQGLAALLQSLPLPVERVHRRQRYRFPDRLLRKCGGCSDHPGAVPQAPRVHRHLHELRLHEPPDVRDGVREAVHEMLPQGQGLDNGATQGSMIPWLFASECFRYRVD

SEQ ID NO: 8939 - DNA, 1746 bp, Zea mays subsp. mays
  misc_feature (1)..(1746): Ceres Seq. ID no. 13492837
  misc_feature: MA Experiment ID: 108527 Result: Up-regulated in Transcription
  misc_feature: MA Experiment 108527 PARAMETER Experiment Name: Zm_5mM_NO_P Parameter: Age (day) Value: 8
  misc_feature: MA Experiment 108527 PARAMETER Experiment Name: Zm_5mM_NO_P Parameter: Organism Value: Zea mays
  misc_feature: MA Experiment 108527 PARAMETER Experiment Name: Zm_5mM_NO_P Parameter: Plant Line Value: 35A19
  misc_feature: MA Experiment 108527 PARAMETER Experiment Name: Zm_5mM_NO_P Parameter: Timepoint (hr) Value: 6
  misc_feature: MA Experiment 108527 PARAMETER Experiment Name: Zm_5mM_NO_P Parameter: Tissue Value: Aerial
  misc_feature: MA Experiment 108527 PARAMETER Experiment Name: Zm_5mM_NO_P Parameter: Treatment Value: 5mM NO vs. No Treatment
  misc_feature: MA Experiment ID: 108529 Result: Up-regulated in Transcription
  misc_feature: MA Experiment 108529 PARAMETER Experiment Name: Zm_Imbibed_Seeds_P Parameter: Age (day) Value: 5 vs. 2
  misc_feature: MA Experiment 108529 PARAMETER Experiment Name: Zm_Imbibed_Seeds_P Parameter: Organism Value: Zea mays
  misc_feature: MA Experiment 108529 PARAMETER Experiment Name: Zm_Imbibed_Seeds_P Parameter: Plant Line Value: 35A19
  misc_feature: MA Experiment 108529 PARAMETER Experiment Name: Zm_Imbibed_Seeds_P Parameter: Tissue Value: Roots vs. Embryo
  misc_feature: MA Experiment ID: 108534 Result: Up-regulated in Transcription
  misc_feature: MA Experiment 108534 PARAMETER Experiment Name: Zm_4deg_Cold_P Parameter: Age (hr) Value: 8
  misc_feature: MA Experiment 108534 PARAMETER Experiment Name: Zm_4deg_Cold_P Parameter: Organism Value: Zea mays
  misc_feature: MA Experiment 108534 PARAMETER Experiment Name: Zm_4deg_Cold_P Parameter: Plant Line Value: 35A19
  misc_feature: MA Experiment 108534 PARAMETER Experiment Name: Zm_4deg_Cold_P Parameter: Temperature (deg C) Value: 4 vs. 22
  misc_feature: MA Experiment 108534 PARAMETER Experiment Name: Zm_4deg_Cold_P Parameter: Timepoint (hr) Value: 6
  misc_feature: MA Experiment 108534 PARAMETER Experiment Name: Zm_4deg_Cold_P Parameter: Tissue Value: Aerial
  misc_feature: MA Experiment ID: 108535 Result: Down-regulated in Transcription
  misc_feature: MA Experiment 108535 PARAMETER Experiment Name: Zm_Meristem_P Parameter: Age (day) Value: 8
  misc_feature: MA Experiment 108535 PARAMETER Experiment Name: Zm_Meristem_P Parameter: Organism Value: Zea mays
  misc_feature: MA Experiment 108535 PARAMETER Experiment Name: Zm_Meristem_P Parameter: Plant Line Value: 35A19
  misc_feature: MA Experiment 108535 PARAMETER Experiment Name: Zm_Meristem_P Parameter: Tissue Value: Root Meristem vs. Above Root Meristem
  misc_feature: MA Experiment ID: 20000492 Result: Down-regulated in Transcription
  misc_feature: MA Experiment 20000492 PARAMETER Experiment Name: Zm_Hybrid_Seed_Dev_P Parameter: DAP Value: 12
  misc_feature: MA Experiment 20000492 PARAMETER Experiment Name: Zm_Hybrid_Seed_Dev_P Parameter: Organism Value: Zea mays
  misc_feature: MA Experiment 20000492 PARAMETER Experiment Name: Zm_Hybrid_Seed_Dev_P Parameter: Plant Line Value: 35A19
  misc_feature: MA Experiment 20000492 PARAMETER Experiment Name: Zm_Hybrid_Seed_Dev_P Parameter: Tissue Value: Fert Kernel vs. Unfert Floret
  misc_feature: MA Experiment ID: 20000535 Result: Down-regulated in Transcription
  misc_feature: MA Experiment 20000535 PARAMETER Experiment Name: Zm_Hybrid_Seed_Dev_P Parameter: DAP Value: 30 vs. 12
  misc_feature: MA Experiment 20000535 PARAMETER Experiment Name: Zm_Hybrid_Seed_Dev_P Parameter: Organism Value: Zea mays
  misc_feature: MA Experiment 20000535 PARAMETER Experiment Name: Zm_Hybrid_Seed_Dev_P Parameter: Plant Line Value: 35A19
  misc_feature: MA Experiment 20000535 PARAMETER Experiment Name: Zm_Hybrid_Seed_Dev_P Parameter: Tissue Value: Embryo vs. Unfert Floret
gttctcccccaaccccaattcgccttcacctcgccgcttcctccattgaccgccaccgttgacgtcgtcttccggcgaggtagctcgccggaagacctcacctggactttcccgaagcaccctccacacactctttaaccctccggaatggccgcctgcttctagctcgtcgacgccccaatctccgcttgcttcctcgacagccccatccgcctcttctcgctctcgctacggctcctctgcctgttcgccatggcgatccgcatcaccgtctcctactccggctacgtggcgcagaacctcgccgcgtcgctcggccaccgcttctcctccgcctccgcctcgggcagccgcctcctccatgacggcgcctggcgccccttctgcatcttcacctccacccgccagcccgagaagcaccgcagtagcggcagcgaccgccatgacggaggcgactacaaccacccgaagccccaggccatcgccgccggagctcactcgttgctgctcacgcgtgcgtgcttatcgtccaagtcgccgccgccgtctcttgccgtgggggctgctctcggtgctcgcgcagaggacgggaccgacgcctggaaccaccggatcggcggcatctctctcaggctcgtcgccgatttccctcggtttcaaccccacctccttcctcccgttcctgcagacagcgaggtggctcccgtgcagcgaccttgccacctcgtcgtcttcggcaccctcttcccctccccgctcgcttgcgccttcggctccccccaagaaggcgttgattggtgctgctactggttctaccggaattgcgacgagcagtggtgctggtgcagcgatgagcaggagcaactggctgtcgaggtgggtcagctcctgctccgatgacgccaagacggcgtttgcggctgtgaccgtgccacttctctacggctcgtccctggccgagccgaagtccatcccgtccaagtccatgtacccgaccttcgatgtcggtgatcggattcttgctgagaaggtctcatacatattccgggatccagaaatttcggacatcgtgatcttccgggctcccccaggacttcaggtttatggctacagctcaggtgatgtgttcatcaagagagttgttgccaagggaggagactatgtcgaagtgcgtgatggcaagctgtttgttaatggagtagttcaggatgaggattttgtgctggagccacacaactacgagatggaaccagtgcttgtgccggaaggttatgtgttcgtgctgggagacaaccgcaacaacagctttgattcccacaactggggtccacttccagtgaggaacattgtcgggagatctatcctccggtattggccgccatcgaagatcaatgatacaatttatgagcctgatgtgtcccgcctcgcggtgccgtcctcgtagtagtcgttgcagtgatgctggatatccagtgtgtgtgtacaatgaccttattacttcgtggagcctcatttgatgagctgagctccagttccaattctctcagaatattttgtctcctgagtgttccctgtaaattctctttgcctgacagatttgttttccctgccgcttggcagatgcttgttcaaagcacgggaaagtgtagtaccttgcatcttgcaatataaactaattaaaccggttacccttttttttcttttatcgagataaactctgcttttaagaaagcaataaggtttcgt

SEQ ID NO: 8940 - protein, 360 aa, Zea mays subsp. mays
  peptide (1)..(360): Ceres Seq. ID no. 13492838
  misc_feature (170)..(331): Pfam Name: Signal peptidase I Pfam Description: Signal peptidase I
  misc_feature (61)..(354): Homolog of NCBI NO: 21553622 NR Description: chloroplast thylakoidal processing peptidase,
  misc_feature (167)..(348): Homolog of NCBI NO: 25408074 NR Description: probable signal peptidase I [imported] - thaliana >gi|1946373|gb|AAB63091.1| putative signal peptidase I
  misc_feature (167)..(348): Homolog of NCBI NO: 30684587 NR Description: signal peptidase I -related [Arabidopsis >gi|2769566|emb|CAA71502.1| chloroplast thylakoidal processing [Arabidopsis thaliana] >gi|22135950|gb|AAM91557.1| putative
  misc_feature (89)..(349): Homolog of NCBI NO: 9294054 NR Description: contains similarity to signal peptidase (leader
  misc_feature (89)..(349): Homolog of NCBI NO: 30687572 NR Description: chloroplast thylakoidal processing peptidase
  misc_feature (61)..(354): Homolog of NCBI NO: 15222236 NR Description: chloroplast thylakoidal processing peptidase [Arabidopsis thaliana] >gi|25406944|pir||E86203 probable signal
  misc_feature (89)..(349): Homolog of NCBI NO: 25082936 NR Description: chloroplast thylakoidal processing peptidase,
  misc_feature (164)..(342): Homolog of NCBI NO: 16329254 NR Description: leader peptidase I [Synechocystis sp. PCC 6803]
  misc_feature (187)..(343): Homolog of NCBI NO: 17230467 NR Description: signal peptidase I [Nostoc sp. PCC 7120]
  misc_feature (169)..(343): Homolog of NCBI NO: 23042815 NR Description: hypothetical protein [Trichodesmium erythraeum
MTAPGAPSASSPPPASPRSTAVAAATAMTEATTTTRSPRPSPPELTRCCSRVRAYRPSRRRRLLPWGLLSVLAQRTGPTPGTTGSAASLSGSSPISLGFNPTSFLPFLQTARWLPCSDLATSSSSAPSSPPRSLAPSAPPKKALIGAATGSTGIATSSGAGAAMSRSNWLSRWVSSCSDDAKTAFAAVTVPLLYGSSLAEPKSIPSKSMYPTFDVGDRILAEKVSYIFRDPEISDIVIFRAPPGLQVYGYSSGDVFIKRVVAKGGDYVEVRDGKLFVNGVVQDEDFVLEPHNYEMEPVLVPEGYVFVLGDNRNNSFDSHNWGPLPVRNIVGRSILRYWPPSKINDTIYEPDVSRLAVPSS

SEQ ID NO: 8941 - protein, 333 aa, Zea mays subsp. mays
  peptide (1)..(333): Ceres Seq. ID no. 13492839
  misc_feature (143)..(304): Pfam Name: Signal peptidase I Pfam Description: Signal peptidase I
  misc_feature (34)..(327): Homolog of NCBI NO: 15222236 NR Description: chloroplast thylakoidal processing peptidase [Arabidopsis thaliana] >gi|25406944|pir||E86203 probable signal
  misc_feature (34)..(327): Homolog of NCBI NO: 21553622 NR Description: chloroplast thylakoidal processing peptidase,
  misc_feature (140)..(321): Homolog of NCBI NO: 25408074 NR Description: probable signal peptidase I [imported] - thaliana >gi|1946373|gb|AAB63091.1| putative signal peptidase I
  misc_feature (140)..(321): Homolog of NCBI NO: 30684587 NR Description: signal peptidase I -related [Arabidopsis >gi|2769566|emb|CAA71502.1| chloroplast thylakoidal processing [Arabidopsis thaliana] >gi|22135950|gb|AAM91557.1| putative
  misc_feature (62)..(322): Homolog of NCBI NO: 9294054 NR Description: contains similarity to signal peptidase (leader
  misc_feature (62)..(322): Homolog of NCBI NO: 30687572 NR Description: chloroplast thylakoidal processing peptidase
  misc_feature (62)..(322): Homolog of NCBI NO: 25082936 NR Description: chloroplast thylakoidal processing peptidase,
  misc_feature (137)..(315): Homolog of NCBI NO: 16329254 NR Description: leader peptidase I [Synechocystis sp. PCC 6803]
  misc_feature (160)..(316): Homolog of NCBI NO: 17230467 NR Description: signal peptidase I [Nostoc sp. PCC 7120]
  misc_feature (142)..(316): Homolog of NCBI NO: 23042815 NR Description: hypothetical protein [Trichodesmium erythraeum
MTEATTTTRSPRPSPPELTRCCSRVRAYRPSRRRRLLPWGLLSVLAQRTGPTPGTTGSAASLSGSSPISLGFNPTSFLPFLQTARWLPCSDLATSSSSAPSSPPRSLAPSAPPKKALIGAATGSTGIATSSGAGAAMSRSNWLSRWVSSCSDDAKTAFAAVTVPLLYGSSLAEPKSIPSKSMYPTFDVGDRILAEKVSYIFRDPEISDIVIFRAPPGLQVYGYSSGDVFIKRVVAKGGDYVEVRDGKLFVNGVVQDEDFVLEPHNYEMEPVLVPEGYVFVLGDNRNNSFDSHNWGPLPVRNIVGRSILRYWPPSKINDTIYEPDVSRLAVPSS

SEQ ID NO: 8942 - protein, 215 aa, Zea mays subsp. mays
  peptide (1)..(215): Ceres Seq. ID no. 13492840
MAIRITVSYSGYVAQNLAASLGHRFSSASASGSRLLHDGAWRPFCIFTSTRQPEKHRSSGSDRHDGGDYNHPKPQAIAAGAHSLLLTRACLSSKSPPPSLAVGAALGARAEDGTDAWNHRIGGISLRLVADFPRFQPHLLPPVPADSEVAPVQRPCHLVVFGTLFPSPLACAFGSPQEGVDWCCYWFYRNCDEQWCWCSDEQEQLAVEVGQLLLR

SEQ ID NO: 8943 - DNA, 968 bp, Zea mays subsp. mays; identical to SEQ ID NO: 7998
  misc_feature (1)..(968): Ceres Seq. ID no. 12380992
  misc_feature: MA Experiment ID: 20000534 Result: Up-regulated in Transcription
  misc_feature: MA Experiment 20000534 PARAMETER Experiment Name: Zm_Hybrid_Pollen_P Parameter: Age (day) Value: 8
  misc_feature: MA Experiment 20000534 PARAMETER Experiment Name: Zm_Hybrid_Pollen_P Parameter: Organism Value: Zea mays
  misc_feature: MA Experiment 20000534 PARAMETER Experiment Name: Zm_Hybrid_Pollen_P Parameter: Plant Line Value: 35A19
  misc_feature: MA Experiment 20000534 PARAMETER Experiment Name: Zm_Hybrid_Pollen_P Parameter: Tissue Value: Pollen vs. Aerial

SEQ ID NO: 8944 - protein, 260 aa, Zea mays subsp. mays; identical to SEQ ID NO: 7999
  peptide (1)..(260): Ceres Seq. ID no. 12380993
  misc_feature (50)..(259): Pfam Name: SAM dependent carboxyl methyltransferase Pfam Description: SAM dependent carboxyl methyltransferase
  misc_feature (50)..(259): Pfam Name: SAM dependent carboxyl methyltransferase Pfam Description: SAM dependent carboxyl methyltransferase
  misc_feature (1)..(259): Homolog of NCBI NO: 34911508 NR Description: putative S-adenosyl-L-methionine:salicylic acid
  misc_feature (3)..(259): Homolog of NCBI NO: 34911486 NR Description: putative S-adenosyl-L-methionine:salicylic acid
  misc_feature (16)..(259): Homolog of NCBI NO: 15234420 NR Description: S-adenosyl-L-methionine:carboxyl family; protein id: At4g36470.1 [Arabidopsis thaliana]
  misc_feature (15)..(259): Homolog of NCBI NO: 6651395 NR Description: floral nectary-specific protein [Brassica rapa
  misc_feature (15)..(259): Homolog of NCBI NO: 15223601 NR Description: S-adenosyl-L-methionine:jasmonic acid carboxyl (JMT); protein id: At1g19640.1, supported by cDNA: gi_13676828
  misc_feature (3)..(259): Homolog of NCBI NO: 34911486 NR Description: putative S-adenosyl-L-methionine:salicylic acid
  misc_feature (15)..(259): Homolog of NCBI NO: 6651395 NR Description: floral nectary-specific protein [Brassica rapa
  misc_feature (20)..(259): Homolog of NCBI NO: 18461100 NR Description: S-adenosyl-L-methionine:salicylic acid calboxyl
  misc_feature (15)..(259): Homolog of NCBI NO: 34809619 NR Description: Chain X, Crystal Structure Of Salicylic Acid
  misc_feature (15)..(259): Homolog of NCBI NO: 13235641 NR Description: S-adenosyl-L-methionine:salicylic acid carboxyl
  misc_feature (20)..(259): Homolog of NCBI NO: 23957318 NR Description: S-adenosyl-L-methionine:salicylic acid
  misc_feature (15)..(259): Homolog of NCBI NO: 13676829 NR Description: S-adenosyl-L-methionine:jasmonic acid carboxyl
  misc_feature (15)..(259): Homolog of NCBI NO: 15223601 NR Description: S-adenosyl-L-methionine:jasmonic acid carboxyl (JMT); protein id: At1g19640.1, supported by cDNA: gi_13676828
  misc_feature (16)..(259): Homolog of NCBI NO: 15234420 NR Description: S-adenosyl-L-methionine:carboxyl family; protein id: At4g36470.1 [Arabidopsis thaliana]
  misc_feature (1)..(259): Homolog of NCBI NO: 34911508 NR Description: putative S-adenosyl-L-methionine:salicylic acid
  misc_feature (15)..(259): Homolog of NCBI NO: 13676829 NR Description: S-adenosyl-L-methionine:jasmonic acid carboxyl
  misc_feature (20)..(259): Homolog of NCBI NO: 23957318 NR Description: S-adenosyl-L-methionine:salicylic acid
  misc_feature (15)..(259): Homolog of NCBI NO: 13235641 NR Description: S-adenosyl-L-methionine:salicylic acid carboxyl
  misc_feature (15)..(259): Homolog of NCBI NO: 34809619 NR Description: Chain X, Crystal Structure Of Salicylic Acid
  misc_feature (20)..(259): Homolog of NCBI NO: 18461100 NR Description: S-adenosyl-L-methionine:salicylic acid calboxyl

SEQ ID NO: 8945 - protein, 238 aa, Zea mays subsp. mays; identical to SEQ ID NO: 8000
  peptide (1)..(238): Ceres Seq. ID no. 12380994
  misc_feature (28)..(237): Pfam Name: SAM dependent carboxyl methyltransferase Pfam Description: SAM dependent carboxyl methyltransferase
  misc_feature (28)..(237): Pfam Name: SAM dependent carboxyl methyltransferase Pfam Description: SAM dependent carboxyl methyltransferase
  misc_feature (1)..(237): Homolog of NCBI NO: 34911508 NR Description: putative S-adenosyl-L-methionine:salicylic acid
  misc_feature (1)..(237): Homolog of NCBI NO: 34911486 NR Description: putative S-adenosyl-L-methionine:salicylic acid
  misc_feature (1)..(237): Homolog of NCBI NO: 15234420 NR Description: S-adenosyl-L-methionine:carboxyl family; protein id: At4g36470.1 [Arabidopsis thaliana]
  misc_feature (1)..(237): Homolog of NCBI NO: 6651395 NR Description: floral nectary-specific protein [Brassica rapa
  misc_feature (1)..(237): Homolog of NCBI NO: 15223601 NR Description: S-adenosyl-L-methionine:jasmonic acid carboxyl (JMT); protein id: At1g19640.1, supported by cDNA: gi_13676828
  misc_feature (1)..(237): Homolog of NCBI NO: 34911486 NR Description: putative S-adenosyl-L-methionine:salicylic acid
  misc_feature (1)..(237): Homolog of NCBI NO: 6651395 NR Description: floral nectary-specific protein [Brassica rapa
  misc_feature (1)..(237): Homolog of NCBI NO: 18461100 NR Description: S-adenosyl-L-methionine:salicylic acid calboxyl
  misc_feature (1)..(237): Homolog of NCBI NO: 34809619 NR Description: Chain X, Crystal Structure Of Salicylic Acid
  misc_feature (1)..(237): Homolog of NCBI NO: 13235641 NR Description: S-adenosyl-L-methionine:salicylic acid carboxyl
  misc_feature (1)..(237): Homolog of NCBI NO: 23957318 NR Description: S-adenosyl-L-methionine:salicylic acid
  misc_feature (1)..(237): Homolog of NCBI NO: 13676829 NR Description: S-adenosyl-L-methionine:jasmonic acid carboxyl
  misc_feature (1)..(237): Homolog of NCBI NO: 15223601 NR Description: S-adenosyl-L-methionine:jasmonic acid carboxyl (JMT); protein id: At1g19640.1, supported by cDNA: gi_13676828
  misc_feature (1)..(237): Homolog of NCBI NO: 15234420 NR Description: S-adenosyl-L-methionine:carboxyl family; protein id: At4g36470.1 [Arabidopsis thaliana]
  misc_feature (1)..(237): Homolog of NCBI NO: 34911508 NR Description: putative S-adenosyl-L-methionine:salicylic acid
  misc_feature (1)..(237): Homolog of NCBI NO: 13676829 NR Description: S-adenosyl-L-methionine:jasmonic acid carboxyl
  misc_feature (1)..(237): Homolog of NCBI NO: 23957318 NR Description: S-adenosyl-L-methionine:salicylic acid
  misc_feature (1)..(237): Homolog of NCBI NO: 13235641 NR Description: S-adenosyl-L-methionine:salicylic acid carboxyl
  misc_feature (1)..(237): Homolog of NCBI NO: 34809619 NR Description: Chain X, Crystal Structure Of Salicylic Acid
  misc_feature (1)..(237): Homolog of NCBI NO: 18461100 NR Description: S-adenosyl-L-methionine:salicylic acid calboxyl

SEQ ID NO: 8946 - protein, 218 aa, Zea mays subsp. mays; identical to SEQ ID NO: 8001
  peptide (1)..(218): Ceres Seq. ID no. 12380995
  misc_feature (8)..(217): Pfam Name: SAM dependent carboxyl methyltransferase Pfam Description: SAM dependent carboxyl methyltransferase
  misc_feature (8)..(217): Pfam Name: SAM dependent carboxyl methyltransferase Pfam Description: SAM dependent carboxyl methyltransferase
  misc_feature (1)..(217): Homolog of NCBI NO: 34911508 NR Description: putative S-adenosyl-L-methionine:salicylic acid
  misc_feature (1)..(217): Homolog of NCBI NO: 34911486 NR Description: putative S-adenosyl-L-methionine:salicylic acid
  misc_feature (1)..(217): Homolog of NCBI NO: 15234420 NR Description: S-adenosyl-L-methionine:carboxyl family; protein id: At4g36470.1 [Arabidopsis thaliana]
  misc_feature (1)..(217): Homolog of NCBI NO: 6651395 NR Description: floral nectary-specific protein [Brassica rapa
  misc_feature (1)..(217): Homolog of NCBI NO: 15223601 NR Description: S-adenosyl-L-methionine:jasmonic acid carboxyl (JMT); protein id: At1g19640.1, supported by cDNA: gi_13676828
  misc_feature (1)..(217): Homolog of NCBI NO: 34911486 NR Description: putative S-adenosyl-L-methionine:salicylic acid
  misc_feature (1)..(217): Homolog of NCBI NO: 6651395 NR Description: floral nectary-specific protein [Brassica rapa
  misc_feature (1)..(217): Homolog of NCBI NO: 18461100 NR Description: S-adenosyl-L-methionine:salicylic acid calboxyl
  misc_feature (1)..(217): Homolog of NCBI NO: 34809619 NR Description: Chain X, Crystal Structure Of Salicylic Acid
  misc_feature (1)..(217): Homolog of NCBI NO: 13235641 NR Description: S-adenosyl-L-methionine:salicylic acid carboxyl
  misc_feature (1)..(217): Homolog of NCBI NO: 23957318 NR Description: S-adenosyl-L-methionine:salicylic acid
  misc_feature (1)..(217): Homolog of NCBI NO: 13676829 NR Description: S-adenosyl-L-methionine:jasmonic acid carboxyl
  misc_feature (1)..(217): Homolog of NCBI NO: 15223601 NR Description: S-adenosyl-L-methionine:jasmonic acid carboxyl (JMT); protein id: At1g19640.1, supported by cDNA: gi_13676828
  misc_feature (1)..(217): Homolog of NCBI NO: 15234420 NR Description: S-adenosyl-L-methionine:carboxyl family; protein id: At4g36470.1 [Arabidopsis thaliana]
  misc_feature (1)..(217): Homolog of NCBI NO: 34911508 NR Description: putative S-adenosyl-L-methionine:salicylic acid
  misc_feature (1)..(217): Homolog of NCBI NO: 13676829 NR Description: S-adenosyl-L-methionine:jasmonic acid carboxyl
  misc_feature (1)..(217): Homolog of NCBI NO: 23957318 NR Description: S-adenosyl-L-methionine:salicylic acid
  misc_feature (1)..(217): Homolog of NCBI NO: 13235641 NR Description: S-adenosyl-L-methionine:salicylic acid carboxyl
  misc_feature (1)..(217): Homolog of NCBI NO: 34809619 NR Description: Chain X, Crystal Structure Of Salicylic Acid
  misc_feature (1)..(217): Homolog of NCBI NO: 18461100 NR Description: S-adenosyl-L-methionine:salicylic acid calboxyl

SEQ ID NO: 8947 - DNA, 1278 bp, Zea mays subsp. mays
  misc_feature (1)..(1278): Ceres Seq. ID no. 12413223
  misc_feature: MA Experiment ID: 108523 Result: Up-regulated in Transcription
  misc_feature: MA Experiment 108523 PARAMETER Experiment Name: Zm_42deg_Heat_P Parameter: Age (day) Value: 8
  misc_feature: MA Experiment 108523 PARAMETER Experiment Name: Zm_42deg_Heat_P Parameter: Organism Value: Zea mays
  misc_feature: MA Experiment 108523 PARAMETER Experiment Name: Zm_42deg_Heat_P Parameter: Plant Line Value: 35A19
  misc_feature: MA Experiment 108523 PARAMETER Experiment Name: Zm_42deg_Heat_P Parameter: Temperature (deg C) Value: 42 vs. 22
  misc_feature: MA Experiment 108523 PARAMETER Experiment Name: Zm_42deg_Heat_P Parameter: Timepoint (hr) Value: 6
  misc_feature: MA Experiment 108523 PARAMETER Experiment Name: Zm_42deg_Heat_P Parameter: Tissue Value: Aerial
  misc_feature: MA Experiment ID: 108527 Result: Up-regulated in Transcription
  misc_feature: MA Experiment 108527 PARAMETER Experiment Name: Zm_5mM_NO_P Parameter: Age (day) Value: 8
  misc_feature: MA Experiment 108527 PARAMETER Experiment Name: Zm_5mM_NO_P Parameter: Organism Value: Zea mays
  misc_feature: MA Experiment 108527 PARAMETER Experiment Name: Zm_5mM_NO_P Parameter: Plant Line Value: 35A19
  misc_feature: MA Experiment 108527 PARAMETER Experiment Name: Zm_5mM_NO_P Parameter: Timepoint (hr) Value: 6
  misc_feature: MA Experiment 108527 PARAMETER Experiment Name: Zm_5mM_NO_P Parameter: Tissue Value: Aerial
  misc_feature: MA Experiment 108527 PARAMETER Experiment Name: Zm_5mM_NO_P Parameter: Treatment Value: 5mM NO vs. No Treatment
  misc_feature: MA Experiment ID: 108528 Result: Up-regulated in Transcription
  misc_feature: MA Experiment 108528 PARAMETER Experiment Name: Zm_Imbibed_Seeds_P Parameter: Age (day) Value: 5 vs. 2
  misc_feature: MA Experiment 108528 PARAMETER Experiment Name: Zm_Imbibed_Seeds_P Parameter: Organism Value: Zea mays
  misc_feature: MA Experiment 108528 PARAMETER Experiment Name: Zm_Imbibed_Seeds_P Parameter: Plant Line Value: 35A19
  misc_feature: MA Experiment 108528 PARAMETER Experiment Name: Zm_Imbibed_Seeds_P Parameter: Tissue Value: Aerial vs. Embryo
  misc_feature: MA Experiment ID: 108529 Result: Up-regulated in Transcription
  misc_feature: MA Experiment 108529 PARAMETER Experiment Name: Zm_Imbibed_Seeds_P Parameter: Age (day) Value: 5 vs. 2
  misc_feature: MA Experiment 108529 PARAMETER Experiment Name: Zm_Imbibed_Seeds_P Parameter: Organism Value: Zea mays
  misc_feature: MA Experiment 108529 PARAMETER Experiment Name: Zm_Imbibed_Seeds_P Parameter: Plant Line Value: 35A19
  misc_feature: MA Experiment 108529 PARAMETER Experiment Name: Zm_Imbibed_Seeds_P Parameter: Tissue Value: Roots vs. Embryo
  misc_feature: MA Experiment ID: 108530 Result: Up-regulated in Transcription
  misc_feature: MA Experiment 108530 PARAMETER Experiment Name: Zm_Imbibed_Seeds_P Parameter: Age (day) Value: 6 vs. 2
  misc_feature: MA Experiment 108530 PARAMETER Experiment Name: Zm_Imbibed_Seeds_P Parameter: Organism Value: Zea mays
  misc_feature: MA Experiment 108530 PARAMETER Experiment Name: Zm_Imbibed_Seeds_P Parameter: Plant Line Value: 35A19
  misc_feature: MA Experiment 108530 PARAMETER Experiment Name: Zm_Imbibed_Seeds_P Parameter: Tissue Value: Aerial vs. Embryo
  misc_feature: MA Experiment ID: 108534 Result: Up-regulated in Transcription
  misc_feature: MA Experiment 108534 PARAMETER Experiment Name: Zm_4deg_Cold_P Parameter: Age (hr) Value: 8
  misc_feature: MA Experiment 108534 PARAMETER Experiment Name: Zm_4deg_Cold_P Parameter: Organism Value: Zea mays
  misc_feature: MA Experiment 108534 PARAMETER Experiment Name: Zm_4deg_Cold_P Parameter: Plant Line Value: 35A19
  misc_feature: MA Experiment 108534 PARAMETER Experiment Name: Zm_4deg_Cold_P Parameter: Temperature (deg C) Value: 4 vs. 22
  misc_feature: MA Experiment 108534 PARAMETER Experiment Name: Zm_4deg_Cold_P Parameter: Timepoint (hr) Value: 6
  misc_feature: MA Experiment 108534 PARAMETER Experiment Name: Zm_4deg_Cold_P Parameter: Tissue Value: Aerial
  misc_feature: MA Experiment ID: 108535 Result: Down-regulated in Transcription
  misc_feature: MA Experiment 108535 PARAMETER Experiment Name: Zm_Meristem_P Parameter: Age (day) Value: 8
  misc_feature: MA Experiment 108535 PARAMETER Experiment Name: Zm_Meristem_P Parameter: Organism Value: Zea mays
  misc_feature: MA Experiment 108535 PARAMETER Experiment Name: Zm_Meristem_P Parameter: Plant Line Value: 35A19
  misc_feature: MA Experiment 108535 PARAMETER Experiment Name: Zm_Meristem_P Parameter: Tissue Value: Root Meristem vs. Above Root Meristem
  misc_feature: MA Experiment ID: 108546 Result: Up-regulated in Transcription
  misc_feature: MA Experiment 108546 PARAMETER Experiment Name: Zm_Imbibed_Seeds_P Parameter: Age (day) Value: 3 vs. 2
  misc_feature: MA Experiment 108546 PARAMETER Experiment Name: Zm_Imbibed_Seeds_P Parameter: Organism Value: Zea mays
  misc_feature: MA Experiment 108546 PARAMETER Experiment Name: Zm_Imbibed_Seeds_P Parameter: Plant Line Value: 35A19
  misc_feature: MA Experiment 108546 PARAMETER Experiment Name: Zm_Imbibed_Seeds_P Parameter: Tissue Value: Roots vs. Embryo
  misc_feature: MA Experiment ID: 108547 Result: Up-regulated in Transcription
  misc_feature: MA Experiment 108547 PARAMETER Experiment Name: Zm_Imbibed_Seeds_P Parameter: Age (day) Value: 4 vs. 2
  misc_feature: MA Experiment 108547 PARAMETER Experiment Name: Zm_Imbibed_Seeds_P Parameter: Organism Value: Zea mays
  misc_feature: MA Experiment 108547 PARAMETER Experiment Name: Zm_Imbibed_Seeds_P Parameter: Plant Line Value: 35A19
  misc_feature: MA Experiment 108547 PARAMETER Experiment Name: Zm_Imbibed_Seeds_P Parameter: Tissue Value: Aerial vs. Embryo
  misc_feature: MA Experiment ID: 108687 Result: Up-regulated in Transcription
  misc_feature: MA Experiment 108687 PARAMETER Experiment Name: Zm_Embryos-Flowers__P Parameter: Tissue Value: Embryo vs. Aerial+
  misc_feature: MA Experiment ID: 108688 Result: Down-regulated in Transcription
  misc_feature: MA Experiment 108688 PARAMETER Experiment Name: Zm_Embryos-Flowers__P Parameter: Tissue Value: Immature Flowers vs. Aerial+
  misc_feature: MA Experiment ID: 20000480 Result: Down-regulated in Transcription
  misc_feature: MA Experiment 20000480 PARAMETER Experiment Name: Zm_Drought_P Parameter: Age (day) Value: 11
  misc_feature: MA Experiment 20000480 PARAMETER Experiment Name: Zm_Drought_P Parameter: Organism Value: Zea mays
  misc_feature: MA Experiment 20000480 PARAMETER Experiment Name: Zm_Drought_P Parameter: Plant Line Value: 35A19
  misc_feature: MA Experiment 20000480 PARAMETER Experiment Name: Zm_Drought_P Parameter: Timepoint (hr) Value: 72
  misc_feature: MA Experiment 20000480 PARAMETER Experiment Name: Zm_Drought_P Parameter: Tissue Value: Aerial
  misc_feature: MA Experiment 20000480 PARAMETER Experiment Name: Zm_Drought_P Parameter: Treatment Value: Drought vs. No Drought
agttcgtggagtggagtcaccacagaatcaaagaaaagctttcccccgatcctctcgcggacaccagcgatgggttcccgctacgaggtggaggtcaccgtcggctccgcccgggacctcaagaacgtcaactggcgcaacggcgacctcaagccctacgccgtggtgtggatcgactccggcagcaagtgctcgacccgcgtcgacctcgacaacggcgagagcccggcgtgggacgagaagctgctcgtcccgctcccgcccacctcccgcctcgacgacgccgtcctctacgtcgacgtcgtccacgccaacgccgcccagggcgtcaagccgctcgtcggctccgcgcgcctcccgctccgcgacgtcctcgacgacgccggggtcgggggcaaggcctcgcgcagcctccgcctcaagcgcccctcgggccgcccccacggccgcctcgacgtccgcgtcgccgtcaaggagccgtccaggtactacgaccccaacccctacccggcccccgcggcctacgccaacacgggcggcggcacccgtgacccctacggctcgtccgctgctgctgccggcggctactacggctccggaggcggatacggttccggtggtggcgcctacggtggcggcggctacggcgccgcgcagccctacaccgcagcgcccccggcggggtacccttccacctacggcgccgcgccgccgcctcagccagcggcagcgtacggcgctcctcctgccgctgcatacggcgctcctcctgtcgccgccaccgccgcgtacggaaccggcgccgttgcttccgacgggaagaagaagaacaagatggggatggggacggggctggcagtgggcgcggcggcgggcgtgctcggagggctggcgctggccggcggggcgagctacctggaggacaagttcgaggagcgcgtgtcggagcgggtggaggacaacctggagagggaggagtcgtacggaggcggcggctacgggggtggctacgacgactatggcggcaacgacgactatggcggcgacgacgactactgatgggtcctgatcctccgatcgtttgcccggctgctacgcttgccatccaccttcaccttcgtcttgctgtcctagatgtttgctgtatcaatcgcatgttctctattcctgccttcagtttcttttctcagttgtggtttatcgaggcggggttgatgttgagatttgagatcctcacctgaggaatggaaaaatgctaaattgattaattcggttgcg

SEQ ID NO: 8948 - protein, 355 aa, Zea mays subsp. mays
  peptide (1)..(355): Ceres Seq. ID no. 12413224
  misc_feature (32)..(221): Pfam Name: Equine herpesvirus glycoprotein gp2 Pfam Description: Equine herpesvirus glycoprotein gp2
  misc_feature (27)..(355): Homolog of NCBI NO: 11360494 NR Description: antifreeze glycopeptide AFGP polyprotein precursor
  misc_feature (26)..(355): Homolog of NCBI NO: 11360494 NR Description: antifreeze glycopeptide AFGP polyprotein precursor
  misc_feature (48)..(270): Homolog of NCBI NO: 18138528 NR Description: hypothetical protein [Grapevine fleck virus]
  misc_feature (33)..(272): Homolog of NCBI NO: 1082604 NR Description: mucin 5AC (clone JER58) - human (fragment)
  misc_feature (28)..(355): Homolog of NCBI NO: 22970264 NR Description: hypothetical protein [Chloroflexus aurantiacus]
  misc_feature (11)..(355): Homolog of NCBI NO: 28574039 NR Description: Salivary gland secretion 1 CG3047-PA
  misc_feature (11)..(355): Homolog of NCBI NO: 28574039 NR Description: Salivary gland secretion 1 CG3047-PA
  misc_feature (11)..(355): Homolog of NCBI NO: 28574039 NR Description: Salivary gland secretion 1 CG3047-PA
  misc_feature (28)..(355): Homolog of NCBI NO: 28574039 NR Description: Salivary gland secretion 1 CG3047-PA
  misc_feature (6)..(355): Homolog of NCBI NO: 28574039 NR Description: Salivary gland secretion 1 CG3047-PA
VRGVESPQNQRKAFPRSSRGHQRWVPATRWRSPSAPPGTSRTSTGATATSSPTPWCGSTPAASARPASTSTTARARRGTRSCSSRSRPPPASTTPSSTSTSSTPTPPRASSRSSAPRASRSATSSTTPGSGARPRAASASSAPRAAPTAASTSASPSRSRPGTTTPTPTRPPRPTPTRAAAPVTPTARPLLLPAATTAPEADTVPVVAPTVAAATAPRSPTPQRPRRGTLPPTAPRRRLSQRQRTALLLPLHTALLLSPPPPRTEPAPLLPTGRRRTRWGWGRGWQWARRRACSEGWRWPAGRATWRTSSRSACRSGWRTTWRGRSRTEAAATGVATTTMAATTTMAATTTTDGS

SEQ ID NO: 8949 - protein, 352 aa, Zea mays subsp. mays
  peptide (1)..(352): Ceres Seq. ID no. 12413225
  misc_feature (30)..(117): Pfam Name: C2 domain Pfam Description: C2 domain
  misc_feature (29)..(195): Homolog of NCBI NO: 10176862 NR Description: emb|CAB80929.1~gene_id:MRO11.1~similar to unknown
  misc_feature (29)..(195): Homolog of NCBI NO: 30689212 NR Description: C2 domain-containing protein [Arabidopsis
  misc_feature (15)..(287): Homolog of NCBI NO: 34908388 NR Description: P0529E05.20 [Oryza sativa (japonica
  misc_feature (29)..(181): Homolog of NCBI NO: 18390752 NR Description: extensin-related; protein id: At1g07310.1, by cDNA: gi_15451131, supported by cDNA: gi_20148320 [Arabidopsis >gi|8778551|gb|AAF79559.1|AC022464_17 F22G5.35 [Arabidopsis
  misc_feature (221)..(329): Homolog of NCBI NO: 34908388 NR Description: P0529E05.20 [Oryza sativa (japonica
SSWSGVTTESKKSFPPILSRTPAMGSRYEVEVTVGSARDLKNVNWRNGDLKPYAVVWIDSGSKCSTRVDLDNGESPAWDEKLLVPLPPTSRLDDAVLYVDVVHANAAQGVKPLVGSARLPLRDVLDDAGVGGKASRSLRLKRPSGRPHGRLDVRVAVKEPSRYYDPNPYPAPAAYANTGGGTRDPYGSSAAAAGGYYGSGGGYGSGGGAYGGGGYGAAQPYTAAPPAGYPSTYGAAPPPQPAAAYGAPPAAAYGAPPVAATAAYGTGAVASDGKKKNKMGMGTGLAVGAAAGVLGGLALAGGASYLEDKFEERVSERVEDNLEREESYGGGGYGGGYDDYGGNDDYGGDDDY

SEQ ID NO: 8950 - protein, 329 aa, Zea mays subsp. mays
  peptide (1)..(329): Ceres Seq. ID no. 12413226
  misc_feature (7)..(94): Pfam Name: C2 domain Pfam Description: C2 domain
  misc_feature (6)..(172): Homolog of NCBI NO: 10176862 NR Description: emb|CAB80929.1~gene_id:MRO11.1~similar to unknown
  misc_feature (6)..(172): Homolog of NCBI NO: 30689212 NR Description: C2 domain-containing protein [Arabidopsis
  misc_feature (1)..(264): Homolog of NCBI NO: 34908388 NR Description: P0529E05.20 [Oryza sativa (japonica
  misc_feature (6)..(158): Homolog of NCBI NO: 18390752 NR Description: extensin-related; protein id: At1g07310.1, by cDNA: gi_15451131, supported by cDNA: gi_20148320 [Arabidopsis >gi|8778551|gb|AAF79559.1|AC022464_17 F22G5.35 [Arabidopsis
  misc_feature (198)..(306): Homolog of NCBI NO: 34908388 NR Description: P0529E05.20 [Oryza sativa (japonica
MGSRYEVEVTVGSARDLKNVNWRNGDLKPYAVVWIDSGSKCSTRVDLDNGESPAWDEKLLVPLPPTSRLDDAVLYVDVVHANAAQGVKPLVGSARLPLRDVLDDAGVGGKASRSLRLKRPSGRPHGRLDVRVAVKEPSRYYDPNPYPAPAAYANTGGGTRDPYGSSAAAAGGYYGSGGGYGSGGGAYGGGGYGAAQPYTAAPPAGYPSTYGAAPPPQPAAAYGAPPAAAYGAPPVAATAAYGTGAVASDGKKKNKMGMGTGLAVGAAAGVLGGLALAGGASYLEDKFEERVSERVEDNLEREESYGGGGYGGGYDDYGGNDDYGGDDDY

SEQ ID NO: 8951 - DNA, 1382 bp, Zea mays subsp. mays
  misc_feature (1)..(1382): Ceres Seq. ID no. 12365863
  misc_feature: MA Experiment ID: 108504 Result: Down-regulated in Transcription
  misc_feature: MA Experiment 108504 PARAMETER Experiment Name: Zm_Drought_P Parameter: Age (day) Value: 8
  misc_feature: MA Experiment 108504 PARAMETER Experiment Name: Zm_Drought_P Parameter: Organism Value: Zea mays
  misc_feature: MA Experiment 108504 PARAMETER Experiment Name: Zm_Drought_P Parameter: Plant Line Value: 35A19
  misc_feature: MA Experiment 108504 PARAMETER Experiment Name: Zm_Drought_P Parameter: Timepoint (hr) Value: 12
  misc_feature: MA Experiment 108504 PARAMETER Experiment Name: Zm_Drought_P Parameter: Tissue Value: Aerial
  misc_feature: MA Experiment 108504 PARAMETER Experiment Name: Zm_Drought_P Parameter: Treatment Value: Drought vs. No Drought
  misc_feature: MA Experiment ID: 108527 Result: Down-regulated in Transcription
  misc_feature: MA Experiment 108527 PARAMETER Experiment Name: Zm_5mM_NO_P Parameter: Age (day) Value: 8
  misc_feature: MA Experiment 108527 PARAMETER Experiment Name: Zm_5mM_NO_P Parameter: Organism Value: Zea mays
  misc_feature: MA Experiment 108527 PARAMETER Experiment Name: Zm_5mM_NO_P Parameter: Plant Line Value: 35A19
  misc_feature: MA Experiment 108527 PARAMETER Experiment Name: Zm_5mM_NO_P Parameter: Timepoint (hr) Value: 6
  misc_feature: MA Experiment 108527 PARAMETER Experiment Name: Zm_5mM_NO_P Parameter: Tissue Value: Aerial
  misc_feature: MA Experiment 108527 PARAMETER Experiment Name: Zm_5mM_NO_P Parameter: Treatment Value: 5mM NO vs. No Treatment
  misc_feature: MA Experiment ID: 108530 Result: Up-regulated in Transcription
  misc_feature: MA Experiment 108530 PARAMETER Experiment Name: Zm_Imbibed_Seeds_P Parameter: Age (day) Value: 6 vs. 2
  misc_feature: MA Experiment 108530 PARAMETER Experiment Name: Zm_Imbibed_Seeds_P Parameter: Organism Value: Zea mays
  misc_feature: MA Experiment 108530 PARAMETER Experiment Name: Zm_Imbibed_Seeds_P Parameter: Plant Line Value: 35A19
  misc_feature: MA Experiment 108530 PARAMETER Experiment Name: Zm_Imbibed_Seeds_P Parameter: Tissue Value: Aerial vs. Embryo
  misc_feature: MA Experiment ID: 108535 Result: Down-regulated in Transcription
  misc_feature: MA Experiment 108535 PARAMETER Experiment Name: Zm_Meristem_P Parameter: Age (day) Value: 8
  misc_feature: MA Experiment 108535 PARAMETER Experiment Name: Zm_Meristem_P Parameter: Organism Value: Zea mays
  misc_feature: MA Experiment 108535 PARAMETER Experiment Name: Zm_Meristem_P Parameter: Plant Line Value: 35A19
  misc_feature: MA Experiment 108535 PARAMETER Experiment Name: Zm_Meristem_P Parameter: Tissue Value: Root Meristem vs. Above Root Meristem
  misc_feature: MA Experiment ID: 108540 Result: Down-regulated in Transcription
  misc_feature: MA Experiment 108540 PARAMETER Experiment Name: Zm_20percent_PEG_P Parameter: Age (day) Value: 8
  misc_feature: MA Experiment 108540 PARAMETER Experiment Name: Zm_20percent_PEG_P Parameter: Organism Value: Zea mays
  misc_feature: MA Experiment 108540 PARAMETER Experiment Name: Zm_20percent_PEG_P Parameter: Plant Line Value: 35A19
  misc_feature: MA Experiment 108540 PARAMETER Experiment Name: Zm_20percent_PEG_P Parameter: Timepoint (hr) Value: 6
  misc_feature: MA Experiment 108540 PARAMETER Experiment Name: Zm_20percent_PEG_P Parameter: Tissue Value: Aerial
  misc_feature: MA Experiment 108540 PARAMETER Experiment Name: Zm_20percent_PEG_P Parameter: Treatment Value: 20percent PEG vs. No Treatment
  misc_feature: MA Experiment ID: 108545 Result: Up-regulated in Transcription
  misc_feature: MA Experiment 108545 PARAMETER Experiment Name: Zm_Imbibed_Seeds_P Parameter: Age (day) Value: 3 vs. 2
  misc_feature: MA Experiment 108545 PARAMETER Experiment Name: Zm_Imbibed_Seeds_P Parameter: Organism Value: Zea mays
  misc_feature: MA Experiment 108545 PARAMETER Experiment Name: Zm_Imbibed_Seeds_P Parameter: Plant Line Value: 35A19
  misc_feature: MA Experiment 108545 PARAMETER Experiment Name: Zm_Imbibed_Seeds_P Parameter: Tissue Value: Aerial vs. Embryo
  misc_feature: MA Experiment ID: 108556 Result: Down-regulated in Transcription
  misc_feature: MA Experiment 108556 PARAMETER Experiment Name: Zm_Drought_P Parameter: Age (day) Value: 9
  misc_feature: MA Experiment 108556 PARAMETER Experiment Name: Zm_Drought_P Parameter: Organism Value: Zea mays
  misc_feature: MA Experiment 108556 PARAMETER Experiment Name: Zm_Drought_P Parameter: Plant Line Value: 35A19
  misc_feature: MA Experiment 108556 PARAMETER Experiment Name: Zm_Drought_P Parameter: Timepoint (hr) Value: 24
  misc_feature: MA Experiment 108556 PARAMETER Experiment Name: Zm_Drought_P Parameter: Tissue Value: Aerial
  misc_feature: MA Experiment 108556 PARAMETER Experiment Name: Zm_Drought_P Parameter: Treatment Value: Drought vs. No Drought
  misc_feature: MA Experiment ID: 108559 Result: Down-regulated in Transcription
  misc_feature: MA Experiment 108559 PARAMETER Experiment Name: Zm_5mM_NO_P Parameter: Age (day) Value: 8
  misc_feature: MA Experiment 108559 PARAMETER Experiment Name: Zm_5mM_NO_P Parameter: Organism Value: Zea mays
  misc_feature: MA Experiment 108559 PARAMETER Experiment Name: Zm_5mM_NO_P Parameter: Plant Line Value: 35A19
  misc_feature: MA Experiment 108559 PARAMETER Experiment Name: Zm_5mM_NO_P Parameter: Timepoint (hr) Value: 12
  misc_feature: MA Experiment 108559 PARAMETER Experiment Name: Zm_5mM_NO_P Parameter: Tissue Value: Aerial
  misc_feature: MA Experiment 108559 PARAMETER Experiment Name: Zm_5mM_NO_P Parameter: Treatment Value: 5mM NO vs. No Treatment
  misc_feature: MA Experiment ID: 108687 Result: Down-regulated in Transcription
  misc_feature: MA Experiment 108687 PARAMETER Experiment Name: Zm_Embryos-Flowers__P Parameter: Tissue Value: Embryo vs. Aerial+
  misc_feature: MA Experiment ID: 108689 Result: Down-regulated in Transcription
  misc_feature: MA Experiment 108689 PARAMETER Experiment Name: Zm_Drought_Roots_P Parameter: Age (day) Value: 9
  misc_feature: MA Experiment 108689 PARAMETER Experiment Name: Zm_Drought_Roots_P Parameter: Organism Value: Zea mays
  misc_feature: MA Experiment 108689 PARAMETER Experiment Name: Zm_Drought_Roots_P Parameter: Plant Line Value: 35A19
  misc_feature: MA Experiment 108689 PARAMETER Experiment Name: Zm_Drought_Roots_P Parameter: Timepoint (hr) Value: 24
  misc_feature: MA Experiment 108689 PARAMETER Experiment Name: Zm_Drought_Roots_P Parameter: Tissue Value: Roots
  misc_feature: MA Experiment 108689 PARAMETER Experiment Name: Zm_Drought_Roots_P Parameter: Treatment Value: Drought vs. No Drought
  misc_feature: MA Experiment ID: 20000477 Result: Down-regulated in Transcription
  misc_feature: MA Experiment 20000477 PARAMETER Experiment Name: Zm_5mM_SA_P Parameter: Age (day) Value: 10
  misc_feature: MA Experiment 20000477 PARAMETER Experiment Name: Zm_5mM_SA_P Parameter: Organism Value: Zea mays
  misc_feature: MA Experiment 20000477 PARAMETER Experiment Name: Zm_5mM_SA_P Parameter: Plant Line Value: 35A19
  misc_feature: MA Experiment 20000477 PARAMETER Experiment Name: Zm_5mM_SA_P Parameter: Timepoint (hr) Value: 48
  misc_feature: MA Experiment 20000477 PARAMETER Experiment Name: Zm_5mM_SA_P Parameter: Tissue Value: Aerial
  misc_feature: MA Experiment 20000477 PARAMETER Experiment Name: Zm_5mM_SA_P Parameter: Treatment Value: 5mM SA vs. No Treatment
  misc_feature: MA Experiment ID: 20000478 Result: Down-regulated in Transcription
  misc_feature: MA Experiment 20000478 PARAMETER Experiment Name: Zm_5mM_SA_P Parameter: Age (day) Value: 11
  misc_feature: MA Experiment 20000478 PARAMETER Experiment Name: Zm_5mM_SA_P Parameter: Organism Value: Zea mays
  misc_feature: MA Experiment 20000478 PARAMETER Experiment Name: Zm_5mM_SA_P Parameter: Plant Line Value: 35A19
  misc_feature: MA Experiment 20000478 PARAMETER Experiment Name: Zm_5mM_SA_P Parameter: Timepoint (hr) Value: 72
  misc_feature: MA Experiment 20000478 PARAMETER Experiment Name: Zm_5mM_SA_P Parameter: Tissue Value: Aerial
  misc_feature: MA Experiment 20000478 PARAMETER Experiment Name: Zm_5mM_SA_P Parameter: Treatment Value: 5mM SA vs. No Treatment
  misc_feature: MA Experiment ID: 20000479 Result: Down-regulated in Transcription
  misc_feature: MA Experiment 20000479 PARAMETER Experiment Name: Zm_Drought_P Parameter: Age (day) Value: 10
  misc_feature: MA Experiment 20000479 PARAMETER Experiment Name: Zm_Drought_P Parameter: Organism Value: Zea mays
  misc_feature: MA Experiment 20000479 PARAMETER Experiment Name: Zm_Drought_P Parameter: Plant Line Value: 35A19
  misc_feature: MA Experiment 20000479 PARAMETER Experiment Name: Zm_Drought_P Parameter: Timepoint (hr) Value: 48
  misc_feature: MA Experiment 20000479 PARAMETER Experiment Name: Zm_Drought_P Parameter: Tissue Value: Aerial
  misc_feature: MA Experiment 20000479 PARAMETER Experiment Name: Zm_Drought_P Parameter: Treatment Value: Drought vs. No Drought
  misc_feature: MA Experiment ID: 20000480 Result: Down-regulated in Transcription
  misc_feature: MA Experiment 20000480 PARAMETER Experiment Name: Zm_Drought_P Parameter: Age (day) Value: 11
  misc_feature: MA Experiment 20000480 PARAMETER Experiment Name: Zm_Drought_P Parameter: Organism Value: Zea mays
  misc_feature: MA Experiment 20000480 PARAMETER Experiment Name: Zm_Drought_P Parameter: Plant Line Value: 35A19
  misc_feature: MA Experiment 20000480 PARAMETER Experiment Name: Zm_Drought_P Parameter: Timepoint (hr) Value: 72
  misc_feature: MA Experiment 20000480 PARAMETER Experiment Name: Zm_Drought_P Parameter: Tissue Value: Aerial
  misc_feature: MA Experiment 20000480 PARAMETER Experiment Name: Zm_Drought_P Parameter: Treatment Value: Drought vs. No Drought
  misc_feature: MA Experiment ID: 20000534 Result: Down-regulated in Transcription
  misc_feature: MA Experiment 20000534 PARAMETER Experiment Name: Zm_Hybrid_Pollen_P Parameter: Age (day) Value: 8
  misc_feature: MA Experiment 20000534 PARAMETER Experiment Name: Zm_Hybrid_Pollen_P Parameter: Organism Value: Zea mays
  misc_feature: MA Experiment 20000534 PARAMETER Experiment Name: Zm_Hybrid_Pollen_P Parameter: Plant Line Value: 35A19
  misc_feature: MA Experiment 20000534 PARAMETER Experiment Name: Zm_Hybrid_Pollen_P Parameter: Tissue Value: Pollen vs. Aerial
  misc_feature: MA Experiment ID: 20000535 Result: Up-regulated in Transcription
  misc_feature: MA Experiment 20000535 PARAMETER Experiment Name: Zm_Hybrid_Seed_Dev_P Parameter: DAP Value: 30 vs. 12
  misc_feature: MA Experiment 20000535 PARAMETER Experiment Name: Zm_Hybrid_Seed_Dev_P Parameter: Organism Value: Zea mays
  misc_feature: MA Experiment 20000535 PARAMETER Experiment Name: Zm_Hybrid_Seed_Dev_P Parameter: Plant Line Value: 35A19
  misc_feature: MA Experiment 20000535 PARAMETER Experiment Name: Zm_Hybrid_Seed_Dev_P Parameter: Tissue Value: Embryo vs. Unfert Floret
atcggcacgtcaatttactactagcactctatcagtagtgttcagctgctcccgagctagcgagcgaagcactgtcggcacagtaacccccccctgtgcgcgtcgcgtgccgagtgccgcagagcacgagaagctaggccgcacagcaagcttgacatcatggcagctgctgccactcgttcattgcactccttcctcgcgcttcttctcctgttggcagctgcggccgcggctgcggcgctgtcgtacgaaaccaagtccatagatcctggactcgtcgtgatgacgctgccggagccggtgtccgggccggagagtctcgccttcgacgggcgtggcggcgggccctactccggcgtctccgacggccgcgtcctccggtggcaaggtcccctccggggatggaccgagttcgcctacaactccaagcacaggagcgtggcgttgtgcgcgccggacaagaagctggtagtgccggagagcctgtgcgggcgcccgctgggcctgcagttccaccggcagtccggcgacctttacgtcgccgacgcctacctggggctgctcagggttgccgcgcgcggcgggctggcgcaggtcgtggcgacggaggccgccggggggccgttcaacttcctcaacgggctcgacgtcgaccagcggaccggcgacgtctacttcaccgatagcagcgccacgtacaggaggagcgactacctgctggtggtggccatgggcgacgagacgggccgcctgctgcgctacgagcggcggaccgggcgcgtgggcgtgctccaggcgggcctgtcgtacccgaacggcgtggcggtgagcgcggacggcacgcacgtggtggtggcgcacacggcgctttgcgagctgcggaggtactggatccgcggcgcccgggcgggcacgtccgacaccttcgccgagctgccggggtacccggacaacctgcgcgccgacggccgcggcgggtactgggtagcgctgagcagcggcgtcgcggctgatgaggcggccgccgcgcccacggtcgccgtcagggtctcccgcgacggcaacgtgacggaggcgcttgacgggttcagcttcgtgtccgtcagcgaggtggcccagcgcggcggcgcgctctgggtcggctccgtggacacgccgtacgccggccagctcaagcggcgtgccagctagtgccgtgccgttttgtcatccattgatatcatatatgcagttgtgttgcgtgtgcatgcaccgtgaacaacatttgactgtacgtaccccaatgtcgtcgtcgtcgtcgtctcgtagctagtgttcgtcgcaattgtggatgtggactccgttcgtggaatggttagtggttgtttggtctctggtgatct

SEQ ID NO: 8952 - protein, 343 aa, Zea mays subsp. mays
  peptide (1)..(343): Ceres Seq. ID no. 12365864
  misc_feature (49)..(280): Pfam Name: Strictosidine synthase Pfam Description: Strictosidine synthase
  misc_feature (13)..(339): Homolog of NCBI NO: 40253286 NR Description: putative male fertility protein [Oryza sativa
  misc_feature (6)..(339): Homolog of NCBI NO: 34395247 NR Description: putative strictosidine synthase [Oryza sativa
  misc_feature (6)..(330): Homolog of NCBI NO: 34393255 NR Description: putative male fertility protein [Oryza sativa
  misc_feature (107)..(343): Homolog of NCBI NO: 34395249 NR Description: putative strictosidine synthase [Oryza sativa
  misc_feature (107)..(339): Homolog of NCBI NO: 34395252 NR Description: putative strictosidine synthase-related [Oryza
  misc_feature (32)..(280): Homolog of NCBI NO: 11280567 NR Description: hypothetical protein F24I3.110 - Arabidopsis >gi|6911873|emb|CAB72173.1| putative protein [Arabidopsis
  misc_feature (32)..(280): Homolog of NCBI NO: 30694556 NR Description: strictosidine synthase-related [Arabidopsis
  misc_feature (15)..(280): Homolog of NCBI NO: 8489790 NR Description: putative strictosidine synthase [Lycopersicon
  misc_feature (285)..(334): Homolog of NCBI NO: 8489790 NR Description: putative strictosidine synthase [Lycopersicon
  misc_feature (48)..(278): Homolog of NCBI NO: 22326950 NR Description: similar to strictosidine synthase-related; id: At5g22020.1 [Arabidopsis thaliana]
MAAAATRSLHSFLALLLLLAAAAAAAALSYETKSIDPGLVVMTLPEPVSGPESLAFDGRGGGPYSGVSDGRVLRWQGPLRGWTEFAYNSKHRSVALCAPDKKLVVPESLCGRPLGLQFHRQSGDLYVADAYLGLLRVAARGGLAQVVATEAAGGPFNFLNGLDVDQRTGDVYFTDSSATYRRSDYLLVVAMGDETGRLLRYERRTGRVGVLQAGLSYPNGVAVSADGTHVVVAHTALCELRRYWIRGARAGTSDTFAELPGYPDNLRADGRGGYWVALSSGVAADEAAAAPTVAVRVSRDGNVTEALDGFSFVSVSEVAQRGGALWVGSVDTPYAGQLKRRAS

SEQ ID NO: 8953 - protein, 302 aa, Zea mays subsp. mays
  peptide (1)..(302): Ceres Seq. ID no. 12365865
  misc_feature (8)..(239): Pfam Name: Strictosidine synthase Pfam Description: Strictosidine synthase
  misc_feature (1)..(298): Homolog of NCBI NO: 40253286 NR Description: putative male fertility protein [Oryza sativa
  misc_feature (1)..(298): Homolog of NCBI NO: 34395247 NR Description: putative strictosidine synthase [Oryza sativa
  misc_feature (1)..(289): Homolog of NCBI NO: 34393255 NR Description: putative male fertility protein [Oryza sativa
  misc_feature (66)..(302): Homolog of NCBI NO: 34395249 NR Description: putative strictosidine synthase [Oryza sativa
  misc_feature (66)..(298): Homolog of NCBI NO: 34395252 NR Description: putative strictosidine synthase-related [Oryza
  misc_feature (1)..(239): Homolog of NCBI NO: 11280567 NR Description: hypothetical protein F24I3.110 - Arabidopsis >gi|6911873|emb|CAB72173.1| putative protein [Arabidopsis
  misc_feature (1)..(239): Homolog of NCBI NO: 30694556 NR Description: strictosidine synthase-related [Arabidopsis
  misc_feature (1)..(239): Homolog of NCBI NO: 8489790 NR Description: putative strictosidine synthase [Lycopersicon
  misc_feature (244)..(293): Homolog of NCBI NO: 8489790 NR Description: putative strictosidine synthase [Lycopersicon
  misc_feature (7)..(237): Homolog of NCBI NO: 22326950 NR Description: similar to strictosidine synthase-related; id: At5g22020.1 [Arabidopsis thaliana]
MTLPEPVSGPESLAFDGRGGGPYSGVSDGRVLRWQGPLRGWTEFAYNSKHRSVALCAPDKKLVVPESLCGRPLGLQFHRQSGDLYVADAYLGLLRVAARGGLAQVVATEAAGGPFNFLNGLDVDQRTGDVYFTDSSATYRRSDYLLVVAMGDETGRLLRYERRTGRVGVLQAGLSYPNGVAVSADGTHVVVAHTALCELRRYWIRGARAGTSDTFAELPGYPDNLRADGRGGYWVALSSGVAADEAAAAPTVAVRVSRDGNVTEALDGFSFVSVSEVAQRGGALWVGSVDTPYAGQLKRRAS

SEQ ID NO: 8954 - DNA, 1170 bp, Zea mays subsp. mays
  misc_feature (1)..(1170): Ceres Seq. ID no. 12356672
  misc_feature: MA Experiment ID: 108527 Result: Down-regulated in Transcription
  misc_feature: MA Experiment 108527 PARAMETER Experiment Name: Zm_5mM_NO_P Parameter: Age (day) Value: 8
  misc_feature: MA Experiment 108527 PARAMETER Experiment Name: Zm_5mM_NO_P Parameter: Organism Value: Zea mays
  misc_feature: MA Experiment 108527 PARAMETER Experiment Name: Zm_5mM_NO_P Parameter: Plant Line Value: 35A19
  misc_feature: MA Experiment 108527 PARAMETER Experiment Name: Zm_5mM_NO_P Parameter: Timepoint (hr) Value: 6
  misc_feature: MA Experiment 108527 PARAMETER Experiment Name: Zm_5mM_NO_P Parameter: Tissue Value: Aerial
  misc_feature: MA Experiment 108527 PARAMETER Experiment Name: Zm_5mM_NO_P Parameter: Treatment Value: 5mM NO vs. No Treatment
  misc_feature: MA Experiment ID: 108528 Result: Up-regulated in Transcription
  misc_feature: MA Experiment 108528 PARAMETER Experiment Name: Zm_Imbibed_Seeds_P Parameter: Age (day) Value: 5 vs. 2
  misc_feature: MA Experiment 108528 PARAMETER Experiment Name: Zm_Imbibed_Seeds_P Parameter: Organism Value: Zea mays
  misc_feature: MA Experiment 108528 PARAMETER Experiment Name: Zm_Imbibed_Seeds_P Parameter: Plant Line Value: 35A19
  misc_feature: MA Experiment 108528 PARAMETER Experiment Name: Zm_Imbibed_Seeds_P Parameter: Tissue Value: Aerial vs. Embryo
  misc_feature: MA Experiment ID: 108529 Result: Down-regulated in Transcription
  misc_feature: MA Experiment 108529 PARAMETER Experiment Name: Zm_Imbibed_Seeds_P Parameter: Age (day) Value: 5 vs. 2
  misc_feature: MA Experiment 108529 PARAMETER Experiment Name: Zm_Imbibed_Seeds_P Parameter: Organism Value: Zea mays
  misc_feature: MA Experiment 108529 PARAMETER Experiment Name: Zm_Imbibed_Seeds_P Parameter: Plant Line Value: 35A19
  misc_feature: MA Experiment 108529 PARAMETER Experiment Name: Zm_Imbibed_Seeds_P Parameter: Tissue Value: Roots vs. Embryo
  misc_feature: MA Experiment ID: 108530 Result: Up-regulated in Transcription
  misc_feature: MA Experiment 108530 PARAMETER Experiment Name: Zm_Imbibed_Seeds_P Parameter: Age (day) Value: 6 vs. 2
  misc_feature: MA Experiment 108530 PARAMETER Experiment Name: Zm_Imbibed_Seeds_P Parameter: Organism Value: Zea mays
  misc_feature: MA Experiment 108530 PARAMETER Experiment Name: Zm_Imbibed_Seeds_P Parameter: Plant Line Value: 35A19
  misc_feature: MA Experiment 108530 PARAMETER Experiment Name: Zm_Imbibed_Seeds_P Parameter: Tissue Value: Aerial vs. Embryo
  misc_feature: MA Experiment ID: 108536 Result: Down-regulated in Transcription
  misc_feature: MA Experiment 108536 PARAMETER Experiment Name: Zm_Meristem_P Parameter: Age (day) Value: 8
  misc_feature: MA Experiment 108536 PARAMETER Experiment Name: Zm_Meristem_P Parameter: Organism Value: Zea mays
  misc_feature: MA Experiment 108536 PARAMETER Experiment Name: Zm_Meristem_P Parameter: Plant Line Value: 35A19
  misc_feature: MA Experiment 108536 PARAMETER Experiment Name: Zm_Meristem_P Parameter: Tissue Value: Shoot Meristem vs. Above Shoot Meristem
  misc_feature: MA Experiment ID: 108545 Result: Up-regulated in Transcription
  misc_feature: MA Experiment 108545 PARAMETER Experiment Name: Zm_Imbibed_Seeds_P Parameter: Age (day) Value: 3 vs. 2
  misc_feature: MA Experiment 108545 PARAMETER Experiment Name: Zm_Imbibed_Seeds_P Parameter: Organism Value: Zea mays
  misc_feature: MA Experiment 108545 PARAMETER Experiment Name: Zm_Imbibed_Seeds_P Parameter: Plant Line Value: 35A19
  misc_feature: MA Experiment 108545 PARAMETER Experiment Name: Zm_Imbibed_Seeds_P Parameter: Tissue Value: Aerial vs. Embryo
  misc_feature: MA Experiment ID: 108547 Result: Up-regulated in Transcription
  misc_feature: MA Experiment 108547 PARAMETER Experiment Name: Zm_Imbibed_Seeds_P Parameter: Age (day) Value: 4 vs. 2
  misc_feature: MA Experiment 108547 PARAMETER Experiment Name: Zm_Imbibed_Seeds_P Parameter: Organism Value: Zea mays
  misc_feature: MA Experiment 108547 PARAMETER Experiment Name: Zm_Imbibed_Seeds_P Parameter: Plant Line Value: 35A19
  misc_feature: MA Experiment 108547 PARAMETER Experiment Name: Zm_Imbibed_Seeds_P Parameter: Tissue Value: Aerial vs. Embryo
  misc_feature: MA Experiment ID: 108556 Result: Down-regulated in Transcription
  misc_feature: MA Experiment 108556 PARAMETER Experiment Name: Zm_Drought_P Parameter: Age (day) Value: 9
  misc_feature: MA Experiment 108556 PARAMETER Experiment Name: Zm_Drought_P Parameter: Organism Value: Zea mays
  misc_feature: MA Experiment 108556 PARAMETER Experiment Name: Zm_Drought_P Parameter: Plant Line Value: 35A19
  misc_feature: MA Experiment 108556 PARAMETER Experiment Name: Zm_Drought_P Parameter: Timepoint (hr) Value: 24
  misc_feature: MA Experiment 108556 PARAMETER Experiment Name: Zm_Drought_P Parameter: Tissue Value: Aerial
  misc_feature: MA Experiment 108556 PARAMETER Experiment Name: Zm_Drought_P Parameter: Treatment Value: Drought vs. No Drought
  misc_feature: MA Experiment ID: 108559 Result: Down-regulated in Transcription
  misc_feature: MA Experiment 108559 PARAMETER Experiment Name: Zm_5mM_NO_P Parameter: Age (day) Value: 8
  misc_feature: MA Experiment 108559 PARAMETER Experiment Name: Zm_5mM_NO_P Parameter: Organism Value: Zea mays
  misc_feature: MA Experiment 108559 PARAMETER Experiment Name: Zm_5mM_NO_P Parameter: Plant Line Value: 35A19
  misc_feature: MA Experiment 108559 PARAMETER Experiment Name: Zm_5mM_NO_P Parameter: Timepoint (hr) Value: 12
  misc_feature: MA Experiment 108559 PARAMETER Experiment Name: Zm_5mM_NO_P Parameter: Tissue Value: Aerial
  misc_feature: MA Experiment 108559 PARAMETER Experiment Name: Zm_5mM_NO_P Parameter: Treatment Value: 5mM NO vs. No Treatment
  misc_feature: MA Experiment ID: 108597 Result: Down-regulated in Transcription
  misc_feature: MA Experiment 108597 PARAMETER Experiment Name: Zm_100uM_ABA_P Parameter: Age (day) Value: 9
  misc_feature: MA Experiment 108597 PARAMETER Experiment Name: Zm_100uM_ABA_P Parameter: Organism Value: Zea mays
  misc_feature: MA Experiment 108597 PARAMETER Experiment Name: Zm_100uM_ABA_P Parameter: Plant Line Value: 35A19
  misc_feature: MA Experiment 108597 PARAMETER Experiment Name: Zm_100uM_ABA_P Parameter: Timepoint (hr) Value: 24
  misc_feature: MA Experiment 108597 PARAMETER Experiment Name: Zm_100uM_ABA_P Parameter: Tissue Value: Aerial
  misc_feature: MA Experiment 108597 PARAMETER Experiment Name: Zm_100uM_ABA_P Parameter: Treatment Value: 100uM ABA vs. No Treatment
  misc_feature: MA Experiment ID: 108687 Result: Down-regulated in Transcription
  misc_feature: MA Experiment 108687 PARAMETER Experiment Name: Zm_Embryos-Flowers__P Parameter: Tissue Value: Embryo vs. Aerial+
  misc_feature: MA Experiment ID: 108688 Result: Down-regulated in Transcription
  misc_feature: MA Experiment 108688 PARAMETER Experiment Name: Zm_Embryos-Flowers__P Parameter: Tissue Value: Immature Flowers vs. Aerial+
  misc_feature: MA Experiment ID: 20000478 Result: Down-regulated in Transcription
  misc_feature: MA Experiment 20000478 PARAMETER Experiment Name: Zm_5mM_SA_P Parameter: Age (day) Value: 11
  misc_feature: MA Experiment 20000478 PARAMETER Experiment Name: Zm_5mM_SA_P Parameter: Organism Value: Zea mays
  misc_feature: MA Experiment 20000478 PARAMETER Experiment Name: Zm_5mM_SA_P Parameter: Plant Line Value: 35A19
  misc_feature: MA Experiment 20000478 PARAMETER Experiment Name: Zm_5mM_SA_P Parameter: Timepoint (hr) Value: 72
  misc_feature: MA Experiment 20000478 PARAMETER Experiment Name: Zm_5mM_SA_P Parameter: Tissue Value: Aerial
  misc_feature: MA Experiment 20000478 PARAMETER Experiment Name: Zm_5mM_SA_P Parameter: Treatment Value: 5mM SA vs. No Treatment
  misc_feature: MA Experiment ID: 20000480 Result: Down-regulated in Transcription
  misc_feature: MA Experiment 20000480 PARAMETER Experiment Name: Zm_Drought_P Parameter: Age (day) Value: 11
  misc_feature: MA Experiment 20000480 PARAMETER Experiment Name: Zm_Drought_P Parameter: Organism Value: Zea mays
  misc_feature: MA Experiment 20000480 PARAMETER Experiment Name: Zm_Drought_P Parameter: Plant Line Value: 35A19
  misc_feature: MA Experiment 20000480 PARAMETER Experiment Name: Zm_Drought_P Parameter: Timepoint (hr) Value: 72
  misc_feature: MA Experiment 20000480 PARAMETER Experiment Name: Zm_Drought_P Parameter: Tissue Value: Aerial
  misc_feature: MA Experiment 20000480 PARAMETER Experiment Name: Zm_Drought_P Parameter: Treatment Value: Drought vs. No Drought
  misc_feature: MA Experiment ID: 20000534 Result: Down-regulated in Transcription
  misc_feature: MA Experiment 20000534 PARAMETER Experiment Name: Zm_Hybrid_Pollen_P Parameter: Age (day) Value: 8
  misc_feature: MA Experiment 20000534 PARAMETER Experiment Name: Zm_Hybrid_Pollen_P Parameter: Organism Value: Zea mays
  misc_feature: MA Experiment 20000534 PARAMETER Experiment Name: Zm_Hybrid_Pollen_P Parameter: Plant Line Value: 35A19
  misc_feature: MA Experiment 20000534 PARAMETER Experiment Name: Zm_Hybrid_Pollen_P Parameter: Tissue Value: Pollen vs. Aerial
atctgaagcctgtaacatctccgccatccgcctgaaggctcgaagcacgacgccaatggcctcccccaacgccgacccggctcagcaccacgcctcgacgccgccgctcctcctcgccgtacgccacctgccgttccccggcgtccaccggacgcgcgcgctccccggccccgacgtcctgacccctctcgcccgccgcctcgaggagctcgcgtccgcggcgacctcccacccgctcctgaagccgctcttcgccgcccactcacacctctcttccttctcccagggcaggaggcggctggtggcggcgcggcgtgcgacggtgctgtccggggggcactgcttcgcggcggtgctagggaactcggtggccgggttggtggtgtccaacggcatcaacaacttcctcaacctctacaacacggtgctcgtcgtcaggctcgtgctcacgtggttccccaacacgccgcccgccatcgtcgcgcctctcagcacgatatgtgacccgtacctgaacatcttccggggcatcatcccgccgctcgggggaacgctggacctgtcgccgatcctcgctttcctcgtcctcaacgccttcaccagcacggcggccgcgcttccggcggagctcccgagctcggcagcggcgcagcaccaccagaggactgctgcttcatccagctcggcgactcccagtcccaaccagaggaaatggatgcggagaatgcgatcaaagacatcacagggagaagatggtggtcactaggcatgtgagcttgtggctgggttcgtcaaatgccttattgttaccagctggggatcatgcttcgcatcagacgctcgagatctgcacagcaatgtgttggacatgcatgctcctcgctctctagccatcgaatgcaaactctgtcaatgccgcatgcagagttcgcccctttggttcaccacgttgcttcagagcttcaaatggtttttgtgcgttgtaatgcgttggcgttgcggagctttcttcaaatggtttttgtgctttgtaatgctttggcggtgagggctgtgctttctgctgcatgtatgtgtagcactttcggtcagctttcttgaattccgatagtgtgatcgcgatgcgtagccaaattcagtcttgagagagtaccaatcgaactttcatcg

SEQ ID NO: 8955 - protein, 254 aa, Zea mays subsp. mays
  peptide (1)..(254): Ceres Seq. ID no. 12356673
  misc_feature (125)..(206): Pfam Name: YGGT family Pfam Description: YGGT family
  misc_feature (109)..(251): Homolog of NCBI NO: 27436744 NR Description: Hypothetical protein [Oryza sativa (japonica
  misc_feature (70)..(243): Homolog of NCBI NO: 22326932 NR Description: unknown protein; protein id: At5g21920.1 thaliana] >gi|13374851|emb|CAC34485.1| putative protein thaliana] >gi|26451921|dbj|BAC43053.1| unknown protein
  misc_feature (127)..(201): Homolog of NCBI NO: 18397948 NR Description: expressed protein; protein id: At3g07430.1, by cDNA: 8898., supported by cDNA: gi_20466761 [Arabidopsis >gi|6041841|gb|AAF02150.1|AC009853_10 unknown protein
  misc_feature (127)..(201): Homolog of NCBI NO: 21617923 NR Description: unknown [Arabidopsis thaliana]
  misc_feature (127)..(201): Homolog of NCBI NO: 15234345 NR Description: putative protein; protein id: At4g27990.1, by cDNA: 32397. [Arabidopsis thaliana] >gi|7486950|pir||T02900
  misc_feature (127)..(201): Homolog of NCBI NO: 21592772 NR Description: unknown [Arabidopsis thaliana]
  misc_feature (131)..(196): Homolog of NCBI NO: 22298077 NR Description: ORF_ID:tsr0534~hypothetical protein
  misc_feature (127)..(206): Homolog of NCBI NO: 33240375 NR Description: Uncharacterized YGGT family conserved membrane [Prochlorococcus marinus subsp. marinus str. CCMP1375] Uncharacterized YGGT family conserved membrane protein
  misc_feature (135)..(197): Homolog of NCBI NO: 17229553 NR Description: hypothetical protein [Nostoc sp. PCC 7120]
SEACNISAIRLKARSTTPMASPNADPAQHHASTPPLLLAVRHLPFPGVHRTRALPGPDVLTPLARRLEELASAATSHPLLKPLFAAHSHLSSFSQGRRRLVAARRATVLSGGHCFAAVLGNSVAGLVVSNGINNFLNLYNTVLVVRLVLTWFPNTPPAIVAPLSTICDPYLNIFRGIIPPLGGTLDLSPILAFLVLNAFTSTAAALPAELPSSAAAQHHQRTAASSSSATPSPNQRKWMRRMRSKTSQGEDGGH

SEQ ID NO: 8956 - protein, 236 aa, Zea mays subsp. mays
  peptide (1)..(236): Ceres Seq. ID no. 12356674
  misc_feature (107)..(188): Pfam Name: YGGT family Pfam Description: YGGT family
  misc_feature (91)..(233): Homolog of NCBI NO: 27436744 NR Description: Hypothetical protein [Oryza sativa (japonica
  misc_feature (52)..(225): Homolog of NCBI NO: 22326932 NR Description: unknown protein; protein id: At5g21920.1 thaliana] >gi|13374851|emb|CAC34485.1| putative protein thaliana] >gi|26451921|dbj|BAC43053.1| unknown protein
  misc_feature (109)..(183): Homolog of NCBI NO: 18397948 NR Description: expressed protein; protein id: At3g07430.1, by cDNA: 8898., supported by cDNA: gi_20466761 [Arabidopsis >gi|6041841|gb|AAF02150.1|AC009853_10 unknown protein
  misc_feature (109)..(183): Homolog of NCBI NO: 21617923 NR Description: unknown [Arabidopsis thaliana]
  misc_feature (109)..(183): Homolog of NCBI NO: 15234345 NR Description: putative protein; protein id: At4g27990.1, by cDNA: 32397. [Arabidopsis thaliana] >gi|7486950|pir||T02900
  misc_feature (109)..(183): Homolog of NCBI NO: 21592772 NR Description: unknown [Arabidopsis thaliana]
  misc_feature (113)..(178): Homolog of NCBI NO: 22298077 NR Description: ORF_ID:tsr0534~hypothetical protein
  misc_feature (109)..(188): Homolog of NCBI NO: 33240375 NR Description: Uncharacterized YGGT family conserved membrane [Prochlorococcus marinus subsp. marinus str. CCMP1375] Uncharacterized YGGT family conserved membrane protein
  misc_feature (117)..(179): Homolog of NCBI NO: 17229553 NR Description: hypothetical protein [Nostoc sp. PCC 7120]
MASPNADPAQHHASTPPLLLAVRHLPFPGVHRTRALPGPDVLTPLARRLEELASAATSHPLLKPLFAAHSHLSSFSQGRRRLVAARRATVLSGGHCFAAVLGNSVAGLVVSNGINNFLNLYNTVLVVRLVLTWFPNTPPAIVAPLSTICDPYLNIFRGIIPPLGGTLDLSPILAFLVLNAFTSTAAALPAELPSSAAAQHHQRTAASSSSATPSPNQRKWMRRMRSKTSQGEDGGH

SEQ ID NO: 8957 - DNA, 756 bp, Zea mays subsp. mays
  misc_feature (1)..(756): Ceres Seq. ID no. 12356686
  misc_feature: MA Experiment ID: 108556 Result: Down-regulated in Transcription
  misc_feature: MA Experiment 108556 PARAMETER Experiment Name: Zm_Drought_P Parameter: Age (day) Value: 9
  misc_feature: MA Experiment 108556 PARAMETER Experiment Name: Zm_Drought_P Parameter: Organism Value: Zea mays
  misc_feature: MA Experiment 108556 PARAMETER Experiment Name: Zm_Drought_P Parameter: Plant Line Value: 35A19
  misc_feature: MA Experiment 108556 PARAMETER Experiment Name: Zm_Drought_P Parameter: Timepoint (hr) Value: 24
  misc_feature: MA Experiment 108556 PARAMETER Experiment Name: Zm_Drought_P Parameter: Tissue Value: Aerial
  misc_feature: MA Experiment 108556 PARAMETER Experiment Name: Zm_Drought_P Parameter: Treatment Value: Drought vs. No Drought
  misc_feature: MA Experiment ID: 20000477 Result: Down-regulated in Transcription
  misc_feature: MA Experiment 20000477 PARAMETER Experiment Name: Zm_5mM_SA_P Parameter: Age (day) Value: 10
  misc_feature: MA Experiment 20000477 PARAMETER Experiment Name: Zm_5mM_SA_P Parameter: Organism Value: Zea mays
  misc_feature: MA Experiment 20000477 PARAMETER Experiment Name: Zm_5mM_SA_P Parameter: Plant Line Value: 35A19
  misc_feature: MA Experiment 20000477 PARAMETER Experiment Name: Zm_5mM_SA_P Parameter: Timepoint (hr) Value: 48
  misc_feature: MA Experiment 20000477 PARAMETER Experiment Name: Zm_5mM_SA_P Parameter: Tissue Value: Aerial
  misc_feature: MA Experiment 20000477 PARAMETER Experiment Name: Zm_5mM_SA_P Parameter: Treatment Value: 5mM SA vs. No Treatment
  misc_feature: MA Experiment ID: 20000478 Result: Down-regulated in Transcription
  misc_feature: MA Experiment 20000478 PARAMETER Experiment Name: Zm_5mM_SA_P Parameter: Age (day) Value: 11
  misc_feature: MA Experiment 20000478 PARAMETER Experiment Name: Zm_5mM_SA_P Parameter: Organism Value: Zea mays
  misc_feature: MA Experiment 20000478 PARAMETER Experiment Name: Zm_5mM_SA_P Parameter: Plant Line Value: 35A19
  misc_feature: MA Experiment 20000478 PARAMETER Experiment Name: Zm_5mM_SA_P Parameter: Timepoint (hr) Value: 72
  misc_feature: MA Experiment 20000478 PARAMETER Experiment Name: Zm_5mM_SA_P Parameter: Tissue Value: Aerial
  misc_feature: MA Experiment 20000478 PARAMETER Experiment Name: Zm_5mM_SA_P Parameter: Treatment Value: 5mM SA vs. No Treatment
  misc_feature: MA Experiment ID: 20000492 Result: Down-regulated in Transcription
  misc_feature: MA Experiment 20000492 PARAMETER Experiment Name: Zm_Hybrid_Seed_Dev_P Parameter: DAP Value: 12
  misc_feature: MA Experiment 20000492 PARAMETER Experiment Name: Zm_Hybrid_Seed_Dev_P Parameter: Organism Value: Zea mays
  misc_feature: MA Experiment 20000492 PARAMETER Experiment Name: Zm_Hybrid_Seed_Dev_P Parameter: Plant Line Value: 35A19
  misc_feature: MA Experiment 20000492 PARAMETER Experiment Name: Zm_Hybrid_Seed_Dev_P Parameter: Tissue Value: Fert Kernel vs. Unfert Floret
  misc_feature: MA Experiment ID: 20000535 Result: Down-regulated in Transcription
  misc_feature: MA Experiment 20000535 PARAMETER Experiment Name: Zm_Hybrid_Seed_Dev_P Parameter: DAP Value: 30 vs. 12
  misc_feature: MA Experiment 20000535 PARAMETER Experiment Name: Zm_Hybrid_Seed_Dev_P Parameter: Organism Value: Zea mays
  misc_feature: MA Experiment 20000535 PARAMETER Experiment Name: Zm_Hybrid_Seed_Dev_P Parameter: Plant Line Value: 35A19
  misc_feature: MA Experiment 20000535 PARAMETER Experiment Name: Zm_Hybrid_Seed_Dev_P Parameter: Tissue Value: Embryo vs. Unfert Floret
attccgttccgagagccaaaaactccactgctttcatcaactccggcgacttggagaagacgaagttccagaatccgatcggaagtttggtgctcgcgccttgacggattgatttcggtgcgccgatggggcaggcgttccgcaagctgttcgattccttcttcggcaccagcgagatgagggttgtgatgcttggtctggatgctgccggtaaaaccaccatattgtacaagctgcatatcggggaggttttgtcgactgttcccacgattggtttcaacgtcgagaaagttcaatacaagaatgtgatgtttactgtgtgggatgttggtggccaagaaaagttgagggtgactacgtccgcaaaggagatgagtttgggtatttctcctttggagggagtacagtgatatgcgtcttcgagaaggacgccatccaatttgacgctgatctcgtggcaaacagcgaaaggtcactggagaccaagtcccggatctgcagaaagtttcgctcggatgacagacagagctgtaaactgtgtgcaggttaacagtagcgtatatttgatactagcaactgccactggtaggcaatactattatcacataatccaagactacatgtatagtcaggctagaggagtctggtttacggcggtgggcgtgggcatgggcattggcccagctgtcatcggctgagagctcactgcatggctcggtggtttttgcaatgacgatactaaccgtgcagttgctc

SEQ ID NO: 8958 - protein, 94 aa, Zea mays subsp. mays
  peptide (1)..(94): Ceres Seq. ID no. 12356687
  misc_feature (4)..(75): Pfam Name: ADP-ribosylation factor family Pfam Description: ADP-ribosylation factor family
  misc_feature (1)..(75): Homolog of NCBI NO: 6671571 NR Description: ADP-ribosylation factor 2 [Mus musculus]
  misc_feature (1)..(75): Homolog of NCBI NO: 26327163 NR Description: unnamed protein product [Mus musculus]
  misc_feature (1)..(75): Homolog of NCBI NO: 3182917 NR Description: ADP-RIBOSYLATION FACTOR 1
  misc_feature (1)..(75): Homolog of NCBI NO: 37537196 NR Description: putative ADP-ribosylation factor [Oryza sativa
  misc_feature (1)..(75): Homolog of NCBI NO: 34897926 NR Description: Similar to Drosophila melanogaster
  misc_feature (1)..(75): Homolog of NCBI NO: 461532 NR Description: ADP-RIBOSYLATION FACTOR >gi|1362500|pir||D49993
  misc_feature (1)..(75): Homolog of NCBI NO: 15228464 NR Description: putative ADP-ribosylation factor; protein id:
  misc_feature (1)..(75): Homolog of NCBI NO: 15237901 NR Description: ADP-ribosylation factor -like protein; protein At5g17060.1, supported by cDNA: 26844., supported by cDNA:
  misc_feature (1)..(75): Homolog of NCBI NO: 32401087 NR Description: ADP-ribosylation factor 1 [Aiptasia pulchella]
  misc_feature (1)..(75): Homolog of NCBI NO: 14714692 NR Description: Similar to ADP-ribosylation factor 2 [Mus
MGQAFRKLFDSFFGTSEMRVVMLGLDAAGKTTILYKLHIGEVLSTVPTIGFNVEKVQYKNVMFTVWDVGGQEKLRVTTSAKEMSLGISPLEGVQ

SEQ ID NO: 8959 - protein, 77 aa, Zea mays subsp. mays
  peptide (1)..(77): Ceres Seq. ID no. 12356688
  misc_feature (1)..(58): Pfam Name: ADP-ribosylation factor family Pfam Description: ADP-ribosylation factor family
  misc_feature (1)..(58): Homolog of NCBI NO: 15237901 NR Description: ADP-ribosylation factor -like protein; protein At5g17060.1, supported by cDNA: 26844., supported by cDNA:
  misc_feature (1)..(58): Homolog of NCBI NO: 37537196 NR Description: putative ADP-ribosylation factor [Oryza sativa
  misc_feature (1)..(58): Homolog of NCBI NO: 15228464 NR Description: putative ADP-ribosylation factor; protein id:
  misc_feature (1)..(58): Homolog of NCBI NO: 34897926 NR Description: Similar to Drosophila melanogaster
  misc_feature (1)..(58): Homolog of NCBI NO: 461532 NR Description: ADP-RIBOSYLATION FACTOR >gi|1362500|pir||D49993
  misc_feature (1)..(58): Homolog of NCBI NO: 6671571 NR Description: ADP-ribosylation factor 2 [Mus musculus]
  misc_feature (1)..(58): Homolog of NCBI NO: 26327163 NR Description: unnamed protein product [Mus musculus]
  misc_feature (1)..(58): Homolog of NCBI NO: 3182917 NR Description: ADP-RIBOSYLATION FACTOR 1
  misc_feature (1)..(58): Homolog of NCBI NO: 32401087 NR Description: ADP-ribosylation factor 1 [Aiptasia pulchella]
  misc_feature (1)..(58): Homolog of NCBI NO: 14714692 NR Description: Similar to ADP-ribosylation factor 2 [Mus
MRVVMLGLDAAGKTTILYKLHIGEVLSTVPTIGFNVEKVQYKNVMFTVWDVGGQEKLRVTTSAKEMSLGISPLEGVQ

SEQ ID NO: 8960 - protein, 73 aa, Zea mays subsp. mays
  peptide (1)..(73): Ceres Seq. ID no. 12356689
  misc_feature (1)..(54): Pfam Name: ADP-ribosylation factor family Pfam Description: ADP-ribosylation factor family
  misc_feature (1)..(54): Homolog of NCBI NO: 15237901 NR Description: ADP-ribosylation factor -like protein; protein At5g17060.1, supported by cDNA: 26844., supported by cDNA:
  misc_feature (1)..(54): Homolog of NCBI NO: 37537196 NR Description: putative ADP-ribosylation factor [Oryza sativa
  misc_feature (1)..(54): Homolog of NCBI NO: 15228464 NR Description: putative ADP-ribosylation factor; protein id:
  misc_feature (1)..(54): Homolog of NCBI NO: 34897926 NR Description: Similar to Drosophila melanogaster
  misc_feature (1)..(54): Homolog of NCBI NO: 461532 NR Description: ADP-RIBOSYLATION FACTOR >gi|1362500|pir||D49993
  misc_feature (1)..(54): Homolog of NCBI NO: 6671571 NR Description: ADP-ribosylation factor 2 [Mus musculus]
  misc_feature (1)..(54): Homolog of NCBI NO: 26327163 NR Description: unnamed protein product [Mus musculus]
  misc_feature (1)..(54): Homolog of NCBI NO: 3182917 NR Description: ADP-RIBOSYLATION FACTOR 1
  misc_feature (1)..(54): Homolog of NCBI NO: 32401087 NR Description: ADP-ribosylation factor 1 [Aiptasia pulchella]
  misc_feature (1)..(54): Homolog of NCBI NO: 14714692 NR Description: Similar to ADP-ribosylation factor 2 [Mus
MLGLDAAGKTTILYKLHIGEVLSTVPTIGFNVEKVQYKNVMFTVWDVGGQEKLRVTTSAKEMSLGISPLEGVQ

SEQ ID NO: 8961 - DNA, 1641 bp, Zea mays subsp. mays
  misc_feature (1)..(1641): Ceres Seq. ID no. 12382117
  misc_feature: MA Experiment ID: 108529 Result: Up-regulated in Transcription
  misc_feature: MA Experiment 108529 PARAMETER Experiment Name: Zm_Imbibed_Seeds_P Parameter: Age (day) Value: 5 vs. 2
  misc_feature: MA Experiment 108529 PARAMETER Experiment Name: Zm_Imbibed_Seeds_P Parameter: Organism Value: Zea mays
  misc_feature: MA Experiment 108529 PARAMETER Experiment Name: Zm_Imbibed_Seeds_P Parameter: Plant Line Value: 35A19
  misc_feature: MA Experiment 108529 PARAMETER Experiment Name: Zm_Imbibed_Seeds_P Parameter: Tissue Value: Roots vs. Embryo
  misc_feature: MA Experiment ID: 108535 Result: Down-regulated in Transcription
  misc_feature: MA Experiment 108535 PARAMETER Experiment Name: Zm_Meristem_P Parameter: Age (day) Value: 8
  misc_feature: MA Experiment 108535 PARAMETER Experiment Name: Zm_Meristem_P Parameter: Organism Value: Zea mays
  misc_feature: MA Experiment 108535 PARAMETER Experiment Name: Zm_Meristem_P Parameter: Plant Line Value: 35A19
  misc_feature: MA Experiment 108535 PARAMETER Experiment Name: Zm_Meristem_P Parameter: Tissue Value: Root Meristem vs. Above Root Meristem
  misc_feature: MA Experiment ID: 108543 Result: Up-regulated in Transcription
  misc_feature: MA Experiment ID: 108545 Result: Down-regulated in Transcription
  misc_feature: MA Experiment 108545 PARAMETER Experiment Name: Zm_Imbibed_Seeds_P Parameter: Age (day) Value: 3 vs. 2
  misc_feature: MA Experiment 108545 PARAMETER Experiment Name: Zm_Imbibed_Seeds_P Parameter: Organism Value: Zea mays
  misc_feature: MA Experiment 108545 PARAMETER Experiment Name: Zm_Imbibed_Seeds_P Parameter: Plant Line Value: 35A19
  misc_feature: MA Experiment 108545 PARAMETER Experiment Name: Zm_Imbibed_Seeds_P Parameter: Tissue Value: Aerial vs. Embryo
  misc_feature: MA Experiment ID: 108546 Result: Up-regulated in Transcription
  misc_feature: MA Experiment 108546 PARAMETER Experiment Name: Zm_Imbibed_Seeds_P Parameter: Age (day) Value: 3 vs. 2
  misc_feature: MA Experiment 108546 PARAMETER Experiment Name: Zm_Imbibed_Seeds_P Parameter: Organism Value: Zea mays
  misc_feature: MA Experiment 108546 PARAMETER Experiment Name: Zm_Imbibed_Seeds_P Parameter: Plant Line Value: 35A19
  misc_feature: MA Experiment 108546 PARAMETER Experiment Name: Zm_Imbibed_Seeds_P Parameter: Tissue Value: Roots vs. Embryo
  misc_feature: MA Experiment ID: 108547 Result: Down-regulated in Transcription
  misc_feature: MA Experiment 108547 PARAMETER Experiment Name: Zm_Imbibed_Seeds_P Parameter: Age (day) Value: 4 vs. 2
  misc_feature: MA Experiment 108547 PARAMETER Experiment Name: Zm_Imbibed_Seeds_P Parameter: Organism Value: Zea mays
  misc_feature: MA Experiment 108547 PARAMETER Experiment Name: Zm_Imbibed_Seeds_P Parameter: Plant Line Value: 35A19
  misc_feature: MA Experiment 108547 PARAMETER Experiment Name: Zm_Imbibed_Seeds_P Parameter: Tissue Value: Aerial vs. Embryo
  misc_feature: MA Experiment ID: 108559 Result: Down-regulated in Transcription
  misc_feature: MA Experiment 108559 PARAMETER Experiment Name: Zm_5mM_NO_P Parameter: Age (day) Value: 8
  misc_feature: MA Experiment 108559 PARAMETER Experiment Name: Zm_5mM_NO_P Parameter: Organism Value: Zea mays
  misc_feature: MA Experiment 108559 PARAMETER Experiment Name: Zm_5mM_NO_P Parameter: Plant Line Value: 35A19
  misc_feature: MA Experiment 108559 PARAMETER Experiment Name: Zm_5mM_NO_P Parameter: Timepoint (hr) Value: 12
  misc_feature: MA Experiment 108559 PARAMETER Experiment Name: Zm_5mM_NO_P Parameter: Tissue Value: Aerial
  misc_feature: MA Experiment 108559 PARAMETER Experiment Name: Zm_5mM_NO_P Parameter: Treatment Value: 5mM NO vs. No Treatment
  misc_feature: MA Experiment ID: 108689 Result: Up-regulated in Transcription
  misc_feature: MA Experiment 108689 PARAMETER Experiment Name: Zm_Drought_Roots_P Parameter: Age (day) Value: 9
  misc_feature: MA Experiment 108689 PARAMETER Experiment Name: Zm_Drought_Roots_P Parameter: Organism Value: Zea mays
  misc_feature: MA Experiment 108689 PARAMETER Experiment Name: Zm_Drought_Roots_P Parameter: Plant Line Value: 35A19
  misc_feature: MA Experiment 108689 PARAMETER Experiment Name: Zm_Drought_Roots_P Parameter: Timepoint (hr) Value: 24
  misc_feature: MA Experiment 108689 PARAMETER Experiment Name: Zm_Drought_Roots_P Parameter: Tissue Value: Roots
  misc_feature: MA Experiment 108689 PARAMETER Experiment Name: Zm_Drought_Roots_P Parameter: Treatment Value: Drought vs. No Drought
  misc_feature: MA Experiment ID: 20000478 Result: Down-regulated in Transcription
  misc_feature: MA Experiment 20000478 PARAMETER Experiment Name: Zm_5mM_SA_P Parameter: Age (day) Value: 11
  misc_feature: MA Experiment 20000478 PARAMETER Experiment Name: Zm_5mM_SA_P Parameter: Organism Value: Zea mays
  misc_feature: MA Experiment 20000478 PARAMETER Experiment Name: Zm_5mM_SA_P Parameter: Plant Line Value: 35A19
  misc_feature: MA Experiment 20000478 PARAMETER Experiment Name: Zm_5mM_SA_P Parameter: Timepoint (hr) Value: 72
  misc_feature: MA Experiment 20000478 PARAMETER Experiment Name: Zm_5mM_SA_P Parameter: Tissue Value: Aerial
  misc_feature: MA Experiment 20000478 PARAMETER Experiment Name: Zm_5mM_SA_P Parameter: Treatment Value: 5mM SA vs. No Treatment
  misc_feature: MA Experiment ID: 20000479 Result: Down-regulated in Transcription
  misc_feature: MA Experiment 20000479 PARAMETER Experiment Name: Zm_Drought_P Parameter: Age (day) Value: 10
  misc_feature: MA Experiment 20000479 PARAMETER Experiment Name: Zm_Drought_P Parameter: Organism Value: Zea mays
  misc_feature: MA Experiment 20000479 PARAMETER Experiment Name: Zm_Drought_P Parameter: Plant Line Value: 35A19
  misc_feature: MA Experiment 20000479 PARAMETER Experiment Name: Zm_Drought_P Parameter: Timepoint (hr) Value: 48
  misc_feature: MA Experiment 20000479 PARAMETER Experiment Name: Zm_Drought_P Parameter: Tissue Value: Aerial
  misc_feature: MA Experiment 20000479 PARAMETER Experiment Name: Zm_Drought_P Parameter: Treatment Value: Drought vs. No Drought
  misc_feature: MA Experiment ID: 20000480 Result: Down-regulated in Transcription
  misc_feature: MA Experiment 20000480 PARAMETER Experiment Name: Zm_Drought_P Parameter: Age (day) Value: 11
  misc_feature: MA Experiment 20000480 PARAMETER Experiment Name: Zm_Drought_P Parameter: Organism Value: Zea mays
  misc_feature: MA Experiment 20000480 PARAMETER Experiment Name: Zm_Drought_P Parameter: Plant Line Value: 35A19
  misc_feature: MA Experiment 20000480 PARAMETER Experiment Name: Zm_Drought_P Parameter: Timepoint (hr) Value: 72
  misc_feature: MA Experiment 20000480 PARAMETER Experiment Name: Zm_Drought_P Parameter: Tissue Value: Aerial
  misc_feature: MA Experiment 20000480 PARAMETER Experiment Name: Zm_Drought_P Parameter: Treatment Value: Drought vs. No Drought
  misc_feature: MA Experiment ID: 20000492 Result: Down-regulated in Transcription
  misc_feature: MA Experiment 20000492 PARAMETER Experiment Name: Zm_Hybrid_Seed_Dev_P Parameter: DAP Value: 12
  misc_feature: MA Experiment 20000492 PARAMETER Experiment Name: Zm_Hybrid_Seed_Dev_P Parameter: Organism Value: Zea mays
  misc_feature: MA Experiment 20000492 PARAMETER Experiment Name: Zm_Hybrid_Seed_Dev_P Parameter: Plant Line Value: 35A19
  misc_feature: MA Experiment 20000492 PARAMETER Experiment Name: Zm_Hybrid_Seed_Dev_P Parameter: Tissue Value: Fert Kernel vs. Unfert Floret
  misc_feature: MA Experiment ID: 20000532 Result: Down-regulated in Transcription
  misc_feature: MA Experiment 20000532 PARAMETER Experiment Name: Zm_0.001percent_MeJA_P Parameter: Age (day) Value: 10
  misc_feature: MA Experiment 20000532 PARAMETER Experiment Name: Zm_0.001percent_MeJA_P Parameter: Organism Value: Zea mays
  misc_feature: MA Experiment 20000532 PARAMETER Experiment Name: Zm_0.001percent_MeJA_P Parameter: Plant Line Value: 35A19
  misc_feature: MA Experiment 20000532 PARAMETER Experiment Name: Zm_0.001percent_MeJA_P Parameter: Timepoint (hr) Value: 48
  misc_feature: MA Experiment 20000532 PARAMETER Experiment Name: Zm_0.001percent_MeJA_P Parameter: Tissue Value: Aerial
  misc_feature: MA Experiment 20000532 PARAMETER Experiment Name: Zm_0.001percent_MeJA_P Parameter: Treatment Value: 0.001percent MeJA vs. No Treatment
  misc_feature: MA Experiment ID: 20000535 Result: Down-regulated in Transcription
  misc_feature: MA Experiment 20000535 PARAMETER Experiment Name: Zm_Hybrid_Seed_Dev_P Parameter: DAP Value: 30 vs. 12
  misc_feature: MA Experiment 20000535 PARAMETER Experiment Name: Zm_Hybrid_Seed_Dev_P Parameter: Organism Value: Zea mays
  misc_feature: MA Experiment 20000535 PARAMETER Experiment Name: Zm_Hybrid_Seed_Dev_P Parameter: Plant Line Value: 35A19
  misc_feature: MA Experiment 20000535 PARAMETER Experiment Name: Zm_Hybrid_Seed_Dev_P Parameter: Tissue Value: Embryo vs. Unfert Floret
  misc_feature: MA Experiment ID: 20000626 Result: Down-regulated in Transcription
  misc_feature: MA Experiment 20000626 PARAMETER Experiment Name: Zm_Herbicide-Treatments_P Parameter: Timepoint (hr) Value: 12
  misc_feature: MA Experiment 20000626 PARAMETER Experiment Name: Zm_Herbicide-Treatments_P Parameter: Tissue Value: Aerial
  misc_feature: MA Experiment 20000626 PARAMETER Experiment Name: Zm_Herbicide-Treatments_P Parameter: Treatment Value: Roundup vs. No Treatment
aaattagaaaacctgaaaacctatcctacaagatacactcttcatccaccccttacgctcagacgtcactagctagccatcatcacacaggcagcatggtgatgaaagaagcagccgaagagcacgatggccgccgcgacgtgaccgtcacggtggagccggcgctgccggtgcagcaacaccgcctgccgctgtccaacctggacctcctcctgccgccgctcgacgtcagcctcttcttctgctacctccacccggcgcccaccgcgatcgctctcaaggaggcactggccaagacgctggtggcgtactacccgttggccggggaggtggtggccaacggcgatggggagccggagctgctctgcagcggccgcggcgtggacttcacggagacggccgcggccggagtcgagctgcgggaggtccggctgggcgccgtggacgaaggcgttgagaagctggtccctgtcaagaagaccggcgtgacgatggcggtcaagctgagcaagttcacgtgcggcggcgccgtcgtcggctgcaccttcgaccaccgcgtctgcgacgcctactccttcaacatgttcctcgtcgcgtgggccgcagccgcccgtggcagctctgcgccaccaccgccggacccgtgcttccgccgctccctagtcgccccacgcgacacaccacatcggcgcgcgccgtccaccgacgccctcatcaaccgcctcttctctcctcgaagcgccgcgccaccgcctccacccgccgccgcaggctccgtcaaccggatctaccgcatagccgccgaggacatcgccgcgctgaaggcctcggcggggccggggcgcacgaagatggaggcgttcacggcgctcctgtggcagctctgcgcaagggcggcctccccgcgccagagccagtgctgcatgggcgtggtcgtggacgggcgcacccggatgttcccggacggcgccatgaaggcctacttcggaaacgtgctcaccatcccgtacggcgtcatcggctccgaagacctgcgctgcatggccctcgctgacgtggccgacgacgtgcaccggtgggtggcggaggccgccaccggcgaccatttccgcgggctcgtggactgggtggaggcgctgcggcctaagccggccgcggcgagggcgtacctgggagggaccggcggcaacgaggcgatggcgtgcatcgtgtcgtccggtatgagcttcccggtgggcaaggccgacttcgggactggcctccccgcgttcgcgtcgtaccatttcccgtggcccgccggcgccgggtacgtgatgccgatgccgagcgcgcgcgggaacggcgattgggtggtgtacgtgcacgtggcgccggaggtggcgaaggtgatggaggagtccaccgtgttccaagccctggtgaacagctatgcgtttgaatgatgatggagatgggccggcatattcgtggatgcgcgcgcgttgccgtccacgcgtgtgtctagagctagtgttgatgtgcatacggcatggagttctcactactcagcagtgctaccaatttgcctcgttggttactatgtttgccagaaaataataatagtaactccatgcatatatgtcacgtgacatatgtgtaatt

SEQ ID NO: 8962 - protein, 479 aa, Zea mays subsp. mays
  peptide (1)..(479): Ceres Seq. ID no. 12382118
  misc_feature (51)..(465): Pfam Name: Transferase family Pfam Description: Transferase family
  misc_feature (50)..(478): Homolog of NCBI NO: 38567901 NR Description: OSJNBa0060N03.21 [Oryza sativa (japonica
  misc_feature (34)..(476): Homolog of NCBI NO: 15223333 NR Description: hypothetical protein; protein id: At1g32910.1
  misc_feature (13)..(476): Homolog of NCBI NO: 7487911 NR Description: hypothetical protein YUP8H12R.39 - Arabidopsis
  misc_feature (34)..(476): Homolog of NCBI NO: 15219263 NR Description: hypothetical protein; protein id: At1g78990.1
  misc_feature (12)..(476): Homolog of NCBI NO: 15237343 NR Description: putative protein; protein id: At5g16410.1
  misc_feature (56)..(472): Homolog of NCBI NO: 15222365 NR Description: hypothetical protein; protein id: At1g31490.1
  misc_feature (51)..(465): Homolog of NCBI NO: 27475616 NR Description: hydroxycinnamoyl transferase [Nicotiana tabacum]
  misc_feature (45)..(465): Homolog of NCBI NO: 21536883 NR Description: anthranilate N-benzoyltransferase [Arabidopsis
  misc_feature (45)..(465): Homolog of NCBI NO: 15239747 NR Description: anthranilate N-benzoyltransferase; protein id: supported by cDNA: 114130. [Arabidopsis thaliana]
  misc_feature (51)..(442): Homolog of NCBI NO: 6469032 NR Description: N-hydroxycinnamoyl/benzoyltransferase [Ipomoea
IRKPENLSYKIHSSSTPYAQTSLASHHHTGSMVMKEAAEEHDGRRDVTVTVEPALPVQQHRLPLSNLDLLLPPLDVSLFFCYLHPAPTAIALKEALAKTLVAYYPLAGEVVANGDGEPELLCSGRGVDFTETAAAGVELREVRLGAVDEGVEKLVPVKKTGVTMAVKLSKFTCGGAVVGCTFDHRVCDAYSFNMFLVAWAAAARGSSAPPPPDPCFRRSLVAPRDTPHRRAPSTDALINRLFSPRSAAPPPPPAAAGSVNRIYRIAAEDIAALKASAGPGRTKMEAFTALLWQLCARAASPRQSQCCMGVVVDGRTRMFPDGAMKAYFGNVLTIPYGVIGSEDLRCMALADVADDVHRWVAEAATGDHFRGLVDWVEALRPKPAAARAYLGGTGGNEAMACIVSSGMSFPVGKADFGTGLPAFASYHFPWPAGAGYVMPMPSARGNGDWVVYVHVAPEVAKVMEESTVFQALVNSYAFE

SEQ ID NO: 8963 - protein, 448 aa, Zea mays subsp. mays
  peptide (1)..(448): Ceres Seq. ID no. 12382119
  misc_feature (20)..(434): Pfam Name: Transferase family Pfam Description: Transferase family
  misc_feature (19)..(447): Homolog of NCBI NO: 38567901 NR Description: OSJNBa0060N03.21 [Oryza sativa (japonica
  misc_feature (3)..(445): Homolog of NCBI NO: 15223333 NR Description: hypothetical protein; protein id: At1g32910.1
  misc_feature (1)..(445): Homolog of NCBI NO: 7487911 NR Description: hypothetical protein YUP8H12R.39 - Arabidopsis
  misc_feature (3)..(445): Homolog of NCBI NO: 15219263 NR Description: hypothetical protein; protein id: At1g78990.1
  misc_feature (1)..(445): Homolog of NCBI NO: 15237343 NR Description: putative protein; protein id: At5g16410.1
  misc_feature (25)..(441): Homolog of NCBI NO: 15222365 NR Description: hypothetical protein; protein id: At1g31490.1
  misc_feature (20)..(434): Homolog of NCBI NO: 27475616 NR Description: hydroxycinnamoyl transferase [Nicotiana tabacum]
  misc_feature (14)..(434): Homolog of NCBI NO: 21536883 NR Description: anthranilate N-benzoyltransferase [Arabidopsis
  misc_feature (14)..(434): Homolog of NCBI NO: 15239747 NR Description: anthranilate N-benzoyltransferase; protein id: supported by cDNA: 114130. [Arabidopsis thaliana]
  misc_feature (20)..(411): Homolog of NCBI NO: 6469032 NR Description: N-hydroxycinnamoyl/benzoyltransferase [Ipomoea
MVMKEAAEEHDGRRDVTVTVEPALPVQQHRLPLSNLDLLLPPLDVSLFFCYLHPAPTAIALKEALAKTLVAYYPLAGEVVANGDGEPELLCSGRGVDFTETAAAGVELREVRLGAVDEGVEKLVPVKKTGVTMAVKLSKFTCGGAVVGCTFDHRVCDAYSFNMFLVAWAAAARGSSAPPPPDPCFRRSLVAPRDTPHRRAPSTDALINRLFSPRSAAPPPPPAAAGSVNRIYRIAAEDIAALKASAGPGRTKMEAFTALLWQLCARAASPRQSQCCMGVVVDGRTRMFPDGAMKAYFGNVLTIPYGVIGSEDLRCMALADVADDVHRWVAEAATGDHFRGLVDWVEALRPKPAAARAYLGGTGGNEAMACIVSSGMSFPVGKADFGTGLPAFASYHFPWPAGAGYVMPMPSARGNGDWVVYVHVAPEVAKVMEESTVFQALVNSYAFE

SEQ ID NO: 8964 - protein, 446 aa, Zea mays subsp. mays
  peptide (1)..(446): Ceres Seq. ID no. 12382120
  misc_feature (18)..(432): Pfam Name: Transferase family Pfam Description: Transferase family
  misc_feature (17)..(445): Homolog of NCBI NO: 38567901 NR Description: OSJNBa0060N03.21 [Oryza sativa (japonica
  misc_feature (1)..(443): Homolog of NCBI NO: 15223333 NR Description: hypothetical protein; protein id: At1g32910.1
  misc_feature (1)..(443): Homolog of NCBI NO: 7487911 NR Description: hypothetical protein YUP8H12R.39 - Arabidopsis
  misc_feature (1)..(443): Homolog of NCBI NO: 15219263 NR Description: hypothetical protein; protein id: At1g78990.1
  misc_feature (1)..(443): Homolog of NCBI NO: 15237343 NR Description: putative protein; protein id: At5g16410.1
  misc_feature (23)..(439): Homolog of NCBI NO: 15222365 NR Description: hypothetical protein; protein id: At1g31490.1
  misc_feature (18)..(432): Homolog of NCBI NO: 27475616 NR Description: hydroxycinnamoyl transferase [Nicotiana tabacum]
  misc_feature (12)..(432): Homolog of NCBI NO: 21536883 NR Description: anthranilate N-benzoyltransferase [Arabidopsis
  misc_feature (12)..(432): Homolog of NCBI NO: 15239747 NR Description: anthranilate N-benzoyltransferase; protein id: supported by cDNA: 114130. [Arabidopsis thaliana]
  misc_feature (18)..(409): Homolog of NCBI NO: 6469032 NR Description: N-hydroxycinnamoyl/benzoyltransferase [Ipomoea
MKEAAEEHDGRRDVTVTVEPALPVQQHRLPLSNLDLLLPPLDVSLFFCYLHPAPTAIALKEALAKTLVAYYPLAGEVVANGDGEPELLCSGRGVDFTETAAAGVELREVRLGAVDEGVEKLVPVKKTGVTMAVKLSKFTCGGAVVGCTFDHRVCDAYSFNMFLVAWAAAARGSSAPPPPDPCFRRSLVAPRDTPHRRAPSTDALINRLFSPRSAAPPPPPAAAGSVNRIYRIAAEDIAALKASAGPGRTKMEAFTALLWQLCARAASPRQSQCCMGVVVDGRTRMFPDGAMKAYFGNVLTIPYGVIGSEDLRCMALADVADDVHRWVAEAATGDHFRGLVDWVEALRPKPAAARAYLGGTGGNEAMACIVSSGMSFPVGKADFGTGLPAFASYHFPWPAGAGYVMPMPSARGNGDWVVYVHVAPEVAKVMEESTVFQALVNSYAFE

SEQ ID NO: 8965 - DNA, 1024 bp, Zea mays subsp. mays
  misc_feature (1)..(1024): Ceres Seq. ID no. 13492744
  misc_feature: MA Experiment ID: 108543 Result: Up-regulated in Transcription
  misc_feature: MA Experiment ID: 108556 Result: Down-regulated in Transcription
  misc_feature: MA Experiment 108556 PARAMETER Experiment Name: Zm_Drought_P Parameter: Age (day) Value: 9
  misc_feature: MA Experiment 108556 PARAMETER Experiment Name: Zm_Drought_P Parameter: Organism Value: Zea mays
  misc_feature: MA Experiment 108556 PARAMETER Experiment Name: Zm_Drought_P Parameter: Plant Line Value: 35A19
  misc_feature: MA Experiment 108556 PARAMETER Experiment Name: Zm_Drought_P Parameter: Timepoint (hr) Value: 24
  misc_feature: MA Experiment 108556 PARAMETER Experiment Name: Zm_Drought_P Parameter: Tissue Value: Aerial
  misc_feature: MA Experiment 108556 PARAMETER Experiment Name: Zm_Drought_P Parameter: Treatment Value: Drought vs. No Drought
  misc_feature: MA Experiment ID: 108559 Result: Down-regulated in Transcription
  misc_feature: MA Experiment 108559 PARAMETER Experiment Name: Zm_5mM_NO_P Parameter: Age (day) Value: 8
  misc_feature: MA Experiment 108559 PARAMETER Experiment Name: Zm_5mM_NO_P Parameter: Organism Value: Zea mays
  misc_feature: MA Experiment 108559 PARAMETER Experiment Name: Zm_5mM_NO_P Parameter: Plant Line Value: 35A19
  misc_feature: MA Experiment 108559 PARAMETER Experiment Name: Zm_5mM_NO_P Parameter: Timepoint (hr) Value: 12
  misc_feature: MA Experiment 108559 PARAMETER Experiment Name: Zm_5mM_NO_P Parameter: Tissue Value: Aerial
  misc_feature: MA Experiment 108559 PARAMETER Experiment Name: Zm_5mM_NO_P Parameter: Treatment Value: 5mM NO vs. No Treatment
  misc_feature: MA Experiment ID: 20000479 Result: Down-regulated in Transcription
  misc_feature: MA Experiment 20000479 PARAMETER Experiment Name: Zm_Drought_P Parameter: Age (day) Value: 10
  misc_feature: MA Experiment 20000479 PARAMETER Experiment Name: Zm_Drought_P Parameter: Organism Value: Zea mays
  misc_feature: MA Experiment 20000479 PARAMETER Experiment Name: Zm_Drought_P Parameter: Plant Line Value: 35A19
  misc_feature: MA Experiment 20000479 PARAMETER Experiment Name: Zm_Drought_P Parameter: Timepoint (hr) Value: 48
  misc_feature: MA Experiment 20000479 PARAMETER Experiment Name: Zm_Drought_P Parameter: Tissue Value: Aerial
  misc_feature: MA Experiment 20000479 PARAMETER Experiment Name: Zm_Drought_P Parameter: Treatment Value: Drought vs. No Drought
  misc_feature: MA Experiment ID: 20000480 Result: Down-regulated in Transcription
  misc_feature: MA Experiment 20000480 PARAMETER Experiment Name: Zm_Drought_P Parameter: Age (day) Value: 11
  misc_feature: MA Experiment 20000480 PARAMETER Experiment Name: Zm_Drought_P Parameter: Organism Value: Zea mays
  misc_feature: MA Experiment 20000480 PARAMETER Experiment Name: Zm_Drought_P Parameter: Plant Line Value: 35A19
  misc_feature: MA Experiment 20000480 PARAMETER Experiment Name: Zm_Drought_P Parameter: Timepoint (hr) Value: 72
  misc_feature: MA Experiment 20000480 PARAMETER Experiment Name: Zm_Drought_P Parameter: Tissue Value: Aerial
  misc_feature: MA Experiment 20000480 PARAMETER Experiment Name: Zm_Drought_P Parameter: Treatment Value: Drought vs. No Drought
acttcgattcgctcccacgcacacacactcctgcctgcggttgccactcgcgtagcaccagacagcgggagcagcacgcgcgcgacgttcgcaatggcggcgcgggcaaccgtcgtcctctgcgccgcnntcctcgnnctgctctccgccaccagctccctcgcgcagtcccccgcggccgcgccggctaaggcgccgcccaagtcctcctccaaggccacgccggccgccgcgcccgcgcccaagtcctcctccaaggccagcccattggcgccggccgccgcgccaaccaccccggcacccgcggcggcgccggccacgccaaagcccaaggcccccgcgcccgcgcccgccaccaaggccgcagccccggccccggctacccctgctcccgtcgccactccccccgcggcgacgcctcccgccgccgaggcgcccgtgcccgccgcggcgccggcccccgagaccaagcccgtcgaggcccccgcccccgcccccgcgccggccaagaagaagaagccgtcgtccccctcctccaaggacaagaagaagaagaagggcgcgtccgcccctgccccggccgccgacgcccccgtcgccaagaagcccagaaccgccgacgcgcccacgtccgcagccgaggctcccggggcccagcggcgacgccgccgctgccgacaccgcgagggccgcagcgaggaggacaccggcgggcgtgatcgcgtcgtcggccgtcgcggtgctgctgggtgcggcggccctgctcgcctagataagatccccggatgccaccatcacaggatttgatgcccttttcctgcttttactttttctttcgctattttgtggaaaaaaggggttttcttctgtgtagtagagtagtaccgtagcagtagactagtagggcggatgatttcttctgcttccagagatgatacgagagagagagtggttagagtagagaggggactgcccgtgtaatgttcagatttatctacatatttatatatccctgttatagccc

SEQ ID NO: 8966 - protein, 268 aa, Zea mays subsp. mays
  peptide (1)..(268): Ceres Seq. ID no. 13492745
  misc_feature (9)..(198): Pfam Name: Glycoprotein GG/GX Pfam Description: Glycoprotein GG/GX
  misc_feature (20)..(220): Homolog of NCBI NO: 9629749 NR Description: 24 [Equine herpesvirus 4]
  misc_feature (12)..(204): Homolog of NCBI NO: 9629749 NR Description: 24 [Equine herpesvirus 4]
  misc_feature (58)..(220): Homolog of NCBI NO: 9629749 NR Description: 24 [Equine herpesvirus 4]
  misc_feature (58)..(220): Homolog of NCBI NO: 9629749 NR Description: 24 [Equine herpesvirus 4]
  misc_feature (58)..(217): Homolog of NCBI NO: 27375632 NR Description: blr0521 [Bradyrhizobium japonicum]
  misc_feature (45)..(216): Homolog of NCBI NO: 12018149 NR Description: gamete-specific hydroxyproline-rich glycoprotein
  misc_feature (12)..(184): Homolog of NCBI NO: 9629749 NR Description: 24 [Equine herpesvirus 4]
  misc_feature (58)..(216): Homolog of NCBI NO: 27375632 NR Description: blr0521 [Bradyrhizobium japonicum]
  misc_feature (55)..(218): Homolog of NCBI NO: 27375632 NR Description: blr0521 [Bradyrhizobium japonicum]
  misc_feature (12)..(234): Homolog of NCBI NO: 30984464 NR Description: very large tegument protein [Cercopithecine
  misc_feature (43)..(43): Xaa is any aa, unknown or other
  misc_feature (44)..(44): Xaa is any aa, unknown or other
  misc_feature (46)..(46): Xaa is any aa, unknown or other
TSIRSHAHTLLPAVATRVAPDSGSSTRATFAMAARATVVLCAXXLXLLSATSSLAQSPAAAPAKAPPKSSSKATPAAAPAPKSSSKASPLAPAAAPTTPAPAAAPATPKPKAPAPAPATKAAAPAPATPAPVATPPAATPPAAEAPVPAAAPAPETKPVEAPAPAPAPAKKKKPSSPSSKDKKKKKGASAPAPAADAPVAKKPRTADAPTSAAEAPGAQRRRRRCRHREGRSEEDTGGRDRVVGRRGAAGCGGPARLDKIPGCHHHRI

SEQ ID NO: 8967 - protein, 237 aa, Zea mays subsp. mays
  peptide (1)..(237): Ceres Seq. ID no. 13492746
  misc_feature (1)..(167): Pfam Name: Glycoprotein GG/GX Pfam Description: Glycoprotein GG/GX
  misc_feature (1)..(189): Homolog of NCBI NO: 9629749 NR Description: 24 [Equine herpesvirus 4]
  misc_feature (1)..(173): Homolog of NCBI NO: 9629749 NR Description: 24 [Equine herpesvirus 4]
  misc_feature (27)..(189): Homolog of NCBI NO: 9629749 NR Description: 24 [Equine herpesvirus 4]
  misc_feature (27)..(189): Homolog of NCBI NO: 9629749 NR Description: 24 [Equine herpesvirus 4]
  misc_feature (27)..(186): Homolog of NCBI NO: 27375632 NR Description: blr0521 [Bradyrhizobium japonicum]
  misc_feature (14)..(185): Homolog of NCBI NO: 12018149 NR Description: gamete-specific hydroxyproline-rich glycoprotein
  misc_feature (1)..(153): Homolog of NCBI NO: 9629749 NR Description: 24 [Equine herpesvirus 4]
  misc_feature (27)..(185): Homolog of NCBI NO: 27375632 NR Description: blr0521 [Bradyrhizobium japonicum]
  misc_feature (24)..(187): Homolog of NCBI NO: 27375632 NR Description: blr0521 [Bradyrhizobium japonicum]
  misc_feature (1)..(203): Homolog of NCBI NO: 30984464 NR Description: very large tegument protein [Cercopithecine
  misc_feature (12)..(12): Xaa is any aa, unknown or other
  misc_feature (13)..(13): Xaa is any aa, unknown or other
  misc_feature (15)..(15): Xaa is any aa, unknown or other
MAARATVVLCAXXLXLLSATSSLAQSPAAAPAKAPPKSSSKATPAAAPAPKSSSKASPLAPAAAPTTPAPAAAPATPKPKAPAPAPATKAAAPAPATPAPVATPPAATPPAAEAPVPAAAPAPETKPVEAPAPAPAPAKKKKPSSPSSKDKKKKKGASAPAPAADAPVAKKPRTADAPTSAAEAPGAQRRRRRCRHREGRSEEDTGGRDRVVGRRGAAGCGGPARLDKIPGCHHHRI

SEQ ID NO: 8968 - DNA, 1425 bp, Zea mays subsp. mays
  misc_feature (1)..(1425): Ceres Seq. ID no. 12358365
  misc_feature: MA Experiment ID: 20000477 Result: Down-regulated in Transcription
  misc_feature: MA Experiment 20000477 PARAMETER Experiment Name: Zm_5mM_SA_P Parameter: Age (day) Value: 10
  misc_feature: MA Experiment 20000477 PARAMETER Experiment Name: Zm_5mM_SA_P Parameter: Organism Value: Zea mays
  misc_feature: MA Experiment 20000477 PARAMETER Experiment Name: Zm_5mM_SA_P Parameter: Plant Line Value: 35A19
  misc_feature: MA Experiment 20000477 PARAMETER Experiment Name: Zm_5mM_SA_P Parameter: Timepoint (hr) Value: 48
  misc_feature: MA Experiment 20000477 PARAMETER Experiment Name: Zm_5mM_SA_P Parameter: Tissue Value: Aerial
  misc_feature: MA Experiment 20000477 PARAMETER Experiment Name: Zm_5mM_SA_P Parameter: Treatment Value: 5mM SA vs. No Treatment
  misc_feature: MA Experiment ID: 20000478 Result: Down-regulated in Transcription
  misc_feature: MA Experiment 20000478 PARAMETER Experiment Name: Zm_5mM_SA_P Parameter: Age (day) Value: 11
  misc_feature: MA Experiment 20000478 PARAMETER Experiment Name: Zm_5mM_SA_P Parameter: Organism Value: Zea mays
  misc_feature: MA Experiment 20000478 PARAMETER Experiment Name: Zm_5mM_SA_P Parameter: Plant Line Value: 35A19
  misc_feature: MA Experiment 20000478 PARAMETER Experiment Name: Zm_5mM_SA_P Parameter: Timepoint (hr) Value: 72
  misc_feature: MA Experiment 20000478 PARAMETER Experiment Name: Zm_5mM_SA_P Parameter: Tissue Value: Aerial
  misc_feature: MA Experiment 20000478 PARAMETER Experiment Name: Zm_5mM_SA_P Parameter: Treatment Value: 5mM SA vs. No Treatment
  misc_feature: MA Experiment ID: 20000479 Result: Down-regulated in Transcription
  misc_feature: MA Experiment 20000479 PARAMETER Experiment Name: Zm_Drought_P Parameter: Age (day) Value: 10
  misc_feature: MA Experiment 20000479 PARAMETER Experiment Name: Zm_Drought_P Parameter: Organism Value: Zea mays
  misc_feature: MA Experiment 20000479 PARAMETER Experiment Name: Zm_Drought_P Parameter: Plant Line Value: 35A19
  misc_feature: MA Experiment 20000479 PARAMETER Experiment Name: Zm_Drought_P Parameter: Timepoint (hr) Value: 48
  misc_feature: MA Experiment 20000479 PARAMETER Experiment Name: Zm_Drought_P Parameter: Tissue Value: Aerial
  misc_feature: MA Experiment 20000479 PARAMETER Experiment Name: Zm_Drought_P Parameter: Treatment Value: Drought vs. No Drought
  misc_feature: MA Experiment ID: 20000480 Result: Down-regulated in Transcription
  misc_feature: MA Experiment 20000480 PARAMETER Experiment Name: Zm_Drought_P Parameter: Age (day) Value: 11
  misc_feature: MA Experiment 20000480 PARAMETER Experiment Name: Zm_Drought_P Parameter: Organism Value: Zea mays
  misc_feature: MA Experiment 20000480 PARAMETER Experiment Name: Zm_Drought_P Parameter: Plant Line Value: 35A19
  misc_feature: MA Experiment 20000480 PARAMETER Experiment Name: Zm_Drought_P Parameter: Timepoint (hr) Value: 72
  misc_feature: MA Experiment 20000480 PARAMETER Experiment Name: Zm_Drought_P Parameter: Tissue Value: Aerial
  misc_feature: MA Experiment 20000480 PARAMETER Experiment Name: Zm_Drought_P Parameter: Treatment Value: Drought vs. No Drought
  misc_feature: MA Experiment ID: 20000535 Result: Up-regulated in Transcription
  misc_feature: MA Experiment 20000535 PARAMETER Experiment Name: Zm_Hybrid_Seed_Dev_P Parameter: DAP Value: 30 vs. 12
  misc_feature: MA Experiment 20000535 PARAMETER Experiment Name: Zm_Hybrid_Seed_Dev_P Parameter: Organism Value: Zea mays
  misc_feature: MA Experiment 20000535 PARAMETER Experiment Name: Zm_Hybrid_Seed_Dev_P Parameter: Plant Line Value: 35A19
  misc_feature: MA Experiment 20000535 PARAMETER Experiment Name: Zm_Hybrid_Seed_Dev_P Parameter: Tissue Value: Embryo vs. Unfert Floret
  misc_feature: MA Experiment ID: 20000629 Result: Up-regulated in Transcription
  misc_feature: MA Experiment 20000629 PARAMETER Experiment Name: Zm_Herbicide-Treatments_P Parameter: Timepoint (hr) Value: 12
  misc_feature: MA Experiment 20000629 PARAMETER Experiment Name: Zm_Herbicide-Treatments_P Parameter: Tissue Value: Aerial
  misc_feature: MA Experiment 20000629 PARAMETER Experiment Name: Zm_Herbicide-Treatments_P Parameter: Treatment Value: Trimec vs. No Treatment
aacatctagagcttggaggaaagctagctagcgagaggaataggatcgcaatggtggaacggccgggcagatcggcaggcgtcagggaggccaataagacttccgctgccgccatggtgaagacgacgacgacgacgaccaccaataaggaggagctggagagcccgtcctacaggttagcagcgttcaagagcctcttctcgtgcaggaacagccacgcgcggccgcgggcgccggacaccggcaacaggagcaagagggggctgggctgctccgcgccgtccatctgcaagctcaaggacgacagcgtgcccgtgccgcccaaggaaaccacgggcacggcgtcggcaggcgagccctgcaagcgccgcgcgtccgtgagcgggagcagcgatcggtgcgtgaagaagccccaatgtggcgctggcagcaacaagcagctgcagcgtggcgggtcgtcgtcgtcgtcgggcgggtcgtcgttcagggccggcatgcagctgaggcggctttcggggtgctacgagtgccacatggtggtggcgggcagcgcctccatgagggccaccaccatctgcccctgcccggactgcggcgaggtgttcgtcaggcaggagagcctccagctccaccagtccatcaggcacgcagtgtccgagcttggcactgacgacacgagccgcaacatcatcgagatcatcttccagtccagctggctcaagaagcagagccccgtgtgcaaggtcgaccgcatcctcaaggtgaacaacacgcccagaacgctggcccgcttcgaggagtaccgcgacgctgtcaaggccagggcgggcgccgagcagctggcggtagcggcggccaacagcaacaggcacccgcgctgcaccgccgacggcaacgagctgctccggttccactgcgccaccctggcctgctcgctcggcctcaacggcgccacgcacctctgcgacgccgcggggacctgcgcagcgtgcggcatcatccgcgacggcttcagcagcggcggggtgctgaccatggccacgagcggccgcgcgcacgacgccgtgcccgctgcggaggctggcgccggactggatgaggaaaccactccaagggcgatgctggtgtgccgggtcatcgcgggaagggtgaagcggcccaaagaagcggtaccagaggaggaggccgtcgccgaagccgccgaggagtcggagtacgactcggttgcggggtcggccggggtgtactccaacctggaggagctgctggtgttcaaccccagggccatcctcccatgctttgtcgttgtctacaaggcttagctactggtggttacactttacaatccatgcaatgcagtccttgtattaagtaacaaacaattcatgataaacctaatgtattgactgacgaatggtcactctc

SEQ ID NO: 8969 - protein, 439 aa, Zea mays subsp. mays
  peptide (1)..(439): Ceres Seq. ID no. 12358366
  misc_feature (192)..(215): Pfam Name: Zinc finger, C2H2 type Pfam Description: Zinc finger, C2H2 type
  misc_feature (51)..(439): Homolog of NCBI NO: 38345520 NR Description: OSJNBa0039K24.23 [Oryza sativa (japonica
  misc_feature (97)..(439): Homolog of NCBI NO: 5777616 NR Description: CAA30374.1 protein [Oryza sativa]
  misc_feature (69)..(438): Homolog of NCBI NO: 15222333 NR Description: unknown protein; protein id: At1g75710.1 thaliana] >gi|9369383|gb|AAF87132.1|AC006434_28 F10A5.10
  misc_feature (24)..(438): Homolog of NCBI NO: 9802582 NR Description: T2E6.3 [Arabidopsis thaliana]
  misc_feature (24)..(438): Homolog of NCBI NO: 15220992 NR Description: hypothetical protein; protein id: At1g47860.1
  misc_feature (24)..(251): Homolog of NCBI NO: 38346001 NR Description: OSJNBa0073L13.11 [Oryza sativa (japonica
  misc_feature (217)..(438): Homolog of NCBI NO: 38346001 NR Description: OSJNBa0073L13.11 [Oryza sativa (japonica
  misc_feature (194)..(439): Homolog of NCBI NO: 34910152 NR Description: B1070A12.19 [Oryza sativa (japonica
  misc_feature (194)..(438): Homolog of NCBI NO: 15239695 NR Description: putative protein; protein id: At5g54630.1, by cDNA: gi_15010657 [Arabidopsis thaliana] gene_id:MRB17.13~pir||T05748~strong similarity to unknown protein
  misc_feature (90)..(438): Homolog of NCBI NO: 18416951 NR Description: expressed protein; protein id: At4g27240.1, by cDNA: 2944. [Arabidopsis thaliana] >gi|7486806|pir||T05748
HLELGGKLASERNRIAMVERPGRSAGVREANKTSAAAMVKTTTTTTTNKEELESPSYRLAAFKSLFSCRNSHARPRAPDTGNRSKRGLGCSAPSICKLKDDSVPVPPKETTGTASAGEPCKRRASVSGSSDRCVKKPQCGAGSNKQLQRGGSSSSSGGSSFRAGMQLRRLSGCYECHMVVAGSASMRATTICPCPDCGEVFVRQESLQLHQSIRHAVSELGTDDTSRNIIEIIFQSSWLKKQSPVCKVDRILKVNNTPRTLARFEEYRDAVKARAGAEQLAVAAANSNRHPRCTADGNELLRFHCATLACSLGLNGATHLCDAAGTCAACGIIRDGFSSGGVLTMATSGRAHDAVPAAEAGAGLDEETTPRAMLVCRVIAGRVKRPKEAVPEEEAVAEAAEESEYDSVAGSAGVYSNLEELLVFNPRAILPCFVVVYKA

SEQ ID NO: 8970 - protein, 423 aa, Zea mays subsp. mays
  peptide (1)..(423): Ceres Seq. ID no. 12358367
  misc_feature (176)..(199): Pfam Name: Zinc finger, C2H2 type Pfam Description: Zinc finger, C2H2 type
  misc_feature (35)..(423): Homolog of NCBI NO: 38345520 NR Description: OSJNBa0039K24.23 [Oryza sativa (japonica
  misc_feature (81)..(423): Homolog of NCBI NO: 5777616 NR Description: CAA30374.1 protein [Oryza sativa]
  misc_feature (53)..(422): Homolog of NCBI NO: 15222333 NR Description: unknown protein; protein id: At1g75710.1 thaliana] >gi|9369383|gb|AAF87132.1|AC006434_28 F10A5.10
  misc_feature (8)..(422): Homolog of NCBI NO: 9802582 NR Description: T2E6.3 [Arabidopsis thaliana]
  misc_feature (8)..(422): Homolog of NCBI NO: 15220992 NR Description: hypothetical protein; protein id: At1g47860.1
  misc_feature (8)..(235): Homolog of NCBI NO: 38346001 NR Description: OSJNBa0073L13.11 [Oryza sativa (japonica
  misc_feature (201)..(422): Homolog of NCBI NO: 38346001 NR Description: OSJNBa0073L13.11 [Oryza sativa (japonica
  misc_feature (178)..(423): Homolog of NCBI NO: 34910152 NR Description: B1070A12.19 [Oryza sativa (japonica
  misc_feature (178)..(422): Homolog of NCBI NO: 15239695 NR Description: putative protein; protein id: At5g54630.1, by cDNA: gi_15010657 [Arabidopsis thaliana] gene_id:MRB17.13~pir||T05748~strong similarity to unknown protein
  misc_feature (74)..(422): Homolog of NCBI NO: 18416951 NR Description: expressed protein; protein id: At4g27240.1, by cDNA: 2944. [Arabidopsis thaliana] >gi|7486806|pir||T05748
MVERPGRSAGVREANKTSAAAMVKTTTTTTTNKEELESPSYRLAAFKSLFSCRNSHARPRAPDTGNRSKRGLGCSAPSICKLKDDSVPVPPKETTGTASAGEPCKRRASVSGSSDRCVKKPQCGAGSNKQLQRGGSSSSSGGSSFRAGMQLRRLSGCYECHMVVAGSASMRATTICPCPDCGEVFVRQESLQLHQSIRHAVSELGTDDTSRNIIEIIFQSSWLKKQSPVCKVDRILKVNNTPRTLARFEEYRDAVKARAGAEQLAVAAANSNRHPRCTADGNELLRFHCATLACSLGLNGATHLCDAAGTCAACGIIRDGFSSGGVLTMATSGRAHDAVPAAEAGAGLDEETTPRAMLVCRVIAGRVKRPKEAVPEEEAVAEAAEESEYDSVAGSAGVYSNLEELLVFNPRAILPCFVVVYKA

SEQ ID NO: 8971 - protein, 402 aa, Zea mays subsp. mays
  peptide (1)..(402): Ceres Seq. ID no. 12358368
  misc_feature (155)..(178): Pfam Name: Zinc finger, C2H2 type Pfam Description: Zinc finger, C2H2 type
  misc_feature (14)..(402): Homolog of NCBI NO: 38345520 NR Description: OSJNBa0039K24.23 [Oryza sativa (japonica
  misc_feature (60)..(402): Homolog of NCBI NO: 5777616 NR Description: CAA30374.1 protein [Oryza sativa]
  misc_feature (32)..(401): Homolog of NCBI NO: 15222333 NR Description: unknown protein; protein id: At1g75710.1 thaliana] >gi|9369383|gb|AAF87132.1|AC006434_28 F10A5.10
  misc_feature (1)..(401): Homolog of NCBI NO: 9802582 NR Description: T2E6.3 [Arabidopsis thaliana]
  misc_feature (1)..(401): Homolog of NCBI NO: 15220992 NR Description: hypothetical protein; protein id: At1g47860.1
  misc_feature (1)..(214): Homolog of NCBI NO: 38346001 NR Description: OSJNBa0073L13.11 [Oryza sativa (japonica
  misc_feature (180)..(401): Homolog of NCBI NO: 38346001 NR Description: OSJNBa0073L13.11 [Oryza sativa (japonica
  misc_feature (157)..(402): Homolog of NCBI NO: 34910152 NR Description: B1070A12.19 [Oryza sativa (japonica
  misc_feature (157)..(401): Homolog of NCBI NO: 15239695 NR Description: putative protein; protein id: At5g54630.1, by cDNA: gi_15010657 [Arabidopsis thaliana] gene_id:MRB17.13~pir||T05748~strong similarity to unknown protein
  misc_feature (53)..(401): Homolog of NCBI NO: 18416951 NR Description: expressed protein; protein id: At4g27240.1, by cDNA: 2944. [Arabidopsis thaliana] >gi|7486806|pir||T05748
MVKTTTTTTTNKEELESPSYRLAAFKSLFSCRNSHARPRAPDTGNRSKRGLGCSAPSICKLKDDSVPVPPKETTGTASAGEPCKRRASVSGSSDRCVKKPQCGAGSNKQLQRGGSSSSSGGSSFRAGMQLRRLSGCYECHMVVAGSASMRATTICPCPDCGEVFVRQESLQLHQSIRHAVSELGTDDTSRNIIEIIFQSSWLKKQSPVCKVDRILKVNNTPRTLARFEEYRDAVKARAGAEQLAVAAANSNRHPRCTADGNELLRFHCATLACSLGLNGATHLCDAAGTCAACGIIRDGFSSGGVLTMATSGRAHDAVPAAEAGAGLDEETTPRAMLVCRVIAGRVKRPKEAVPEEEAVAEAAEESEYDSVAGSAGVYSNLEELLVFNPRAILPCFVVVYKA

SEQ ID NO: 8972 - DNA, 1061 bp, Zea mays subsp. mays
  misc_feature (1)..(1061): Ceres Seq. ID no. 12403200
  misc_feature: MA Experiment ID: 108504 Result: Down-regulated in Transcription
  misc_feature: MA Experiment 108504 PARAMETER Experiment Name: Zm_Drought_P Parameter: Age (day) Value: 8
  misc_feature: MA Experiment 108504 PARAMETER Experiment Name: Zm_Drought_P Parameter: Organism Value: Zea mays
  misc_feature: MA Experiment 108504 PARAMETER Experiment Name: Zm_Drought_P Parameter: Plant Line Value: 35A19
  misc_feature: MA Experiment 108504 PARAMETER Experiment Name: Zm_Drought_P Parameter: Timepoint (hr) Value: 12
  misc_feature: MA Experiment 108504 PARAMETER Experiment Name: Zm_Drought_P Parameter: Tissue Value: Aerial
  misc_feature: MA Experiment 108504 PARAMETER Experiment Name: Zm_Drought_P Parameter: Treatment Value: Drought vs. No Drought
  misc_feature: MA Experiment ID: 108515 Result: Down-regulated in Transcription
  misc_feature: MA Experiment 108515 PARAMETER Experiment Name: Zm_2mM_SA_P Parameter: Age (day) Value: 8
  misc_feature: MA Experiment 108515 PARAMETER Experiment Name: Zm_2mM_SA_P Parameter: Organism Value: Zea mays
  misc_feature: MA Experiment 108515 PARAMETER Experiment Name: Zm_2mM_SA_P Parameter: Plant Line Value: 35A19
  misc_feature: MA Experiment 108515 PARAMETER Experiment Name: Zm_2mM_SA_P Parameter: Timepoint (hr) Value: 12
  misc_feature: MA Experiment 108515 PARAMETER Experiment Name: Zm_2mM_SA_P Parameter: Tissue Value: Aerial
  misc_feature: MA Experiment 108515 PARAMETER Experiment Name: Zm_2mM_SA_P Parameter: Treatment Value: 2mM SA vs. No Treatment
  misc_feature: MA Experiment ID: 108523 Result: Down-regulated in Transcription
  misc_feature: MA Experiment 108523 PARAMETER Experiment Name: Zm_42deg_Heat_P Parameter: Age (day) Value: 8
  misc_feature: MA Experiment 108523 PARAMETER Experiment Name: Zm_42deg_Heat_P Parameter: Organism Value: Zea mays
  misc_feature: MA Experiment 108523 PARAMETER Experiment Name: Zm_42deg_Heat_P Parameter: Plant Line Value: 35A19
  misc_feature: MA Experiment 108523 PARAMETER Experiment Name: Zm_42deg_Heat_P Parameter: Temperature (deg C) Value: 42 vs. 22
  misc_feature: MA Experiment 108523 PARAMETER Experiment Name: Zm_42deg_Heat_P Parameter: Timepoint (hr) Value: 6
  misc_feature: MA Experiment 108523 PARAMETER Experiment Name: Zm_42deg_Heat_P Parameter: Tissue Value: Aerial
  misc_feature: MA Experiment ID: 108528 Result: Up-regulated in Transcription
  misc_feature: MA Experiment 108528 PARAMETER Experiment Name: Zm_Imbibed_Seeds_P Parameter: Age (day) Value: 5 vs. 2
  misc_feature: MA Experiment 108528 PARAMETER Experiment Name: Zm_Imbibed_Seeds_P Parameter: Organism Value: Zea mays
  misc_feature: MA Experiment 108528 PARAMETER Experiment Name: Zm_Imbibed_Seeds_P Parameter: Plant Line Value: 35A19
  misc_feature: MA Experiment 108528 PARAMETER Experiment Name: Zm_Imbibed_Seeds_P Parameter: Tissue Value: Aerial vs. Embryo
  misc_feature: MA Experiment ID: 108529 Result: Up-regulated in Transcription
  misc_feature: MA Experiment 108529 PARAMETER Experiment Name: Zm_Imbibed_Seeds_P Parameter: Age (day) Value: 5 vs. 2
  misc_feature: MA Experiment 108529 PARAMETER Experiment Name: Zm_Imbibed_Seeds_P Parameter: Organism Value: Zea mays
  misc_feature: MA Experiment 108529 PARAMETER Experiment Name: Zm_Imbibed_Seeds_P Parameter: Plant Line Value: 35A19
  misc_feature: MA Experiment 108529 PARAMETER Experiment Name: Zm_Imbibed_Seeds_P Parameter: Tissue Value: Roots vs. Embryo
  misc_feature: MA Experiment ID: 108530 Result: Up-regulated in Transcription
  misc_feature: MA Experiment 108530 PARAMETER Experiment Name: Zm_Imbibed_Seeds_P Parameter: Age (day) Value: 6 vs. 2
  misc_feature: MA Experiment 108530 PARAMETER Experiment Name: Zm_Imbibed_Seeds_P Parameter: Organism Value: Zea mays
  misc_feature: MA Experiment 108530 PARAMETER Experiment Name: Zm_Imbibed_Seeds_P Parameter: Plant Line Value: 35A19
  misc_feature: MA Experiment 108530 PARAMETER Experiment Name: Zm_Imbibed_Seeds_P Parameter: Tissue Value: Aerial vs. Embryo
  misc_feature: MA Experiment ID: 108534 Result: Down-regulated in Transcription
  misc_feature: MA Experiment 108534 PARAMETER Experiment Name: Zm_4deg_Cold_P Parameter: Age (hr) Value: 8
  misc_feature: MA Experiment 108534 PARAMETER Experiment Name: Zm_4deg_Cold_P Parameter: Organism Value: Zea mays
  misc_feature: MA Experiment 108534 PARAMETER Experiment Name: Zm_4deg_Cold_P Parameter: Plant Line Value: 35A19
  misc_feature: MA Experiment 108534 PARAMETER Experiment Name: Zm_4deg_Cold_P Parameter: Temperature (deg C) Value: 4 vs. 22
  misc_feature: MA Experiment 108534 PARAMETER Experiment Name: Zm_4deg_Cold_P Parameter: Timepoint (hr) Value: 6
  misc_feature: MA Experiment 108534 PARAMETER Experiment Name: Zm_4deg_Cold_P Parameter: Tissue Value: Aerial
  misc_feature: MA Experiment ID: 108535 Result: Down-regulated in Transcription
  misc_feature: MA Experiment 108535 PARAMETER Experiment Name: Zm_Meristem_P Parameter: Age (day) Value: 8
  misc_feature: MA Experiment 108535 PARAMETER Experiment Name: Zm_Meristem_P Parameter: Organism Value: Zea mays
  misc_feature: MA Experiment 108535 PARAMETER Experiment Name: Zm_Meristem_P Parameter: Plant Line Value: 35A19
  misc_feature: MA Experiment 108535 PARAMETER Experiment Name: Zm_Meristem_P Parameter: Tissue Value: Root Meristem vs. Above Root Meristem
  misc_feature: MA Experiment ID: 108543 Result: Up-regulated in Transcription
  misc_feature: MA Experiment ID: 108546 Result: Up-regulated in Transcription
  misc_feature: MA Experiment 108546 PARAMETER Experiment Name: Zm_Imbibed_Seeds_P Parameter: Age (day) Value: 3 vs. 2
  misc_feature: MA Experiment 108546 PARAMETER Experiment Name: Zm_Imbibed_Seeds_P Parameter: Organism Value: Zea mays
  misc_feature: MA Experiment 108546 PARAMETER Experiment Name: Zm_Imbibed_Seeds_P Parameter: Plant Line Value: 35A19
  misc_feature: MA Experiment 108546 PARAMETER Experiment Name: Zm_Imbibed_Seeds_P Parameter: Tissue Value: Roots vs. Embryo
  misc_feature: MA Experiment ID: 108547 Result: Up-regulated in Transcription
  misc_feature: MA Experiment 108547 PARAMETER Experiment Name: Zm_Imbibed_Seeds_P Parameter: Age (day) Value: 4 vs. 2
  misc_feature: MA Experiment 108547 PARAMETER Experiment Name: Zm_Imbibed_Seeds_P Parameter: Organism Value: Zea mays
  misc_feature: MA Experiment 108547 PARAMETER Experiment Name: Zm_Imbibed_Seeds_P Parameter: Plant Line Value: 35A19
  misc_feature: MA Experiment 108547 PARAMETER Experiment Name: Zm_Imbibed_Seeds_P Parameter: Tissue Value: Aerial vs. Embryo
  misc_feature: MA Experiment ID: 108559 Result: Down-regulated in Transcription
  misc_feature: MA Experiment 108559 PARAMETER Experiment Name: Zm_5mM_NO_P Parameter: Age (day) Value: 8
  misc_feature: MA Experiment 108559 PARAMETER Experiment Name: Zm_5mM_NO_P Parameter: Organism Value: Zea mays
  misc_feature: MA Experiment 108559 PARAMETER Experiment Name: Zm_5mM_NO_P Parameter: Plant Line Value: 35A19
  misc_feature: MA Experiment 108559 PARAMETER Experiment Name: Zm_5mM_NO_P Parameter: Timepoint (hr) Value: 12
  misc_feature: MA Experiment 108559 PARAMETER Experiment Name: Zm_5mM_NO_P Parameter: Tissue Value: Aerial
  misc_feature: MA Experiment 108559 PARAMETER Experiment Name: Zm_5mM_NO_P Parameter: Treatment Value: 5mM NO vs. No Treatment
  misc_feature: MA Experiment ID: 108597 Result: Down-regulated in Transcription
  misc_feature: MA Experiment 108597 PARAMETER Experiment Name: Zm_100uM_ABA_P Parameter: Age (day) Value: 9
  misc_feature: MA Experiment 108597 PARAMETER Experiment Name: Zm_100uM_ABA_P Parameter: Organism Value: Zea mays
  misc_feature: MA Experiment 108597 PARAMETER Experiment Name: Zm_100uM_ABA_P Parameter: Plant Line Value: 35A19
  misc_feature: MA Experiment 108597 PARAMETER Experiment Name: Zm_100uM_ABA_P Parameter: Timepoint (hr) Value: 24
  misc_feature: MA Experiment 108597 PARAMETER Experiment Name: Zm_100uM_ABA_P Parameter: Tissue Value: Aerial
  misc_feature: MA Experiment 108597 PARAMETER Experiment Name: Zm_100uM_ABA_P Parameter: Treatment Value: 100uM ABA vs. No Treatment
  misc_feature: MA Experiment ID: 20000478 Result: Down-regulated in Transcription
  misc_feature: MA Experiment 20000478 PARAMETER Experiment Name: Zm_5mM_SA_P Parameter: Age (day) Value: 11
  misc_feature: MA Experiment 20000478 PARAMETER Experiment Name: Zm_5mM_SA_P Parameter: Organism Value: Zea mays
  misc_feature: MA Experiment 20000478 PARAMETER Experiment Name: Zm_5mM_SA_P Parameter: Plant Line Value: 35A19
  misc_feature: MA Experiment 20000478 PARAMETER Experiment Name: Zm_5mM_SA_P Parameter: Timepoint (hr) Value: 72
  misc_feature: MA Experiment 20000478 PARAMETER Experiment Name: Zm_5mM_SA_P Parameter: Tissue Value: Aerial
  misc_feature: MA Experiment 20000478 PARAMETER Experiment Name: Zm_5mM_SA_P Parameter: Treatment Value: 5mM SA vs. No Treatment
  misc_feature: MA Experiment ID: 20000479 Result: Down-regulated in Transcription
  misc_feature: MA Experiment 20000479 PARAMETER Experiment Name: Zm_Drought_P Parameter: Age (day) Value: 10
  misc_feature: MA Experiment 20000479 PARAMETER Experiment Name: Zm_Drought_P Parameter: Organism Value: Zea mays
  misc_feature: MA Experiment 20000479 PARAMETER Experiment Name: Zm_Drought_P Parameter: Plant Line Value: 35A19
  misc_feature: MA Experiment 20000479 PARAMETER Experiment Name: Zm_Drought_P Parameter: Timepoint (hr) Value: 48
  misc_feature: MA Experiment 20000479 PARAMETER Experiment Name: Zm_Drought_P Parameter: Tissue Value: Aerial
  misc_feature: MA Experiment 20000479 PARAMETER Experiment Name: Zm_Drought_P Parameter: Treatment Value: Drought vs. No Drought
  misc_feature: MA Experiment ID: 20000480 Result: Down-regulated in Transcription
  misc_feature: MA Experiment 20000480 PARAMETER Experiment Name: Zm_Drought_P Parameter: Age (day) Value: 11
  misc_feature: MA Experiment 20000480 PARAMETER Experiment Name: Zm_Drought_P Parameter: Organism Value: Zea mays
  misc_feature: MA Experiment 20000480 PARAMETER Experiment Name: Zm_Drought_P Parameter: Plant Line Value: 35A19
  misc_feature: MA Experiment 20000480 PARAMETER Experiment Name: Zm_Drought_P Parameter: Timepoint (hr) Value: 72
  misc_feature: MA Experiment 20000480 PARAMETER Experiment Name: Zm_Drought_P Parameter: Tissue Value: Aerial
  misc_feature: MA Experiment 20000480 PARAMETER Experiment Name: Zm_Drought_P Parameter: Treatment Value: Drought vs. No Drought
  misc_feature: MA Experiment ID: 20000492 Result: Down-regulated in Transcription
  misc_feature: MA Experiment 20000492 PARAMETER Experiment Name: Zm_Hybrid_Seed_Dev_P Parameter: DAP Value: 12
  misc_feature: MA Experiment 20000492 PARAMETER Experiment Name: Zm_Hybrid_Seed_Dev_P Parameter: Organism Value: Zea mays
  misc_feature: MA Experiment 20000492 PARAMETER Experiment Name: Zm_Hybrid_Seed_Dev_P Parameter: Plant Line Value: 35A19
  misc_feature: MA Experiment 20000492 PARAMETER Experiment Name: Zm_Hybrid_Seed_Dev_P Parameter: Tissue Value: Fert Kernel vs. Unfert Floret
  misc_feature: MA Experiment ID: 20000535 Result: Down-regulated in Transcription
  misc_feature: MA Experiment 20000535 PARAMETER Experiment Name: Zm_Hybrid_Seed_Dev_P Parameter: DAP Value: 30 vs. 12
  misc_feature: MA Experiment 20000535 PARAMETER Experiment Name: Zm_Hybrid_Seed_Dev_P Parameter: Organism Value: Zea mays
  misc_feature: MA Experiment 20000535 PARAMETER Experiment Name: Zm_Hybrid_Seed_Dev_P Parameter: Plant Line Value: 35A19
  misc_feature: MA Experiment 20000535 PARAMETER Experiment Name: Zm_Hybrid_Seed_Dev_P Parameter: Tissue Value: Embryo vs. Unfert Floret
aacattaggtccagtccacccctccagccaacccaagtctccatccacaagagctcgagaacctggccacgagcccatgacggcaagaagcggtcatggccggtgatgaggaggaccacctagcagacgcgccgcgggtggtgggcgtcctctccgcgctcctggaacgtgtcgtggagcgcaacgacgcggttggccgatgagctcgccgccgggaccgagtccgcggcgccgccgtcggcgttccgggcgacggcgaggcccgacatctcggtgcgctcgtacatggcgcgcatcgcgcggttcgcagggtgcagcccggcttgctacgtcgtggcgtacgtctacctcgaccgcctcctgcgccgcgcccgcagcgcgcccgccgtggactcgtacaccgtgcaccgnctcctcatcaccgccgtgctcgcggccgtcaagttcatggatgacgtatgctacaacaacgcctacttcgccagggtcggcggcatcagcctgtcggagatgaactacctggaggtggacttcctcttcgccgtcgggttcgacctcaacgtgtcgccggagacgttcggccactactgcacggtcctccgggccgagatgctgtacctggagctggagggtcctcctcctccagccgccagtacaagtctgcacaggtgctgcttgtcagaagacgacgacggtagcagcagcaccagcagcagctagctgcatagagacaggtacagcggttgcttccaagcaagcaaccatgtatgaatgtgtccgtgtacactgtacagtacagacatgcttgcttgaaagcaaacacggagtacgtgacgtaggcatctgcgtgtgatcggtttgctatctggcggctggcgcttagttgtttttagctttgttattaggtaatctgttgctcttgtagtcttgtatagctgcattgctgttgttcatgtggaaatcggaaaaccgtaaggaacggtataaattgcagtcttggggcagtgtaattgttttcttgtccagcagtttatccatagtttatctaaaatattgttttt

SEQ ID NO: 8973 - protein, 144 aa, Zea mays subsp. mays
  peptide (1)..(144): Ceres Seq. ID no. 12403201
  misc_feature (1)..(92): Pfam Name: Cyclin, N-terminal domain Pfam Description: Cyclin, N-terminal domain
  misc_feature (1)..(143): Homolog of NCBI NO: 14140116 NR Description: PREG-like protein [Oryza sativa]
  misc_feature (1)..(136): Homolog of NCBI NO: 37536902 NR Description: hypothetical protein [Oryza sativa (japonica group)] >gi|12597875|gb|AAG60183.1| hypothetical protein [Oryza >gi|31433542|gb|AAP55040.1| hypothetical protein [Oryza sativa
  misc_feature (1)..(144): Homolog of NCBI NO: 15240794 NR Description: putative protein; protein id: At5g07450.1
  misc_feature (1)..(113): Homolog of NCBI NO: 15224950 NR Description: putative PREG1-like negative regulator; protein
  misc_feature (1)..(112): Homolog of NCBI NO: 15240306 NR Description: PREG-like - like protein; protein id: At5g61650.1
  misc_feature (1)..(110): Homolog of NCBI NO: 25493992 NR Description: PREG-like protein [imported] - Picea mariana
  misc_feature (1)..(109): Homolog of NCBI NO: 15233185 NR Description: PREG-like protein, putative; protein id:
  misc_feature (1)..(108): Homolog of NCBI NO: 15229382 NR Description: putative protein; protein id: At3g63120.1, by cDNA: 35075. [Arabidopsis thaliana] >gi|11358166|pir||T48101
  misc_feature (1)..(108): Homolog of NCBI NO: 21593009 NR Description: unknown [Arabidopsis thaliana]
  misc_feature (1)..(108): Homolog of NCBI NO: 6729043 NR Description: hypothetical protein [Arabidopsis thaliana]
  misc_feature (42)..(42): Xaa is any aa, unknown or other
MARIARFAGCSPACYVVAYVYLDRLLRRARSAPAVDSYTVHXLLITAVLAAVKFMDDVCYNNAYFARVGGISLSEMNYLEVDFLFAVGFDLNVSPETFGHYCTVLRAEMLYLELEGPPPPAASTSLHRCCLSEDDDGSSSTSSS

SEQ ID NO: 8974 - protein, 104 aa, Zea mays subsp. mays
  peptide (1)..(104): Ceres Seq. ID no. 12403202
  misc_feature (2)..(104): Pfam Name: Cupin Pfam Description: Cupin
  misc_feature (71)..(71): Xaa is any aa, unknown or other
MSSPPGPSPRRRRRRSGRRRGPTSRCARTWRASRGSQGAARLATSWRTSTSTASCAAPAARPPWTRTPCTXSSSPPCSRPSSSWMTYATTTPTSPGSAASACRR

SEQ ID NO: 8975 - protein, 90 aa, Zea mays subsp. mays
  peptide (1)..(90): Ceres Seq. ID no. 12403203
  misc_feature (1)..(54): Homolog of NCBI NO: 15229382 NR Description: putative protein; protein id: At3g63120.1, by cDNA: 35075. [Arabidopsis thaliana] >gi|11358166|pir||T48101
  misc_feature (1)..(54): Homolog of NCBI NO: 21593009 NR Description: unknown [Arabidopsis thaliana]
  misc_feature (1)..(54): Homolog of NCBI NO: 6729043 NR Description: hypothetical protein [Arabidopsis thaliana]
  misc_feature (1)..(89): Homolog of NCBI NO: 14140116 NR Description: PREG-like protein [Oryza sativa]
  misc_feature (1)..(82): Homolog of NCBI NO: 37536902 NR Description: hypothetical protein [Oryza sativa (japonica group)] >gi|12597875|gb|AAG60183.1| hypothetical protein [Oryza >gi|31433542|gb|AAP55040.1| hypothetical protein [Oryza sativa
  misc_feature (1)..(90): Homolog of NCBI NO: 15240794 NR Description: putative protein; protein id: At5g07450.1
  misc_feature (1)..(59): Homolog of NCBI NO: 15224950 NR Description: putative PREG1-like negative regulator; protein
  misc_feature (1)..(58): Homolog of NCBI NO: 15240306 NR Description: PREG-like - like protein; protein id: At5g61650.1
  misc_feature (1)..(56): Homolog of NCBI NO: 25493992 NR Description: PREG-like protein [imported] - Picea mariana
  misc_feature (1)..(55): Homolog of NCBI NO: 15233185 NR Description: PREG-like protein, putative; protein id:
MDDVCYNNAYFARVGGISLSEMNYLEVDFLFAVGFDLNVSPETFGHYCTVLRAEMLYLELEGPPPPAASTSLHRCCLSEDDDGSSSTSSS

SEQ ID NO: 8976 - DNA, 1112 bp, Zea mays subsp. mays
  misc_feature (1)..(1112): Ceres Seq. ID no. 12402142
  misc_feature: MA Experiment ID: 108504 Result: Up-regulated in Transcription
  misc_feature: MA Experiment 108504 PARAMETER Experiment Name: Zm_Drought_P Parameter: Age (day) Value: 8
  misc_feature: MA Experiment 108504 PARAMETER Experiment Name: Zm_Drought_P Parameter: Organism Value: Zea mays
  misc_feature: MA Experiment 108504 PARAMETER Experiment Name: Zm_Drought_P Parameter: Plant Line Value: 35A19
  misc_feature: MA Experiment 108504 PARAMETER Experiment Name: Zm_Drought_P Parameter: Timepoint (hr) Value: 12
  misc_feature: MA Experiment 108504 PARAMETER Experiment Name: Zm_Drought_P Parameter: Tissue Value: Aerial
  misc_feature: MA Experiment 108504 PARAMETER Experiment Name: Zm_Drought_P Parameter: Treatment Value: Drought vs. No Drought
  misc_feature: MA Experiment ID: 108526 Result: Up-regulated in Transcription
  misc_feature: MA Experiment 108526 PARAMETER Experiment Name: Zm_5mM_NO_P Parameter: Age (day) Value: 8
  misc_feature: MA Experiment 108526 PARAMETER Experiment Name: Zm_5mM_NO_P Parameter: Organism Value: Zea mays
  misc_feature: MA Experiment 108526 PARAMETER Experiment Name: Zm_5mM_NO_P Parameter: Plant Line Value: 35A19
  misc_feature: MA Experiment 108526 PARAMETER Experiment Name: Zm_5mM_NO_P Parameter: Timepoint (hr) Value: 1
  misc_feature: MA Experiment 108526 PARAMETER Experiment Name: Zm_5mM_NO_P Parameter: Tissue Value: Aerial
  misc_feature: MA Experiment 108526 PARAMETER Experiment Name: Zm_5mM_NO_P Parameter: Treatment Value: 5mM NO vs. No Treatment
  misc_feature: MA Experiment ID: 108527 Result: Up-regulated in Transcription
  misc_feature: MA Experiment 108527 PARAMETER Experiment Name: Zm_5mM_NO_P Parameter: Age (day) Value: 8
  misc_feature: MA Experiment 108527 PARAMETER Experiment Name: Zm_5mM_NO_P Parameter: Organism Value: Zea mays
  misc_feature: MA Experiment 108527 PARAMETER Experiment Name: Zm_5mM_NO_P Parameter: Plant Line Value: 35A19
  misc_feature: MA Experiment 108527 PARAMETER Experiment Name: Zm_5mM_NO_P Parameter: Timepoint (hr) Value: 6
  misc_feature: MA Experiment 108527 PARAMETER Experiment Name: Zm_5mM_NO_P Parameter: Tissue Value: Aerial
  misc_feature: MA Experiment 108527 PARAMETER Experiment Name: Zm_5mM_NO_P Parameter: Treatment Value: 5mM NO vs. No Treatment
  misc_feature: MA Experiment ID: 108534 Result: Up-regulated in Transcription
  misc_feature: MA Experiment 108534 PARAMETER Experiment Name: Zm_4deg_Cold_P Parameter: Age (hr) Value: 8
  misc_feature: MA Experiment 108534 PARAMETER Experiment Name: Zm_4deg_Cold_P Parameter: Organism Value: Zea mays
  misc_feature: MA Experiment 108534 PARAMETER Experiment Name: Zm_4deg_Cold_P Parameter: Plant Line Value: 35A19
  misc_feature: MA Experiment 108534 PARAMETER Experiment Name: Zm_4deg_Cold_P Parameter: Temperature (deg C) Value: 4 vs. 22
  misc_feature: MA Experiment 108534 PARAMETER Experiment Name: Zm_4deg_Cold_P Parameter: Timepoint (hr) Value: 6
  misc_feature: MA Experiment 108534 PARAMETER Experiment Name: Zm_4deg_Cold_P Parameter: Tissue Value: Aerial
  misc_feature: MA Experiment ID: 108543 Result: Up-regulated in Transcription
  misc_feature: MA Experiment ID: 108556 Result: Up-regulated in Transcription
  misc_feature: MA Experiment 108556 PARAMETER Experiment Name: Zm_Drought_P Parameter: Age (day) Value: 9
  misc_feature: MA Experiment 108556 PARAMETER Experiment Name: Zm_Drought_P Parameter: Organism Value: Zea mays
  misc_feature: MA Experiment 108556 PARAMETER Experiment Name: Zm_Drought_P Parameter: Plant Line Value: 35A19
  misc_feature: MA Experiment 108556 PARAMETER Experiment Name: Zm_Drought_P Parameter: Timepoint (hr) Value: 24
  misc_feature: MA Experiment 108556 PARAMETER Experiment Name: Zm_Drought_P Parameter: Tissue Value: Aerial
  misc_feature: MA Experiment 108556 PARAMETER Experiment Name: Zm_Drought_P Parameter: Treatment Value: Drought vs. No Drought
  misc_feature: MA Experiment ID: 108559 Result: Up-regulated in Transcription
  misc_feature: MA Experiment 108559 PARAMETER Experiment Name: Zm_5mM_NO_P Parameter: Age (day) Value: 8
  misc_feature: MA Experiment 108559 PARAMETER Experiment Name: Zm_5mM_NO_P Parameter: Organism Value: Zea mays
  misc_feature: MA Experiment 108559 PARAMETER Experiment Name: Zm_5mM_NO_P Parameter: Plant Line Value: 35A19
  misc_feature: MA Experiment 108559 PARAMETER Experiment Name: Zm_5mM_NO_P Parameter: Timepoint (hr) Value: 12
  misc_feature: MA Experiment 108559 PARAMETER Experiment Name: Zm_5mM_NO_P Parameter: Tissue Value: Aerial
  misc_feature: MA Experiment 108559 PARAMETER Experiment Name: Zm_5mM_NO_P Parameter: Treatment Value: 5mM NO vs. No Treatment
  misc_feature: MA Experiment ID: 108687 Result: Up-regulated in Transcription
  misc_feature: MA Experiment 108687 PARAMETER Experiment Name: Zm_Embryos-Flowers__P Parameter: Tissue Value: Embryo vs. Aerial+
  misc_feature: MA Experiment ID: 108688 Result: Down-regulated in Transcription
  misc_feature: MA Experiment 108688 PARAMETER Experiment Name: Zm_Embryos-Flowers__P Parameter: Tissue Value: Immature Flowers vs. Aerial+
  misc_feature: MA Experiment ID: 20000479 Result: Up-regulated in Transcription
  misc_feature: MA Experiment 20000479 PARAMETER Experiment Name: Zm_Drought_P Parameter: Age (day) Value: 10
  misc_feature: MA Experiment 20000479 PARAMETER Experiment Name: Zm_Drought_P Parameter: Organism Value: Zea mays
  misc_feature: MA Experiment 20000479 PARAMETER Experiment Name: Zm_Drought_P Parameter: Plant Line Value: 35A19
  misc_feature: MA Experiment 20000479 PARAMETER Experiment Name: Zm_Drought_P Parameter: Timepoint (hr) Value: 48
  misc_feature: MA Experiment 20000479 PARAMETER Experiment Name: Zm_Drought_P Parameter: Tissue Value: Aerial
  misc_feature: MA Experiment 20000479 PARAMETER Experiment Name: Zm_Drought_P Parameter: Treatment Value: Drought vs. No Drought
  misc_feature: MA Experiment ID: 20000627 Result: Up-regulated in Transcription
  misc_feature: MA Experiment 20000627 PARAMETER Experiment Name: Zm_Herbicide-Treatments_P Parameter: Timepoint (hr) Value: 12
  misc_feature: MA Experiment 20000627 PARAMETER Experiment Name: Zm_Herbicide-Treatments_P Parameter: Tissue Value: Aerial
  misc_feature: MA Experiment 20000627 PARAMETER Experiment Name: Zm_Herbicide-Treatments_P Parameter: Treatment Value: Finale vs. No Treatment
  misc_feature: MA Experiment ID: 20001608 Result: Down-regulated in Transcription
  misc_feature: MA Experiment 20001608 PARAMETER Experiment Name: Zm_50ppm_KNO3_L-to-H_P Parameter: Age (day) Value: 21
  misc_feature: MA Experiment 20001608 PARAMETER Experiment Name: Zm_50ppm_KNO3_L-to-H_P Parameter: Organism Value: Zea mays
  misc_feature: MA Experiment 20001608 PARAMETER Experiment Name: Zm_50ppm_KNO3_L-to-H_P Parameter: Plant Line Value: 35A19
  misc_feature: MA Experiment 20001608 PARAMETER Experiment Name: Zm_50ppm_KNO3_L-to-H_P Parameter: Timepoint (hr) Value: 48
  misc_feature: MA Experiment 20001608 PARAMETER Experiment Name: Zm_50ppm_KNO3_L-to-H_P Parameter: Tissue Value: Shoots
  misc_feature: MA Experiment 20001608 PARAMETER Experiment Name: Zm_50ppm_KNO3_L-to-H_P Parameter: Treatment Value: 50ppm KNO3 vs. 50ppm KCl
gaaaccggccaccgggccggagcgaacccttagaagcgaccttggcccgtgaggaagccaatcagccagagacagaacaatccatccaccatgaacagcctgttctcgagctcatggaagcgcgacggcggggacatcgagtccggcggcgtggagatgtctgcgccgccgggcgccgcggcgggcgcgagcctggacaggttcttcgaggacgtggagtccatcaaggacgagctccgcgacctggagcgcatccagcggtcgctccacgacgccaacgaggggggaaagtcgatgcacgacgcggcggccgtgcgcggcctccgcgcgcggatggacgcggacgtggccgcggcgatcaagaaggccaaggtggtgaagctgcgcctcgagtcgctggaccgcgccaacgccgccaaccggtccgtgcccgggtgcgggccgggctcctccaccgaccgcacccggacgtccgtcgtggccgggctgcgcaagaagctccgggactcgatggagtccttctcgtcgctgcggtcccgcgtcgcggccgagtaccgggacacggtggcgcggcggtacttcacggtcacgggggcgcagcccgacgaggcgaccctggacgcgctggcggagtccggggaaggagagcggttcctgcagcgcgccatcgcggagcagggccaggggcgcggagaggtgctgggcgtggtggcggagatccaggancggcacggcgccgtggcggggctggagcgcagcctgctggagctgcagcaggtgttcaacgacatggccgtgctggtggccgcgcagggggagcagctggacgacatcgagggcaacgtcggccgcgccaggtccttcgtcgaccgcggacgcgagcagctgcaggtggcgcggaagcaccagaagagcacccgcaagtggaccttcatcgccatcatcatcctcctcgtcatcatcctcgtcatcgtcctccccatcgtgctcaagggcgtcaataagaactaggccgcctggcctgcgtaattcgttctagtttttcttttcgtggcctttgtatcatacatacggttcgttgatacggtcgtcttgattatatttttcttctt

SEQ ID NO: 8977 - protein, 333 aa, Zea mays subsp. mays
  peptide (1)..(333): Ceres Seq. ID no. 12402143
  misc_feature (209)..(333): Pfam Name: Amidohydrolase family Pfam Description: Amidohydrolase family
  misc_feature (50)..(302): Homolog of NCBI NO: 29829093 NR Description: putative translation initiation factor IF-2
  misc_feature (41)..(276): Homolog of NCBI NO: 25989121 NR Description: putative PHA synthase [Streptomyces aureofaciens]
  misc_feature (41)..(298): Homolog of NCBI NO: 25989121 NR Description: putative PHA synthase [Streptomyces aureofaciens]
  misc_feature (71)..(327): Homolog of NCBI NO: 17542802 NR Description: Putative nuclear protein, nematode specific
  misc_feature (102)..(333): Homolog of NCBI NO: 11024339 NR Description: PKSA putative O-methyltransferase; PKSA-ORF6
  misc_feature (29)..(318): Homolog of NCBI NO: 22960369 NR Description: hypothetical protein [Rhodobacter sphaeroides]
  misc_feature (76)..(304): Homolog of NCBI NO: 18025496 NR Description: EBNA-1 [cercopithicine herpesvirus 15]
  misc_feature (46)..(316): Homolog of NCBI NO: 23105951 NR Description: hypothetical protein [Azotobacter vinelandii]
  misc_feature (65)..(274): Homolog of NCBI NO: 13561998 NR Description: major ampullate spidroin 1 [Latrodectus
  misc_feature (58)..(283): Homolog of NCBI NO: 465445 NR Description: PROBABLE NUCLEAR ANTIGEN >gi|418708|pir||B45344
  misc_feature (242)..(242): Xaa is any aa, unknown or other
NRPPGRSEPLEATLAREEANQPETEQSIHHEQPVLELMEARRRGHRVRRRGDVCAAGRRGGREPGQVLRGRGVHQGRAPRPGAHPAVAPRRQRGGKVDARRGGRARPPRADGRGRGRGDQEGQGGEAAPRVAGPRQRRQPVRARVRAGLLHRPHPDVRRGRAAQEAPGLDGVLLVAAVPRRGRVPGHGGAAVLHGHGGAARRGDPGRAGGVRGRRAVPAARHRGAGPGARRGAGRGGGDPGXARRRGGAGAQPAGAAAGVQRHGRAGGRAGGAAGRHRGQRRPRQVLRRPRTRAAAGGAEAPEEHPQVDLHRHHHPPRHHPRHRPPHRAQGRQ

SEQ ID NO: 8978 - protein, 306 aa, Zea mays subsp. mays
  peptide (1)..(306): Ceres Seq. ID no. 12402144
  misc_feature (213)..(274): Pfam Name: SNARE domain Pfam Description: SNARE domain
  misc_feature (1)..(306): Homolog of NCBI NO: 15229865 NR Description: syntaxin SYP121; protein id: At3g11820.1, by cDNA: 38899., supported by cDNA: gi_20260503, supported by gi_4206788 [Arabidopsis thaliana]
  misc_feature (1)..(298): Homolog of NCBI NO: 4206787 NR Description: syntaxin-related protein Nt-syr1 [Nicotiana
  misc_feature (1)..(299): Homolog of NCBI NO: 15220328 NR Description: syntaxin SYP125; protein id: At1g11250.1 thaliana] >gi|28380142|sp|Q9SXB0|S125_ARATH Putative syntaxin 125
  misc_feature (1)..(297): Homolog of NCBI NO: 15219900 NR Description: syntaxin SYP124; protein id: At1g61290.1 thaliana] >gi|28380117|sp|O64791|S124_ARATH Putative syntaxin 124
  misc_feature (1)..(299): Homolog of NCBI NO: 15236285 NR Description: syntaxin SYP123; protein id: At4g03330.1, by cDNA: 37727. [Arabidopsis thaliana]
  misc_feature (1)..(296): Homolog of NCBI NO: 11358871 NR Description: syntaxin synt4 [imported] - Arabidopsis thaliana
  misc_feature (1)..(296): Homolog of NCBI NO: 15231205 NR Description: syntaxin SYP122; protein id: At3g52400.1, by cDNA: 37248., supported by cDNA: gi_15292946, supported by gi_20259662 [Arabidopsis thaliana]
  misc_feature (15)..(298): Homolog of NCBI NO: 29788865 NR Description: putative cytokinesis-specific syntaxin-related
  misc_feature (15)..(298): Homolog of NCBI NO: 5912543 NR Description: Knolle [Capsicum annuum]
  misc_feature (15)..(298): Homolog of NCBI NO: 28974542 NR Description: knolle [Antirrhinum majus]
  misc_feature (212)..(212): Xaa is any aa, unknown or other
MNSLFSSSWKRDGGDIESGGVEMSAPPGAAAGASLDRFFEDVESIKDELRDLERIQRSLHDANEGGKSMHDAAAVRGLRARMDADVAAAIKKAKVVKLRLESLDRANAANRSVPGCGPGSSTDRTRTSVVAGLRKKLRDSMESFSSLRSRVAAEYRDTVARRYFTVTGAQPDEATLDALAESGEGERFLQRAIAEQGQGRGEVLGVVAEIQXRHGAVAGLERSLLELQQVFNDMAVLVAAQGEQLDDIEGNVGRARSFVDRGREQLQVARKHQKSTRKWTFIAIIILLVIILVIVLPIVLKGVNKN

SEQ ID NO: 8979 - protein, 296 aa, Zea mays subsp. mays
  peptide (1)..(296): Ceres Seq. ID no. 12402145
  misc_feature (172)..(296): Pfam Name: Amidohydrolase family Pfam Description: Amidohydrolase family
  misc_feature (13)..(265): Homolog of NCBI NO: 29829093 NR Description: putative translation initiation factor IF-2
  misc_feature (4)..(239): Homolog of NCBI NO: 25989121 NR Description: putative PHA synthase [Streptomyces aureofaciens]
  misc_feature (4)..(261): Homolog of NCBI NO: 25989121 NR Description: putative PHA synthase [Streptomyces aureofaciens]
  misc_feature (34)..(290): Homolog of NCBI NO: 17542802 NR Description: Putative nuclear protein, nematode specific
  misc_feature (65)..(296): Homolog of NCBI NO: 11024339 NR Description: PKSA putative O-methyltransferase; PKSA-ORF6
  misc_feature (1)..(281): Homolog of NCBI NO: 22960369 NR Description: hypothetical protein [Rhodobacter sphaeroides]
  misc_feature (39)..(267): Homolog of NCBI NO: 18025496 NR Description: EBNA-1 [cercopithicine herpesvirus 15]
  misc_feature (9)..(279): Homolog of NCBI NO: 23105951 NR Description: hypothetical protein [Azotobacter vinelandii]
  misc_feature (28)..(237): Homolog of NCBI NO: 13561998 NR Description: major ampullate spidroin 1 [Latrodectus
  misc_feature (21)..(246): Homolog of NCBI NO: 465445 NR Description: PROBABLE NUCLEAR ANTIGEN >gi|418708|pir||B45344
  misc_feature (205)..(205): Xaa is any aa, unknown or other
MEARRRGHRVRRRGDVCAAGRRGGREPGQVLRGRGVHQGRAPRPGAHPAVAPRRQRGGKVDARRGGRARPPRADGRGRGRGDQEGQGGEAAPRVAGPRQRRQPVRARVRAGLLHRPHPDVRRGRAAQEAPGLDGVLLVAAVPRRGRVPGHGGAAVLHGHGGAARRGDPGRAGGVRGRRAVPAARHRGAGPGARRGAGRGGGDPGXARRRGGAGAQPAGAAAGVQRHGRAGGRAGGAAGRHRGQRRPRQVLRRPRTRAAAGGAEAPEEHPQVDLHRHHHPPRHHPRHRPPHRAQGRQ

SEQ ID NO: 8980 - DNA, 936 bp, Zea mays subsp. mays
  misc_feature (1)..(936): Ceres Seq. ID no. 12346933
  misc_feature: MA Experiment ID: 20000629 Result: Up-regulated in Transcription
  misc_feature: MA Experiment 20000629 PARAMETER Experiment Name: Zm_Herbicide-Treatments_P Parameter: Timepoint (hr) Value: 12
  misc_feature: MA Experiment 20000629 PARAMETER Experiment Name: Zm_Herbicide-Treatments_P Parameter: Tissue Value: Aerial
  misc_feature: MA Experiment 20000629 PARAMETER Experiment Name: Zm_Herbicide-Treatments_P Parameter: Treatment Value: Trimec vs. No Treatment
tcggatgacaagaaaggctcttcatcagggagtgaggggtccatctggccgaagtttgaaatcaccctgtcaaacagggaaaaggaagaggatttcctggtgttcaaaggatccaagctgcctcaaagacccaagaaaaaagctaaggtcatccagagaaccgtcaattttgtatgcccaggaacgtggctatgtgacttgactcttgaaagatatgaagtccgggagaagaaggtttccaagaagcgccccaggggattgaaagctatgcacgacatggacagtgactcggaataaataaaagaagatcactgaacatgagaagctgaatattagaaagaaggccaggacagatcctgcagatggaggccgacgagaaaacgtcctgatggaatgaatggccgtatcaacgattcgccacttctcgtgattgctactggagatcagtttgttccaaaaggacttatggagatcggaggacggccgaaatgtcaggaagctgcatggaagaacagaagagagccgcaggagctggaattcctggacattattattcagttccctctgtaaagcagcaacgctgttttgcaagcctcccatgctaatttcgcgctgccaaatattagcgtgatcgcgaagctagccagtcctggcgcgtctagtttgccgggttgtctgacaacaaaagttagtatgaatatgaaagggccttccttaatgttttttcccacttggtgctgtataaaggttcagtgtatattccattcaggagaatgagaaaaagttcaacactccagtgtgggtggattcaaaacaggcgacttttaattttgaaagtttcagtagatttgttagtttatagtttatattttgaaagtttcagtagtgtccaatggaactcgatgtgtaattcaaaacaggcagacttttaatttt

SEQ ID NO: 8981 - protein, 98 aa, Zea mays subsp. mays
  peptide (1)..(98): Ceres Seq. ID no. 12346934
  misc_feature (15)..(98): Homolog of NCBI NO: 30695924 NR Description: expressed protein [Arabidopsis thaliana]
  misc_feature (8)..(98): Homolog of NCBI NO: 30678969 NR Description: expressed protein [Arabidopsis thaliana] unknown protein [Arabidopsis thaliana]
  misc_feature (16)..(98): Homolog of NCBI NO: 7485821 NR Description: hypothetical protein F1C12.211 - Arabidopsis >gi|3046695|emb|CAA18257.1| putative protein [Arabidopsis >gi|7268825|emb|CAB79030.1| putative protein [Arabidopsis
  misc_feature (16)..(98): Homolog of NCBI NO: 30685058 NR Description: expressed protein [Arabidopsis thaliana] putative protein [Arabidopsis thaliana]
  misc_feature (17)..(98): Homolog of NCBI NO: 30103017 NR Description: unknown protein [Oryza sativa (japonica
  misc_feature (16)..(98): Homolog of NCBI NO: 21553974 NR Description: unknown [Arabidopsis thaliana]
  misc_feature (15)..(85): Homolog of NCBI NO: 25405821 NR Description: unknown protein, 25817-24837 [imported] -
  misc_feature (8)..(55): Homolog of NCBI NO: 6006854 NR Description: hypothetical protein [Arabidopsis thaliana]
  misc_feature (58)..(98): Homolog of NCBI NO: 6006854 NR Description: hypothetical protein [Arabidopsis thaliana]
  misc_feature (6)..(86): Homolog of NCBI NO: 34911178 NR Description: P0019E03.4 [Oryza sativa (japonica
SDDKKGSSSGSEGSIWPKFEITLSNREKEEDFLVFKGSKLPQRPKKKAKVIQRTVNFVCPGTWLCDLTLERYEVREKKVSKKRPRGLKAMHDMDSDSE

SEQ ID NO: 8982 - protein, 66 aa, Zea mays subsp. mays
  peptide (1)..(66): Ceres Seq. ID no. 12346935
RMTRKALHQGVRGPSGRSLKSPCQTGKRKRISWCSKDPSCLKDPRKKLRSSREPSILYAQERGYVT

SEQ ID NO: 8983 - protein, 65 aa, Zea mays subsp. mays
  peptide (1)..(65): Ceres Seq. ID no. 12346936
MTRKALHQGVRGPSGRSLKSPCQTGKRKRISWCSKDPSCLKDPRKKLRSSREPSILYAQERGYVT

SEQ ID NO: 8984 - DNA, 1528 bp, Zea mays subsp. mays
  misc_feature (1)..(1528): Ceres Seq. ID no. 12360551
  misc_feature: MA Experiment ID: 108527 Result: Down-regulated in Transcription
  misc_feature: MA Experiment 108527 PARAMETER Experiment Name: Zm_5mM_NO_P Parameter: Age (day) Value: 8
  misc_feature: MA Experiment 108527 PARAMETER Experiment Name: Zm_5mM_NO_P Parameter: Organism Value: Zea mays
  misc_feature: MA Experiment 108527 PARAMETER Experiment Name: Zm_5mM_NO_P Parameter: Plant Line Value: 35A19
  misc_feature: MA Experiment 108527 PARAMETER Experiment Name: Zm_5mM_NO_P Parameter: Timepoint (hr) Value: 6
  misc_feature: MA Experiment 108527 PARAMETER Experiment Name: Zm_5mM_NO_P Parameter: Tissue Value: Aerial
  misc_feature: MA Experiment 108527 PARAMETER Experiment Name: Zm_5mM_NO_P Parameter: Treatment Value: 5mM NO vs. No Treatment
  misc_feature: MA Experiment ID: 108529 Result: Up-regulated in Transcription
  misc_feature: MA Experiment 108529 PARAMETER Experiment Name: Zm_Imbibed_Seeds_P Parameter: Age (day) Value: 5 vs. 2
  misc_feature: MA Experiment 108529 PARAMETER Experiment Name: Zm_Imbibed_Seeds_P Parameter: Organism Value: Zea mays
  misc_feature: MA Experiment 108529 PARAMETER Experiment Name: Zm_Imbibed_Seeds_P Parameter: Plant Line Value: 35A19
  misc_feature: MA Experiment 108529 PARAMETER Experiment Name: Zm_Imbibed_Seeds_P Parameter: Tissue Value: Roots vs. Embryo
  misc_feature: MA Experiment ID: 108535 Result: Down-regulated in Transcription
  misc_feature: MA Experiment 108535 PARAMETER Experiment Name: Zm_Meristem_P Parameter: Age (day) Value: 8
  misc_feature: MA Experiment 108535 PARAMETER Experiment Name: Zm_Meristem_P Parameter: Organism Value: Zea mays
  misc_feature: MA Experiment 108535 PARAMETER Experiment Name: Zm_Meristem_P Parameter: Plant Line Value: 35A19
  misc_feature: MA Experiment 108535 PARAMETER Experiment Name: Zm_Meristem_P Parameter: Tissue Value: Root Meristem vs. Above Root Meristem
  misc_feature: MA Experiment ID: 108689 Result: Up-regulated in Transcription
  misc_feature: MA Experiment 108689 PARAMETER Experiment Name: Zm_Drought_Roots_P Parameter: Age (day) Value: 9
  misc_feature: MA Experiment 108689 PARAMETER Experiment Name: Zm_Drought_Roots_P Parameter: Organism Value: Zea mays
  misc_feature: MA Experiment 108689 PARAMETER Experiment Name: Zm_Drought_Roots_P Parameter: Plant Line Value: 35A19
  misc_feature: MA Experiment 108689 PARAMETER Experiment Name: Zm_Drought_Roots_P Parameter: Timepoint (hr) Value: 24
  misc_feature: MA Experiment 108689 PARAMETER Experiment Name: Zm_Drought_Roots_P Parameter: Tissue Value: Roots
  misc_feature: MA Experiment 108689 PARAMETER Experiment Name: Zm_Drought_Roots_P Parameter: Treatment Value: Drought vs. No Drought
  misc_feature: MA Experiment ID: 20000478 Result: Up-regulated in Transcription
  misc_feature: MA Experiment 20000478 PARAMETER Experiment Name: Zm_5mM_SA_P Parameter: Age (day) Value: 11
  misc_feature: MA Experiment 20000478 PARAMETER Experiment Name: Zm_5mM_SA_P Parameter: Organism Value: Zea mays
  misc_feature: MA Experiment 20000478 PARAMETER Experiment Name: Zm_5mM_SA_P Parameter: Plant Line Value: 35A19
  misc_feature: MA Experiment 20000478 PARAMETER Experiment Name: Zm_5mM_SA_P Parameter: Timepoint (hr) Value: 72
  misc_feature: MA Experiment 20000478 PARAMETER Experiment Name: Zm_5mM_SA_P Parameter: Tissue Value: Aerial
  misc_feature: MA Experiment 20000478 PARAMETER Experiment Name: Zm_5mM_SA_P Parameter: Treatment Value: 5mM SA vs. No Treatment
  misc_feature: MA Experiment ID: 20000492 Result: Down-regulated in Transcription
  misc_feature: MA Experiment 20000492 PARAMETER Experiment Name: Zm_Hybrid_Seed_Dev_P Parameter: DAP Value: 12
  misc_feature: MA Experiment 20000492 PARAMETER Experiment Name: Zm_Hybrid_Seed_Dev_P Parameter: Organism Value: Zea mays
  misc_feature: MA Experiment 20000492 PARAMETER Experiment Name: Zm_Hybrid_Seed_Dev_P Parameter: Plant Line Value: 35A19
  misc_feature: MA Experiment 20000492 PARAMETER Experiment Name: Zm_Hybrid_Seed_Dev_P Parameter: Tissue Value: Fert Kernel vs. Unfert Floret
  misc_feature: MA Experiment ID: 20000535 Result: Down-regulated in Transcription
  misc_feature: MA Experiment 20000535 PARAMETER Experiment Name: Zm_Hybrid_Seed_Dev_P Parameter: DAP Value: 30 vs. 12
  misc_feature: MA Experiment 20000535 PARAMETER Experiment Name: Zm_Hybrid_Seed_Dev_P Parameter: Organism Value: Zea mays
  misc_feature: MA Experiment 20000535 PARAMETER Experiment Name: Zm_Hybrid_Seed_Dev_P Parameter: Plant Line Value: 35A19
  misc_feature: MA Experiment 20000535 PARAMETER Experiment Name: Zm_Hybrid_Seed_Dev_P Parameter: Tissue Value: Embryo vs. Unfert Floret
gcacgagaccattacctagaacatcctaatcaaaagttttctcttgatcgctttgtcacttgaatccgtgcctgctctaacagagagcggagacgaccacgacgacggcgaggccaggctctgcgatggagcaggagccgcaccggcccatggagctgcccccgggcttccgcttccacccgaccgacgaggagctcatcacgcactacctggcccgcaaggccgccgacgcccgcttcgccgcgcttgccgtcgccgaggccgacctcaacaagtgcgagccctgggacctgccatcgctggcgaggatgggggagaaggagtggtacttcttctgcctcaaggaccgcaagtacccgacggggctgaggaccaaccgggccacggaggccgggtactggaaggccacgggcaaggacagggacgtcttcaggggcaaggcgctcgtcggttccaagaagacgctcgtcttctacacggggagggcgcccaggggcgagaagtccggatgggtcatgcacgagtaccgcctccacgccaagctccacggccacggccacggccaaggcgcagccgtcgtcgtcgtccccaaggccgccgggtccaagaacgagtgggtgctgtgcagggtgttcaagaagagcctggtcgtaggtggtgcagctgcagcagcagcaccaaccgcaggcaagaggggcggcacggagacgtcgtccaactacaagacgggcgacgtagaggccatcgcccacctccctccgctgatggacgtgtccggctccggctccggcgccggcgccgccgccgcggcggcggcacacgtgacctgcttctccgacgcgctggagggccagttcttggaccagacgacgaccacgccgccgccagaagccgccaccgccgccacggacgacgacggccacctcggcgccctcggcgcctcctcctcgcccttccagctgcccggcttcgcgcactactactacggcggcgggccgccgcacctgcaccagcaccacggcgccgccagcctggtgcagctcctggagggcagcgtgccgccgtgcaataagggcggcgagcgggagcgggagcggctgagcgcgtcgcaggacacggggctcacctccgacgtcaaccccgagatctcctcctcctccggccaacgcttcgaccacgaccacgaccatgaccaccacctctgctgctggggctactgatcgtcgattcgatgagcctacgacgactaccgagcgcgcatcatgcatgcgtcgcgttattactagcgattagtgtatagcacactgctgtaaataaaacatctactagtactacatctgcgtgaggtcgacgatcggccgtgtggtggtggtggtgcgtggcatgcatgcgtcgagctgcctacgtttcattatctgctcgtgtgatttgttactgtagacgagtgtgggggtgtgtaattagcattgttgatgtattattattcacgatttggtggaataatatctccttggttaatgacgccgcc

SEQ ID NO: 8985 - protein, 364 aa, Zea mays subsp. mays
  peptide (1)..(364): Ceres Seq. ID no. 12360552
  misc_feature (11)..(137): Pfam Name: No apical meristem (NAM) protein Pfam Description: No apical meristem (NAM) protein
  misc_feature (1)..(352): Homolog of NCBI NO: 38344965 NR Description: OSJNBa0072F16.10 [Oryza sativa (japonica
  misc_feature (9)..(352): Homolog of NCBI NO: 27529810 NR Description: OsNAC2 protein [Oryza sativa]
  misc_feature (9)..(345): Homolog of NCBI NO: 27529808 NR Description: OsNAC1 protein [Oryza sativa]
MEQEPHRPMELPPGFRFHPTDEELITHYLARKAADARFAALAVAEADLNKCEPWDLPSLARMGEKEWYFFCLKDRKYPTGLRTNRATEAGYWKATGKDRDVFRGKALVGSKKTLVFYTGRAPRGEKSGWVMHEYRLHAKLHGHGHGQGAAVVVVPKAAGSKNEWVLCRVFKKSLVVGGAAAAAAPTAGKRGGTETSSNYKTGDVEAIAHLPPLMDVSGSGSGAGAAAAAAAHVTCFSDALEGQFLDQTTTTPPPEAATAATDDDGHLGALGASSSPFQLPGFAHYYYGGGPPHLHQHHGAASLVQLLEGSVPPCNKGGERERERLSASQDTGLTSDVNPEISSSSGQRFDHDHDHDHHLCCWGY

SEQ ID NO: 8986 - protein, 356 aa, Zea mays subsp. mays
  peptide (1)..(356): Ceres Seq. ID no. 12360553
  misc_feature (3)..(129): Pfam Name: No apical meristem (NAM) protein Pfam Description: No apical meristem (NAM) protein
  misc_feature (1)..(344): Homolog of NCBI NO: 38344965 NR Description: OSJNBa0072F16.10 [Oryza sativa (japonica
  misc_feature (1)..(344): Homolog of NCBI NO: 27529810 NR Description: OsNAC2 protein [Oryza sativa]
  misc_feature (1)..(337): Homolog of NCBI NO: 27529808 NR Description: OsNAC1 protein [Oryza sativa]
MELPPGFRFHPTDEELITHYLARKAADARFAALAVAEADLNKCEPWDLPSLARMGEKEWYFFCLKDRKYPTGLRTNRATEAGYWKATGKDRDVFRGKALVGSKKTLVFYTGRAPRGEKSGWVMHEYRLHAKLHGHGHGQGAAVVVVPKAAGSKNEWVLCRVFKKSLVVGGAAAAAAPTAGKRGGTETSSNYKTGDVEAIAHLPPLMDVSGSGSGAGAAAAAAAHVTCFSDALEGQFLDQTTTTPPPEAATAATDDDGHLGALGASSSPFQLPGFAHYYYGGGPPHLHQHHGAASLVQLLEGSVPPCNKGGERERERLSASQDTGLTSDVNPEISSSSGQRFDHDHDHDHHLCCWGY

SEQ ID NO: 8987 - protein, 303 aa, Zea mays subsp. mays
  peptide (1)..(303): Ceres Seq. ID no. 12360554
  misc_feature (1)..(76): Pfam Name: No apical meristem (NAM) protein Pfam Description: No apical meristem (NAM) protein
  misc_feature (1)..(291): Homolog of NCBI NO: 38344965 NR Description: OSJNBa0072F16.10 [Oryza sativa (japonica
  misc_feature (1)..(291): Homolog of NCBI NO: 27529810 NR Description: OsNAC2 protein [Oryza sativa]
  misc_feature (1)..(284): Homolog of NCBI NO: 27529808 NR Description: OsNAC1 protein [Oryza sativa]
MGEKEWYFFCLKDRKYPTGLRTNRATEAGYWKATGKDRDVFRGKALVGSKKTLVFYTGRAPRGEKSGWVMHEYRLHAKLHGHGHGQGAAVVVVPKAAGSKNEWVLCRVFKKSLVVGGAAAAAAPTAGKRGGTETSSNYKTGDVEAIAHLPPLMDVSGSGSGAGAAAAAAAHVTCFSDALEGQFLDQTTTTPPPEAATAATDDDGHLGALGASSSPFQLPGFAHYYYGGGPPHLHQHHGAASLVQLLEGSVPPCNKGGERERERLSASQDTGLTSDVNPEISSSSGQRFDHDHDHDHHLCCWGY

SEQ ID NO: 8988 - DNA, 1033 bp, Zea mays subsp. mays
  misc_feature (1)..(1033): Ceres Seq. ID no. 12365844
  misc_feature: MA Experiment ID: 108527 Result: Up-regulated in Transcription
  misc_feature: MA Experiment 108527 PARAMETER Experiment Name: Zm_5mM_NO_P Parameter: Age (day) Value: 8
  misc_feature: MA Experiment 108527 PARAMETER Experiment Name: Zm_5mM_NO_P Parameter: Organism Value: Zea mays
  misc_feature: MA Experiment 108527 PARAMETER Experiment Name: Zm_5mM_NO_P Parameter: Plant Line Value: 35A19
  misc_feature: MA Experiment 108527 PARAMETER Experiment Name: Zm_5mM_NO_P Parameter: Timepoint (hr) Value: 6
  misc_feature: MA Experiment 108527 PARAMETER Experiment Name: Zm_5mM_NO_P Parameter: Tissue Value: Aerial
  misc_feature: MA Experiment 108527 PARAMETER Experiment Name: Zm_5mM_NO_P Parameter: Treatment Value: 5mM NO vs. No Treatment
  misc_feature: MA Experiment ID: 108528 Result: Down-regulated in Transcription
  misc_feature: MA Experiment 108528 PARAMETER Experiment Name: Zm_Imbibed_Seeds_P Parameter: Age (day) Value: 5 vs. 2
  misc_feature: MA Experiment 108528 PARAMETER Experiment Name: Zm_Imbibed_Seeds_P Parameter: Organism Value: Zea mays
  misc_feature: MA Experiment 108528 PARAMETER Experiment Name: Zm_Imbibed_Seeds_P Parameter: Plant Line Value: 35A19
  misc_feature: MA Experiment 108528 PARAMETER Experiment Name: Zm_Imbibed_Seeds_P Parameter: Tissue Value: Aerial vs. Embryo
  misc_feature: MA Experiment ID: 108530 Result: Down-regulated in Transcription
  misc_feature: MA Experiment 108530 PARAMETER Experiment Name: Zm_Imbibed_Seeds_P Parameter: Age (day) Value: 6 vs. 2
  misc_feature: MA Experiment 108530 PARAMETER Experiment Name: Zm_Imbibed_Seeds_P Parameter: Organism Value: Zea mays
  misc_feature: MA Experiment 108530 PARAMETER Experiment Name: Zm_Imbibed_Seeds_P Parameter: Plant Line Value: 35A19
  misc_feature: MA Experiment 108530 PARAMETER Experiment Name: Zm_Imbibed_Seeds_P Parameter: Tissue Value: Aerial vs. Embryo
  misc_feature: MA Experiment ID: 108540 Result: Up-regulated in Transcription
  misc_feature: MA Experiment 108540 PARAMETER Experiment Name: Zm_20percent_PEG_P Parameter: Age (day) Value: 8
  misc_feature: MA Experiment 108540 PARAMETER Experiment Name: Zm_20percent_PEG_P Parameter: Organism Value: Zea mays
  misc_feature: MA Experiment 108540 PARAMETER Experiment Name: Zm_20percent_PEG_P Parameter: Plant Line Value: 35A19
  misc_feature: MA Experiment 108540 PARAMETER Experiment Name: Zm_20percent_PEG_P Parameter: Timepoint (hr) Value: 6
  misc_feature: MA Experiment 108540 PARAMETER Experiment Name: Zm_20percent_PEG_P Parameter: Tissue Value: Aerial
  misc_feature: MA Experiment 108540 PARAMETER Experiment Name: Zm_20percent_PEG_P Parameter: Treatment Value: 20percent PEG vs. No Treatment
  misc_feature: MA Experiment ID: 108543 Result: Down-regulated in Transcription
  misc_feature: MA Experiment ID: 108545 Result: Down-regulated in Transcription
  misc_feature: MA Experiment 108545 PARAMETER Experiment Name: Zm_Imbibed_Seeds_P Parameter: Age (day) Value: 3 vs. 2
  misc_feature: MA Experiment 108545 PARAMETER Experiment Name: Zm_Imbibed_Seeds_P Parameter: Organism Value: Zea mays
  misc_feature: MA Experiment 108545 PARAMETER Experiment Name: Zm_Imbibed_Seeds_P Parameter: Plant Line Value: 35A19
  misc_feature: MA Experiment 108545 PARAMETER Experiment Name: Zm_Imbibed_Seeds_P Parameter: Tissue Value: Aerial vs. Embryo
  misc_feature: MA Experiment ID: 108546 Result: Down-regulated in Transcription
  misc_feature: MA Experiment 108546 PARAMETER Experiment Name: Zm_Imbibed_Seeds_P Parameter: Age (day) Value: 3 vs. 2
  misc_feature: MA Experiment 108546 PARAMETER Experiment Name: Zm_Imbibed_Seeds_P Parameter: Organism Value: Zea mays
  misc_feature: MA Experiment 108546 PARAMETER Experiment Name: Zm_Imbibed_Seeds_P Parameter: Plant Line Value: 35A19
  misc_feature: MA Experiment 108546 PARAMETER Experiment Name: Zm_Imbibed_Seeds_P Parameter: Tissue Value: Roots vs. Embryo
  misc_feature: MA Experiment ID: 108556 Result: Up-regulated in Transcription
  misc_feature: MA Experiment 108556 PARAMETER Experiment Name: Zm_Drought_P Parameter: Age (day) Value: 9
  misc_feature: MA Experiment 108556 PARAMETER Experiment Name: Zm_Drought_P Parameter: Organism Value: Zea mays
  misc_feature: MA Experiment 108556 PARAMETER Experiment Name: Zm_Drought_P Parameter: Plant Line Value: 35A19
  misc_feature: MA Experiment 108556 PARAMETER Experiment Name: Zm_Drought_P Parameter: Timepoint (hr) Value: 24
  misc_feature: MA Experiment 108556 PARAMETER Experiment Name: Zm_Drought_P Parameter: Tissue Value: Aerial
  misc_feature: MA Experiment 108556 PARAMETER Experiment Name: Zm_Drought_P Parameter: Treatment Value: Drought vs. No Drought
  misc_feature: MA Experiment ID: 108559 Result: Up-regulated in Transcription
  misc_feature: MA Experiment 108559 PARAMETER Experiment Name: Zm_5mM_NO_P Parameter: Age (day) Value: 8
  misc_feature: MA Experiment 108559 PARAMETER Experiment Name: Zm_5mM_NO_P Parameter: Organism Value: Zea mays
  misc_feature: MA Experiment 108559 PARAMETER Experiment Name: Zm_5mM_NO_P Parameter: Plant Line Value: 35A19
  misc_feature: MA Experiment 108559 PARAMETER Experiment Name: Zm_5mM_NO_P Parameter: Timepoint (hr) Value: 12
  misc_feature: MA Experiment 108559 PARAMETER Experiment Name: Zm_5mM_NO_P Parameter: Tissue Value: Aerial
  misc_feature: MA Experiment 108559 PARAMETER Experiment Name: Zm_5mM_NO_P Parameter: Treatment Value: 5mM NO vs. No Treatment
  misc_feature: MA Experiment ID: 108597 Result: Up-regulated in Transcription
  misc_feature: MA Experiment 108597 PARAMETER Experiment Name: Zm_100uM_ABA_P Parameter: Age (day) Value: 9
  misc_feature: MA Experiment 108597 PARAMETER Experiment Name: Zm_100uM_ABA_P Parameter: Organism Value: Zea mays
  misc_feature: MA Experiment 108597 PARAMETER Experiment Name: Zm_100uM_ABA_P Parameter: Plant Line Value: 35A19
  misc_feature: MA Experiment 108597 PARAMETER Experiment Name: Zm_100uM_ABA_P Parameter: Timepoint (hr) Value: 24
  misc_feature: MA Experiment 108597 PARAMETER Experiment Name: Zm_100uM_ABA_P Parameter: Tissue Value: Aerial
  misc_feature: MA Experiment 108597 PARAMETER Experiment Name: Zm_100uM_ABA_P Parameter: Treatment Value: 100uM ABA vs. No Treatment
  misc_feature: MA Experiment ID: 20000478 Result: Up-regulated in Transcription
  misc_feature: MA Experiment 20000478 PARAMETER Experiment Name: Zm_5mM_SA_P Parameter: Age (day) Value: 11
  misc_feature: MA Experiment 20000478 PARAMETER Experiment Name: Zm_5mM_SA_P Parameter: Organism Value: Zea mays
  misc_feature: MA Experiment 20000478 PARAMETER Experiment Name: Zm_5mM_SA_P Parameter: Plant Line Value: 35A19
  misc_feature: MA Experiment 20000478 PARAMETER Experiment Name: Zm_5mM_SA_P Parameter: Timepoint (hr) Value: 72
  misc_feature: MA Experiment 20000478 PARAMETER Experiment Name: Zm_5mM_SA_P Parameter: Tissue Value: Aerial
  misc_feature: MA Experiment 20000478 PARAMETER Experiment Name: Zm_5mM_SA_P Parameter: Treatment Value: 5mM SA vs. No Treatment
  misc_feature: MA Experiment ID: 20000626 Result: Up-regulated in Transcription
  misc_feature: MA Experiment 20000626 PARAMETER Experiment Name: Zm_Herbicide-Treatments_P Parameter: Timepoint (hr) Value: 12
  misc_feature: MA Experiment 20000626 PARAMETER Experiment Name: Zm_Herbicide-Treatments_P Parameter: Tissue Value: Aerial
  misc_feature: MA Experiment 20000626 PARAMETER Experiment Name: Zm_Herbicide-Treatments_P Parameter: Treatment Value: Roundup vs. No Treatment
cctgatttcctgaaacacagatcatcatcattcatggtcatggctatggcaaactcggcaacgatcctgaccgtcgttctggctctcgggctagcgttcctccgcgccgcagctccggcctccgcgcagaactgcggctgcccgccaggctactgctgcagcaagttcggttactgcggcaccagcttcgactactgcaatgccaacacgtgccagtccggcccgtgcacggccgggggcgccggtagcggcggcggcgcgaacgtgagtggcgtcgtcaccgacgcatttctcagcggcatcaagtcccaggccgggagcgggtgcgagggcagtagcttgagcttctactcgcgaagggcgttcctgagcgccgccagctcgtatcccggcttcgcccgtgcaggatcggaggccgacggcaagcgcgaggtcgccgccttcttcgcgcacgtcacgcacgagaccggccatttctgctacgtcagcgagatcaacaagaacaacagctactgcaactcgagcaacacgcagtggccgtgcgccccgggcaagaagtactacggacgcggcccgcctgcagatctcgtggaactacaactacggtcccgccgggaggagcgtcggcttcgacgggctggtgaacccggacatggtggcgcaggaccccgtggtctcgttcaagacggcgctctggttctggatgagcaacgcgcaccaggtcatgccgcgggggttcggcgccactatccgtgccatcaacggcgccctcgagtgcaacggcgagaaccccgccgccgtgaacgcgcgcgtgggctactacaaggagtactgcaagcagttcggcgtcggcccagggaacaacctcacctgctagaacctattcaagtgttgtgttgggttcatgcatatgcgggcttcaatggaaaactcagtccgctgtagtgaagctcagagtttgagagtacctgtttattatacaagaaaaatgaagcagttcctaatatacagattatatcatttaattaatggg

SEQ ID NO: 8989 - protein, 314 aa, Zea mays subsp. mays
  peptide (1)..(314): Ceres Seq. ID no. 12365845
  misc_feature (92)..(192): Pfam Name: Chitinase class I Pfam Description: Chitinase class I
  misc_feature (26)..(192): Homolog of NCBI NO: 15213848 NR Description: chitinase-B [Saccharum officinarum]
  misc_feature (26)..(192): Homolog of NCBI NO: 283037 NR Description: chitinase (EC 3.2.1.14) A - maize
  misc_feature (16)..(192): Homolog of NCBI NO: 15529119 NR Description: chitinase-B1 [Sorghum bicolor]
  misc_feature (26)..(192): Homolog of NCBI NO: 116329 NR Description: ENDOCHITINASE A PRECURSOR (SEED CHITINASE A)
  misc_feature (26)..(192): Homolog of NCBI NO: 15213852 NR Description: chitinase-B [Sorghum halepense]
  misc_feature (26)..(192): Homolog of NCBI NO: 15529117 NR Description: chitinase-B [Sorghum bicolor]
  misc_feature (26)..(192): Homolog of NCBI NO: 15213850 NR Description: chitinase-B [Sorghum arundinaceum]
  misc_feature (26)..(192): Homolog of NCBI NO: 15529121 NR Description: chitinase-B [Sorghum bicolor]
  misc_feature (26)..(192): Homolog of NCBI NO: 116333 NR Description: ENDOCHITINASE B PRECURSOR (SEED CHITINASE B)
  misc_feature (26)..(192): Homolog of NCBI NO: 482985 NR Description: chitinase (EC 3.2.1.14) precursor - maize
PDFLKHRSSSFMVMAMANSATILTVVLALGLAFLRAAAPASAQNCGCPPGYCCSKFGYCGTSFDYCNANTCQSGPCTAGGAGSGGGANVSGVVTDAFLSGIKSQAGSGCEGSSLSFYSRRAFLSAASSYPGFARAGSEADGKREVAAFFAHVTHETGHFCYVSEINKNNSYCNSSNTQWPCAPGKKYYGRGPPADLVELQLRSRREERRLRRAGEPGHGGAGPRGLVQDGALVLDEQRAPGHAAGVRRHYPCHQRRPRVQRREPRRRERARGLLQGVLQAVRRRPREQPHLLEPIQVLCWVHAYAGFNGKLSPL

SEQ ID NO: 8990 - protein, 303 aa, Zea mays subsp. mays
  peptide (1)..(303): Ceres Seq. ID no. 12365846
  misc_feature (81)..(181): Pfam Name: Chitinase class I Pfam Description: Chitinase class I
  misc_feature (15)..(181): Homolog of NCBI NO: 15213848 NR Description: chitinase-B [Saccharum officinarum]
  misc_feature (15)..(181): Homolog of NCBI NO: 283037 NR Description: chitinase (EC 3.2.1.14) A - maize
  misc_feature (5)..(181): Homolog of NCBI NO: 15529119 NR Description: chitinase-B1 [Sorghum bicolor]
  misc_feature (15)..(181): Homolog of NCBI NO: 116329 NR Description: ENDOCHITINASE A PRECURSOR (SEED CHITINASE A)
  misc_feature (15)..(181): Homolog of NCBI NO: 15213852 NR Description: chitinase-B [Sorghum halepense]
  misc_feature (15)..(181): Homolog of NCBI NO: 15529117 NR Description: chitinase-B [Sorghum bicolor]
  misc_feature (15)..(181): Homolog of NCBI NO: 15213850 NR Description: chitinase-B [Sorghum arundinaceum]
  misc_feature (15)..(181): Homolog of NCBI NO: 15529121 NR Description: chitinase-B [Sorghum bicolor]
  misc_feature (15)..(181): Homolog of NCBI NO: 116333 NR Description: ENDOCHITINASE B PRECURSOR (SEED CHITINASE B)
  misc_feature (15)..(181): Homolog of NCBI NO: 482985 NR Description: chitinase (EC 3.2.1.14) precursor - maize
MVMAMANSATILTVVLALGLAFLRAAAPASAQNCGCPPGYCCSKFGYCGTSFDYCNANTCQSGPCTAGGAGSGGGANVSGVVTDAFLSGIKSQAGSGCEGSSLSFYSRRAFLSAASSYPGFARAGSEADGKREVAAFFAHVTHETGHFCYVSEINKNNSYCNSSNTQWPCAPGKKYYGRGPPADLVELQLRSRREERRLRRAGEPGHGGAGPRGLVQDGALVLDEQRAPGHAAGVRRHYPCHQRRPRVQRREPRRRERARGLLQGVLQAVRRRPREQPHLLEPIQVLCWVHAYAGFNGKLSPL

SEQ ID NO: 8991 - protein, 301 aa, Zea mays subsp. mays
  peptide (1)..(301): Ceres Seq. ID no. 12365847
  misc_feature (79)..(179): Pfam Name: Chitinase class I Pfam Description: Chitinase class I
  misc_feature (13)..(179): Homolog of NCBI NO: 15213848 NR Description: chitinase-B [Saccharum officinarum]
  misc_feature (13)..(179): Homolog of NCBI NO: 283037 NR Description: chitinase (EC 3.2.1.14) A - maize
  misc_feature (3)..(179): Homolog of NCBI NO: 15529119 NR Description: chitinase-B1 [Sorghum bicolor]
  misc_feature (13)..(179): Homolog of NCBI NO: 116329 NR Description: ENDOCHITINASE A PRECURSOR (SEED CHITINASE A)
  misc_feature (13)..(179): Homolog of NCBI NO: 15213852 NR Description: chitinase-B [Sorghum halepense]
  misc_feature (13)..(179): Homolog of NCBI NO: 15529117 NR Description: chitinase-B [Sorghum bicolor]
  misc_feature (13)..(179): Homolog of NCBI NO: 15213850 NR Description: chitinase-B [Sorghum arundinaceum]
  misc_feature (13)..(179): Homolog of NCBI NO: 15529121 NR Description: chitinase-B [Sorghum bicolor]
  misc_feature (13)..(179): Homolog of NCBI NO: 116333 NR Description: ENDOCHITINASE B PRECURSOR (SEED CHITINASE B)
  misc_feature (13)..(179): Homolog of NCBI NO: 482985 NR Description: chitinase (EC 3.2.1.14) precursor - maize
MAMANSATILTVVLALGLAFLRAAAPASAQNCGCPPGYCCSKFGYCGTSFDYCNANTCQSGPCTAGGAGSGGGANVSGVVTDAFLSGIKSQAGSGCEGSSLSFYSRRAFLSAASSYPGFARAGSEADGKREVAAFFAHVTHETGHFCYVSEINKNNSYCNSSNTQWPCAPGKKYYGRGPPADLVELQLRSRREERRLRRAGEPGHGGAGPRGLVQDGALVLDEQRAPGHAAGVRRHYPCHQRRPRVQRREPRRRERARGLLQGVLQAVRRRPREQPHLLEPIQVLCWVHAYAGFNGKLSPL

SEQ ID NO: 8992 - DNA, 1403 bp, Zea mays subsp. mays
  misc_feature (1)..(1403): Ceres Seq. ID no. 12350590
  misc_feature: MA Experiment ID: 108522 Result: Down-regulated in Transcription
  misc_feature: MA Experiment 108522 PARAMETER Experiment Name: Zm_42deg_Heat_P Parameter: Age (day) Value: 8
  misc_feature: MA Experiment 108522 PARAMETER Experiment Name: Zm_42deg_Heat_P Parameter: Organism Value: Zea mays
  misc_feature: MA Experiment 108522 PARAMETER Experiment Name: Zm_42deg_Heat_P Parameter: Plant Line Value: 35A19
  misc_feature: MA Experiment 108522 PARAMETER Experiment Name: Zm_42deg_Heat_P Parameter: Temperature (deg C) Value: 42 vs. 22
  misc_feature: MA Experiment 108522 PARAMETER Experiment Name: Zm_42deg_Heat_P Parameter: Timepoint (hr) Value: 1
  misc_feature: MA Experiment 108522 PARAMETER Experiment Name: Zm_42deg_Heat_P Parameter: Tissue Value: Aerial
aacttcttgccttctcgcgctcgcctccgtttcgtgtcggctcgctctaaacgtgagatcggggaggtggtggacttggggtcgttgtggtatcggcggcgagccgcgggggcctagggtttcctgccttcctggtttggatccgcgccctggcccatgggatccggaggcttcgcggccgcggtggccgcgtgcccctccgccgccgaggccttccttaagtactatggtattgtatcaggaggtacaagtgcggagtcaagacaagcattggttgagctttcactagctatagacggaattgaaggaatgagggatgtgatatttgctgatattccaaagctcattccatttattgatctggaggatatgagcctattcagttgcttctacgattttgttttcttcatctgccgtgaaaagggtcaaaagagtgtcactattcagagagctgtagcagcatggaggattgttctaagtggaaggttccgtttgcttgatcgatggtgtaacttcgttgagaagtaccaacgccataacatatccgaggatacttggcagcagctgctagctttcagcaggtgtgtaaatgaagatctggaaggttatgacccacgaggtgcttggcctgttctgattgatgattttgttgagcaaatgcacagaatttatcactccactgactgcagcagtgcgatggaatcacagtgtaacatttccagtacccttaaaggactggatcctcaacctggatcaaagaggaaatgcccacacctcaaatccaatgaagaggatgtagagctttcggatagctttacgcgctctgtccatcttacaccaataaagcgactcaaggaaagccatgacgccagatatggagcgggggaatccgccaaaactacccatttctctaatagttcctctggtggttaccacgaggatatgaatttacacaactcaagaggttaccttcagaactccccctgtaatgttgaggatgccctgtccaaagggtttgagggttgtatttcgatgaaatgtccattttgatgtaacaaatttcgtgtcagcccagaagctatacattcccttttagcggcaaaatcatcctgtgtgtgtatctagtcattttgtgcaaaaaaaatgcagtaattgaatgcattttttttaaaatgctttaaagtgtattgatcagcatcggacctgtttttagaggcatcggtatgaagggagggctgttggttgtgtttgcttgacagcaaatccctcccattcaataccccgcactttctgaaaattgcgacttccatattcccttcccttgagctttgttaagacagtattgtattacaagatctgaatcgctgcaagcgtgcagaataatgaatgccatctttctatgc

SEQ ID NO: 8993 - protein, 297 aa, Zea mays subsp. mays
  peptide (1)..(297): Ceres Seq. ID no. 12350591
  misc_feature (1)..(297): Homolog of NCBI NO: 33146550 NR Description: leucine zipper protein-like [Oryza sativa
  misc_feature (1)..(170): Homolog of NCBI NO: 34913252 NR Description: P0011H09.36 [Oryza sativa (japonica
  misc_feature (35)..(292): Homolog of NCBI NO: 15228555 NR Description: unknown protein; protein id: At3g28970.1 thaliana] >gi|7939547|dbj|BAA95750.1| gene_id:K5K13.10~unknown [Arabidopsis thaliana] >gi|26452857|dbj|BAC43507.1| unknown
  misc_feature (49)..(190): Homolog of NCBI NO: 24664675 NR Description: CG7427-PA [Drosophila melanogaster]
  misc_feature (31)..(166): Homolog of NCBI NO: 34784120 NR Description: Unknown (protein for MGC:66414) [Danio rerio]
  misc_feature (31)..(166): Homolog of NCBI NO: 18700658 NR Description: leucine zipper protein [Homo sapiens]
  misc_feature (31)..(166): Homolog of NCBI NO: 6166507 NR Description: RP42 [Mus musculus] >gi|12842984|dbj|BAB25813.1| protein product [Mus musculus] >gi|18044904|gb|AAH20161.1| testis transcript 3, pseudogene [Mus musculus]
  misc_feature (35)..(166): Homolog of NCBI NO: 26325272 NR Description: unnamed protein product [Mus musculus]
  misc_feature (31)..(166): Homolog of NCBI NO: 34857167 NR Description: similar to RP42 homolog [Rattus norvegicus]
  misc_feature (31)..(166): Homolog of NCBI NO: 15826860 NR Description: testis derived transcript 3 [Mus musculus]
MGSGGFAAAVAACPSAAEAFLKYYGIVSGGTSAESRQALVELSLAIDGIEGMRDVIFADIPKLIPFIDLEDMSLFSCFYDFVFFICREKGQKSVTIQRAVAAWRIVLSGRFRLLDRWCNFVEKYQRHNISEDTWQQLLAFSRCVNEDLEGYDPRGAWPVLIDDFVEQMHRIYHSTDCSSAMESQCNISSTLKGLDPQPGSKRKCPHLKSNEEDVELSDSFTRSVHLTPIKRLKESHDARYGAGESAKTTHFSNSSSGGYHEDMNLHNSRGYLQNSPCNVEDALSKGFEGCISMKCPF

SEQ ID NO: 8994 - protein, 246 aa, Zea mays subsp. mays
  peptide (1)..(246): Ceres Seq. ID no. 12350592
  misc_feature (1)..(246): Homolog of NCBI NO: 33146550 NR Description: leucine zipper protein-like [Oryza sativa
  misc_feature (1)..(119): Homolog of NCBI NO: 34913252 NR Description: P0011H09.36 [Oryza sativa (japonica
  misc_feature (1)..(241): Homolog of NCBI NO: 15228555 NR Description: unknown protein; protein id: At3g28970.1 thaliana] >gi|7939547|dbj|BAA95750.1| gene_id:K5K13.10~unknown [Arabidopsis thaliana] >gi|26452857|dbj|BAC43507.1| unknown
  misc_feature (1)..(139): Homolog of NCBI NO: 24664675 NR Description: CG7427-PA [Drosophila melanogaster]
  misc_feature (1)..(115): Homolog of NCBI NO: 34784120 NR Description: Unknown (protein for MGC:66414) [Danio rerio]
  misc_feature (1)..(115): Homolog of NCBI NO: 18700658 NR Description: leucine zipper protein [Homo sapiens]
  misc_feature (1)..(115): Homolog of NCBI NO: 6166507 NR Description: RP42 [Mus musculus] >gi|12842984|dbj|BAB25813.1| protein product [Mus musculus] >gi|18044904|gb|AAH20161.1| testis transcript 3, pseudogene [Mus musculus]
  misc_feature (1)..(115): Homolog of NCBI NO: 26325272 NR Description: unnamed protein product [Mus musculus]
  misc_feature (1)..(115): Homolog of NCBI NO: 34857167 NR Description: similar to RP42 homolog [Rattus norvegicus]
  misc_feature (1)..(115): Homolog of NCBI NO: 15826860 NR Description: testis derived transcript 3 [Mus musculus]
MRDVIFADIPKLIPFIDLEDMSLFSCFYDFVFFICREKGQKSVTIQRAVAAWRIVLSGRFRLLDRWCNFVEKYQRHNISEDTWQQLLAFSRCVNEDLEGYDPRGAWPVLIDDFVEQMHRIYHSTDCSSAMESQCNISSTLKGLDPQPGSKRKCPHLKSNEEDVELSDSFTRSVHLTPIKRLKESHDARYGAGESAKTTHFSNSSSGGYHEDMNLHNSRGYLQNSPCNVEDALSKGFEGCISMKCPF

SEQ ID NO: 8995 - protein, 226 aa, Zea mays subsp. mays
  peptide (1)..(226): Ceres Seq. ID no. 12350593
  misc_feature (1)..(226): Homolog of NCBI NO: 33146550 NR Description: leucine zipper protein-like [Oryza sativa
  misc_feature (1)..(99): Homolog of NCBI NO: 34913252 NR Description: P0011H09.36 [Oryza sativa (japonica
  misc_feature (1)..(221): Homolog of NCBI NO: 15228555 NR Description: unknown protein; protein id: At3g28970.1 thaliana] >gi|7939547|dbj|BAA95750.1| gene_id:K5K13.10~unknown [Arabidopsis thaliana] >gi|26452857|dbj|BAC43507.1| unknown
  misc_feature (1)..(119): Homolog of NCBI NO: 24664675 NR Description: CG7427-PA [Drosophila melanogaster]
  misc_feature (1)..(95): Homolog of NCBI NO: 34784120 NR Description: Unknown (protein for MGC:66414) [Danio rerio]
  misc_feature (1)..(95): Homolog of NCBI NO: 18700658 NR Description: leucine zipper protein [Homo sapiens]
  misc_feature (1)..(95): Homolog of NCBI NO: 6166507 NR Description: RP42 [Mus musculus] >gi|12842984|dbj|BAB25813.1| protein product [Mus musculus] >gi|18044904|gb|AAH20161.1| testis transcript 3, pseudogene [Mus musculus]
  misc_feature (1)..(95): Homolog of NCBI NO: 26325272 NR Description: unnamed protein product [Mus musculus]
  misc_feature (1)..(95): Homolog of NCBI NO: 34857167 NR Description: similar to RP42 homolog [Rattus norvegicus]
  misc_feature (1)..(95): Homolog of NCBI NO: 15826860 NR Description: testis derived transcript 3 [Mus musculus]
MSLFSCFYDFVFFICREKGQKSVTIQRAVAAWRIVLSGRFRLLDRWCNFVEKYQRHNISEDTWQQLLAFSRCVNEDLEGYDPRGAWPVLIDDFVEQMHRIYHSTDCSSAMESQCNISSTLKGLDPQPGSKRKCPHLKSNEEDVELSDSFTRSVHLTPIKRLKESHDARYGAGESAKTTHFSNSSSGGYHEDMNLHNSRGYLQNSPCNVEDALSKGFEGCISMKCPF

SEQ ID NO: 8996 - DNA, 644 bp, Zea mays subsp. mays
  misc_feature (1)..(644): Ceres Seq. ID no. 12402849
  misc_feature: MA Experiment ID: 108504 Result: Down-regulated in Transcription
  misc_feature: MA Experiment 108504 PARAMETER Experiment Name: Zm_Drought_P Parameter: Age (day) Value: 8
  misc_feature: MA Experiment 108504 PARAMETER Experiment Name: Zm_Drought_P Parameter: Organism Value: Zea mays
  misc_feature: MA Experiment 108504 PARAMETER Experiment Name: Zm_Drought_P Parameter: Plant Line Value: 35A19
  misc_feature: MA Experiment 108504 PARAMETER Experiment Name: Zm_Drought_P Parameter: Timepoint (hr) Value: 12
  misc_feature: MA Experiment 108504 PARAMETER Experiment Name: Zm_Drought_P Parameter: Tissue Value: Aerial
  misc_feature: MA Experiment 108504 PARAMETER Experiment Name: Zm_Drought_P Parameter: Treatment Value: Drought vs. No Drought
  misc_feature: MA Experiment ID: 108522 Result: Down-regulated in Transcription
  misc_feature: MA Experiment 108522 PARAMETER Experiment Name: Zm_42deg_Heat_P Parameter: Age (day) Value: 8
  misc_feature: MA Experiment 108522 PARAMETER Experiment Name: Zm_42deg_Heat_P Parameter: Organism Value: Zea mays
  misc_feature: MA Experiment 108522 PARAMETER Experiment Name: Zm_42deg_Heat_P Parameter: Plant Line Value: 35A19
  misc_feature: MA Experiment 108522 PARAMETER Experiment Name: Zm_42deg_Heat_P Parameter: Temperature (deg C) Value: 42 vs. 22
  misc_feature: MA Experiment 108522 PARAMETER Experiment Name: Zm_42deg_Heat_P Parameter: Timepoint (hr) Value: 1
  misc_feature: MA Experiment 108522 PARAMETER Experiment Name: Zm_42deg_Heat_P Parameter: Tissue Value: Aerial
  misc_feature: MA Experiment ID: 108523 Result: Up-regulated in Transcription
  misc_feature: MA Experiment 108523 PARAMETER Experiment Name: Zm_42deg_Heat_P Parameter: Age (day) Value: 8
  misc_feature: MA Experiment 108523 PARAMETER Experiment Name: Zm_42deg_Heat_P Parameter: Organism Value: Zea mays
  misc_feature: MA Experiment 108523 PARAMETER Experiment Name: Zm_42deg_Heat_P Parameter: Plant Line Value: 35A19
  misc_feature: MA Experiment 108523 PARAMETER Experiment Name: Zm_42deg_Heat_P Parameter: Temperature (deg C) Value: 42 vs. 22
  misc_feature: MA Experiment 108523 PARAMETER Experiment Name: Zm_42deg_Heat_P Parameter: Timepoint (hr) Value: 6
  misc_feature: MA Experiment 108523 PARAMETER Experiment Name: Zm_42deg_Heat_P Parameter: Tissue Value: Aerial
  misc_feature: MA Experiment ID: 108527 Result: Down-regulated in Transcription
  misc_feature: MA Experiment 108527 PARAMETER Experiment Name: Zm_5mM_NO_P Parameter: Age (day) Value: 8
  misc_feature: MA Experiment 108527 PARAMETER Experiment Name: Zm_5mM_NO_P Parameter: Organism Value: Zea mays
  misc_feature: MA Experiment 108527 PARAMETER Experiment Name: Zm_5mM_NO_P Parameter: Plant Line Value: 35A19
  misc_feature: MA Experiment 108527 PARAMETER Experiment Name: Zm_5mM_NO_P Parameter: Timepoint (hr) Value: 6
  misc_feature: MA Experiment 108527 PARAMETER Experiment Name: Zm_5mM_NO_P Parameter: Tissue Value: Aerial
  misc_feature: MA Experiment 108527 PARAMETER Experiment Name: Zm_5mM_NO_P Parameter: Treatment Value: 5mM NO vs. No Treatment
  misc_feature: MA Experiment ID: 108529 Result: Up-regulated in Transcription
  misc_feature: MA Experiment 108529 PARAMETER Experiment Name: Zm_Imbibed_Seeds_P Parameter: Age (day) Value: 5 vs. 2
  misc_feature: MA Experiment 108529 PARAMETER Experiment Name: Zm_Imbibed_Seeds_P Parameter: Organism Value: Zea mays
  misc_feature: MA Experiment 108529 PARAMETER Experiment Name: Zm_Imbibed_Seeds_P Parameter: Plant Line Value: 35A19
  misc_feature: MA Experiment 108529 PARAMETER Experiment Name: Zm_Imbibed_Seeds_P Parameter: Tissue Value: Roots vs. Embryo
  misc_feature: MA Experiment ID: 108534 Result: Up-regulated in Transcription
  misc_feature: MA Experiment 108534 PARAMETER Experiment Name: Zm_4deg_Cold_P Parameter: Age (hr) Value: 8
  misc_feature: MA Experiment 108534 PARAMETER Experiment Name: Zm_4deg_Cold_P Parameter: Organism Value: Zea mays
  misc_feature: MA Experiment 108534 PARAMETER Experiment Name: Zm_4deg_Cold_P Parameter: Plant Line Value: 35A19
  misc_feature: MA Experiment 108534 PARAMETER Experiment Name: Zm_4deg_Cold_P Parameter: Temperature (deg C) Value: 4 vs. 22
  misc_feature: MA Experiment 108534 PARAMETER Experiment Name: Zm_4deg_Cold_P Parameter: Timepoint (hr) Value: 6
  misc_feature: MA Experiment 108534 PARAMETER Experiment Name: Zm_4deg_Cold_P Parameter: Tissue Value: Aerial
  misc_feature: MA Experiment ID: 108535 Result: Down-regulated in Transcription
  misc_feature: MA Experiment 108535 PARAMETER Experiment Name: Zm_Meristem_P Parameter: Age (day) Value: 8
  misc_feature: MA Experiment 108535 PARAMETER Experiment Name: Zm_Meristem_P Parameter: Organism Value: Zea mays
  misc_feature: MA Experiment 108535 PARAMETER Experiment Name: Zm_Meristem_P Parameter: Plant Line Value: 35A19
  misc_feature: MA Experiment 108535 PARAMETER Experiment Name: Zm_Meristem_P Parameter: Tissue Value: Root Meristem vs. Above Root Meristem
  misc_feature: MA Experiment ID: 108539 Result: Up-regulated in Transcription
  misc_feature: MA Experiment 108539 PARAMETER Experiment Name: Zm_20percent_PEG_P Parameter: Age (day) Value: 8
  misc_feature: MA Experiment 108539 PARAMETER Experiment Name: Zm_20percent_PEG_P Parameter: Organism Value: Zea mays
  misc_feature: MA Experiment 108539 PARAMETER Experiment Name: Zm_20percent_PEG_P Parameter: Plant Line Value: 35A19
  misc_feature: MA Experiment 108539 PARAMETER Experiment Name: Zm_20percent_PEG_P Parameter: Timepoint (hr) Value: 1
  misc_feature: MA Experiment 108539 PARAMETER Experiment Name: Zm_20percent_PEG_P Parameter: Tissue Value: Aerial
  misc_feature: MA Experiment 108539 PARAMETER Experiment Name: Zm_20percent_PEG_P Parameter: Treatment Value: 20percent PEG vs. No Treatment
  misc_feature: MA Experiment ID: 108543 Result: Down-regulated in Transcription
  misc_feature: MA Experiment ID: 108546 Result: Up-regulated in Transcription
  misc_feature: MA Experiment 108546 PARAMETER Experiment Name: Zm_Imbibed_Seeds_P Parameter: Age (day) Value: 3 vs. 2
  misc_feature: MA Experiment 108546 PARAMETER Experiment Name: Zm_Imbibed_Seeds_P Parameter: Organism Value: Zea mays
  misc_feature: MA Experiment 108546 PARAMETER Experiment Name: Zm_Imbibed_Seeds_P Parameter: Plant Line Value: 35A19
  misc_feature: MA Experiment 108546 PARAMETER Experiment Name: Zm_Imbibed_Seeds_P Parameter: Tissue Value: Roots vs. Embryo
  misc_feature: MA Experiment ID: 108597 Result: Down-regulated in Transcription
  misc_feature: MA Experiment 108597 PARAMETER Experiment Name: Zm_100uM_ABA_P Parameter: Age (day) Value: 9
  misc_feature: MA Experiment 108597 PARAMETER Experiment Name: Zm_100uM_ABA_P Parameter: Organism Value: Zea mays
  misc_feature: MA Experiment 108597 PARAMETER Experiment Name: Zm_100uM_ABA_P Parameter: Plant Line Value: 35A19
  misc_feature: MA Experiment 108597 PARAMETER Experiment Name: Zm_100uM_ABA_P Parameter: Timepoint (hr) Value: 24
  misc_feature: MA Experiment 108597 PARAMETER Experiment Name: Zm_100uM_ABA_P Parameter: Tissue Value: Aerial
  misc_feature: MA Experiment 108597 PARAMETER Experiment Name: Zm_100uM_ABA_P Parameter: Treatment Value: 100uM ABA vs. No Treatment
  misc_feature: MA Experiment ID: 108689 Result: Down-regulated in Transcription
  misc_feature: MA Experiment 108689 PARAMETER Experiment Name: Zm_Drought_Roots_P Parameter: Age (day) Value: 9
  misc_feature: MA Experiment 108689 PARAMETER Experiment Name: Zm_Drought_Roots_P Parameter: Organism Value: Zea mays
  misc_feature: MA Experiment 108689 PARAMETER Experiment Name: Zm_Drought_Roots_P Parameter: Plant Line Value: 35A19
  misc_feature: MA Experiment 108689 PARAMETER Experiment Name: Zm_Drought_Roots_P Parameter: Timepoint (hr) Value: 24
  misc_feature: MA Experiment 108689 PARAMETER Experiment Name: Zm_Drought_Roots_P Parameter: Tissue Value: Roots
  misc_feature: MA Experiment 108689 PARAMETER Experiment Name: Zm_Drought_Roots_P Parameter: Treatment Value: Drought vs. No Drought
  misc_feature: MA Experiment ID: 20000477 Result: Down-regulated in Transcription
  misc_feature: MA Experiment 20000477 PARAMETER Experiment Name: Zm_5mM_SA_P Parameter: Age (day) Value: 10
  misc_feature: MA Experiment 20000477 PARAMETER Experiment Name: Zm_5mM_SA_P Parameter: Organism Value: Zea mays
  misc_feature: MA Experiment 20000477 PARAMETER Experiment Name: Zm_5mM_SA_P Parameter: Plant Line Value: 35A19
  misc_feature: MA Experiment 20000477 PARAMETER Experiment Name: Zm_5mM_SA_P Parameter: Timepoint (hr) Value: 48
  misc_feature: MA Experiment 20000477 PARAMETER Experiment Name: Zm_5mM_SA_P Parameter: Tissue Value: Aerial
  misc_feature: MA Experiment 20000477 PARAMETER Experiment Name: Zm_5mM_SA_P Parameter: Treatment Value: 5mM SA vs. No Treatment
  misc_feature: MA Experiment ID: 20000478 Result: Down-regulated in Transcription
  misc_feature: MA Experiment 20000478 PARAMETER Experiment Name: Zm_5mM_SA_P Parameter: Age (day) Value: 11
  misc_feature: MA Experiment 20000478 PARAMETER Experiment Name: Zm_5mM_SA_P Parameter: Organism Value: Zea mays
  misc_feature: MA Experiment 20000478 PARAMETER Experiment Name: Zm_5mM_SA_P Parameter: Plant Line Value: 35A19
  misc_feature: MA Experiment 20000478 PARAMETER Experiment Name: Zm_5mM_SA_P Parameter: Timepoint (hr) Value: 72
  misc_feature: MA Experiment 20000478 PARAMETER Experiment Name: Zm_5mM_SA_P Parameter: Tissue Value: Aerial
  misc_feature: MA Experiment 20000478 PARAMETER Experiment Name: Zm_5mM_SA_P Parameter: Treatment Value: 5mM SA vs. No Treatment
  misc_feature: MA Experiment ID: 20000488 Result: Up-regulated in Transcription
  misc_feature: MA Experiment 20000488 PARAMETER Experiment Name: Zm_50mM_NH4NO3_L_to_H_P Parameter: Organism Value: Zea mays
  misc_feature: MA Experiment 20000488 PARAMETER Experiment Name: Zm_50mM_NH4NO3_L_to_H_P Parameter: Timepoint (hr) Value: 8
  misc_feature: MA Experiment 20000488 PARAMETER Experiment Name: Zm_50mM_NH4NO3_L_to_H_P Parameter: Tissue Value: Leaves
  misc_feature: MA Experiment 20000488 PARAMETER Experiment Name: Zm_50mM_NH4NO3_L_to_H_P Parameter: Treatment Value: 50mM NH4NO3 vs. 100mM Mannitol
  misc_feature: MA Experiment ID: 20000492 Result: Up-regulated in Transcription
  misc_feature: MA Experiment 20000492 PARAMETER Experiment Name: Zm_Hybrid_Seed_Dev_P Parameter: DAP Value: 12
  misc_feature: MA Experiment 20000492 PARAMETER Experiment Name: Zm_Hybrid_Seed_Dev_P Parameter: Organism Value: Zea mays
  misc_feature: MA Experiment 20000492 PARAMETER Experiment Name: Zm_Hybrid_Seed_Dev_P Parameter: Plant Line Value: 35A19
  misc_feature: MA Experiment 20000492 PARAMETER Experiment Name: Zm_Hybrid_Seed_Dev_P Parameter: Tissue Value: Fert Kernel vs. Unfert Floret
  misc_feature: MA Experiment ID: 20000533 Result: Up-regulated in Transcription
  misc_feature: MA Experiment 20000533 PARAMETER Experiment Name: Zm_0.001percent_MeJA_P Parameter: Age (day) Value: 11
  misc_feature: MA Experiment 20000533 PARAMETER Experiment Name: Zm_0.001percent_MeJA_P Parameter: Organism Value: Zea mays
  misc_feature: MA Experiment 20000533 PARAMETER Experiment Name: Zm_0.001percent_MeJA_P Parameter: Plant Line Value: 35A19
  misc_feature: MA Experiment 20000533 PARAMETER Experiment Name: Zm_0.001percent_MeJA_P Parameter: Timepoint (hr) Value: 72
  misc_feature: MA Experiment 20000533 PARAMETER Experiment Name: Zm_0.001percent_MeJA_P Parameter: Tissue Value: Aerial
  misc_feature: MA Experiment 20000533 PARAMETER Experiment Name: Zm_0.001percent_MeJA_P Parameter: Treatment Value: 0.001percent MeJA vs. No Treatment
  misc_feature: MA Experiment ID: 20000534 Result: Up-regulated in Transcription
  misc_feature: MA Experiment 20000534 PARAMETER Experiment Name: Zm_Hybrid_Pollen_P Parameter: Age (day) Value: 8
  misc_feature: MA Experiment 20000534 PARAMETER Experiment Name: Zm_Hybrid_Pollen_P Parameter: Organism Value: Zea mays
  misc_feature: MA Experiment 20000534 PARAMETER Experiment Name: Zm_Hybrid_Pollen_P Parameter: Plant Line Value: 35A19
  misc_feature: MA Experiment 20000534 PARAMETER Experiment Name: Zm_Hybrid_Pollen_P Parameter: Tissue Value: Pollen vs. Aerial
  misc_feature: MA Experiment ID: 20000626 Result: Up-regulated in Transcription
  misc_feature: MA Experiment 20000626 PARAMETER Experiment Name: Zm_Herbicide-Treatments_P Parameter: Timepoint (hr) Value: 12
  misc_feature: MA Experiment 20000626 PARAMETER Experiment Name: Zm_Herbicide-Treatments_P Parameter: Tissue Value: Aerial
  misc_feature: MA Experiment 20000626 PARAMETER Experiment Name: Zm_Herbicide-Treatments_P Parameter: Treatment Value: Roundup vs. No Treatment
  misc_feature: MA Experiment ID: 20000627 Result: Up-regulated in Transcription
  misc_feature: MA Experiment 20000627 PARAMETER Experiment Name: Zm_Herbicide-Treatments_P Parameter: Timepoint (hr) Value: 12
  misc_feature: MA Experiment 20000627 PARAMETER Experiment Name: Zm_Herbicide-Treatments_P Parameter: Tissue Value: Aerial
  misc_feature: MA Experiment 20000627 PARAMETER Experiment Name: Zm_Herbicide-Treatments_P Parameter: Treatment Value: Finale vs. No Treatment
  misc_feature: MA Experiment ID: 20001612 Result: Up-regulated in Transcription
  misc_feature: MA Experiment 20001612 PARAMETER Experiment Name: Zm_50ppm_KNO3_L-to-H_P Parameter: Age (day) Value: 19
  misc_feature: MA Experiment 20001612 PARAMETER Experiment Name: Zm_50ppm_KNO3_L-to-H_P Parameter: Organism Value: Zea mays
  misc_feature: MA Experiment 20001612 PARAMETER Experiment Name: Zm_50ppm_KNO3_L-to-H_P Parameter: Plant Line Value: 35A19
  misc_feature: MA Experiment 20001612 PARAMETER Experiment Name: Zm_50ppm_KNO3_L-to-H_P Parameter: Timepoint (hr) Value: 8
  misc_feature: MA Experiment 20001612 PARAMETER Experiment Name: Zm_50ppm_KNO3_L-to-H_P Parameter: Tissue Value: Roots
  misc_feature: MA Experiment 20001612 PARAMETER Experiment Name: Zm_50ppm_KNO3_L-to-H_P Parameter: Treatment Value: 50ppm KNO3 vs. 50ppm KCl
  misc_feature: MA Experiment ID: 20001613 Result: Up-regulated in Transcription
  misc_feature: MA Experiment 20001613 PARAMETER Experiment Name: Zm_50ppm_KNO3_L-to-H_P Parameter: Age (day) Value: 20
  misc_feature: MA Experiment 20001613 PARAMETER Experiment Name: Zm_50ppm_KNO3_L-to-H_P Parameter: Organism Value: Zea mays
  misc_feature: MA Experiment 20001613 PARAMETER Experiment Name: Zm_50ppm_KNO3_L-to-H_P Parameter: Plant Line Value: 35A19
  misc_feature: MA Experiment 20001613 PARAMETER Experiment Name: Zm_50ppm_KNO3_L-to-H_P Parameter: Timepoint (hr) Value: 24
  misc_feature: MA Experiment 20001613 PARAMETER Experiment Name: Zm_50ppm_KNO3_L-to-H_P Parameter: Tissue Value: Roots
  misc_feature: MA Experiment 20001613 PARAMETER Experiment Name: Zm_50ppm_KNO3_L-to-H_P Parameter: Treatment Value: 50ppm KNO3 vs. 50ppm KCl
accacacccaccccacgaaaccgtaagaagcgcagagtgtgagagagagaggagcatcaaggacgacgtgggcaagatgatgcaggtgttcgtgaagacgctggcggggaagacgatcacgctggaggtggagggcagcgacgacgccgtcgagaacgtgaaggccatgatccagggcaaggaaggcatcccgccggaggagcagcgcctcgtcttcgcgggcaagcagctggacgacgacggccgcaccctggccgactacggcgtccagaaggagtcgacgctgcacctggagctgcgcctccgcggcggcagcaggggcggctaccccatggggatcccgcccagcctccgcgagctcgcgcagaagtacaacgagaacaagatggtctgccgcaagtgctatgcgcggcttccgcctagggcaaccaactgccgcaagaagaagtgtgggcacagtaacgagctgaggtcgaagaaaaggttcatgtccaagattggcgggaaatgatcggcttttgtcattgcgtgacatatatggagcatcagctgaaatttcttagacgcttaataatttttactttaacgccgtggttgtgatcttttactgaataaagttgtagtagaaacaaaaaattcgtgcc

SEQ ID NO: 8997 - protein, 169 aa, Zea mays subsp. mays
  peptide (1)..(169): Ceres Seq. ID no. 12402850
  misc_feature (27)..(102): Pfam Name: Ubiquitin family Pfam Description: Ubiquitin family
  misc_feature (27)..(161): Homolog of NCBI NO: 17554758 NR Description: Ubiquitin UBQ-2, Ribosomal Protein, Large subunit
  misc_feature (27)..(161): Homolog of NCBI NO: 39588931 NR Description: Hypothetical protein CBG15773 [Caenorhabditis
  misc_feature (27)..(161): Homolog of NCBI NO: 485518 NR Description: ubiquitin / ribosomal protein CEP52 - rice
  misc_feature (27)..(161): Homolog of NCBI NO: 2558539 NR Description: ubiquitin-ribosomal protein fusion protein
  misc_feature (27)..(161): Homolog of NCBI NO: 15187109 NR Description: ubiquitin [Branchiostoma belcheri]
  misc_feature (27)..(161): Homolog of NCBI NO: 4507761 NR Description: ubiquitin and ribosomal protein L40 precursor; amino acid fusion protein; ubiquitin carboxyl extension protein
  misc_feature (27)..(161): Homolog of NCBI NO: 11138788 NR Description: ubiquitin-like protein [Wuchereria bancrofti]
  misc_feature (27)..(161): Homolog of NCBI NO: 13569612 NR Description: ubiquitin A-52 residue ribosomal protein fusion
  misc_feature (27)..(161): Homolog of NCBI NO: 6633991 NR Description: ubiquitin [Oncorhynchus mykiss]
  misc_feature (27)..(163): Homolog of NCBI NO: 70653 NR Description: ubiquitin / ribosomal protein CEP52 - slime mold
PHPPHETVRSAECERERSIKDDVGKMMQVFVKTLAGKTITLEVEGSDDAVENVKAMIQGKEGIPPEEQRLVFAGKQLDDDGRTLADYGVQKESTLHLELRLRGGSRGGYPMGIPPSLRELAQKYNENKMVCRKCYARLPPRATNCRKKKCGHSNELRSKKRFMSKIGGK

SEQ ID NO: 8998 - protein, 144 aa, Zea mays subsp. mays
  peptide (1)..(144): Ceres Seq. ID no. 12402851
  misc_feature (2)..(77): Pfam Name: Ubiquitin family Pfam Description: Ubiquitin family
  misc_feature (2)..(136): Homolog of NCBI NO: 17554758 NR Description: Ubiquitin UBQ-2, Ribosomal Protein, Large subunit
  misc_feature (2)..(136): Homolog of NCBI NO: 39588931 NR Description: Hypothetical protein CBG15773 [Caenorhabditis
  misc_feature (2)..(136): Homolog of NCBI NO: 485518 NR Description: ubiquitin / ribosomal protein CEP52 - rice
  misc_feature (2)..(136): Homolog of NCBI NO: 2558539 NR Description: ubiquitin-ribosomal protein fusion protein
  misc_feature (2)..(136): Homolog of NCBI NO: 15187109 NR Description: ubiquitin [Branchiostoma belcheri]
  misc_feature (2)..(136): Homolog of NCBI NO: 4507761 NR Description: ubiquitin and ribosomal protein L40 precursor; amino acid fusion protein; ubiquitin carboxyl extension protein
  misc_feature (2)..(136): Homolog of NCBI NO: 13569612 NR Description: ubiquitin A-52 residue ribosomal protein fusion
  misc_feature (2)..(136): Homolog of NCBI NO: 11138788 NR Description: ubiquitin-like protein [Wuchereria bancrofti]
  misc_feature (2)..(136): Homolog of NCBI NO: 6633991 NR Description: ubiquitin [Oncorhynchus mykiss]
  misc_feature (2)..(138): Homolog of NCBI NO: 70653 NR Description: ubiquitin / ribosomal protein CEP52 - slime mold
MMQVFVKTLAGKTITLEVEGSDDAVENVKAMIQGKEGIPPEEQRLVFAGKQLDDDGRTLADYGVQKESTLHLELRLRGGSRGGYPMGIPPSLRELAQKYNENKMVCRKCYARLPPRATNCRKKKCGHSNELRSKKRFMSKIGGK

SEQ ID NO: 8999 - protein, 143 aa, Zea mays subsp. mays
  peptide (1)..(143): Ceres Seq. ID no. 12402852
  misc_feature (1)..(76): Pfam Name: Ubiquitin family Pfam Description: Ubiquitin family
  misc_feature (1)..(135): Homolog of NCBI NO: 39588931 NR Description: Hypothetical protein CBG15773 [Caenorhabditis
  misc_feature (1)..(135): Homolog of NCBI NO: 485518 NR Description: ubiquitin / ribosomal protein CEP52 - rice
  misc_feature (1)..(135): Homolog of NCBI NO: 2558539 NR Description: ubiquitin-ribosomal protein fusion protein
  misc_feature (1)..(135): Homolog of NCBI NO: 15187109 NR Description: ubiquitin [Branchiostoma belcheri]
  misc_feature (1)..(135): Homolog of NCBI NO: 4507761 NR Description: ubiquitin and ribosomal protein L40 precursor; amino acid fusion protein; ubiquitin carboxyl extension protein
  misc_feature (1)..(135): Homolog of NCBI NO: 17554758 NR Description: Ubiquitin UBQ-2, Ribosomal Protein, Large subunit
  misc_feature (1)..(135): Homolog of NCBI NO: 11138788 NR Description: ubiquitin-like protein [Wuchereria bancrofti]
  misc_feature (1)..(135): Homolog of NCBI NO: 13569612 NR Description: ubiquitin A-52 residue ribosomal protein fusion
  misc_feature (1)..(135): Homolog of NCBI NO: 6633991 NR Description: ubiquitin [Oncorhynchus mykiss]
  misc_feature (1)..(137): Homolog of NCBI NO: 70653 NR Description: ubiquitin / ribosomal protein CEP52 - slime mold
MQVFVKTLAGKTITLEVEGSDDAVENVKAMIQGKEGIPPEEQRLVFAGKQLDDDGRTLADYGVQKESTLHLELRLRGGSRGGYPMGIPPSLRELAQKYNENKMVCRKCYARLPPRATNCRKKKCGHSNELRSKKRFMSKIGGK

SEQ ID NO: 9000 - DNA, 1319 bp, Zea mays subsp. mays
  misc_feature (1)..(1319): Ceres Seq. ID no. 12407555
  misc_feature: MA Experiment ID: 108544 Result: Down-regulated in Transcription
ctgtaactggagtacttagtacgggcagtctatagcttctccattgcccggtttgcaagcaaggaattgatgaacaagcatggggctggccggccgtctgggctttgcgggcagggcaaggacgccgccagctaccacgtgctgtccttcctcctcggcgccgctctccccactgccctcctcttctacctcgcgtccgacccggctcggcgagggcttatccagcatctcaccgagcagctgggggagcagccgaaccccgacgacccagcagctagccggcgccactgatcacactgctcctacttctcctacctcccaaggtcaagagtccgaatttgcagaactggctgagctgctacccagagtcgccaccgacgacgacaggacggtgatcctcacgtcagtgaacgaagcatttgcgaggcctgactcgttgctcggcctgttccgcgagagcttcccgggccggcgaggggaccgagcacctccttgaccatgtcctcgtcgtcgccgtggacgccatggcgttcgtccactgcaaggccgtgcacccacactgctaccgcctcgaggtggattccgccacgtacctcagctccgagagcagcttcttgagcgcggcctacgtggagctcgtctgggccaagctctcgctgcagcagcgcgtcctcgagctcggctacaacttcctcttcacggacgtggacgtcgtgtggttgcgcaacccgttccggcacatcagcgtgtacccggacatgacgacgtcgagcgacatattccacggcgacgccaacagcctcgacaactggcccaacaccggcttctactacgtcaaggcaacgaaccggacggtggagatgctgcggcggtggcgggctgcgcggaggaggttccctccgaaccacgagcaggccatcttcaaccagatcaagcacgagctcgccgccgacctcggggtgcgcatccagttcctcgacacggcgcgttcgccggcttctgccggatcttccacagtgacatgggcgcgcgtgcaccatgcacgccaactgctgcttcgggctcgctaacaagctgcacgacctcagggaagtgctcggccagtggaggaactacaccgtccttccgccgctggagaagaagagccgaaagttcatctggaaggatcccggcaagtgcggaacgccggacaaaaagaattggtcgataaatacatgagatcacgcatccctagaagcgactagggcactgggctgcctgatataattctcgtttttcaaccacaaattggtgaaacaaataaaatggtatatgttgtt

SEQ ID NO: 9001 - protein, 181 aa, Zea mays subsp. mays
  peptide (1)..(181): Ceres Seq. ID no. 12407556
  misc_feature (1)..(154): Homolog of NCBI NO: 19386738 NR Description: P0678F11.28 [Oryza sativa (japonica
  misc_feature (1)..(153): Homolog of NCBI NO: 19386741 NR Description: P0678F11.31 [Oryza sativa (japonica
  misc_feature (1)..(154): Homolog of NCBI NO: 34897440 NR Description: putative regulatory protein [Oryza sativa
  misc_feature (1)..(153): Homolog of NCBI NO: 34897442 NR Description: putative regulatory protein [Oryza sativa
  misc_feature (1)..(173): Homolog of NCBI NO: 19386737 NR Description: P0678F11.26 [Oryza sativa (japonica
  misc_feature (1)..(154): Homolog of NCBI NO: 19386795 NR Description: OJ1485_B09.3 [Oryza sativa (japonica
  misc_feature (1)..(153): Homolog of NCBI NO: 34904674 NR Description: P0446G09.1 [Oryza sativa (japonica >gi|28564589|dbj|BAC57756.1| putative regulatory protein [Oryza
  misc_feature (1)..(154): Homolog of NCBI NO: 19386742 NR Description: P0678F11.32 [Oryza sativa (japonica
  misc_feature (1)..(153): Homolog of NCBI NO: 15235236 NR Description: hypothetical protein common family; protein id:
  misc_feature (1)..(153): Homolog of NCBI NO: 18395292 NR Description: unknown protein; protein id: At2g02060.1
MAFVHCKAVHPHCYRLEVDSATYLSSESSFLSAAYVELVWAKLSLQQRVLELGYNFLFTDVDVVWLRNPFRHISVYPDMTTSSDIFHGDANSLDNWPNTGFYYVKATNRTVEMLRRWRAARRRFPPNHEQAIFNQIKHELAADLGVRIQFLDTARSPASAGSSTVTWARVHHARQLLLRAR

SEQ ID NO: 9002 - protein, 138 aa, Zea mays subsp. mays
  peptide (1)..(138): Ceres Seq. ID no. 12407557
  misc_feature (76)..(128): Homolog of NCBI NO: 19386738 NR Description: P0678F11.28 [Oryza sativa (japonica
  misc_feature (42)..(133): Homolog of NCBI NO: 19386741 NR Description: P0678F11.31 [Oryza sativa (japonica
  misc_feature (21)..(137): Homolog of NCBI NO: 34897440 NR Description: putative regulatory protein [Oryza sativa
  misc_feature (74)..(128): Homolog of NCBI NO: 34897442 NR Description: putative regulatory protein [Oryza sativa
  misc_feature (57)..(133): Homolog of NCBI NO: 19386737 NR Description: P0678F11.26 [Oryza sativa (japonica
  misc_feature (24)..(128): Homolog of NCBI NO: 19386795 NR Description: OJ1485_B09.3 [Oryza sativa (japonica
  misc_feature (41)..(134): Homolog of NCBI NO: 34904674 NR Description: P0446G09.1 [Oryza sativa (japonica >gi|28564589|dbj|BAC57756.1| putative regulatory protein [Oryza
  misc_feature (24)..(128): Homolog of NCBI NO: 19386742 NR Description: P0678F11.32 [Oryza sativa (japonica
  misc_feature (71)..(128): Homolog of NCBI NO: 15235236 NR Description: hypothetical protein common family; protein id:
  misc_feature (73)..(135): Homolog of NCBI NO: 18395292 NR Description: unknown protein; protein id: At2g02060.1
MGLAGRLGFAGRARTPPATTCCPSSSAPLSPLPSSSTSRPTRLGEGLSSISPSSWGSSRTPTTQQLAGATDHTAPTSPTSQGQESEFAELAELLPRVATDDDRTVILTSVNEAFARPDSLLGLFRESFPGRRGDRAPP

SEQ ID NO: 9003 - protein, 103 aa, Zea mays subsp. mays
  peptide (1)..(103): Ceres Seq. ID no. 12407558
  misc_feature (1)..(76): Homolog of NCBI NO: 19386738 NR Description: P0678F11.28 [Oryza sativa (japonica
  misc_feature (1)..(75): Homolog of NCBI NO: 19386741 NR Description: P0678F11.31 [Oryza sativa (japonica
  misc_feature (1)..(76): Homolog of NCBI NO: 34897440 NR Description: putative regulatory protein [Oryza sativa
  misc_feature (1)..(75): Homolog of NCBI NO: 34897442 NR Description: putative regulatory protein [Oryza sativa
  misc_feature (1)..(95): Homolog of NCBI NO: 19386737 NR Description: P0678F11.26 [Oryza sativa (japonica
  misc_feature (1)..(76): Homolog of NCBI NO: 19386795 NR Description: OJ1485_B09.3 [Oryza sativa (japonica
  misc_feature (1)..(75): Homolog of NCBI NO: 34904674 NR Description: P0446G09.1 [Oryza sativa (japonica >gi|28564589|dbj|BAC57756.1| putative regulatory protein [Oryza
  misc_feature (1)..(76): Homolog of NCBI NO: 19386742 NR Description: P0678F11.32 [Oryza sativa (japonica
  misc_feature (1)..(75): Homolog of NCBI NO: 15235236 NR Description: hypothetical protein common family; protein id:
  misc_feature (1)..(75): Homolog of NCBI NO: 18395292 NR Description: unknown protein; protein id: At2g02060.1
MTTSSDIFHGDANSLDNWPNTGFYYVKATNRTVEMLRRWRAARRRFPPNHEQAIFNQIKHELAADLGVRIQFLDTARSPASAGSSTVTWARVHHARQLLLRAR

SEQ ID NO: 9004 - DNA, 981 bp, Zea mays subsp. mays
  misc_feature (1)..(981): Ceres Seq. ID no. 12356692
  misc_feature: MA Experiment ID: 108527 Result: Down-regulated in Transcription
  misc_feature: MA Experiment 108527 PARAMETER Experiment Name: Zm_5mM_NO_P Parameter: Age (day) Value: 8
  misc_feature: MA Experiment 108527 PARAMETER Experiment Name: Zm_5mM_NO_P Parameter: Organism Value: Zea mays
  misc_feature: MA Experiment 108527 PARAMETER Experiment Name: Zm_5mM_NO_P Parameter: Plant Line Value: 35A19
  misc_feature: MA Experiment 108527 PARAMETER Experiment Name: Zm_5mM_NO_P Parameter: Timepoint (hr) Value: 6
  misc_feature: MA Experiment 108527 PARAMETER Experiment Name: Zm_5mM_NO_P Parameter: Tissue Value: Aerial
  misc_feature: MA Experiment 108527 PARAMETER Experiment Name: Zm_5mM_NO_P Parameter: Treatment Value: 5mM NO vs. No Treatment
  misc_feature: MA Experiment ID: 108528 Result: Up-regulated in Transcription
  misc_feature: MA Experiment 108528 PARAMETER Experiment Name: Zm_Imbibed_Seeds_P Parameter: Age (day) Value: 5 vs. 2
  misc_feature: MA Experiment 108528 PARAMETER Experiment Name: Zm_Imbibed_Seeds_P Parameter: Organism Value: Zea mays
  misc_feature: MA Experiment 108528 PARAMETER Experiment Name: Zm_Imbibed_Seeds_P Parameter: Plant Line Value: 35A19
  misc_feature: MA Experiment 108528 PARAMETER Experiment Name: Zm_Imbibed_Seeds_P Parameter: Tissue Value: Aerial vs. Embryo
  misc_feature: MA Experiment ID: 108534 Result: Up-regulated in Transcription
  misc_feature: MA Experiment 108534 PARAMETER Experiment Name: Zm_4deg_Cold_P Parameter: Age (hr) Value: 8
  misc_feature: MA Experiment 108534 PARAMETER Experiment Name: Zm_4deg_Cold_P Parameter: Organism Value: Zea mays
  misc_feature: MA Experiment 108534 PARAMETER Experiment Name: Zm_4deg_Cold_P Parameter: Plant Line Value: 35A19
  misc_feature: MA Experiment 108534 PARAMETER Experiment Name: Zm_4deg_Cold_P Parameter: Temperature (deg C) Value: 4 vs. 22
  misc_feature: MA Experiment 108534 PARAMETER Experiment Name: Zm_4deg_Cold_P Parameter: Timepoint (hr) Value: 6
  misc_feature: MA Experiment 108534 PARAMETER Experiment Name: Zm_4deg_Cold_P Parameter: Tissue Value: Aerial
  misc_feature: MA Experiment ID: 108543 Result: Up-regulated in Transcription
  misc_feature: MA Experiment ID: 108547 Result: Up-regulated in Transcription
  misc_feature: MA Experiment 108547 PARAMETER Experiment Name: Zm_Imbibed_Seeds_P Parameter: Age (day) Value: 4 vs. 2
  misc_feature: MA Experiment 108547 PARAMETER Experiment Name: Zm_Imbibed_Seeds_P Parameter: Organism Value: Zea mays
  misc_feature: MA Experiment 108547 PARAMETER Experiment Name: Zm_Imbibed_Seeds_P Parameter: Plant Line Value: 35A19
  misc_feature: MA Experiment 108547 PARAMETER Experiment Name: Zm_Imbibed_Seeds_P Parameter: Tissue Value: Aerial vs. Embryo
  misc_feature: MA Experiment ID: 20000108 Result: Up-regulated in Transcription
  misc_feature: MA Experiment 20000108 PARAMETER Experiment Name: Zm_Root-Tips_P Parameter: Age (day) Value: 12
  misc_feature: MA Experiment 20000108 PARAMETER Experiment Name: Zm_Root-Tips_P Parameter: Organism Value: Zea mays
  misc_feature: MA Experiment 20000108 PARAMETER Experiment Name: Zm_Root-Tips_P Parameter: Tissue Value: Root tips vs. Root mid region    35
  misc_feature: MA Experiment 20000108 PARAMETER Experiment Name: Zm_Root-Tips_P Parameter: Tissue Value: Root tips vs. Root mid region   Sequence Listing-Misc Features (4)
  misc_feature: MA Experiment ID: 20000535 Result: Up-regulated in Transcription
  misc_feature: MA Experiment 20000535 PARAMETER Experiment Name: Zm_Hybrid_Seed_Dev_P Parameter: DAP Value: 30 vs. 12
  misc_feature: MA Experiment 20000535 PARAMETER Experiment Name: Zm_Hybrid_Seed_Dev_P Parameter: Organism Value: Zea mays
  misc_feature: MA Experiment 20000535 PARAMETER Experiment Name: Zm_Hybrid_Seed_Dev_P Parameter: Plant Line Value: 35A19
  misc_feature: MA Experiment 20000535 PARAMETER Experiment Name: Zm_Hybrid_Seed_Dev_P Parameter: Tissue Value: Embryo vs. Unfert Floret
actgccagctccggtccgcagagggagggaggaggacgccagttgccactgccgcgccgctcccgcctccctctctccatccgacgagctcgagaagccaccatgatctccgcgcgcaccgccgcagcttcccccgcctccctgtggaagcggggaggacaaagtgagggcggcggcagttgcgacggatgtcggacctacaggaacactttgcggagggccgcagcagcgaaggtgcgtgccttgccgtcgagggcggtggaggcggtcaaaatgggctccgccgcggaggtggagcaggaggaggcggaggtagccgcggccgcggacggcgtcgtcgtcgaggaccactacggcgaggacagcgccaccgaggagctgcccatcatgccctgggccttctccgtcgcaagcggttacaccctcttgagggatccacatcacaacaagggtcttgctttcacggagaaggagagggatgcacaccacttgcgtgggctgcttcctcctgcagttgttcctcaagaactccaaattaagaagatcatgcacaacctgcggcagtaccaggtccctttgcagcgctatatggccatgatggaccttcaggagaggaacgagaggcttttctacaagcttttaattgataacgtggaggagctgcttcctgtggtttatacaccaactgtaggtgaggcctgccagaagtatgggtccatctttcgacaaccacagggtctgtatgtcagcttgagggacaaagggaaggtcctagaagttctaaggaactggccacataggaacattcaagttatctgtgttactgatggtgagcgaatcttgggacttggagatttgggttctcagggaatgggaattcctgtaggcaaacttgctctatacactgctcttggaggagttcgtccatcagcttgtttgcctatcacaatcgatgttggcacaaataatgagaaactgctt

SEQ ID NO: 9005 - protein, 327 aa, Zea mays subsp. mays
  peptide (1)..(327): Ceres Seq. ID no. 12356693
  misc_feature (203)..(326): Pfam Name: Malic enzyme, N-terminal domain Pfam Description: Malic enzyme, N-terminal domain
  misc_feature (35)..(326): Homolog of NCBI NO: 18460985 NR Description: NADP-dependent malic enzyme [Zea mays]
  misc_feature (35)..(326): Homolog of NCBI NO: 37147841 NR Description: non-photosynthetic NADP-malic enzyme [Zea mays]
  misc_feature (138)..(326): Homolog of NCBI NO: 4096786 NR Description: NADP-malic enzyme [Zea mays]
  misc_feature (35)..(167): Homolog of NCBI NO: 4096786 NR Description: NADP-malic enzyme [Zea mays]
  misc_feature (35)..(326): Homolog of NCBI NO: 34906372 NR Description: unnamed protein product [Oryza sativa (japonica group)] >gi|9558508|dbj|BAB03427.1| unnamed protein product
  misc_feature (35)..(326): Homolog of NCBI NO: 30526303 NR Description: NADP-dependent malic enzyme [Sorghum bicolor]
  misc_feature (35)..(326): Homolog of NCBI NO: 126737 NR Description: NADP-DEPENDENT MALIC ENZYME, CHLOROPLAST
  misc_feature (35)..(326): Homolog of NCBI NO: 1170871 NR Description: NADP-DEPENDENT MALIC ENZYME, CHLOROPLAST
  misc_feature (35)..(326): Homolog of NCBI NO: 30575690 NR Description: NADP-malic enzyme [Zea mays]
  misc_feature (58)..(326): Homolog of NCBI NO: 126736 NR Description: NADP-dependent malic enzyme, chloroplast
TASSGPQREGGGRQLPLPRRSRLPLSIRRAREATMISARTAAASPASLWKRGGQSEGGGSCDGCRTYRNTLRRAAAAKVRALPSRAVEAVKMGSAAEVEQEEAEVAAAADGVVVEDHYGEDSATEELPIMPWAFSVASGYTLLRDPHHNKGLAFTEKERDAHHLRGLLPPAVVPQELQIKKIMHNLRQYQVPLQRYMAMMDLQERNERLFYKLLIDNVEELLPVVYTPTVGEACQKYGSIFRQPQGLYVSLRDKGKVLEVLRNWPHRNIQVICVTDGERILGLGDLGSQGMGIPVGKLALYTALGGVRPSACLPITIDVGTNNEKLL

SEQ ID NO: 9006 - protein, 293 aa, Zea mays subsp. mays
  peptide (1)..(293): Ceres Seq. ID no. 12356694
  misc_feature (169)..(292): Pfam Name: Malic enzyme, N-terminal domain Pfam Description: Malic enzyme, N-terminal domain
  misc_feature (1)..(292): Homolog of NCBI NO: 18460985 NR Description: NADP-dependent malic enzyme [Zea mays]
  misc_feature (1)..(292): Homolog of NCBI NO: 37147841 NR Description: non-photosynthetic NADP-malic enzyme [Zea mays]
  misc_feature (104)..(292): Homolog of NCBI NO: 4096786 NR Description: NADP-malic enzyme [Zea mays]
  misc_feature (1)..(133): Homolog of NCBI NO: 4096786 NR Description: NADP-malic enzyme [Zea mays]
  misc_feature (1)..(292): Homolog of NCBI NO: 34906372 NR Description: unnamed protein product [Oryza sativa (japonica group)] >gi|9558508|dbj|BAB03427.1| unnamed protein product
  misc_feature (1)..(292): Homolog of NCBI NO: 30526303 NR Description: NADP-dependent malic enzyme [Sorghum bicolor]
  misc_feature (1)..(292): Homolog of NCBI NO: 126737 NR Description: NADP-DEPENDENT MALIC ENZYME, CHLOROPLAST
  misc_feature (1)..(292): Homolog of NCBI NO: 1170871 NR Description: NADP-DEPENDENT MALIC ENZYME, CHLOROPLAST
  misc_feature (1)..(292): Homolog of NCBI NO: 30575690 NR Description: NADP-malic enzyme [Zea mays]
  misc_feature (24)..(292): Homolog of NCBI NO: 126736 NR Description: NADP-dependent malic enzyme, chloroplast
MISARTAAASPASLWKRGGQSEGGGSCDGCRTYRNTLRRAAAAKVRALPSRAVEAVKMGSAAEVEQEEAEVAAAADGVVVEDHYGEDSATEELPIMPWAFSVASGYTLLRDPHHNKGLAFTEKERDAHHLRGLLPPAVVPQELQIKKIMHNLRQYQVPLQRYMAMMDLQERNERLFYKLLIDNVEELLPVVYTPTVGEACQKYGSIFRQPQGLYVSLRDKGKVLEVLRNWPHRNIQVICVTDGERILGLGDLGSQGMGIPVGKLALYTALGGVRPSACLPITIDVGTNNEKLL

SEQ ID NO: 9007 - protein, 236 aa, Zea mays subsp. mays
  peptide (1)..(236): Ceres Seq. ID no. 12356695
  misc_feature (112)..(235): Pfam Name: Malic enzyme, N-terminal domain Pfam Description: Malic enzyme, N-terminal domain
  misc_feature (1)..(235): Homolog of NCBI NO: 18460985 NR Description: NADP-dependent malic enzyme [Zea mays]
  misc_feature (1)..(235): Homolog of NCBI NO: 37147841 NR Description: non-photosynthetic NADP-malic enzyme [Zea mays]
  misc_feature (47)..(235): Homolog of NCBI NO: 4096786 NR Description: NADP-malic enzyme [Zea mays]
  misc_feature (1)..(76): Homolog of NCBI NO: 4096786 NR Description: NADP-malic enzyme [Zea mays]
  misc_feature (1)..(235): Homolog of NCBI NO: 34906372 NR Description: unnamed protein product [Oryza sativa (japonica group)] >gi|9558508|dbj|BAB03427.1| unnamed protein product
  misc_feature (1)..(235): Homolog of NCBI NO: 30526303 NR Description: NADP-dependent malic enzyme [Sorghum bicolor]
  misc_feature (1)..(235): Homolog of NCBI NO: 126737 NR Description: NADP-DEPENDENT MALIC ENZYME, CHLOROPLAST
  misc_feature (1)..(235): Homolog of NCBI NO: 1170871 NR Description: NADP-DEPENDENT MALIC ENZYME, CHLOROPLAST
  misc_feature (1)..(235): Homolog of NCBI NO: 30575690 NR Description: NADP-malic enzyme [Zea mays]
  misc_feature (1)..(235): Homolog of NCBI NO: 126736 NR Description: NADP-dependent malic enzyme, chloroplast
MGSAAEVEQEEAEVAAAADGVVVEDHYGEDSATEELPIMPWAFSVASGYTLLRDPHHNKGLAFTEKERDAHHLRGLLPPAVVPQELQIKKIMHNLRQYQVPLQRYMAMMDLQERNERLFYKLLIDNVEELLPVVYTPTVGEACQKYGSIFRQPQGLYVSLRDKGKVLEVLRNWPHRNIQVICVTDGERILGLGDLGSQGMGIPVGKLALYTALGGVRPSACLPITIDVGTNNEKLL

SEQ ID NO: 9008 - DNA, 1072 bp, Zea mays subsp. mays
  misc_feature (1)..(1072): Ceres Seq. ID no. 12382121
  misc_feature: MA Experiment ID: 108527 Result: Up-regulated in Transcription
  misc_feature: MA Experiment 108527 PARAMETER Experiment Name: Zm_5mM_NO_P Parameter: Age (day) Value: 8
  misc_feature: MA Experiment 108527 PARAMETER Experiment Name: Zm_5mM_NO_P Parameter: Organism Value: Zea mays
  misc_feature: MA Experiment 108527 PARAMETER Experiment Name: Zm_5mM_NO_P Parameter: Plant Line Value: 35A19
  misc_feature: MA Experiment 108527 PARAMETER Experiment Name: Zm_5mM_NO_P Parameter: Timepoint (hr) Value: 6
  misc_feature: MA Experiment 108527 PARAMETER Experiment Name: Zm_5mM_NO_P Parameter: Tissue Value: Aerial
  misc_feature: MA Experiment 108527 PARAMETER Experiment Name: Zm_5mM_NO_P Parameter: Treatment Value: 5mM NO vs. No Treatment
  misc_feature: MA Experiment ID: 108528 Result: Up-regulated in Transcription
  misc_feature: MA Experiment 108528 PARAMETER Experiment Name: Zm_Imbibed_Seeds_P Parameter: Age (day) Value: 5 vs. 2
  misc_feature: MA Experiment 108528 PARAMETER Experiment Name: Zm_Imbibed_Seeds_P Parameter: Organism Value: Zea mays
  misc_feature: MA Experiment 108528 PARAMETER Experiment Name: Zm_Imbibed_Seeds_P Parameter: Plant Line Value: 35A19
  misc_feature: MA Experiment 108528 PARAMETER Experiment Name: Zm_Imbibed_Seeds_P Parameter: Tissue Value: Aerial vs. Embryo
  misc_feature: MA Experiment ID: 108530 Result: Up-regulated in Transcription
  misc_feature: MA Experiment 108530 PARAMETER Experiment Name: Zm_Imbibed_Seeds_P Parameter: Age (day) Value: 6 vs. 2
  misc_feature: MA Experiment 108530 PARAMETER Experiment Name: Zm_Imbibed_Seeds_P Parameter: Organism Value: Zea mays
  misc_feature: MA Experiment 108530 PARAMETER Experiment Name: Zm_Imbibed_Seeds_P Parameter: Plant Line Value: 35A19
  misc_feature: MA Experiment 108530 PARAMETER Experiment Name: Zm_Imbibed_Seeds_P Parameter: Tissue Value: Aerial vs. Embryo
  misc_feature: MA Experiment ID: 108547 Result: Up-regulated in Transcription
  misc_feature: MA Experiment 108547 PARAMETER Experiment Name: Zm_Imbibed_Seeds_P Parameter: Age (day) Value: 4 vs. 2
  misc_feature: MA Experiment 108547 PARAMETER Experiment Name: Zm_Imbibed_Seeds_P Parameter: Organism Value: Zea mays
  misc_feature: MA Experiment 108547 PARAMETER Experiment Name: Zm_Imbibed_Seeds_P Parameter: Plant Line Value: 35A19
  misc_feature: MA Experiment 108547 PARAMETER Experiment Name: Zm_Imbibed_Seeds_P Parameter: Tissue Value: Aerial vs. Embryo
  misc_feature: MA Experiment ID: 20000492 Result: Down-regulated in Transcription
  misc_feature: MA Experiment 20000492 PARAMETER Experiment Name: Zm_Hybrid_Seed_Dev_P Parameter: DAP Value: 12
  misc_feature: MA Experiment 20000492 PARAMETER Experiment Name: Zm_Hybrid_Seed_Dev_P Parameter: Organism Value: Zea mays
  misc_feature: MA Experiment 20000492 PARAMETER Experiment Name: Zm_Hybrid_Seed_Dev_P Parameter: Plant Line Value: 35A19
  misc_feature: MA Experiment 20000492 PARAMETER Experiment Name: Zm_Hybrid_Seed_Dev_P Parameter: Tissue Value: Fert Kernel vs. Unfert Floret
  misc_feature: MA Experiment ID: 20000535 Result: Down-regulated in Transcription
  misc_feature: MA Experiment 20000535 PARAMETER Experiment Name: Zm_Hybrid_Seed_Dev_P Parameter: DAP Value: 30 vs. 12
  misc_feature: MA Experiment 20000535 PARAMETER Experiment Name: Zm_Hybrid_Seed_Dev_P Parameter: Organism Value: Zea mays
  misc_feature: MA Experiment 20000535 PARAMETER Experiment Name: Zm_Hybrid_Seed_Dev_P Parameter: Plant Line Value: 35A19
  misc_feature: MA Experiment 20000535 PARAMETER Experiment Name: Zm_Hybrid_Seed_Dev_P Parameter: Tissue Value: Embryo vs. Unfert Floret
cccgtccacgcatcgccaccgcgccatatcggcatatccgcaagaagcacccggcacatcgcgtcgcccccaccttccccctcccaccaccgcaagcccggacacgcccagggcgcaaatccggacaagcgctgccccggtcgcggcaggcatgggtttcccggtgggctactcggagctggtgctcccgaagcagctgctccacctcctgctgctgctggggtacatccgccgcttcctcctctgggcgttcgacgccgtggggctcggcgacctgctggatctcggggacgaccaccaggcgctgctgcaggaccaccagcagcagcagcacggcgccgccgcgcaggggcgggacctgccgcagcaggcggcgatgctgcagcaccggcgcccggagttccggncggtgccggcgatggtcatcgaggaggtcctccccgtggtgcggttcgacgagctggagctggagccggagcccggagactgcgcggtgtgcctgagcggcatcggcggccgcgacgaggtgcggcggctcagcaactgccgccacgtcttccaccgggcctgcctcgaccgctggatggagcacgaccagcgcacgtgcccgctctgccgcgcgccgctcatccccgacgagatggccggcgcgctctgggccgccgccgccggcgtccccgacgcctccgacttcgacttctcctacctcggcgcgccgctggcgcccgtgccctccccgacgctgctgcggccgcacgagctgctgctcaccggcctgggcggctaccagtgagagctcaccaccgcccgccacttcccccgtggggaatgcgcgtctgcctggatccatcgacgcttgcttgcttgcttccgttccgtgggagggacggggacggacagcagccgaggcagagaagaaacccaaggctctcgaattgtacataggcaaaatgagtaaagcggccacccccccaaaaaaaggctaggagattagatccctcttgtgcataggtagattccgtcttccaagtttgtggagttgtgaatctttgcgcggattaaatttttgtcg

SEQ ID NO: 9009 - protein, 314 aa, Zea mays subsp. mays
  peptide (1)..(314): Ceres Seq. ID no. 12382122
  misc_feature (1)..(218): Pfam Name: Assemblin (Peptidase family S21) Pfam Description: Assemblin (Peptidase family S21)
  misc_feature (46)..(258): Homolog of NCBI NO: 26347495 NR Description: unnamed protein product [Mus musculus]
  misc_feature (6)..(206): Homolog of NCBI NO: 25453418 NR Description: proline-rich proteoglycan 2 [Rattus norvegicus]
  misc_feature (1)..(261): Homolog of NCBI NO: 22960097 NR Description: hypothetical protein [Rhodobacter sphaeroides]
  misc_feature (1)..(309): Homolog of NCBI NO: 29247944 NR Description: GLP_26_54603_52153 [Giardia lamblia ATCC 50803]
  misc_feature (24)..(234): Homolog of NCBI NO: 17509327 NR Description: Cuticle collagen [Caenorhabditis elegans]
  misc_feature (1)..(211): Homolog of NCBI NO: 22962211 NR Description: hypothetical protein [Rhodopseudomonas palustris]
  misc_feature (1)..(208): Homolog of NCBI NO: 27375632 NR Description: blr0521 [Bradyrhizobium japonicum]
  misc_feature (5)..(220): Homolog of NCBI NO: 18025542 NR Description: EBNA-3B [cercopithicine herpesvirus 15]
  misc_feature (46)..(219): Homolog of NCBI NO: 2144803 NR Description: collagen alpha 1(I) chain precursor - human
  misc_feature (22)..(276): Homolog of NCBI NO: 71400 NR Description: dermal gland protein APEG precursor - African frog (fragment) >gi|1334643|emb|CAA35759.1| APEG precursor
  misc_feature (136)..(136): Xaa is any aa, unknown or other
PVHASPPRHIGISARSTRHIASPPPSPSHHRKPGHAQGANPDKRCPGRGRHGFPGGLLGAGAPEAAAPPPAAAGVHPPLPPLGVRRRGARRPAGSRGRPPGAAAGPPAAAARRRRAGAGPAAAGGDAAAPAPGVPXGAGDGHRGGPPRGAVRRAGAGAGARRLRGVPERHRRPRRGAAAQQLPPRLPPGLPRPLDGARPAHVPALPRAAHPRRDGRRALGRRRRRPRRLRLRLLLPRRAAGARALPDAAAAARAAAHRPGRLPVRAHHRPPLPPWGMRVCLDPSTLACLLPFRGRDGDGQQPRQRRNPRLSNCT

SEQ ID NO: 9010 - protein, 263 aa, Zea mays subsp. mays
  peptide (1)..(263): Ceres Seq. ID no. 12382123
  misc_feature (163)..(205): Pfam Name: Zinc finger, C3HC4 type (RING finger) Pfam Description: Zinc finger, C3HC4 type (RING finger)
  misc_feature (130)..(227): Homolog of NCBI NO: 15233117 NR Description: RING finger protein; protein id: At3g61460.1, by cDNA: 25801., supported by cDNA: gi_17644156, supported by
  misc_feature (51)..(95): Homolog of NCBI NO: 15233117 NR Description: RING finger protein; protein id: At3g61460.1, by cDNA: 25801., supported by cDNA: gi_17644156, supported by
  misc_feature (139)..(225): Homolog of NCBI NO: 15222553 NR Description: putative RING zinc finger protein; protein id: supported by cDNA: gi_16648709 [Arabidopsis thaliana]
  misc_feature (51)..(94): Homolog of NCBI NO: 15222553 NR Description: putative RING zinc finger protein; protein id: supported by cDNA: gi_16648709 [Arabidopsis thaliana]
  misc_feature (51)..(214): Homolog of NCBI NO: 21554155 NR Description: RING zinc finger protein-like [Arabidopsis
  misc_feature (51)..(214): Homolog of NCBI NO: 15238072 NR Description: RING zinc finger protein-like; protein id: supported by cDNA: 207148. [Arabidopsis thaliana]
  misc_feature (142)..(212): Homolog of NCBI NO: 18411282 NR Description: similar to RING finger protein; protein id:
  misc_feature (142)..(211): Homolog of NCBI NO: 34897812 NR Description: P0514G12.26 [Oryza sativa (japonica
  misc_feature (139)..(213): Homolog of NCBI NO: 11358776 NR Description: RING-H2 finger protein RHA1a [imported] -
  misc_feature (139)..(213): Homolog of NCBI NO: 11358777 NR Description: RING-H2 finger protein RHA1b [imported] -
  misc_feature (136)..(136): Xaa is any aa, unknown or other
PSTHRHRAISAYPQEAPGTSRRPHLPPPTTASPDTPRAQIRTSAAPVAAGMGFPVGYSELVLPKQLLHLLLLLGYIRRFLLWAFDAVGLGDLLDLGDDHQALLQDHQQQQHGAAAQGRDLPQQAAMLQHRRPEFRXVPAMVIEEVLPVVRFDELELEPEPGDCAVCLSGIGGRDEVRRLSNCRHVFHRACLDRWMEHDQRTCPLCRAPLIPDEMAGALWAAAAGVPDASDFDFSYLGAPLAPVPSPTLLRPHELLLTGLGGYQ

SEQ ID NO: 9011 - protein, 213 aa, Zea mays subsp. mays
  peptide (1)..(213): Ceres Seq. ID no. 12382124
  misc_feature (113)..(155): Pfam Name: Zinc finger, C3HC4 type (RING finger) Pfam Description: Zinc finger, C3HC4 type (RING finger)
  misc_feature (80)..(177): Homolog of NCBI NO: 15233117 NR Description: RING finger protein; protein id: At3g61460.1, by cDNA: 25801., supported by cDNA: gi_17644156, supported by
  misc_feature (1)..(45): Homolog of NCBI NO: 15233117 NR Description: RING finger protein; protein id: At3g61460.1, by cDNA: 25801., supported by cDNA: gi_17644156, supported by
  misc_feature (89)..(175): Homolog of NCBI NO: 15222553 NR Description: putative RING zinc finger protein; protein id: supported by cDNA: gi_16648709 [Arabidopsis thaliana]
  misc_feature (1)..(44): Homolog of NCBI NO: 15222553 NR Description: putative RING zinc finger protein; protein id: supported by cDNA: gi_16648709 [Arabidopsis thaliana]
  misc_feature (1)..(164): Homolog of NCBI NO: 21554155 NR Description: RING zinc finger protein-like [Arabidopsis
  misc_feature (1)..(164): Homolog of NCBI NO: 15238072 NR Description: RING zinc finger protein-like; protein id: supported by cDNA: 207148. [Arabidopsis thaliana]
  misc_feature (92)..(162): Homolog of NCBI NO: 18411282 NR Description: similar to RING finger protein; protein id:
  misc_feature (92)..(161): Homolog of NCBI NO: 34897812 NR Description: P0514G12.26 [Oryza sativa (japonica
  misc_feature (89)..(163): Homolog of NCBI NO: 11358776 NR Description: RING-H2 finger protein RHA1a [imported] -
  misc_feature (89)..(163): Homolog of NCBI NO: 15233352 NR Description: RING-H2 finger protein RHA1a -like protein; id: At4g11370.1, supported by cDNA: 21591., supported by cDNA:
  misc_feature (86)..(86): Xaa is any aa, unknown or other
MGFPVGYSELVLPKQLLHLLLLLGYIRRFLLWAFDAVGLGDLLDLGDDHQALLQDHQQQQHGAAAQGRDLPQQAAMLQHRRPEFRXVPAMVIEEVLPVVRFDELELEPEPGDCAVCLSGIGGRDEVRRLSNCRHVFHRACLDRWMEHDQRTCPLCRAPLIPDEMAGALWAAAAGVPDASDFDFSYLGAPLAPVPSPTLLRPHELLLTGLGGYQ

SEQ ID NO: 9012 - DNA, 1357 bp, Zea mays subsp. mays
  misc_feature (1)..(1357): Ceres Seq. ID no. 12358369
  misc_feature: MA Experiment ID: 108504 Result: Up-regulated in Transcription
  misc_feature: MA Experiment 108504 PARAMETER Experiment Name: Zm_Drought_P Parameter: Age (day) Value: 8
  misc_feature: MA Experiment 108504 PARAMETER Experiment Name: Zm_Drought_P Parameter: Organism Value: Zea mays
  misc_feature: MA Experiment 108504 PARAMETER Experiment Name: Zm_Drought_P Parameter: Plant Line Value: 35A19
  misc_feature: MA Experiment 108504 PARAMETER Experiment Name: Zm_Drought_P Parameter: Timepoint (hr) Value: 12
  misc_feature: MA Experiment 108504 PARAMETER Experiment Name: Zm_Drought_P Parameter: Tissue Value: Aerial
  misc_feature: MA Experiment 108504 PARAMETER Experiment Name: Zm_Drought_P Parameter: Treatment Value: Drought vs. No Drought
  misc_feature: MA Experiment ID: 108527 Result: Up-regulated in Transcription
  misc_feature: MA Experiment 108527 PARAMETER Experiment Name: Zm_5mM_NO_P Parameter: Age (day) Value: 8
  misc_feature: MA Experiment 108527 PARAMETER Experiment Name: Zm_5mM_NO_P Parameter: Organism Value: Zea mays
  misc_feature: MA Experiment 108527 PARAMETER Experiment Name: Zm_5mM_NO_P Parameter: Plant Line Value: 35A19
  misc_feature: MA Experiment 108527 PARAMETER Experiment Name: Zm_5mM_NO_P Parameter: Timepoint (hr) Value: 6
  misc_feature: MA Experiment 108527 PARAMETER Experiment Name: Zm_5mM_NO_P Parameter: Tissue Value: Aerial
  misc_feature: MA Experiment 108527 PARAMETER Experiment Name: Zm_5mM_NO_P Parameter: Treatment Value: 5mM NO vs. No Treatment
  misc_feature: MA Experiment ID: 108528 Result: Down-regulated in Transcription
  misc_feature: MA Experiment 108528 PARAMETER Experiment Name: Zm_Imbibed_Seeds_P Parameter: Age (day) Value: 5 vs. 2
  misc_feature: MA Experiment 108528 PARAMETER Experiment Name: Zm_Imbibed_Seeds_P Parameter: Organism Value: Zea mays
  misc_feature: MA Experiment 108528 PARAMETER Experiment Name: Zm_Imbibed_Seeds_P Parameter: Plant Line Value: 35A19
  misc_feature: MA Experiment 108528 PARAMETER Experiment Name: Zm_Imbibed_Seeds_P Parameter: Tissue Value: Aerial vs. Embryo
  misc_feature: MA Experiment ID: 108536 Result: Up-regulated in Transcription
  misc_feature: MA Experiment 108536 PARAMETER Experiment Name: Zm_Meristem_P Parameter: Age (day) Value: 8
  misc_feature: MA Experiment 108536 PARAMETER Experiment Name: Zm_Meristem_P Parameter: Organism Value: Zea mays
  misc_feature: MA Experiment 108536 PARAMETER Experiment Name: Zm_Meristem_P Parameter: Plant Line Value: 35A19
  misc_feature: MA Experiment 108536 PARAMETER Experiment Name: Zm_Meristem_P Parameter: Tissue Value: Shoot Meristem vs. Above Shoot Meristem
  misc_feature: MA Experiment ID: 20000630 Result: Up-regulated in Transcription
  misc_feature: MA Experiment 20000630 PARAMETER Experiment Name: Zm_Herbicide-Treatments_P Parameter: Timepoint (hr) Value: 4
  misc_feature: MA Experiment 20000630 PARAMETER Experiment Name: Zm_Herbicide-Treatments_P Parameter: Tissue Value: Aerial
  misc_feature: MA Experiment 20000630 PARAMETER Experiment Name: Zm_Herbicide-Treatments_P Parameter: Treatment Value: Roundup vs. No Treatment
gtgcgggcggatgcacttgtttgcgtcccgtgcgcgcgtgatctgatcagcgcgttcgcgtggctcggtcgccacccaactcgacaccgcccacctccacctcctcctcctccgcgtccgcttttttgtccgggcacacccccgcccgacgccgccggaaccagaccagaccacaccacaccacaggagaggagaggagctccggcccgccaaaaaaaaatagcaggggcaggggccgcaggcgccgcgacccatgggcgtcaagcaggtcctcgtccgcccccgctacggcgacgaggatgtcgtcgaccagtcgccgccgccgcccatgtcgtcctcgccctgcggccgctacgtcctccaccgcgtctgcaggttcgacacgctcgccggcgtagccatcaagtacggcgtcgaggtggcggacgtgaagcgcgccaacggcctcaccaccgacctgcagatgttcgcgcacaagacgctgcgggtcccgctccacggcaggcacgcgccgtctcctccctcctcgtccccaagccacgccgccagagaatggactaaaaatgctgcttccctggacccgctccttaaaccaccacggagcacagtttcgccatccatgagccttctactacaggggtgccatggcctgacgccggctccaaagggggacctgaacctgaccgatgaatgcgctcaaggccatcacaggaaagccggaagcttatcgagcaccttgttgccgaggagagccgggcaagggctggccctgaggccaaagtctggcggtcgggcagacacgaacggcatccaccaggacctgttggctgcgtgggtgccctcgtacggggacgggttgcgcgcggtgaagagatcgtcgagcgctccggagttccaggattcggacagcgtcagcctcgcctcggcgtggctgaagagcaagtggaacctgaaaccggattatgccttcaccctggcgctgttcgacggcatctccaagcctctcctggacagcatccccaagcctctcctcgacaacatccccaactcgatcgttgcttggagaaacaaggcggccagagattagcagcttcgtttcgtctctttacagccaaaaaaaagaaggcctcgaacggttggacacactgtgctgaaatggcgcgatggatacagtgacacattacttgcacatacatactgtgctgaatctattgtgccaaagcagcagcagcagcagattgggagctgggagatgagcctgggggtgtattcttttcatttttgtacgtacacatataggaatgaaggcaaacgcctagcagcattcccatgacctaataaagaaatagcttgttct

SEQ ID NO: 9013 - protein, 277 aa, Zea mays subsp. mays
  peptide (1)..(277): Ceres Seq. ID no. 12358370
  misc_feature (37)..(80): Pfam Name: LysM domain Pfam Description: LysM domain
  misc_feature (21)..(140): Homolog of NCBI NO: 37535512 NR Description: unknown protein [Oryza sativa (japonica
  misc_feature (159)..(277): Homolog of NCBI NO: 37535512 NR Description: unknown protein [Oryza sativa (japonica
  misc_feature (154)..(277): Homolog of NCBI NO: 24431595 NR Description: Hypothetical protein [Oryza sativa (japonica
  misc_feature (21)..(135): Homolog of NCBI NO: 22327003 NR Description: unknown protein; protein id: At5g23130.1, by cDNA: gi_17979294, supported by cDNA: gi_21281230 [Arabidopsis >gi|17979295|gb|AAL49873.1| unknown protein [Arabidopsis
  misc_feature (21)..(138): Homolog of NCBI NO: 11291586 NR Description: hypothetical protein T22D6.140 - Arabidopsis >gi|8346557|emb|CAB93721.1| hypothetical protein [Arabidopsis
  misc_feature (21)..(138): Homolog of NCBI NO: 30682281 NR Description: expressed protein [Arabidopsis thaliana] unknown protein [Arabidopsis thaliana]
  misc_feature (21)..(135): Homolog of NCBI NO: 9759371 NR Description: gene_id:MYJ24.12~unknown protein [Arabidopsis
MGVKQVLVRPRYGDEDVVDQSPPPPMSSSPCGRYVLHRVCRFDTLAGVAIKYGVEVADVKRANGLTTDLQMFAHKTLRVPLHGRHAPSPPSSSPSHAAREWTKNAASLDPLLKPPRSTVSPSMSLLLQGCHGLTPAPKGDLNLTDECAQGHHRKAGSLSSTLLPRRAGQGLALRPKSGGRADTNGIHQDLLAAWVPSYGDGLRAVKRSSSAPEFQDSDSVSLASAWLKSKWNLKPDYAFTLALFDGISKPLLDSIPKPLLDNIPNSIVAWRNKAARD

SEQ ID NO: 9014 - protein, 252 aa, Zea mays subsp. mays
  peptide (1)..(252): Ceres Seq. ID no. 12358371
  misc_feature (12)..(55): Pfam Name: LysM domain Pfam Description: LysM domain
  misc_feature (1)..(115): Homolog of NCBI NO: 37535512 NR Description: unknown protein [Oryza sativa (japonica
  misc_feature (134)..(252): Homolog of NCBI NO: 37535512 NR Description: unknown protein [Oryza sativa (japonica
  misc_feature (129)..(252): Homolog of NCBI NO: 24431595 NR Description: Hypothetical protein [Oryza sativa (japonica
  misc_feature (1)..(110): Homolog of NCBI NO: 22327003 NR Description: unknown protein; protein id: At5g23130.1, by cDNA: gi_17979294, supported by cDNA: gi_21281230 [Arabidopsis >gi|17979295|gb|AAL49873.1| unknown protein [Arabidopsis
  misc_feature (1)..(113): Homolog of NCBI NO: 11291586 NR Description: hypothetical protein T22D6.140 - Arabidopsis >gi|8346557|emb|CAB93721.1| hypothetical protein [Arabidopsis
  misc_feature (1)..(113): Homolog of NCBI NO: 30682281 NR Description: expressed protein [Arabidopsis thaliana] unknown protein [Arabidopsis thaliana]
  misc_feature (1)..(110): Homolog of NCBI NO: 9759371 NR Description: gene_id:MYJ24.12~unknown protein [Arabidopsis
MSSSPCGRYVLHRVCRFDTLAGVAIKYGVEVADVKRANGLTTDLQMFAHKTLRVPLHGRHAPSPPSSSPSHAAREWTKNAASLDPLLKPPRSTVSPSMSLLLQGCHGLTPAPKGDLNLTDECAQGHHRKAGSLSSTLLPRRAGQGLALRPKSGGRADTNGIHQDLLAAWVPSYGDGLRAVKRSSSAPEFQDSDSVSLASAWLKSKWNLKPDYAFTLALFDGISKPLLDSIPKPLLDNIPNSIVAWRNKAARD

SEQ ID NO: 9015 - protein, 207 aa, Zea mays subsp. mays
  peptide (1)..(207): Ceres Seq. ID no. 12358372
  misc_feature (1)..(70): Homolog of NCBI NO: 37535512 NR Description: unknown protein [Oryza sativa (japonica
  misc_feature (89)..(207): Homolog of NCBI NO: 37535512 NR Description: unknown protein [Oryza sativa (japonica
  misc_feature (84)..(207): Homolog of NCBI NO: 24431595 NR Description: Hypothetical protein [Oryza sativa (japonica
  misc_feature (1)..(65): Homolog of NCBI NO: 22327003 NR Description: unknown protein; protein id: At5g23130.1, by cDNA: gi_17979294, supported by cDNA: gi_21281230 [Arabidopsis >gi|17979295|gb|AAL49873.1| unknown protein [Arabidopsis
  misc_feature (1)..(68): Homolog of NCBI NO: 11291586 NR Description: hypothetical protein T22D6.140 - Arabidopsis >gi|8346557|emb|CAB93721.1| hypothetical protein [Arabidopsis
  misc_feature (1)..(68): Homolog of NCBI NO: 30682281 NR Description: expressed protein [Arabidopsis thaliana] unknown protein [Arabidopsis thaliana]
  misc_feature (1)..(65): Homolog of NCBI NO: 9759371 NR Description: gene_id:MYJ24.12~unknown protein [Arabidopsis
MFAHKTLRVPLHGRHAPSPPSSSPSHAAREWTKNAASLDPLLKPPRSTVSPSMSLLLQGCHGLTPAPKGDLNLTDECAQGHHRKAGSLSSTLLPRRAGQGLALRPKSGGRADTNGIHQDLLAAWVPSYGDGLRAVKRSSSAPEFQDSDSVSLASAWLKSKWNLKPDYAFTLALFDGISKPLLDSIPKPLLDNIPNSIVAWRNKAARD

SEQ ID NO: 9016 - DNA, 936 bp, Zea mays subsp. mays; identical to SEQ ID NO: 6253
  misc_feature (1)..(936): Ceres Seq. ID no. 12361812
  misc_feature: MA Experiment ID: 108529 Result: Up-regulated in Transcription
  misc_feature: MA Experiment 108529 PARAMETER Experiment Name: Zm_Imbibed_Seeds_P Parameter: Age (day) Value: 5 vs. 2
  misc_feature: MA Experiment 108529 PARAMETER Experiment Name: Zm_Imbibed_Seeds_P Parameter: Organism Value: Zea mays
  misc_feature: MA Experiment 108529 PARAMETER Experiment Name: Zm_Imbibed_Seeds_P Parameter: Plant Line Value: 35A19
  misc_feature: MA Experiment 108529 PARAMETER Experiment Name: Zm_Imbibed_Seeds_P Parameter: Tissue Value: Roots vs. Embryo
  misc_feature: MA Experiment ID: 108530 Result: Up-regulated in Transcription
  misc_feature: MA Experiment 108530 PARAMETER Experiment Name: Zm_Imbibed_Seeds_P Parameter: Age (day) Value: 6 vs. 2
  misc_feature: MA Experiment 108530 PARAMETER Experiment Name: Zm_Imbibed_Seeds_P Parameter: Organism Value: Zea mays
  misc_feature: MA Experiment 108530 PARAMETER Experiment Name: Zm_Imbibed_Seeds_P Parameter: Plant Line Value: 35A19
  misc_feature: MA Experiment 108530 PARAMETER Experiment Name: Zm_Imbibed_Seeds_P Parameter: Tissue Value: Aerial vs. Embryo
  misc_feature: MA Experiment ID: 108535 Result: Down-regulated in Transcription
  misc_feature: MA Experiment 108535 PARAMETER Experiment Name: Zm_Meristem_P Parameter: Age (day) Value: 8
  misc_feature: MA Experiment 108535 PARAMETER Experiment Name: Zm_Meristem_P Parameter: Organism Value: Zea mays
  misc_feature: MA Experiment 108535 PARAMETER Experiment Name: Zm_Meristem_P Parameter: Plant Line Value: 35A19
  misc_feature: MA Experiment 108535 PARAMETER Experiment Name: Zm_Meristem_P Parameter: Tissue Value: Root Meristem vs. Above Root Meristem
  misc_feature: MA Experiment ID: 20000535 Result: Down-regulated in Transcription
  misc_feature: MA Experiment 20000535 PARAMETER Experiment Name: Zm_Hybrid_Seed_Dev_P Parameter: DAP Value: 30 vs. 12
  misc_feature: MA Experiment 20000535 PARAMETER Experiment Name: Zm_Hybrid_Seed_Dev_P Parameter: Organism Value: Zea mays
  misc_feature: MA Experiment 20000535 PARAMETER Experiment Name: Zm_Hybrid_Seed_Dev_P Parameter: Plant Line Value: 35A19
  misc_feature: MA Experiment 20000535 PARAMETER Experiment Name: Zm_Hybrid_Seed_Dev_P Parameter: Tissue Value: Embryo vs. Unfert Floret

SEQ ID NO: 9017 - protein, 119 aa, Zea mays subsp. mays; identical to SEQ ID NO: 6254
  peptide (1)..(119): Ceres Seq. ID no. 12361813
  misc_feature (14)..(117): Pfam Name: Microtubule associated protein 1A/1B, light chain 3 Pfam Description: Microtubule associated protein 1A/1B, light
  misc_feature (14)..(117): Pfam Name: Microtubule associated protein 1A/1B, light chain 3 Pfam Description: Microtubule associated protein 1A/1B, light
  misc_feature (1)..(119): Homolog of NCBI NO: 38344173 NR Description: OSJNBa0053K19.12 [Oryza sativa (japonica
  misc_feature (1)..(117): Homolog of NCBI NO: 34595981 NR Description: microtubule-associated protein 1 light chain 3
  misc_feature (1)..(119): Homolog of NCBI NO: 15220686 NR Description: symbiosis-related protein, putative; protein id: supported by cDNA: 19175., supported by cDNA: gi_19912154 thaliana] >gi|19912155|dbj|BAB88389.1| autophagy 8c [Arabidopsis
  misc_feature (1)..(117): Homolog of NCBI NO: 33146967 NR Description: putative microtubule associated protein [Oryza
  misc_feature (1)..(118): Homolog of NCBI NO: 21592920 NR Description: putative microtubule-associated protein
  misc_feature (1)..(119): Homolog of NCBI NO: 38344173 NR Description: OSJNBa0053K19.12 [Oryza sativa (japonica
  misc_feature (1)..(119): Homolog of NCBI NO: 15220686 NR Description: symbiosis-related protein, putative; protein id: supported by cDNA: 19175., supported by cDNA: gi_19912154 thaliana] >gi|19912155|dbj|BAB88389.1| autophagy 8c [Arabidopsis
  misc_feature (1)..(118): Homolog of NCBI NO: 7446944 NR Description: hypothetical protein F8K4.23 - Arabidopsis
  misc_feature (1)..(118): Homolog of NCBI NO: 15224577 NR Description: putative microtubule-associated protein; protein At2g05630.1, supported by cDNA: 3416., supported by cDNA:
  misc_feature (1)..(119): Homolog of NCBI NO: 21553487 NR Description: symbiosis-related like protein [Arabidopsis
  misc_feature (1)..(119): Homolog of NCBI NO: 18415813 NR Description: symbiosis-related like protein; protein id: supported by cDNA: 14759., supported by cDNA: gi_19912150 thaliana] >gi|19912151|dbj|BAB88387.1| autophagy 8a [Arabidopsis
  misc_feature (1)..(118): Homolog of NCBI NO: 21592920 NR Description: putative microtubule-associated protein
  misc_feature (1)..(117): Homolog of NCBI NO: 33146967 NR Description: putative microtubule associated protein [Oryza
  misc_feature (1)..(117): Homolog of NCBI NO: 34595981 NR Description: microtubule-associated protein 1 light chain 3
  misc_feature (1)..(118): Homolog of NCBI NO: 40253647 NR Description: putative microtubial binding protein [Oryza
  misc_feature (1)..(118): Homolog of NCBI NO: 40253647 NR Description: putative microtubial binding protein [Oryza
  misc_feature (1)..(119): Homolog of NCBI NO: 18415813 NR Description: symbiosis-related like protein; protein id: supported by cDNA: 14759., supported by cDNA: gi_19912150 thaliana] >gi|19912151|dbj|BAB88387.1| autophagy 8a [Arabidopsis
  misc_feature (1)..(119): Homolog of NCBI NO: 21553487 NR Description: symbiosis-related like protein [Arabidopsis
  misc_feature (1)..(118): Homolog of NCBI NO: 15224577 NR Description: putative microtubule-associated protein; protein At2g05630.1, supported by cDNA: 3416., supported by cDNA:
  misc_feature (1)..(118): Homolog of NCBI NO: 7446944 NR Description: hypothetical protein F8K4.23 - Arabidopsis

SEQ ID NO: 9018 - protein, 107 aa, Zea mays subsp. mays; identical to SEQ ID NO: 6255
  peptide (1)..(107): Ceres Seq. ID no. 12361814

SEQ ID NO: 9019 - DNA, 681 bp, Zea mays subsp. mays
  misc_feature (1)..(681): Ceres Seq. ID no. 12357263
  misc_feature: MA Experiment ID: 108522 Result: Down-regulated in Transcription
  misc_feature: MA Experiment 108522 PARAMETER Experiment Name: Zm_42deg_Heat_P Parameter: Age (day) Value: 8
  misc_feature: MA Experiment 108522 PARAMETER Experiment Name: Zm_42deg_Heat_P Parameter: Organism Value: Zea mays
  misc_feature: MA Experiment 108522 PARAMETER Experiment Name: Zm_42deg_Heat_P Parameter: Plant Line Value: 35A19
  misc_feature: MA Experiment 108522 PARAMETER Experiment Name: Zm_42deg_Heat_P Parameter: Temperature (deg C) Value: 42 vs. 22
  misc_feature: MA Experiment 108522 PARAMETER Experiment Name: Zm_42deg_Heat_P Parameter: Timepoint (hr) Value: 1
  misc_feature: MA Experiment 108522 PARAMETER Experiment Name: Zm_42deg_Heat_P Parameter: Tissue Value: Aerial
  misc_feature: MA Experiment ID: 108523 Result: Down-regulated in Transcription
  misc_feature: MA Experiment 108523 PARAMETER Experiment Name: Zm_42deg_Heat_P Parameter: Age (day) Value: 8
  misc_feature: MA Experiment 108523 PARAMETER Experiment Name: Zm_42deg_Heat_P Parameter: Organism Value: Zea mays
  misc_feature: MA Experiment 108523 PARAMETER Experiment Name: Zm_42deg_Heat_P Parameter: Plant Line Value: 35A19
  misc_feature: MA Experiment 108523 PARAMETER Experiment Name: Zm_42deg_Heat_P Parameter: Temperature (deg C) Value: 42 vs. 22
  misc_feature: MA Experiment 108523 PARAMETER Experiment Name: Zm_42deg_Heat_P Parameter: Timepoint (hr) Value: 6
  misc_feature: MA Experiment 108523 PARAMETER Experiment Name: Zm_42deg_Heat_P Parameter: Tissue Value: Aerial
  misc_feature: MA Experiment ID: 108527 Result: Up-regulated in Transcription
  misc_feature: MA Experiment 108527 PARAMETER Experiment Name: Zm_5mM_NO_P Parameter: Age (day) Value: 8
  misc_feature: MA Experiment 108527 PARAMETER Experiment Name: Zm_5mM_NO_P Parameter: Organism Value: Zea mays
  misc_feature: MA Experiment 108527 PARAMETER Experiment Name: Zm_5mM_NO_P Parameter: Plant Line Value: 35A19
  misc_feature: MA Experiment 108527 PARAMETER Experiment Name: Zm_5mM_NO_P Parameter: Timepoint (hr) Value: 6
  misc_feature: MA Experiment 108527 PARAMETER Experiment Name: Zm_5mM_NO_P Parameter: Tissue Value: Aerial
  misc_feature: MA Experiment 108527 PARAMETER Experiment Name: Zm_5mM_NO_P Parameter: Treatment Value: 5mM NO vs. No Treatment
  misc_feature: MA Experiment ID: 108528 Result: Down-regulated in Transcription
  misc_feature: MA Experiment 108528 PARAMETER Experiment Name: Zm_Imbibed_Seeds_P Parameter: Age (day) Value: 5 vs. 2
  misc_feature: MA Experiment 108528 PARAMETER Experiment Name: Zm_Imbibed_Seeds_P Parameter: Organism Value: Zea mays
  misc_feature: MA Experiment 108528 PARAMETER Experiment Name: Zm_Imbibed_Seeds_P Parameter: Plant Line Value: 35A19
  misc_feature: MA Experiment 108528 PARAMETER Experiment Name: Zm_Imbibed_Seeds_P Parameter: Tissue Value: Aerial vs. Embryo
  misc_feature: MA Experiment ID: 108529 Result: Down-regulated in Transcription
  misc_feature: MA Experiment 108529 PARAMETER Experiment Name: Zm_Imbibed_Seeds_P Parameter: Age (day) Value: 5 vs. 2
  misc_feature: MA Experiment 108529 PARAMETER Experiment Name: Zm_Imbibed_Seeds_P Parameter: Organism Value: Zea mays
  misc_feature: MA Experiment 108529 PARAMETER Experiment Name: Zm_Imbibed_Seeds_P Parameter: Plant Line Value: 35A19
  misc_feature: MA Experiment 108529 PARAMETER Experiment Name: Zm_Imbibed_Seeds_P Parameter: Tissue Value: Roots vs. Embryo
  misc_feature: MA Experiment ID: 108530 Result: Down-regulated in Transcription
  misc_feature: MA Experiment 108530 PARAMETER Experiment Name: Zm_Imbibed_Seeds_P Parameter: Age (day) Value: 6 vs. 2
  misc_feature: MA Experiment 108530 PARAMETER Experiment Name: Zm_Imbibed_Seeds_P Parameter: Organism Value: Zea mays
  misc_feature: MA Experiment 108530 PARAMETER Experiment Name: Zm_Imbibed_Seeds_P Parameter: Plant Line Value: 35A19
  misc_feature: MA Experiment 108530 PARAMETER Experiment Name: Zm_Imbibed_Seeds_P Parameter: Tissue Value: Aerial vs. Embryo
  misc_feature: MA Experiment ID: 108534 Result: Down-regulated in Transcription
  misc_feature: MA Experiment 108534 PARAMETER Experiment Name: Zm_4deg_Cold_P Parameter: Age (hr) Value: 8
  misc_feature: MA Experiment 108534 PARAMETER Experiment Name: Zm_4deg_Cold_P Parameter: Organism Value: Zea mays
  misc_feature: MA Experiment 108534 PARAMETER Experiment Name: Zm_4deg_Cold_P Parameter: Plant Line Value: 35A19
  misc_feature: MA Experiment 108534 PARAMETER Experiment Name: Zm_4deg_Cold_P Parameter: Temperature (deg C) Value: 4 vs. 22
  misc_feature: MA Experiment 108534 PARAMETER Experiment Name: Zm_4deg_Cold_P Parameter: Timepoint (hr) Value: 6
  misc_feature: MA Experiment 108534 PARAMETER Experiment Name: Zm_4deg_Cold_P Parameter: Tissue Value: Aerial
  misc_feature: MA Experiment ID: 108535 Result: Down-regulated in Transcription
  misc_feature: MA Experiment 108535 PARAMETER Experiment Name: Zm_Meristem_P Parameter: Age (day) Value: 8
  misc_feature: MA Experiment 108535 PARAMETER Experiment Name: Zm_Meristem_P Parameter: Organism Value: Zea mays
  misc_feature: MA Experiment 108535 PARAMETER Experiment Name: Zm_Meristem_P Parameter: Plant Line Value: 35A19
  misc_feature: MA Experiment 108535 PARAMETER Experiment Name: Zm_Meristem_P Parameter: Tissue Value: Root Meristem vs. Above Root Meristem
  misc_feature: MA Experiment ID: 108544 Result: Up-regulated in Transcription
  misc_feature: MA Experiment ID: 108545 Result: Down-regulated in Transcription
  misc_feature: MA Experiment 108545 PARAMETER Experiment Name: Zm_Imbibed_Seeds_P Parameter: Age (day) Value: 3 vs. 2
  misc_feature: MA Experiment 108545 PARAMETER Experiment Name: Zm_Imbibed_Seeds_P Parameter: Organism Value: Zea mays
  misc_feature: MA Experiment 108545 PARAMETER Experiment Name: Zm_Imbibed_Seeds_P Parameter: Plant Line Value: 35A19
  misc_feature: MA Experiment 108545 PARAMETER Experiment Name: Zm_Imbibed_Seeds_P Parameter: Tissue Value: Aerial vs. Embryo
  misc_feature: MA Experiment ID: 108546 Result: Down-regulated in Transcription
  misc_feature: MA Experiment 108546 PARAMETER Experiment Name: Zm_Imbibed_Seeds_P Parameter: Age (day) Value: 3 vs. 2
  misc_feature: MA Experiment 108546 PARAMETER Experiment Name: Zm_Imbibed_Seeds_P Parameter: Organism Value: Zea mays
  misc_feature: MA Experiment 108546 PARAMETER Experiment Name: Zm_Imbibed_Seeds_P Parameter: Plant Line Value: 35A19
  misc_feature: MA Experiment 108546 PARAMETER Experiment Name: Zm_Imbibed_Seeds_P Parameter: Tissue Value: Roots vs. Embryo
  misc_feature: MA Experiment ID: 108547 Result: Down-regulated in Transcription
  misc_feature: MA Experiment 108547 PARAMETER Experiment Name: Zm_Imbibed_Seeds_P Parameter: Age (day) Value: 4 vs. 2
  misc_feature: MA Experiment 108547 PARAMETER Experiment Name: Zm_Imbibed_Seeds_P Parameter: Organism Value: Zea mays
  misc_feature: MA Experiment 108547 PARAMETER Experiment Name: Zm_Imbibed_Seeds_P Parameter: Plant Line Value: 35A19
  misc_feature: MA Experiment 108547 PARAMETER Experiment Name: Zm_Imbibed_Seeds_P Parameter: Tissue Value: Aerial vs. Embryo
  misc_feature: MA Experiment ID: 108556 Result: Up-regulated in Transcription
  misc_feature: MA Experiment 108556 PARAMETER Experiment Name: Zm_Drought_P Parameter: Age (day) Value: 9
  misc_feature: MA Experiment 108556 PARAMETER Experiment Name: Zm_Drought_P Parameter: Organism Value: Zea mays
  misc_feature: MA Experiment 108556 PARAMETER Experiment Name: Zm_Drought_P Parameter: Plant Line Value: 35A19
  misc_feature: MA Experiment 108556 PARAMETER Experiment Name: Zm_Drought_P Parameter: Timepoint (hr) Value: 24
  misc_feature: MA Experiment 108556 PARAMETER Experiment Name: Zm_Drought_P Parameter: Tissue Value: Aerial
  misc_feature: MA Experiment 108556 PARAMETER Experiment Name: Zm_Drought_P Parameter: Treatment Value: Drought vs. No Drought
  misc_feature: MA Experiment ID: 108559 Result: Up-regulated in Transcription
  misc_feature: MA Experiment 108559 PARAMETER Experiment Name: Zm_5mM_NO_P Parameter: Age (day) Value: 8
  misc_feature: MA Experiment 108559 PARAMETER Experiment Name: Zm_5mM_NO_P Parameter: Organism Value: Zea mays
  misc_feature: MA Experiment 108559 PARAMETER Experiment Name: Zm_5mM_NO_P Parameter: Plant Line Value: 35A19
  misc_feature: MA Experiment 108559 PARAMETER Experiment Name: Zm_5mM_NO_P Parameter: Timepoint (hr) Value: 12
  misc_feature: MA Experiment 108559 PARAMETER Experiment Name: Zm_5mM_NO_P Parameter: Tissue Value: Aerial
  misc_feature: MA Experiment 108559 PARAMETER Experiment Name: Zm_5mM_NO_P Parameter: Treatment Value: 5mM NO vs. No Treatment
  misc_feature: MA Experiment ID: 108597 Result: Up-regulated in Transcription
  misc_feature: MA Experiment 108597 PARAMETER Experiment Name: Zm_100uM_ABA_P Parameter: Age (day) Value: 9
  misc_feature: MA Experiment 108597 PARAMETER Experiment Name: Zm_100uM_ABA_P Parameter: Organism Value: Zea mays
  misc_feature: MA Experiment 108597 PARAMETER Experiment Name: Zm_100uM_ABA_P Parameter: Plant Line Value: 35A19
  misc_feature: MA Experiment 108597 PARAMETER Experiment Name: Zm_100uM_ABA_P Parameter: Timepoint (hr) Value: 24
  misc_feature: MA Experiment 108597 PARAMETER Experiment Name: Zm_100uM_ABA_P Parameter: Tissue Value: Aerial
  misc_feature: MA Experiment 108597 PARAMETER Experiment Name: Zm_100uM_ABA_P Parameter: Treatment Value: 100uM ABA vs. No Treatment
  misc_feature: MA Experiment ID: 108599 Result: Up-regulated in Transcription
  misc_feature: MA Experiment 108599 PARAMETER Experiment Name: Zm_RT1_P Parameter: Age (day) Value: 11
  misc_feature: MA Experiment 108599 PARAMETER Experiment Name: Zm_RT1_P Parameter: Organism Value: Zea mays
  misc_feature: MA Experiment 108599 PARAMETER Experiment Name: Zm_RT1_P Parameter: Plant Line Value: rt1 mut vs. rt1 wt
  misc_feature: MA Experiment 108599 PARAMETER Experiment Name: Zm_RT1_P Parameter: Tissue Value: Roots
  misc_feature: MA Experiment ID: 108687 Result: Down-regulated in Transcription
  misc_feature: MA Experiment 108687 PARAMETER Experiment Name: Zm_Embryos-Flowers__P Parameter: Tissue Value: Embryo vs. Aerial+
  misc_feature: MA Experiment ID: 20000477 Result: Up-regulated in Transcription
  misc_feature: MA Experiment 20000477 PARAMETER Experiment Name: Zm_5mM_SA_P Parameter: Age (day) Value: 10
  misc_feature: MA Experiment 20000477 PARAMETER Experiment Name: Zm_5mM_SA_P Parameter: Organism Value: Zea mays
  misc_feature: MA Experiment 20000477 PARAMETER Experiment Name: Zm_5mM_SA_P Parameter: Plant Line Value: 35A19
  misc_feature: MA Experiment 20000477 PARAMETER Experiment Name: Zm_5mM_SA_P Parameter: Timepoint (hr) Value: 48
  misc_feature: MA Experiment 20000477 PARAMETER Experiment Name: Zm_5mM_SA_P Parameter: Tissue Value: Aerial
  misc_feature: MA Experiment 20000477 PARAMETER Experiment Name: Zm_5mM_SA_P Parameter: Treatment Value: 5mM SA vs. No Treatment
  misc_feature: MA Experiment ID: 20000478 Result: Up-regulated in Transcription
  misc_feature: MA Experiment 20000478 PARAMETER Experiment Name: Zm_5mM_SA_P Parameter: Age (day) Value: 11
  misc_feature: MA Experiment 20000478 PARAMETER Experiment Name: Zm_5mM_SA_P Parameter: Organism Value: Zea mays
  misc_feature: MA Experiment 20000478 PARAMETER Experiment Name: Zm_5mM_SA_P Parameter: Plant Line Value: 35A19
  misc_feature: MA Experiment 20000478 PARAMETER Experiment Name: Zm_5mM_SA_P Parameter: Timepoint (hr) Value: 72
  misc_feature: MA Experiment 20000478 PARAMETER Experiment Name: Zm_5mM_SA_P Parameter: Tissue Value: Aerial
  misc_feature: MA Experiment 20000478 PARAMETER Experiment Name: Zm_5mM_SA_P Parameter: Treatment Value: 5mM SA vs. No Treatment
  misc_feature: MA Experiment ID: 20000480 Result: Up-regulated in Transcription
  misc_feature: MA Experiment 20000480 PARAMETER Experiment Name: Zm_Drought_P Parameter: Age (day) Value: 11
  misc_feature: MA Experiment 20000480 PARAMETER Experiment Name: Zm_Drought_P Parameter: Organism Value: Zea mays
  misc_feature: MA Experiment 20000480 PARAMETER Experiment Name: Zm_Drought_P Parameter: Plant Line Value: 35A19
  misc_feature: MA Experiment 20000480 PARAMETER Experiment Name: Zm_Drought_P Parameter: Timepoint (hr) Value: 72
  misc_feature: MA Experiment 20000480 PARAMETER Experiment Name: Zm_Drought_P Parameter: Tissue Value: Aerial
  misc_feature: MA Experiment 20000480 PARAMETER Experiment Name: Zm_Drought_P Parameter: Treatment Value: Drought vs. No Drought
  misc_feature: MA Experiment ID: 20000487 Result: Down-regulated in Transcription
  misc_feature: MA Experiment 20000487 PARAMETER Experiment Name: Zm_50mM_NH4NO3_L_to_H_P Parameter: Organism Value: Zea mays
  misc_feature: MA Experiment 20000487 PARAMETER Experiment Name: Zm_50mM_NH4NO3_L_to_H_P Parameter: Timepoint (hr) Value: 4
  misc_feature: MA Experiment 20000487 PARAMETER Experiment Name: Zm_50mM_NH4NO3_L_to_H_P Parameter: Tissue Value: Leaves
  misc_feature: MA Experiment 20000487 PARAMETER Experiment Name: Zm_50mM_NH4NO3_L_to_H_P Parameter: Treatment Value: 50mM NH4NO3 vs. 100mM Mannitol
  misc_feature: MA Experiment ID: 20000488 Result: Down-regulated in Transcription
  misc_feature: MA Experiment 20000488 PARAMETER Experiment Name: Zm_50mM_NH4NO3_L_to_H_P Parameter: Organism Value: Zea mays
  misc_feature: MA Experiment 20000488 PARAMETER Experiment Name: Zm_50mM_NH4NO3_L_to_H_P Parameter: Timepoint (hr) Value: 8
  misc_feature: MA Experiment 20000488 PARAMETER Experiment Name: Zm_50mM_NH4NO3_L_to_H_P Parameter: Tissue Value: Leaves
  misc_feature: MA Experiment 20000488 PARAMETER Experiment Name: Zm_50mM_NH4NO3_L_to_H_P Parameter: Treatment Value: 50mM NH4NO3 vs. 100mM Mannitol
  misc_feature: MA Experiment ID: 20000492 Result: Down-regulated in Transcription
  misc_feature: MA Experiment 20000492 PARAMETER Experiment Name: Zm_Hybrid_Seed_Dev_P Parameter: DAP Value: 12
  misc_feature: MA Experiment 20000492 PARAMETER Experiment Name: Zm_Hybrid_Seed_Dev_P Parameter: Organism Value: Zea mays
  misc_feature: MA Experiment 20000492 PARAMETER Experiment Name: Zm_Hybrid_Seed_Dev_P Parameter: Plant Line Value: 35A19
  misc_feature: MA Experiment 20000492 PARAMETER Experiment Name: Zm_Hybrid_Seed_Dev_P Parameter: Tissue Value: Fert Kernel vs. Unfert Floret
  misc_feature: MA Experiment ID: 20000532 Result: Up-regulated in Transcription
  misc_feature: MA Experiment 20000532 PARAMETER Experiment Name: Zm_0.001percent_MeJA_P Parameter: Age (day) Value: 10
  misc_feature: MA Experiment 20000532 PARAMETER Experiment Name: Zm_0.001percent_MeJA_P Parameter: Organism Value: Zea mays
  misc_feature: MA Experiment 20000532 PARAMETER Experiment Name: Zm_0.001percent_MeJA_P Parameter: Plant Line Value: 35A19
  misc_feature: MA Experiment 20000532 PARAMETER Experiment Name: Zm_0.001percent_MeJA_P Parameter: Timepoint (hr) Value: 48
  misc_feature: MA Experiment 20000532 PARAMETER Experiment Name: Zm_0.001percent_MeJA_P Parameter: Tissue Value: Aerial
  misc_feature: MA Experiment 20000532 PARAMETER Experiment Name: Zm_0.001percent_MeJA_P Parameter: Treatment Value: 0.001percent MeJA vs. No Treatment
  misc_feature: MA Experiment ID: 20000533 Result: Up-regulated in Transcription
  misc_feature: MA Experiment 20000533 PARAMETER Experiment Name: Zm_0.001percent_MeJA_P Parameter: Age (day) Value: 11
  misc_feature: MA Experiment 20000533 PARAMETER Experiment Name: Zm_0.001percent_MeJA_P Parameter: Organism Value: Zea mays
  misc_feature: MA Experiment 20000533 PARAMETER Experiment Name: Zm_0.001percent_MeJA_P Parameter: Plant Line Value: 35A19
  misc_feature: MA Experiment 20000533 PARAMETER Experiment Name: Zm_0.001percent_MeJA_P Parameter: Timepoint (hr) Value: 72
  misc_feature: MA Experiment 20000533 PARAMETER Experiment Name: Zm_0.001percent_MeJA_P Parameter: Tissue Value: Aerial
  misc_feature: MA Experiment 20000533 PARAMETER Experiment Name: Zm_0.001percent_MeJA_P Parameter: Treatment Value: 0.001percent MeJA vs. No Treatment
  misc_feature: MA Experiment ID: 20000535 Result: Down-regulated in Transcription
  misc_feature: MA Experiment 20000535 PARAMETER Experiment Name: Zm_Hybrid_Seed_Dev_P Parameter: DAP Value: 30 vs. 12
  misc_feature: MA Experiment 20000535 PARAMETER Experiment Name: Zm_Hybrid_Seed_Dev_P Parameter: Organism Value: Zea mays
  misc_feature: MA Experiment 20000535 PARAMETER Experiment Name: Zm_Hybrid_Seed_Dev_P Parameter: Plant Line Value: 35A19
  misc_feature: MA Experiment 20000535 PARAMETER Experiment Name: Zm_Hybrid_Seed_Dev_P Parameter: Tissue Value: Embryo vs. Unfert Floret
  misc_feature: MA Experiment ID: 20000626 Result: Up-regulated in Transcription
  misc_feature: MA Experiment 20000626 PARAMETER Experiment Name: Zm_Herbicide-Treatments_P Parameter: Timepoint (hr) Value: 12
  misc_feature: MA Experiment 20000626 PARAMETER Experiment Name: Zm_Herbicide-Treatments_P Parameter: Tissue Value: Aerial
  misc_feature: MA Experiment 20000626 PARAMETER Experiment Name: Zm_Herbicide-Treatments_P Parameter: Treatment Value: Roundup vs. No Treatment
  misc_feature: MA Experiment ID: 20000627 Result: Up-regulated in Transcription
  misc_feature: MA Experiment 20000627 PARAMETER Experiment Name: Zm_Herbicide-Treatments_P Parameter: Timepoint (hr) Value: 12
  misc_feature: MA Experiment 20000627 PARAMETER Experiment Name: Zm_Herbicide-Treatments_P Parameter: Tissue Value: Aerial
  misc_feature: MA Experiment 20000627 PARAMETER Experiment Name: Zm_Herbicide-Treatments_P Parameter: Treatment Value: Finale vs. No Treatment
  misc_feature: MA Experiment ID: 20000628 Result: Down-regulated in Transcription
  misc_feature: MA Experiment 20000628 PARAMETER Experiment Name: Zm_Herbicide-Treatments_P Parameter: Timepoint (hr) Value: 12
  misc_feature: MA Experiment 20000628 PARAMETER Experiment Name: Zm_Herbicide-Treatments_P Parameter: Tissue Value: Aerial
  misc_feature: MA Experiment 20000628 PARAMETER Experiment Name: Zm_Herbicide-Treatments_P Parameter: Treatment Value: Glean vs. No Treatment
  misc_feature: MA Experiment ID: 20001610 Result: Down-regulated in Transcription
  misc_feature: MA Experiment 20001610 PARAMETER Experiment Name: Zm_50ppm_KNO3_L-to-H_P Parameter: Age (day) Value: 19
  misc_feature: MA Experiment 20001610 PARAMETER Experiment Name: Zm_50ppm_KNO3_L-to-H_P Parameter: Organism Value: Zea mays
  misc_feature: MA Experiment 20001610 PARAMETER Experiment Name: Zm_50ppm_KNO3_L-to-H_P Parameter: Plant Line Value: 35A19
  misc_feature: MA Experiment 20001610 PARAMETER Experiment Name: Zm_50ppm_KNO3_L-to-H_P Parameter: Timepoint (hr) Value: 2
  misc_feature: MA Experiment 20001610 PARAMETER Experiment Name: Zm_50ppm_KNO3_L-to-H_P Parameter: Tissue Value: Roots
  misc_feature: MA Experiment 20001610 PARAMETER Experiment Name: Zm_50ppm_KNO3_L-to-H_P Parameter: Treatment Value: 50ppm KNO3 vs. 50ppm KCl
  misc_feature: MA Experiment ID: 20001612 Result: Down-regulated in Transcription
  misc_feature: MA Experiment 20001612 PARAMETER Experiment Name: Zm_50ppm_KNO3_L-to-H_P Parameter: Age (day) Value: 19
  misc_feature: MA Experiment 20001612 PARAMETER Experiment Name: Zm_50ppm_KNO3_L-to-H_P Parameter: Organism Value: Zea mays
  misc_feature: MA Experiment 20001612 PARAMETER Experiment Name: Zm_50ppm_KNO3_L-to-H_P Parameter: Plant Line Value: 35A19
  misc_feature: MA Experiment 20001612 PARAMETER Experiment Name: Zm_50ppm_KNO3_L-to-H_P Parameter: Timepoint (hr) Value: 8
  misc_feature: MA Experiment 20001612 PARAMETER Experiment Name: Zm_50ppm_KNO3_L-to-H_P Parameter: Tissue Value: Roots
  misc_feature: MA Experiment 20001612 PARAMETER Experiment Name: Zm_50ppm_KNO3_L-to-H_P Parameter: Treatment Value: 50ppm KNO3 vs. 50ppm KCl
aagtagcagctacatacgtcctcctccattaatattggcagcaagctaggatcatcagcatctgagcttatatattactacatcgatcggttgccaaatggcggggatgacagtcggcaataagctggcgctggctgcggtgctgctgtgcgcggcggcggccatggccacggcgcagcaggcctccggcgtgcgcgccacctacaacttctacaacccgcagcagaacaactgggacctcaacgccgtgagcgcgtactgcgcgacgtgggacgccagcaagccgctgtcgtggcgcatgaagtacggctggacggccttctgcgggcccgccggccccaccggccaggccgcgtgcgggcagtgtcttctggtgaccaacacggcgacgggggcgtccatcacggtgaggatcgtggaccagtgcagcaacggcggcctggacctggactacgacacggcgttcaagcccatcgacaccaacggccagggcttccaggccggccacctcaccgtcaactaccagttcgtcaactgcggcgacaactgaactgatagattattcacctgtgcatgcacctatatgtactagcaccattattccaagagttatatggatgtgatcccacacgtaagagccaataaaacatatatgcccagtggaataaactgaattaccta

SEQ ID NO: 9020 - protein, 150 aa, Zea mays subsp. mays
  peptide (1)..(150): Ceres Seq. ID no. 12357264
  misc_feature (28)..(147): Pfam Name: Barwin family Pfam Description: Barwin family
  misc_feature (9)..(149): Homolog of NCBI NO: 7442145 NR Description: pathogenesis-related protein 4 - barley
  misc_feature (4)..(149): Homolog of NCBI NO: 34925032 NR Description: Wheatwin2 precursor (Pathogenesis-related protein
  misc_feature (1)..(147): Homolog of NCBI NO: 16024932 NR Description: pathogenesis-related protein [Oryza sativa]
  misc_feature (12)..(149): Homolog of NCBI NO: 34925030 NR Description: Wheatwin1 precursor (Pathogenesis-related protein
  misc_feature (4)..(150): Homolog of NCBI NO: 38018635 NR Description: pathogenesis-related protein 4b [Oryza sativa
  misc_feature (15)..(149): Homolog of NCBI NO: 3511147 NR Description: PR-4 type protein [Vitis vinifera]
  misc_feature (27)..(149): Homolog of NCBI NO: 114832 NR Description: BARWIN >gi|322831|pir||A43474 barwin - barley
  misc_feature (6)..(149): Homolog of NCBI NO: 100351 NR Description: pathogenesis-related protein 4A - common tobacco
  misc_feature (27)..(149): Homolog of NCBI NO: 442693 NR Description: Barwin, Basic Barley Seed Protein (Nmr, 20 >gi|442694|pdb|1BW4| Barwin, Basic Barley Seed Protein (Nmr, 20
  misc_feature (6)..(149): Homolog of NCBI NO: 130839 NR Description: Pathogenesis-related protein PR-4A precursor
MAGMTVGNKLALAAVLLCAAAAMATAQQASGVRATYNFYNPQQNNWDLNAVSAYCATWDASKPLSWRMKYGWTAFCGPAGPTGQAACGQCLLVTNTATGASITVRIVDQCSNGGLDLDYDTAFKPIDTNGQGFQAGHLTVNYQFVNCGDN

SEQ ID NO: 9021 - protein, 147 aa, Zea mays subsp. mays
  peptide (1)..(147): Ceres Seq. ID no. 12357265
  misc_feature (25)..(144): Pfam Name: Barwin family Pfam Description: Barwin family
  misc_feature (6)..(146): Homolog of NCBI NO: 7442145 NR Description: pathogenesis-related protein 4 - barley
  misc_feature (1)..(146): Homolog of NCBI NO: 34925032 NR Description: Wheatwin2 precursor (Pathogenesis-related protein
  misc_feature (1)..(144): Homolog of NCBI NO: 16024932 NR Description: pathogenesis-related protein [Oryza sativa]
  misc_feature (9)..(146): Homolog of NCBI NO: 34925030 NR Description: Wheatwin1 precursor (Pathogenesis-related protein
  misc_feature (1)..(147): Homolog of NCBI NO: 38018635 NR Description: pathogenesis-related protein 4b [Oryza sativa
  misc_feature (12)..(146): Homolog of NCBI NO: 3511147 NR Description: PR-4 type protein [Vitis vinifera]
  misc_feature (24)..(146): Homolog of NCBI NO: 114832 NR Description: BARWIN >gi|322831|pir||A43474 barwin - barley
  misc_feature (3)..(146): Homolog of NCBI NO: 100351 NR Description: pathogenesis-related protein 4A - common tobacco
  misc_feature (24)..(146): Homolog of NCBI NO: 442693 NR Description: Barwin, Basic Barley Seed Protein (Nmr, 20 >gi|442694|pdb|1BW4| Barwin, Basic Barley Seed Protein (Nmr, 20
  misc_feature (3)..(146): Homolog of NCBI NO: 130839 NR Description: Pathogenesis-related protein PR-4A precursor
MTVGNKLALAAVLLCAAAAMATAQQASGVRATYNFYNPQQNNWDLNAVSAYCATWDASKPLSWRMKYGWTAFCGPAGPTGQAACGQCLLVTNTATGASITVRIVDQCSNGGLDLDYDTAFKPIDTNGQGFQAGHLTVNYQFVNCGDN

SEQ ID NO: 9022 - protein, 128 aa, Zea mays subsp. mays
  peptide (1)..(128): Ceres Seq. ID no. 12357266
  misc_feature (6)..(125): Pfam Name: Barwin family Pfam Description: Barwin family
  misc_feature (1)..(127): Homolog of NCBI NO: 7442145 NR Description: pathogenesis-related protein 4 - barley
  misc_feature (1)..(127): Homolog of NCBI NO: 34925032 NR Description: Wheatwin2 precursor (Pathogenesis-related protein
  misc_feature (1)..(125): Homolog of NCBI NO: 16024932 NR Description: pathogenesis-related protein [Oryza sativa]
  misc_feature (1)..(127): Homolog of NCBI NO: 34925030 NR Description: Wheatwin1 precursor (Pathogenesis-related protein
  misc_feature (1)..(128): Homolog of NCBI NO: 38018635 NR Description: pathogenesis-related protein 4b [Oryza sativa
  misc_feature (1)..(127): Homolog of NCBI NO: 3511147 NR Description: PR-4 type protein [Vitis vinifera]
  misc_feature (5)..(127): Homolog of NCBI NO: 114832 NR Description: BARWIN >gi|322831|pir||A43474 barwin - barley
  misc_feature (1)..(127): Homolog of NCBI NO: 100351 NR Description: pathogenesis-related protein 4A - common tobacco
  misc_feature (5)..(127): Homolog of NCBI NO: 442693 NR Description: Barwin, Basic Barley Seed Protein (Nmr, 20 >gi|442694|pdb|1BW4| Barwin, Basic Barley Seed Protein (Nmr, 20
  misc_feature (1)..(127): Homolog of NCBI NO: 130839 NR Description: Pathogenesis-related protein PR-4A precursor
MATAQQASGVRATYNFYNPQQNNWDLNAVSAYCATWDASKPLSWRMKYGWTAFCGPAGPTGQAACGQCLLVTNTATGASITVRIVDQCSNGGLDLDYDTAFKPIDTNGQGFQAGHLTVNYQFVNCGDN

SEQ ID NO: 9023 - DNA, 741 bp, Zea mays subsp. mays
  misc_feature (1)..(741): Ceres Seq. ID no. 12402135
  misc_feature: MA Experiment ID: 108535 Result: Up-regulated in Transcription
  misc_feature: MA Experiment 108535 PARAMETER Experiment Name: Zm_Meristem_P Parameter: Age (day) Value: 8
  misc_feature: MA Experiment 108535 PARAMETER Experiment Name: Zm_Meristem_P Parameter: Organism Value: Zea mays
  misc_feature: MA Experiment 108535 PARAMETER Experiment Name: Zm_Meristem_P Parameter: Plant Line Value: 35A19
  misc_feature: MA Experiment 108535 PARAMETER Experiment Name: Zm_Meristem_P Parameter: Tissue Value: Root Meristem vs. Above Root Meristem
cattttctgggtgttcttcactccagttatggtcagtgtggctaaatctttcgatgctccaataaagcttctgtttccaactgcagacgctgaacggccattctccatgcttggccttggtgacattgtaatacctggtatattcgtcgcacttgccttgcgttttgatgtctcaagaggtaccaagaagcgttacttcaacagtgcatttttgggatacgctgtgggtatgacggtgaccatcgttgtaatgaactggtttcaagcggcgcagcctgctctactataccttgttcctggtgtgattggttttgtcgctgttccctgtctgtggtatggagaagtgaaacagctactggagtttgacgagtcaaaaactgagtcggaggaaggcagtacagaagagaagcaagatgatgatagttccaaaggcaacaaaaaggtggactagcaggatttagttccggaggtaaaaggacaggaagacagttttcgtgtaatgtcgtctggcagctaaaaaaacgggtctgatgaccctctaataccggattcgctcgccttacttaagaacttagaagaaatggttcagcatgatacaagttttattttattttttgtttcattttgcggattatttgccctgggctggagagtgggaattgaggggaacaaaatagatgctgttactcgcgatgtactccctgattcgttaaggaattcaccagaactttgacttggccg

SEQ ID NO: 9024 - protein, 149 aa, Zea mays subsp. mays
  peptide (1)..(149): Ceres Seq. ID no. 12402136
  misc_feature (1)..(123): Pfam Name: Signal peptide peptidase Pfam Description: Signal peptide peptidase
  misc_feature (1)..(145): Homolog of NCBI NO: 18395487 NR Description: expressed protein; protein id: At2g03120.1, by cDNA: 37655., supported by cDNA: gi_17473841 [Arabidopsis
  misc_feature (1)..(145): Homolog of NCBI NO: 21593273 NR Description: unknown [Arabidopsis thaliana]
  misc_feature (1)..(149): Homolog of NCBI NO: 18034682 NR Description: histocompatibility 13 [Mus musculus]
  misc_feature (1)..(149): Homolog of NCBI NO: 20452374 NR Description: minor histocompatibility antigen H13 isoform 1
  misc_feature (1)..(149): Homolog of NCBI NO: 25992191 NR Description: putative presenilin-like aspartyl protease [Mus
  misc_feature (1)..(149): Homolog of NCBI NO: 26389558 NR Description: unnamed protein product [Mus musculus]
  misc_feature (1)..(149): Homolog of NCBI NO: 28277155 NR Description: Similar to histocompatibility 13 [Mus musculus]
  misc_feature (1)..(149): Homolog of NCBI NO: 34858994 NR Description: similar to histocompatibility 13; presenilin-like
  misc_feature (1)..(147): Homolog of NCBI NO: 11121544 NR Description: dJ324O17.1.2 (A novel protein similar to
  misc_feature (1)..(147): Homolog of NCBI NO: 22761270 NR Description: unnamed protein product [Homo sapiens]
IFWVFFTPVMVSVAKSFDAPIKLLFPTADAERPFSMLGLGDIVIPGIFVALALRFDVSRGTKKRYFNSAFLGYAVGMTVTIVVMNWFQAAQPALLYLVPGVIGFVAVPCLWYGEVKQLLEFDESKTESEEGSTEEKQDDDSSKGNKKVD

SEQ ID NO: 9025 - protein, 140 aa, Zea mays subsp. mays
  peptide (1)..(140): Ceres Seq. ID no. 12402137
  misc_feature (1)..(114): Pfam Name: Signal peptide peptidase Pfam Description: Signal peptide peptidase
  misc_feature (1)..(136): Homolog of NCBI NO: 18395487 NR Description: expressed protein; protein id: At2g03120.1, by cDNA: 37655., supported by cDNA: gi_17473841 [Arabidopsis
  misc_feature (1)..(136): Homolog of NCBI NO: 21593273 NR Description: unknown [Arabidopsis thaliana]
  misc_feature (1)..(140): Homolog of NCBI NO: 18034682 NR Description: histocompatibility 13 [Mus musculus]
  misc_feature (1)..(140): Homolog of NCBI NO: 20452374 NR Description: minor histocompatibility antigen H13 isoform 1
  misc_feature (1)..(140): Homolog of NCBI NO: 28277155 NR Description: Similar to histocompatibility 13 [Mus musculus]
  misc_feature (1)..(140): Homolog of NCBI NO: 25992191 NR Description: putative presenilin-like aspartyl protease [Mus
  misc_feature (1)..(140): Homolog of NCBI NO: 26389558 NR Description: unnamed protein product [Mus musculus]
  misc_feature (1)..(140): Homolog of NCBI NO: 34858994 NR Description: similar to histocompatibility 13; presenilin-like
  misc_feature (1)..(138): Homolog of NCBI NO: 11121544 NR Description: dJ324O17.1.2 (A novel protein similar to
  misc_feature (1)..(138): Homolog of NCBI NO: 23308607 NR Description: histocompatibility (minor) 13; signal peptide
MVSVAKSFDAPIKLLFPTADAERPFSMLGLGDIVIPGIFVALALRFDVSRGTKKRYFNSAFLGYAVGMTVTIVVMNWFQAAQPALLYLVPGVIGFVAVPCLWYGEVKQLLEFDESKTESEEGSTEEKQDDDSSKGNKKVD

SEQ ID NO: 9026 - protein, 114 aa, Zea mays subsp. mays
  peptide (1)..(114): Ceres Seq. ID no. 12402138
  misc_feature (1)..(88): Pfam Name: Signal peptide peptidase Pfam Description: Signal peptide peptidase
  misc_feature (1)..(110): Homolog of NCBI NO: 18395487 NR Description: expressed protein; protein id: At2g03120.1, by cDNA: 37655., supported by cDNA: gi_17473841 [Arabidopsis
  misc_feature (1)..(110): Homolog of NCBI NO: 21593273 NR Description: unknown [Arabidopsis thaliana]
  misc_feature (1)..(114): Homolog of NCBI NO: 18034682 NR Description: histocompatibility 13 [Mus musculus]
  misc_feature (1)..(114): Homolog of NCBI NO: 20452374 NR Description: minor histocompatibility antigen H13 isoform 1
  misc_feature (1)..(114): Homolog of NCBI NO: 25992191 NR Description: putative presenilin-like aspartyl protease [Mus
  misc_feature (1)..(114): Homolog of NCBI NO: 28277155 NR Description: Similar to histocompatibility 13 [Mus musculus]
  misc_feature (1)..(114): Homolog of NCBI NO: 26389558 NR Description: unnamed protein product [Mus musculus]
  misc_feature (1)..(114): Homolog of NCBI NO: 34858994 NR Description: similar to histocompatibility 13; presenilin-like
  misc_feature (1)..(112): Homolog of NCBI NO: 11121544 NR Description: dJ324O17.1.2 (A novel protein similar to
  misc_feature (1)..(112): Homolog of NCBI NO: 22761270 NR Description: unnamed protein product [Homo sapiens]
MLGLGDIVIPGIFVALALRFDVSRGTKKRYFNSAFLGYAVGMTVTIVVMNWFQAAQPALLYLVPGVIGFVAVPCLWYGEVKQLLEFDESKTESEEGSTEEKQDDDSSKGNKKVD

SEQ ID NO: 9027 - DNA, 765 bp, Zea mays subsp. mays
  misc_feature (1)..(765): Ceres Seq. ID no. 12346311
  misc_feature: MA Experiment ID: 108527 Result: Down-regulated in Transcription
  misc_feature: MA Experiment 108527 PARAMETER Experiment Name: Zm_5mM_NO_P Parameter: Age (day) Value: 8
  misc_feature: MA Experiment 108527 PARAMETER Experiment Name: Zm_5mM_NO_P Parameter: Organism Value: Zea mays
  misc_feature: MA Experiment 108527 PARAMETER Experiment Name: Zm_5mM_NO_P Parameter: Plant Line Value: 35A19
  misc_feature: MA Experiment 108527 PARAMETER Experiment Name: Zm_5mM_NO_P Parameter: Timepoint (hr) Value: 6
  misc_feature: MA Experiment 108527 PARAMETER Experiment Name: Zm_5mM_NO_P Parameter: Tissue Value: Aerial
  misc_feature: MA Experiment 108527 PARAMETER Experiment Name: Zm_5mM_NO_P Parameter: Treatment Value: 5mM NO vs. No Treatment
  misc_feature: MA Experiment ID: 108528 Result: Up-regulated in Transcription
  misc_feature: MA Experiment 108528 PARAMETER Experiment Name: Zm_Imbibed_Seeds_P Parameter: Age (day) Value: 5 vs. 2
  misc_feature: MA Experiment 108528 PARAMETER Experiment Name: Zm_Imbibed_Seeds_P Parameter: Organism Value: Zea mays
  misc_feature: MA Experiment 108528 PARAMETER Experiment Name: Zm_Imbibed_Seeds_P Parameter: Plant Line Value: 35A19
  misc_feature: MA Experiment 108528 PARAMETER Experiment Name: Zm_Imbibed_Seeds_P Parameter: Tissue Value: Aerial vs. Embryo
  misc_feature: MA Experiment ID: 108530 Result: Up-regulated in Transcription
  misc_feature: MA Experiment 108530 PARAMETER Experiment Name: Zm_Imbibed_Seeds_P Parameter: Age (day) Value: 6 vs. 2
  misc_feature: MA Experiment 108530 PARAMETER Experiment Name: Zm_Imbibed_Seeds_P Parameter: Organism Value: Zea mays
  misc_feature: MA Experiment 108530 PARAMETER Experiment Name: Zm_Imbibed_Seeds_P Parameter: Plant Line Value: 35A19
  misc_feature: MA Experiment 108530 PARAMETER Experiment Name: Zm_Imbibed_Seeds_P Parameter: Tissue Value: Aerial vs. Embryo
  misc_feature: MA Experiment ID: 108535 Result: Up-regulated in Transcription
  misc_feature: MA Experiment 108535 PARAMETER Experiment Name: Zm_Meristem_P Parameter: Age (day) Value: 8
  misc_feature: MA Experiment 108535 PARAMETER Experiment Name: Zm_Meristem_P Parameter: Organism Value: Zea mays
  misc_feature: MA Experiment 108535 PARAMETER Experiment Name: Zm_Meristem_P Parameter: Plant Line Value: 35A19
  misc_feature: MA Experiment 108535 PARAMETER Experiment Name: Zm_Meristem_P Parameter: Tissue Value: Root Meristem vs. Above Root Meristem
  misc_feature: MA Experiment ID: 108536 Result: Down-regulated in Transcription
  misc_feature: MA Experiment 108536 PARAMETER Experiment Name: Zm_Meristem_P Parameter: Age (day) Value: 8
  misc_feature: MA Experiment 108536 PARAMETER Experiment Name: Zm_Meristem_P Parameter: Organism Value: Zea mays
  misc_feature: MA Experiment 108536 PARAMETER Experiment Name: Zm_Meristem_P Parameter: Plant Line Value: 35A19
  misc_feature: MA Experiment 108536 PARAMETER Experiment Name: Zm_Meristem_P Parameter: Tissue Value: Shoot Meristem vs. Above Shoot Meristem
  misc_feature: MA Experiment ID: 108545 Result: Up-regulated in Transcription
  misc_feature: MA Experiment 108545 PARAMETER Experiment Name: Zm_Imbibed_Seeds_P Parameter: Age (day) Value: 3 vs. 2
  misc_feature: MA Experiment 108545 PARAMETER Experiment Name: Zm_Imbibed_Seeds_P Parameter: Organism Value: Zea mays
  misc_feature: MA Experiment 108545 PARAMETER Experiment Name: Zm_Imbibed_Seeds_P Parameter: Plant Line Value: 35A19
  misc_feature: MA Experiment 108545 PARAMETER Experiment Name: Zm_Imbibed_Seeds_P Parameter: Tissue Value: Aerial vs. Embryo
  misc_feature: MA Experiment ID: 108546 Result: Down-regulated in Transcription
  misc_feature: MA Experiment 108546 PARAMETER Experiment Name: Zm_Imbibed_Seeds_P Parameter: Age (day) Value: 3 vs. 2
  misc_feature: MA Experiment 108546 PARAMETER Experiment Name: Zm_Imbibed_Seeds_P Parameter: Organism Value: Zea mays
  misc_feature: MA Experiment 108546 PARAMETER Experiment Name: Zm_Imbibed_Seeds_P Parameter: Plant Line Value: 35A19
  misc_feature: MA Experiment 108546 PARAMETER Experiment Name: Zm_Imbibed_Seeds_P Parameter: Tissue Value: Roots vs. Embryo
  misc_feature: MA Experiment ID: 108547 Result: Up-regulated in Transcription
  misc_feature: MA Experiment 108547 PARAMETER Experiment Name: Zm_Imbibed_Seeds_P Parameter: Age (day) Value: 4 vs. 2
  misc_feature: MA Experiment 108547 PARAMETER Experiment Name: Zm_Imbibed_Seeds_P Parameter: Organism Value: Zea mays
  misc_feature: MA Experiment 108547 PARAMETER Experiment Name: Zm_Imbibed_Seeds_P Parameter: Plant Line Value: 35A19
  misc_feature: MA Experiment 108547 PARAMETER Experiment Name: Zm_Imbibed_Seeds_P Parameter: Tissue Value: Aerial vs. Embryo
  misc_feature: MA Experiment ID: 108559 Result: Down-regulated in Transcription
  misc_feature: MA Experiment 108559 PARAMETER Experiment Name: Zm_5mM_NO_P Parameter: Age (day) Value: 8
  misc_feature: MA Experiment 108559 PARAMETER Experiment Name: Zm_5mM_NO_P Parameter: Organism Value: Zea mays
  misc_feature: MA Experiment 108559 PARAMETER Experiment Name: Zm_5mM_NO_P Parameter: Plant Line Value: 35A19
  misc_feature: MA Experiment 108559 PARAMETER Experiment Name: Zm_5mM_NO_P Parameter: Timepoint (hr) Value: 12
  misc_feature: MA Experiment 108559 PARAMETER Experiment Name: Zm_5mM_NO_P Parameter: Tissue Value: Aerial
  misc_feature: MA Experiment 108559 PARAMETER Experiment Name: Zm_5mM_NO_P Parameter: Treatment Value: 5mM NO vs. No Treatment
  misc_feature: MA Experiment ID: 108687 Result: Down-regulated in Transcription
  misc_feature: MA Experiment 108687 PARAMETER Experiment Name: Zm_Embryos-Flowers__P Parameter: Tissue Value: Embryo vs. Aerial+
  misc_feature: MA Experiment ID: 108688 Result: Down-regulated in Transcription
  misc_feature: MA Experiment 108688 PARAMETER Experiment Name: Zm_Embryos-Flowers__P Parameter: Tissue Value: Immature Flowers vs. Aerial+
  misc_feature: MA Experiment ID: 20000478 Result: Down-regulated in Transcription
  misc_feature: MA Experiment 20000478 PARAMETER Experiment Name: Zm_5mM_SA_P Parameter: Age (day) Value: 11
  misc_feature: MA Experiment 20000478 PARAMETER Experiment Name: Zm_5mM_SA_P Parameter: Organism Value: Zea mays
  misc_feature: MA Experiment 20000478 PARAMETER Experiment Name: Zm_5mM_SA_P Parameter: Plant Line Value: 35A19
  misc_feature: MA Experiment 20000478 PARAMETER Experiment Name: Zm_5mM_SA_P Parameter: Timepoint (hr) Value: 72
  misc_feature: MA Experiment 20000478 PARAMETER Experiment Name: Zm_5mM_SA_P Parameter: Tissue Value: Aerial
  misc_feature: MA Experiment 20000478 PARAMETER Experiment Name: Zm_5mM_SA_P Parameter: Treatment Value: 5mM SA vs. No Treatment
  misc_feature: MA Experiment ID: 20000479 Result: Down-regulated in Transcription
  misc_feature: MA Experiment 20000479 PARAMETER Experiment Name: Zm_Drought_P Parameter: Age (day) Value: 10
  misc_feature: MA Experiment 20000479 PARAMETER Experiment Name: Zm_Drought_P Parameter: Organism Value: Zea mays
  misc_feature: MA Experiment 20000479 PARAMETER Experiment Name: Zm_Drought_P Parameter: Plant Line Value: 35A19
  misc_feature: MA Experiment 20000479 PARAMETER Experiment Name: Zm_Drought_P Parameter: Timepoint (hr) Value: 48
  misc_feature: MA Experiment 20000479 PARAMETER Experiment Name: Zm_Drought_P Parameter: Tissue Value: Aerial
  misc_feature: MA Experiment 20000479 PARAMETER Experiment Name: Zm_Drought_P Parameter: Treatment Value: Drought vs. No Drought
  misc_feature: MA Experiment ID: 20000480 Result: Down-regulated in Transcription
  misc_feature: MA Experiment 20000480 PARAMETER Experiment Name: Zm_Drought_P Parameter: Age (day) Value: 11
  misc_feature: MA Experiment 20000480 PARAMETER Experiment Name: Zm_Drought_P Parameter: Organism Value: Zea mays
  misc_feature: MA Experiment 20000480 PARAMETER Experiment Name: Zm_Drought_P Parameter: Plant Line Value: 35A19
  misc_feature: MA Experiment 20000480 PARAMETER Experiment Name: Zm_Drought_P Parameter: Timepoint (hr) Value: 72
  misc_feature: MA Experiment 20000480 PARAMETER Experiment Name: Zm_Drought_P Parameter: Tissue Value: Aerial
  misc_feature: MA Experiment 20000480 PARAMETER Experiment Name: Zm_Drought_P Parameter: Treatment Value: Drought vs. No Drought
  misc_feature: MA Experiment ID: 20000535 Result: Down-regulated in Transcription
  misc_feature: MA Experiment 20000535 PARAMETER Experiment Name: Zm_Hybrid_Seed_Dev_P Parameter: DAP Value: 30 vs. 12
  misc_feature: MA Experiment 20000535 PARAMETER Experiment Name: Zm_Hybrid_Seed_Dev_P Parameter: Organism Value: Zea mays
  misc_feature: MA Experiment 20000535 PARAMETER Experiment Name: Zm_Hybrid_Seed_Dev_P Parameter: Plant Line Value: 35A19
  misc_feature: MA Experiment 20000535 PARAMETER Experiment Name: Zm_Hybrid_Seed_Dev_P Parameter: Tissue Value: Embryo vs. Unfert Floret
atctacgaacgggggccgggaaaagatcggctacagacagatgaggctctgtctccggcaagcggcggccaccagctcacccctcgcagctaccctccgcggcaagacttctacgagcaccctcgccccccatggccggctcagcttcagccacaccacgtcgctgcagacggcgcccgggcaccgctggctccgagcagggtgggcggtgcgcgtgctcccgctgacggaggagaacgtggagaaggtgctggacgaggtgcggccgagcctgatggcggacggcggcaacgtggcgctgcacgagatcgacggcctcgtcgtcgtgctcaagctgcagggcgcgtgcggctcctgccccagctccaccatgacgctcaagatgggcatcgagacgcgcctccgcgacaagatccccgacatcctcgaggtcgagcagatcgtcgacaccgagaccggcctcgacctcaccgccgacaacgtcgacaaggtgcttgatgagatcagaccgtacctctccggcactggaggtggaagcctcgagcttctccagattgacggatacgtcgtcaagatccggatcggcggacctgcagccggtgtaatgacagtacgagtagccgtgacacagaaactgagggagaaaataccttccatcttggctgttcagctcacagaatagaaatgcgagagctcacttgtgcatcatcacgacgaaactctggctttcaggcgaatgtgcagtgttcatcagtcttatatttc

SEQ ID NO: 9028 - protein, 226 aa, Zea mays subsp. mays
  peptide (1)..(226): Ceres Seq. ID no. 12346312
  misc_feature (80)..(146): Pfam Name: NifU-like domain Pfam Description: NifU-like domain
  misc_feature (24)..(226): Homolog of NCBI NO: 7485833 NR Description: hypothetical protein F20B18.20 - Arabidopsis >gi|4538920|emb|CAB39656.1| nitrogen fixation like protein thaliana] >gi|7269442|emb|CAB79446.1| nitrogen fixation like
  misc_feature (24)..(226): Homolog of NCBI NO: 18416645 NR Description: nitrogen fixation like protein; protein id: supported by cDNA: 256052. [Arabidopsis thaliana]
  misc_feature (24)..(226): Homolog of NCBI NO: 21554503 NR Description: nitrogen fixation like protein [Arabidopsis
  misc_feature (73)..(224): Homolog of NCBI NO: 18423084 NR Description: Expressed protein; protein id: At5g49940.1, by cDNA: gi_13878180, supported by cDNA: gi_16226433, supported cDNA: gi_17104538 [Arabidopsis thaliana]
  misc_feature (21)..(224): Homolog of NCBI NO: 30698492 NR Description: NifU1 [Oryza sativa (japonica cultivar-group)]
  misc_feature (73)..(204): Homolog of NCBI NO: 8777425 NR Description: gene_id:K9P8.8~pir||T09896~strong similarity to
  misc_feature (73)..(148): Homolog of NCBI NO: 22298836 NR Description: ORF_ID:tsl1293~similar to NifU protein
  misc_feature (69)..(147): Homolog of NCBI NO: 24414813 NR Description: putative NifU-like protein [Synechococcus sp. PCC
  misc_feature (69)..(148): Homolog of NCBI NO: 33860975 NR Description: NifU-like protein [Prochlorococcus marinus subsp.
  misc_feature (69)..(148): Homolog of NCBI NO: 33862527 NR Description: NifU-like protein [Prochlorococcus marinus str.
STNGGREKIGYRQMRLCLRQAAATSSPLAATLRGKTSTSTLAPHGRLSFSHTTSLQTAPGHRWLRAGWAVRVLPLTEENVEKVLDEVRPSLMADGGNVALHEIDGLVVVLKLQGACGSCPSSTMTLKMGIETRLRDKIPDILEVEQIVDTETGLDLTADNVDKVLDEIRPYLSGTGGGSLELLQIDGYVVKIRIGGPAAGVMTVRVAVTQKLREKIPSILAVQLTE

SEQ ID NO: 9029 - protein, 213 aa, Zea mays subsp. mays
  peptide (1)..(213): Ceres Seq. ID no. 12346313
  misc_feature (67)..(133): Pfam Name: NifU-like domain Pfam Description: NifU-like domain
  misc_feature (11)..(213): Homolog of NCBI NO: 7485833 NR Description: hypothetical protein F20B18.20 - Arabidopsis >gi|4538920|emb|CAB39656.1| nitrogen fixation like protein thaliana] >gi|7269442|emb|CAB79446.1| nitrogen fixation like
  misc_feature (11)..(213): Homolog of NCBI NO: 18416645 NR Description: nitrogen fixation like protein; protein id: supported by cDNA: 256052. [Arabidopsis thaliana]
  misc_feature (11)..(213): Homolog of NCBI NO: 21554503 NR Description: nitrogen fixation like protein [Arabidopsis
  misc_feature (60)..(211): Homolog of NCBI NO: 18423084 NR Description: Expressed protein; protein id: At5g49940.1, by cDNA: gi_13878180, supported by cDNA: gi_16226433, supported cDNA: gi_17104538 [Arabidopsis thaliana]
  misc_feature (8)..(211): Homolog of NCBI NO: 30698492 NR Description: NifU1 [Oryza sativa (japonica cultivar-group)]
  misc_feature (60)..(191): Homolog of NCBI NO: 8777425 NR Description: gene_id:K9P8.8~pir||T09896~strong similarity to
  misc_feature (60)..(135): Homolog of NCBI NO: 22298836 NR Description: ORF_ID:tsl1293~similar to NifU protein
  misc_feature (56)..(134): Homolog of NCBI NO: 24414813 NR Description: putative NifU-like protein [Synechococcus sp. PCC
  misc_feature (56)..(135): Homolog of NCBI NO: 33860975 NR Description: NifU-like protein [Prochlorococcus marinus subsp.
  misc_feature (56)..(135): Homolog of NCBI NO: 33862527 NR Description: NifU-like protein [Prochlorococcus marinus str.
MRLCLRQAAATSSPLAATLRGKTSTSTLAPHGRLSFSHTTSLQTAPGHRWLRAGWAVRVLPLTEENVEKVLDEVRPSLMADGGNVALHEIDGLVVVLKLQGACGSCPSSTMTLKMGIETRLRDKIPDILEVEQIVDTETGLDLTADNVDKVLDEIRPYLSGTGGGSLELLQIDGYVVKIRIGGPAAGVMTVRVAVTQKLREKIPSILAVQLTE

SEQ ID NO: 9030 - protein, 165 aa, Zea mays subsp. mays
  peptide (1)..(165): Ceres Seq. ID no. 12346314
IYERGPGKDRLQTDEALSPASGGHQLTPRSYPPRQDFYEHPRPPWPAQLQPHHVAADGARAPLAPSRVGGARAPADGGERGEGAGRGAAEPDGGRRQRGAARDRRPRRRAQAAGRVRLLPQLHHDAQDGHRDAPPRQDPRHPRGRADRRHRDRPRPHRRQRRQGA

SEQ ID NO: 9031 - DNA, 1721 bp, Zea mays subsp. mays
  misc_feature (1)..(1721): Ceres Seq. ID no. 12362091
  misc_feature: MA Experiment ID: 108528 Result: Up-regulated in Transcription
  misc_feature: MA Experiment 108528 PARAMETER Experiment Name: Zm_Imbibed_Seeds_P Parameter: Age (day) Value: 5 vs. 2
  misc_feature: MA Experiment 108528 PARAMETER Experiment Name: Zm_Imbibed_Seeds_P Parameter: Organism Value: Zea mays
  misc_feature: MA Experiment 108528 PARAMETER Experiment Name: Zm_Imbibed_Seeds_P Parameter: Plant Line Value: 35A19
  misc_feature: MA Experiment 108528 PARAMETER Experiment Name: Zm_Imbibed_Seeds_P Parameter: Tissue Value: Aerial vs. Embryo
  misc_feature: MA Experiment ID: 108529 Result: Down-regulated in Transcription
  misc_feature: MA Experiment 108529 PARAMETER Experiment Name: Zm_Imbibed_Seeds_P Parameter: Age (day) Value: 5 vs. 2
  misc_feature: MA Experiment 108529 PARAMETER Experiment Name: Zm_Imbibed_Seeds_P Parameter: Organism Value: Zea mays
  misc_feature: MA Experiment 108529 PARAMETER Experiment Name: Zm_Imbibed_Seeds_P Parameter: Plant Line Value: 35A19
  misc_feature: MA Experiment 108529 PARAMETER Experiment Name: Zm_Imbibed_Seeds_P Parameter: Tissue Value: Roots vs. Embryo
  misc_feature: MA Experiment ID: 108530 Result: Up-regulated in Transcription
  misc_feature: MA Experiment 108530 PARAMETER Experiment Name: Zm_Imbibed_Seeds_P Parameter: Age (day) Value: 6 vs. 2
  misc_feature: MA Experiment 108530 PARAMETER Experiment Name: Zm_Imbibed_Seeds_P Parameter: Organism Value: Zea mays
  misc_feature: MA Experiment 108530 PARAMETER Experiment Name: Zm_Imbibed_Seeds_P Parameter: Plant Line Value: 35A19
  misc_feature: MA Experiment 108530 PARAMETER Experiment Name: Zm_Imbibed_Seeds_P Parameter: Tissue Value: Aerial vs. Embryo
  misc_feature: MA Experiment ID: 108535 Result: Up-regulated in Transcription
  misc_feature: MA Experiment 108535 PARAMETER Experiment Name: Zm_Meristem_P Parameter: Age (day) Value: 8
  misc_feature: MA Experiment 108535 PARAMETER Experiment Name: Zm_Meristem_P Parameter: Organism Value: Zea mays
  misc_feature: MA Experiment 108535 PARAMETER Experiment Name: Zm_Meristem_P Parameter: Plant Line Value: 35A19
  misc_feature: MA Experiment 108535 PARAMETER Experiment Name: Zm_Meristem_P Parameter: Tissue Value: Root Meristem vs. Above Root Meristem
  misc_feature: MA Experiment ID: 108545 Result: Up-regulated in Transcription
  misc_feature: MA Experiment 108545 PARAMETER Experiment Name: Zm_Imbibed_Seeds_P Parameter: Age (day) Value: 3 vs. 2
  misc_feature: MA Experiment 108545 PARAMETER Experiment Name: Zm_Imbibed_Seeds_P Parameter: Organism Value: Zea mays
  misc_feature: MA Experiment 108545 PARAMETER Experiment Name: Zm_Imbibed_Seeds_P Parameter: Plant Line Value: 35A19
  misc_feature: MA Experiment 108545 PARAMETER Experiment Name: Zm_Imbibed_Seeds_P Parameter: Tissue Value: Aerial vs. Embryo
  misc_feature: MA Experiment ID: 108546 Result: Down-regulated in Transcription
  misc_feature: MA Experiment 108546 PARAMETER Experiment Name: Zm_Imbibed_Seeds_P Parameter: Age (day) Value: 3 vs. 2
  misc_feature: MA Experiment 108546 PARAMETER Experiment Name: Zm_Imbibed_Seeds_P Parameter: Organism Value: Zea mays
  misc_feature: MA Experiment 108546 PARAMETER Experiment Name: Zm_Imbibed_Seeds_P Parameter: Plant Line Value: 35A19
  misc_feature: MA Experiment 108546 PARAMETER Experiment Name: Zm_Imbibed_Seeds_P Parameter: Tissue Value: Roots vs. Embryo
  misc_feature: MA Experiment ID: 108547 Result: Up-regulated in Transcription
  misc_feature: MA Experiment 108547 PARAMETER Experiment Name: Zm_Imbibed_Seeds_P Parameter: Age (day) Value: 4 vs. 2
  misc_feature: MA Experiment 108547 PARAMETER Experiment Name: Zm_Imbibed_Seeds_P Parameter: Organism Value: Zea mays
  misc_feature: MA Experiment 108547 PARAMETER Experiment Name: Zm_Imbibed_Seeds_P Parameter: Plant Line Value: 35A19
  misc_feature: MA Experiment 108547 PARAMETER Experiment Name: Zm_Imbibed_Seeds_P Parameter: Tissue Value: Aerial vs. Embryo
  misc_feature: MA Experiment ID: 108597 Result: Down-regulated in Transcription
  misc_feature: MA Experiment 108597 PARAMETER Experiment Name: Zm_100uM_ABA_P Parameter: Age (day) Value: 9
  misc_feature: MA Experiment 108597 PARAMETER Experiment Name: Zm_100uM_ABA_P Parameter: Organism Value: Zea mays
  misc_feature: MA Experiment 108597 PARAMETER Experiment Name: Zm_100uM_ABA_P Parameter: Plant Line Value: 35A19
  misc_feature: MA Experiment 108597 PARAMETER Experiment Name: Zm_100uM_ABA_P Parameter: Timepoint (hr) Value: 24
  misc_feature: MA Experiment 108597 PARAMETER Experiment Name: Zm_100uM_ABA_P Parameter: Tissue Value: Aerial
  misc_feature: MA Experiment 108597 PARAMETER Experiment Name: Zm_100uM_ABA_P Parameter: Treatment Value: 100uM ABA vs. No Treatment
  misc_feature: MA Experiment ID: 20000535 Result: Down-regulated in Transcription
  misc_feature: MA Experiment 20000535 PARAMETER Experiment Name: Zm_Hybrid_Seed_Dev_P Parameter: DAP Value: 30 vs. 12
  misc_feature: MA Experiment 20000535 PARAMETER Experiment Name: Zm_Hybrid_Seed_Dev_P Parameter: Organism Value: Zea mays
  misc_feature: MA Experiment 20000535 PARAMETER Experiment Name: Zm_Hybrid_Seed_Dev_P Parameter: Plant Line Value: 35A19
  misc_feature: MA Experiment 20000535 PARAMETER Experiment Name: Zm_Hybrid_Seed_Dev_P Parameter: Tissue Value: Embryo vs. Unfert Floret
agggagggaggggcagataaagaacactgcaccatttgatttgtgtgctcctgcagtctacaccctcacttgctttcaaacgtgcacctcctctcttcttcttcctcccctcatctccttccaacagtgccataaccacagcctccctctcctctctctcttgttgcacgaatatgacgccatgatctcccccgtgaacgacaaggagaagcagagtgctacataggtacatgtagggtactataggataggaactatacagctaggaggtagcgcggagggaggagcacgccgccagcagtagggatgtacaagaaccagctccaagaactggcgcagaggagctgcttcagcctgccgtcgtacgtgtgcacgcgcgagggccctgaccacgcgccgcgcttccgggcggccgtcaccttcaacggtgagaccttcgagggccccagcggctgcaccacgctccgccaggccgagcacgccgctgccgaagtcgccctcgcccgcctctccctccgcggcccgttccactaccctcgccgcccgggtcctcgatgagacgggggtgtacaagaacctgctgcaggagacggcccaccgggcggggctgaagctgccggcgtacaccacggtgcgatcgggcccgggccactcgccggtgttctcctccaccgtcgagctcgccggcttgagcttcgcgggcgaccccgccaggaccaagaagcaggcggagaagaacgccgccatggccgcctggtcctcgctcaaacagatgccggaggctcgcaaggagcccggcgccggcgacgagcaggagcacgtggctgtcgccagagcgctcgcggcgctgaagccgcgagacggcggcgacggaaaggcggcgccgcctctgcagaagcacagcagcaacggctcttcttcctccgctcttccgaacccgtcgctgtacagacaccaatggcggcctcggaccagtacccctgcccagcccctgccgccgaggacgggggccctgcccctgcagccgccggccggcccaaggatcctgcccccgctgcatctgctacaacagccggcgtgcggctccagggacgccgcggcggcagagctggtgcggatgctggagcgcgccatggtgcgcgaccgggaggcaacgccgccttcgccgtgctactacgcggcgcctgccgcctcggcgtaccgccacggcagcgcgccgaggaccttcgccgcgggcgggttccacgccccggctgtgagcgtgcggtcggtgatcccggtgtgcgccgccccgccgccgcagaccccggtcaaggaggaaaggaatggcccggcgacaccctcaggcgcatgcaagagggcgtgagcgacgtggtcagcttgtgaagcgcagcccagagaagaagaaagaaagagcctggctctgttgttgcaggggagttttggatcacaactttctctgtagtctgtacagaagttgtgtacgaggtcaactactacgcatctccctcgctctctgtgtgtgtttgaccaggatctagatggtgagatcttcgtcagaaaggcagccatggccatgatgaggctgtgaagggttttaggtggacgatgaacatatatgaatatatagttgtactgttctagggcttcagtagaagccatgctaccgtgttaacaagcgcatcgtatcatcccttcggctcggcaatctgcctgcctgc

SEQ ID NO: 9032 - protein, 206 aa, Zea mays subsp. mays
  peptide (1)..(206): Ceres Seq. ID no. 12362092
  misc_feature (1)..(39): Homolog of NCBI NO: 11994159 NR Description: gb|AAD20688.1~gene_id:MQP17.5~similar to unknown
  misc_feature (168)..(196): Homolog of NCBI NO: 11994159 NR Description: gb|AAD20688.1~gene_id:MQP17.5~similar to unknown
  misc_feature (1)..(39): Homolog of NCBI NO: 15231653 NR Description: hypothetical protein; protein id: At3g26932.1
  misc_feature (168)..(196): Homolog of NCBI NO: 15231653 NR Description: hypothetical protein; protein id: At3g26932.1
  misc_feature (1)..(199): Homolog of NCBI NO: 37535422 NR Description: putative extensin [Oryza sativa (japonica
  misc_feature (1)..(186): Homolog of NCBI NO: 30693732 NR Description: expressed protein [Arabidopsis thaliana]
  misc_feature (1)..(169): Homolog of NCBI NO: 18401724 NR Description: expressed protein; protein id: At2g28380.1, by cDNA: gi_14334605, supported by cDNA: gi_17065633 [Arabidopsis >gi|25407980|pir||B84684 hypothetical protein At2g28380
  misc_feature (1)..(43): Homolog of NCBI NO: 40788412 NR Description: hypothetical protein [Oryza sativa (japonica
  misc_feature (1)..(186): Homolog of NCBI NO: 9759153 NR Description: gb|AAD20688.1~gene_id:MEE6.14~similar to unknown
  misc_feature (1)..(12): Homolog of NCBI NO: 9229939 NR Description: dsRNA-binding protein ODB1 [Oryza sativa
MAAWSSLKQMPEARKEPGAGDEQEHVAVARALAALKPRDGGDGKAAPPLQKHSSNGSSSSALPNPSLYRHQWRPRTSTPAQPLPPRTGALPLQPPAGPRILPPLHLLQQPACGSRDAAAAELVRMLERAMVRDREATPPSPCYYAAPAASAYRHGSAPRTFAAGGFHAPAVSVRSVIPVCAAPPPQTPVKEERNGPATPSGACKRA

SEQ ID NO: 9033 - protein, 197 aa, Zea mays subsp. mays
  peptide (1)..(197): Ceres Seq. ID no. 12362093
  misc_feature (1)..(30): Homolog of NCBI NO: 11994159 NR Description: gb|AAD20688.1~gene_id:MQP17.5~similar to unknown
  misc_feature (159)..(187): Homolog of NCBI NO: 11994159 NR Description: gb|AAD20688.1~gene_id:MQP17.5~similar to unknown
  misc_feature (1)..(30): Homolog of NCBI NO: 15231653 NR Description: hypothetical protein; protein id: At3g26932.1
  misc_feature (159)..(187): Homolog of NCBI NO: 15231653 NR Description: hypothetical protein; protein id: At3g26932.1
  misc_feature (1)..(190): Homolog of NCBI NO: 37535422 NR Description: putative extensin [Oryza sativa (japonica
  misc_feature (1)..(177): Homolog of NCBI NO: 30693732 NR Description: expressed protein [Arabidopsis thaliana]
  misc_feature (1)..(160): Homolog of NCBI NO: 18401724 NR Description: expressed protein; protein id: At2g28380.1, by cDNA: gi_14334605, supported by cDNA: gi_17065633 [Arabidopsis >gi|25407980|pir||B84684 hypothetical protein At2g28380
  misc_feature (1)..(34): Homolog of NCBI NO: 40788412 NR Description: hypothetical protein [Oryza sativa (japonica
  misc_feature (1)..(177): Homolog of NCBI NO: 9759153 NR Description: gb|AAD20688.1~gene_id:MEE6.14~similar to unknown
  misc_feature (1)..(13): Homolog of NCBI NO: 15231653 NR Description: hypothetical protein; protein id: At3g26932.1
MPEARKEPGAGDEQEHVAVARALAALKPRDGGDGKAAPPLQKHSSNGSSSSALPNPSLYRHQWRPRTSTPAQPLPPRTGALPLQPPAGPRILPPLHLLQQPACGSRDAAAAELVRMLERAMVRDREATPPSPCYYAAPAASAYRHGSAPRTFAAGGFHAPAVSVRSVIPVCAAPPPQTPVKEERNGPATPSGACKRA

SEQ ID NO: 9034 - protein, 142 aa, Zea mays subsp. mays
  peptide (1)..(142): Ceres Seq. ID no. 12362094
  misc_feature (1)..(142): Homolog of NCBI NO: 40788412 NR Description: hypothetical protein [Oryza sativa (japonica
  misc_feature (1)..(47): Homolog of NCBI NO: 40788412 NR Description: hypothetical protein [Oryza sativa (japonica
MAASDQYPCPAPAAEDGGPAPAAAGRPKDPAPAASATTAGVRLQGRRGGRAGADAGARHGARPGGNAAFAVLLRGACRLGVPPRQRAEDLRRGRVPRPGCERAVGDPGVRRPAAADPGQGGKEWPGDTLRRMQEGVSDVVSL

SEQ ID NO: 9035 - DNA, 1478 bp, Zea mays subsp. mays
  misc_feature (1)..(1478): Ceres Seq. ID no. 12373137
  misc_feature: MA Experiment ID: 108527 Result: Up-regulated in Transcription
  misc_feature: MA Experiment 108527 PARAMETER Experiment Name: Zm_5mM_NO_P Parameter: Age (day) Value: 8
  misc_feature: MA Experiment 108527 PARAMETER Experiment Name: Zm_5mM_NO_P Parameter: Organism Value: Zea mays
  misc_feature: MA Experiment 108527 PARAMETER Experiment Name: Zm_5mM_NO_P Parameter: Plant Line Value: 35A19
  misc_feature: MA Experiment 108527 PARAMETER Experiment Name: Zm_5mM_NO_P Parameter: Timepoint (hr) Value: 6
  misc_feature: MA Experiment 108527 PARAMETER Experiment Name: Zm_5mM_NO_P Parameter: Tissue Value: Aerial
  misc_feature: MA Experiment 108527 PARAMETER Experiment Name: Zm_5mM_NO_P Parameter: Treatment Value: 5mM NO vs. No Treatment
  misc_feature: MA Experiment ID: 108529 Result: Up-regulated in Transcription
  misc_feature: MA Experiment 108529 PARAMETER Experiment Name: Zm_Imbibed_Seeds_P Parameter: Age (day) Value: 5 vs. 2
  misc_feature: MA Experiment 108529 PARAMETER Experiment Name: Zm_Imbibed_Seeds_P Parameter: Organism Value: Zea mays
  misc_feature: MA Experiment 108529 PARAMETER Experiment Name: Zm_Imbibed_Seeds_P Parameter: Plant Line Value: 35A19
  misc_feature: MA Experiment 108529 PARAMETER Experiment Name: Zm_Imbibed_Seeds_P Parameter: Tissue Value: Roots vs. Embryo
  misc_feature: MA Experiment ID: 108543 Result: Down-regulated in Transcription
  misc_feature: MA Experiment ID: 108545 Result: Down-regulated in Transcription
  misc_feature: MA Experiment 108545 PARAMETER Experiment Name: Zm_Imbibed_Seeds_P Parameter: Age (day) Value: 3 vs. 2
  misc_feature: MA Experiment 108545 PARAMETER Experiment Name: Zm_Imbibed_Seeds_P Parameter: Organism Value: Zea mays
  misc_feature: MA Experiment 108545 PARAMETER Experiment Name: Zm_Imbibed_Seeds_P Parameter: Plant Line Value: 35A19
  misc_feature: MA Experiment 108545 PARAMETER Experiment Name: Zm_Imbibed_Seeds_P Parameter: Tissue Value: Aerial vs. Embryo
  misc_feature: MA Experiment ID: 20000108 Result: Down-regulated in Transcription
  misc_feature: MA Experiment 20000108 PARAMETER Experiment Name: Zm_Root-Tips_P Parameter: Age (day) Value: 12
  misc_feature: MA Experiment 20000108 PARAMETER Experiment Name: Zm_Root-Tips_P Parameter: Organism Value: Zea mays
  misc_feature: MA Experiment 20000108 PARAMETER Experiment Name: Zm_Root-Tips_P Parameter: Tissue Value: Root tips vs. Root mid region    35
  misc_feature: MA Experiment 20000108 PARAMETER Experiment Name: Zm_Root-Tips_P Parameter: Tissue Value: Root tips vs. Root mid region   Sequence Listing-Misc Features (4)
  misc_feature: MA Experiment ID: 20000627 Result: Up-regulated in Transcription
  misc_feature: MA Experiment 20000627 PARAMETER Experiment Name: Zm_Herbicide-Treatments_P Parameter: Timepoint (hr) Value: 12
  misc_feature: MA Experiment 20000627 PARAMETER Experiment Name: Zm_Herbicide-Treatments_P Parameter: Tissue Value: Aerial
  misc_feature: MA Experiment 20000627 PARAMETER Experiment Name: Zm_Herbicide-Treatments_P Parameter: Treatment Value: Finale vs. No Treatment
ttaatcaaaaactaaacccaatcccccttccaccattcacacgtaccggcggagaaggaaggaattggtcgccgccgcctgcctctctccgatcctcctccgtcagtggcggtggccacgccgtgctaagctaagctaagcttgcgcaagtgacaagttctttggttggttggaggcagagccacatggcatcgtcgtcgcggctggatctcccgccggggttccgcttccaccccaccgacgaggaggtggtgtcgcactacctgacccacaaggcgctggacagccgcttctcctgcgtcgtcatcgccgacgccgacctgaacaagatcgagccgtgggatctcccaagcaaggctaagatgggcgagaaggagtggtacttcttctgccacaaggaccgcaagtacccgacggggatgcgcaccaaccgcgccaccgccagcgggtactggaaggccacgggcaaggacaaggagatcttccgcggcagtagtccccgccgcgtgctcgtcggcatgaagaagacgctcgtcttctacacgggccgcgcgccgcgcggaggcaagacgccgtgggtcatgcacgagtaccgcctcgagggcagcctgccgcccaacctccaccgcggggccaaggacgaatgggctgtgtgtaaggtgatcaacaaagacttggcgggcaaggctgggcagcaacaaatggcgccgccgcacgccgtgtccgtgggcatggagcgcagcgactcgctggccttcctcgacgacctggtgctcgacaacgccgacgacctgcccccgctcatcgactcgacaacgtacgccgcggcggggacgaccacgacgacgaacgacgacagcggcgggtaccaacaagccaccaaggcggagccgcagccgcatctgcccgcgccgagcaacagcccgtaccagcagcaggccatacggaggcactgcaaggcggaggcgccggcgccggcgatggttctgagcccgtcgcgcgagacgccgggcgcggacatgttccagctccagcatgtggacgagctgctccagctggacggcggcttcatggaggactactacaacatgaacatgtggaaggtctagttaggccgctcggatcgtcggttgcctggcggatgatggattgattagttggttgattggattaacctgttattagacgaagaggagtggaaaggccggccgcgccgattggcatggacgaggtctgtctgacgaagatgtgtcgagacctcgccggcggtgtggtttgtgagaattggttagttagctaatcttcattagctagctagctagctagctactgattagaacagctagcagtagtgtgtaaccgcgcgcgtgtcgttgcctctgctggtcgagaggattgaagcacgcatgtgtacataataataggtaggagtcgtcgtcgttgagtgatgagaaaaatgaatgaaacatactatatat

SEQ ID NO: 9036 - protein, 307 aa, Zea mays subsp. mays
  peptide (1)..(307): Ceres Seq. ID no. 12373138
  misc_feature (9)..(139): Pfam Name: No apical meristem (NAM) protein Pfam Description: No apical meristem (NAM) protein
  misc_feature (5)..(299): Homolog of NCBI NO: 34394523 NR Description: putative GRAB2 protein(Geminivirus Rep A-binding)
  misc_feature (6)..(252): Homolog of NCBI NO: 4218537 NR Description: GRAB2 protein [Triticum sp.]
  misc_feature (2)..(277): Homolog of NCBI NO: 34902148 NR Description: Putative NAM (no apical meristem) protein [Oryza
  misc_feature (7)..(307): Homolog of NCBI NO: 27529808 NR Description: OsNAC1 protein [Oryza sativa]
  misc_feature (7)..(208): Homolog of NCBI NO: 30686737 NR Description: NAM (no apical meristem)-related protein
  misc_feature (1)..(216): Homolog of NCBI NO: 38344965 NR Description: OSJNBa0072F16.10 [Oryza sativa (japonica
  misc_feature (7)..(208): Homolog of NCBI NO: 9758909 NR Description: NAM (no apical meristem)-like protein thaliana] >gi|28973617|gb|AAO64133.1| putative NAM (no apical protein [Arabidopsis thaliana] >gi|29824189|gb|AAP04055.1|
  misc_feature (7)..(216): Homolog of NCBI NO: 27529810 NR Description: OsNAC2 protein [Oryza sativa]
  misc_feature (7)..(208): Homolog of NCBI NO: 15229219 NR Description: NAM-like protein (no apical meristem); protein At3g04060.1, supported by cDNA: 119460., supported by cDNA:
  misc_feature (1)..(167): Homolog of NCBI NO: 30682048 NR Description: NAM (no apical meristem)-related protein
MASSSRLDLPPGFRFHPTDEEVVSHYLTHKALDSRFSCVVIADADLNKIEPWDLPSKAKMGEKEWYFFCHKDRKYPTGMRTNRATASGYWKATGKDKEIFRGSSPRRVLVGMKKTLVFYTGRAPRGGKTPWVMHEYRLEGSLPPNLHRGAKDEWAVCKVINKDLAGKAGQQQMAPPHAVSVGMERSDSLAFLDDLVLDNADDLPPLIDSTTYAAAGTTTTTNDDSGGYQQATKAEPQPHLPAPSNSPYQQQAIRRHCKAEAPAPAMVLSPSRETPGADMFQLQHVDELLQLDGGFMEDYYNMNMWKV

SEQ ID NO: 9037 - protein, 248 aa, Zea mays subsp. mays
  peptide (1)..(248): Ceres Seq. ID no. 12373139
  misc_feature (1)..(80): Pfam Name: No apical meristem (NAM) protein Pfam Description: No apical meristem (NAM) protein
  misc_feature (1)..(240): Homolog of NCBI NO: 34394523 NR Description: putative GRAB2 protein(Geminivirus Rep A-binding)
  misc_feature (1)..(193): Homolog of NCBI NO: 4218537 NR Description: GRAB2 protein [Triticum sp.]
  misc_feature (1)..(218): Homolog of NCBI NO: 34902148 NR Description: Putative NAM (no apical meristem) protein [Oryza
  misc_feature (1)..(248): Homolog of NCBI NO: 27529808 NR Description: OsNAC1 protein [Oryza sativa]
  misc_feature (1)..(149): Homolog of NCBI NO: 30686737 NR Description: NAM (no apical meristem)-related protein
  misc_feature (1)..(157): Homolog of NCBI NO: 38344965 NR Description: OSJNBa0072F16.10 [Oryza sativa (japonica
  misc_feature (1)..(149): Homolog of NCBI NO: 9758909 NR Description: NAM (no apical meristem)-like protein thaliana] >gi|28973617|gb|AAO64133.1| putative NAM (no apical protein [Arabidopsis thaliana] >gi|29824189|gb|AAP04055.1|
  misc_feature (1)..(157): Homolog of NCBI NO: 27529810 NR Description: OsNAC2 protein [Oryza sativa]
  misc_feature (1)..(149): Homolog of NCBI NO: 15229219 NR Description: NAM-like protein (no apical meristem); protein At3g04060.1, supported by cDNA: 119460., supported by cDNA:
  misc_feature (1)..(108): Homolog of NCBI NO: 30682048 NR Description: NAM (no apical meristem)-related protein
MGEKEWYFFCHKDRKYPTGMRTNRATASGYWKATGKDKEIFRGSSPRRVLVGMKKTLVFYTGRAPRGGKTPWVMHEYRLEGSLPPNLHRGAKDEWAVCKVINKDLAGKAGQQQMAPPHAVSVGMERSDSLAFLDDLVLDNADDLPPLIDSTTYAAAGTTTTTNDDSGGYQQATKAEPQPHLPAPSNSPYQQQAIRRHCKAEAPAPAMVLSPSRETPGADMFQLQHVDELLQLDGGFMEDYYNMNMWKV

SEQ ID NO: 9038 - protein, 229 aa, Zea mays subsp. mays
  peptide (1)..(229): Ceres Seq. ID no. 12373140
  misc_feature (1)..(61): Pfam Name: No apical meristem (NAM) protein Pfam Description: No apical meristem (NAM) protein
  misc_feature (1)..(221): Homolog of NCBI NO: 34394523 NR Description: putative GRAB2 protein(Geminivirus Rep A-binding)
  misc_feature (1)..(174): Homolog of NCBI NO: 4218537 NR Description: GRAB2 protein [Triticum sp.]
  misc_feature (1)..(199): Homolog of NCBI NO: 34902148 NR Description: Putative NAM (no apical meristem) protein [Oryza
  misc_feature (1)..(229): Homolog of NCBI NO: 27529808 NR Description: OsNAC1 protein [Oryza sativa]
  misc_feature (1)..(130): Homolog of NCBI NO: 30686737 NR Description: NAM (no apical meristem)-related protein
  misc_feature (1)..(138): Homolog of NCBI NO: 38344965 NR Description: OSJNBa0072F16.10 [Oryza sativa (japonica
  misc_feature (1)..(130): Homolog of NCBI NO: 9758909 NR Description: NAM (no apical meristem)-like protein thaliana] >gi|28973617|gb|AAO64133.1| putative NAM (no apical protein [Arabidopsis thaliana] >gi|29824189|gb|AAP04055.1|
  misc_feature (1)..(138): Homolog of NCBI NO: 27529810 NR Description: OsNAC2 protein [Oryza sativa]
  misc_feature (1)..(130): Homolog of NCBI NO: 15229219 NR Description: NAM-like protein (no apical meristem); protein At3g04060.1, supported by cDNA: 119460., supported by cDNA:
  misc_feature (1)..(89): Homolog of NCBI NO: 30682048 NR Description: NAM (no apical meristem)-related protein
MRTNRATASGYWKATGKDKEIFRGSSPRRVLVGMKKTLVFYTGRAPRGGKTPWVMHEYRLEGSLPPNLHRGAKDEWAVCKVINKDLAGKAGQQQMAPPHAVSVGMERSDSLAFLDDLVLDNADDLPPLIDSTTYAAAGTTTTTNDDSGGYQQATKAEPQPHLPAPSNSPYQQQAIRRHCKAEAPAPAMVLSPSRETPGADMFQLQHVDELLQLDGGFMEDYYNMNMWKV

SEQ ID NO: 9039 - DNA, 1518 bp, Zea mays subsp. mays
  misc_feature (1)..(1518): Ceres Seq. ID no. 12382183
  misc_feature: MA Experiment ID: 108536 Result: Up-regulated in Transcription
  misc_feature: MA Experiment 108536 PARAMETER Experiment Name: Zm_Meristem_P Parameter: Age (day) Value: 8
  misc_feature: MA Experiment 108536 PARAMETER Experiment Name: Zm_Meristem_P Parameter: Organism Value: Zea mays
  misc_feature: MA Experiment 108536 PARAMETER Experiment Name: Zm_Meristem_P Parameter: Plant Line Value: 35A19
  misc_feature: MA Experiment 108536 PARAMETER Experiment Name: Zm_Meristem_P Parameter: Tissue Value: Shoot Meristem vs. Above Shoot Meristem
gaagttcattcagagagagcgcgagagggggtgtggctgtctatggcgtacgagaggatacacgaagctcctcagatggtggccatctcgccaaccaggctcaggatgaagctgctgggctccaatcacaaggacgaccccactcgcaagacgctgcaggcgtcgaggctcgacgacgatgaccaccccaacaacagcctcctgccgcaagagctcgacgaagagtaccccaaggaccaccgctccgactcttcccggtcgcggtccgacgccagccacgacaggatcagtggcagcgacgacgacagcggcaccaactttgagttctgcaaggacgagagggcgtccctgccggcttcggcggcgcccggaccgttcttccggcagcaggtgccgtccaagtggaacgacgcggagaagtggatcgcggggcgccaccaccgccacgtcgtgcactccaaccctgtcttctccaagaagcccgcggcgggcgcgcccaccgagctgtcgtctaataggtcctcgcacaagaagccccgcttctcgccggcggccgtgtcgacgcgggacgtcgggacggagatgacgcccgccgcgagccaggagcagtcgcgcagcggcacccccgccggcgccgccacgccggcgctcagcccgctctgctcggcgccgtccagcccgcggcgcggcggctcctcgtccgtgccggagcgggagctccggctccggacgcggcgggagatcgctgcgctcggcctgcagctcggcaagatgagcatcgcgtcgtgggccagcaaggaggagggtctcctcgccgccgcgtcgccggagaaggacaagcgctacgcggccgtcgacacggtggtcaggagcaaggcgttcgaagctcgcgccgccgcgtgggaggagtccaacaagtgtaaactcgcggcaagataccagaggaaagaggcgaagatagagggatgggaaagcttgcagaaatgcaagttcgaagccaagctgaggcaggccgaggcacgggctgagcagatgaaagcccgggcgaagcaggacctggcgaagaggctgtcagcgctgagccacaaggtggaggggaagcaggcgagggtggaggcgcgccggggccggcaggcgtcccggctggcgcggcaggtggagcgcatccgcgagaccggccgtgtgccgtgccggctccggcggtgctgcgcctggttcctgtagtgtagtgtagctagcatgctcccaatcgtcggaacaagtgctgatggcagtatgtcatggcatgggctgcttgatttgtaactacatgaaaattcatcgctggttcatgttcgtcccaatgccagggcagtggttggtagctgctcgccgctgtggtttggatgccgccgcctgcctttgtgccggttgtctagcttggcctgcaccctgcagccagctgatctagtgatgtggtgcccaaattcacgcacatgtaaagctccttgcaatttcaattaactcaggttattcttg

SEQ ID NO: 9040 - protein, 407 aa, Zea mays subsp. mays
  peptide (1)..(407): Ceres Seq. ID no. 12382184
  misc_feature (295)..(399): Pfam Name: Remorin, C-terminal region Pfam Description: Remorin, C-terminal region
  misc_feature (174)..(406): Homolog of NCBI NO: 15220725 NR Description: hypothetical protein; protein id: At1g30320.1
  misc_feature (86)..(197): Homolog of NCBI NO: 15220725 NR Description: hypothetical protein; protein id: At1g30320.1
  misc_feature (170)..(402): Homolog of NCBI NO: 18395321 NR Description: expressed protein; protein id: At2g02170.1, by cDNA: gi_14326557 [Arabidopsis thaliana]
  misc_feature (185)..(404): Homolog of NCBI NO: 38344336 NR Description: OSJNBa0058K23.18 [Oryza sativa (japonica
  misc_feature (151)..(407): Homolog of NCBI NO: 34902218 NR Description: Unknown protein [Oryza sativa (japonica
  misc_feature (173)..(402): Homolog of NCBI NO: 15220963 NR Description: hypothetical protein; protein id: At1g53860.1
  misc_feature (128)..(153): Homolog of NCBI NO: 15220963 NR Description: hypothetical protein; protein id: At1g53860.1
  misc_feature (275)..(396): Homolog of NCBI NO: 28393368 NR Description: unknown protein [Arabidopsis thaliana]
  misc_feature (275)..(396): Homolog of NCBI NO: 18408804 NR Description: expressed protein; protein id: At1g67590.1, by cDNA: 10212. [Arabidopsis thaliana] F12A21.28 [Arabidopsis thaliana]
  misc_feature (275)..(396): Homolog of NCBI NO: 21536537 NR Description: unknown [Arabidopsis thaliana]
EVHSERAREGVWLSMAYERIHEAPQMVAISPTRLRMKLLGSNHKDDPTRKTLQASRLDDDDHPNNSLLPQELDEEYPKDHRSDSSRSRSDASHDRISGSDDDSGTNFEFCKDERASLPASAAPGPFFRQQVPSKWNDAEKWIAGRHHRHVVHSNPVFSKKPAAGAPTELSSNRSSHKKPRFSPAAVSTRDVGTEMTPAASQEQSRSGTPAGAATPALSPLCSAPSSPRRGGSSSVPERELRLRTRREIAALGLQLGKMSIASWASKEEGLLAAASPEKDKRYAAVDTVVRSKAFEARAAAWEESNKCKLAARYQRKEAKIEGWESLQKCKFEAKLRQAEARAEQMKARAKQDLAKRLSALSHKVEGKQARVEARRGRQASRLARQVERIRETGRVPCRLRRCCAWFL

SEQ ID NO: 9041 - protein, 393 aa, Zea mays subsp. mays
  peptide (1)..(393): Ceres Seq. ID no. 12382185
  misc_feature (281)..(385): Pfam Name: Remorin, C-terminal region Pfam Description: Remorin, C-terminal region
  misc_feature (160)..(392): Homolog of NCBI NO: 15220725 NR Description: hypothetical protein; protein id: At1g30320.1
  misc_feature (72)..(183): Homolog of NCBI NO: 15220725 NR Description: hypothetical protein; protein id: At1g30320.1
  misc_feature (156)..(388): Homolog of NCBI NO: 18395321 NR Description: expressed protein; protein id: At2g02170.1, by cDNA: gi_14326557 [Arabidopsis thaliana]
  misc_feature (171)..(390): Homolog of NCBI NO: 38344336 NR Description: OSJNBa0058K23.18 [Oryza sativa (japonica
  misc_feature (137)..(393): Homolog of NCBI NO: 34902218 NR Description: Unknown protein [Oryza sativa (japonica
  misc_feature (159)..(388): Homolog of NCBI NO: 15220963 NR Description: hypothetical protein; protein id: At1g53860.1
  misc_feature (114)..(139): Homolog of NCBI NO: 15220963 NR Description: hypothetical protein; protein id: At1g53860.1
  misc_feature (261)..(382): Homolog of NCBI NO: 28393368 NR Description: unknown protein [Arabidopsis thaliana]
  misc_feature (261)..(382): Homolog of NCBI NO: 18408804 NR Description: expressed protein; protein id: At1g67590.1, by cDNA: 10212. [Arabidopsis thaliana] F12A21.28 [Arabidopsis thaliana]
  misc_feature (261)..(382): Homolog of NCBI NO: 21536537 NR Description: unknown [Arabidopsis thaliana]
MAYERIHEAPQMVAISPTRLRMKLLGSNHKDDPTRKTLQASRLDDDDHPNNSLLPQELDEEYPKDHRSDSSRSRSDASHDRISGSDDDSGTNFEFCKDERASLPASAAPGPFFRQQVPSKWNDAEKWIAGRHHRHVVHSNPVFSKKPAAGAPTELSSNRSSHKKPRFSPAAVSTRDVGTEMTPAASQEQSRSGTPAGAATPALSPLCSAPSSPRRGGSSSVPERELRLRTRREIAALGLQLGKMSIASWASKEEGLLAAASPEKDKRYAAVDTVVRSKAFEARAAAWEESNKCKLAARYQRKEAKIEGWESLQKCKFEAKLRQAEARAEQMKARAKQDLAKRLSALSHKVEGKQARVEARRGRQASRLARQVERIRETGRVPCRLRRCCAWFL

SEQ ID NO: 9042 - protein, 382 aa, Zea mays subsp. mays
  peptide (1)..(382): Ceres Seq. ID no. 12382186
  misc_feature (270)..(374): Pfam Name: Remorin, C-terminal region Pfam Description: Remorin, C-terminal region
  misc_feature (149)..(381): Homolog of NCBI NO: 15220725 NR Description: hypothetical protein; protein id: At1g30320.1
  misc_feature (61)..(172): Homolog of NCBI NO: 15220725 NR Description: hypothetical protein; protein id: At1g30320.1
  misc_feature (145)..(377): Homolog of NCBI NO: 18395321 NR Description: expressed protein; protein id: At2g02170.1, by cDNA: gi_14326557 [Arabidopsis thaliana]
  misc_feature (160)..(379): Homolog of NCBI NO: 38344336 NR Description: OSJNBa0058K23.18 [Oryza sativa (japonica
  misc_feature (126)..(382): Homolog of NCBI NO: 34902218 NR Description: Unknown protein [Oryza sativa (japonica
  misc_feature (148)..(377): Homolog of NCBI NO: 15220963 NR Description: hypothetical protein; protein id: At1g53860.1
  misc_feature (103)..(128): Homolog of NCBI NO: 15220963 NR Description: hypothetical protein; protein id: At1g53860.1
  misc_feature (250)..(371): Homolog of NCBI NO: 28393368 NR Description: unknown protein [Arabidopsis thaliana]
  misc_feature (250)..(371): Homolog of NCBI NO: 18408804 NR Description: expressed protein; protein id: At1g67590.1, by cDNA: 10212. [Arabidopsis thaliana] F12A21.28 [Arabidopsis thaliana]
  misc_feature (250)..(371): Homolog of NCBI NO: 21536537 NR Description: unknown [Arabidopsis thaliana]
MVAISPTRLRMKLLGSNHKDDPTRKTLQASRLDDDDHPNNSLLPQELDEEYPKDHRSDSSRSRSDASHDRISGSDDDSGTNFEFCKDERASLPASAAPGPFFRQQVPSKWNDAEKWIAGRHHRHVVHSNPVFSKKPAAGAPTELSSNRSSHKKPRFSPAAVSTRDVGTEMTPAASQEQSRSGTPAGAATPALSPLCSAPSSPRRGGSSSVPERELRLRTRREIAALGLQLGKMSIASWASKEEGLLAAASPEKDKRYAAVDTVVRSKAFEARAAAWEESNKCKLAARYQRKEAKIEGWESLQKCKFEAKLRQAEARAEQMKARAKQDLAKRLSALSHKVEGKQARVEARRGRQASRLARQVERIRETGRVPCRLRRCCAWFL

SEQ ID NO: 9043 - DNA, 1296 bp, Zea mays subsp. mays
  misc_feature (1)..(1296): Ceres Seq. ID no. 12359791
  misc_feature: MA Experiment ID: 108523 Result: Down-regulated in Transcription
  misc_feature: MA Experiment 108523 PARAMETER Experiment Name: Zm_42deg_Heat_P Parameter: Age (day) Value: 8
  misc_feature: MA Experiment 108523 PARAMETER Experiment Name: Zm_42deg_Heat_P Parameter: Organism Value: Zea mays
  misc_feature: MA Experiment 108523 PARAMETER Experiment Name: Zm_42deg_Heat_P Parameter: Plant Line Value: 35A19
  misc_feature: MA Experiment 108523 PARAMETER Experiment Name: Zm_42deg_Heat_P Parameter: Temperature (deg C) Value: 42 vs. 22
  misc_feature: MA Experiment 108523 PARAMETER Experiment Name: Zm_42deg_Heat_P Parameter: Timepoint (hr) Value: 6
  misc_feature: MA Experiment 108523 PARAMETER Experiment Name: Zm_42deg_Heat_P Parameter: Tissue Value: Aerial
  misc_feature: MA Experiment ID: 108529 Result: Up-regulated in Transcription
  misc_feature: MA Experiment 108529 PARAMETER Experiment Name: Zm_Imbibed_Seeds_P Parameter: Age (day) Value: 5 vs. 2
  misc_feature: MA Experiment 108529 PARAMETER Experiment Name: Zm_Imbibed_Seeds_P Parameter: Organism Value: Zea mays
  misc_feature: MA Experiment 108529 PARAMETER Experiment Name: Zm_Imbibed_Seeds_P Parameter: Plant Line Value: 35A19
  misc_feature: MA Experiment 108529 PARAMETER Experiment Name: Zm_Imbibed_Seeds_P Parameter: Tissue Value: Roots vs. Embryo
  misc_feature: MA Experiment ID: 108534 Result: Down-regulated in Transcription
  misc_feature: MA Experiment 108534 PARAMETER Experiment Name: Zm_4deg_Cold_P Parameter: Age (hr) Value: 8
  misc_feature: MA Experiment 108534 PARAMETER Experiment Name: Zm_4deg_Cold_P Parameter: Organism Value: Zea mays
  misc_feature: MA Experiment 108534 PARAMETER Experiment Name: Zm_4deg_Cold_P Parameter: Plant Line Value: 35A19
  misc_feature: MA Experiment 108534 PARAMETER Experiment Name: Zm_4deg_Cold_P Parameter: Temperature (deg C) Value: 4 vs. 22
  misc_feature: MA Experiment 108534 PARAMETER Experiment Name: Zm_4deg_Cold_P Parameter: Timepoint (hr) Value: 6
  misc_feature: MA Experiment 108534 PARAMETER Experiment Name: Zm_4deg_Cold_P Parameter: Tissue Value: Aerial
  misc_feature: MA Experiment ID: 108543 Result: Down-regulated in Transcription
  misc_feature: MA Experiment ID: 108546 Result: Up-regulated in Transcription
  misc_feature: MA Experiment 108546 PARAMETER Experiment Name: Zm_Imbibed_Seeds_P Parameter: Age (day) Value: 3 vs. 2
  misc_feature: MA Experiment 108546 PARAMETER Experiment Name: Zm_Imbibed_Seeds_P Parameter: Organism Value: Zea mays
  misc_feature: MA Experiment 108546 PARAMETER Experiment Name: Zm_Imbibed_Seeds_P Parameter: Plant Line Value: 35A19
  misc_feature: MA Experiment 108546 PARAMETER Experiment Name: Zm_Imbibed_Seeds_P Parameter: Tissue Value: Roots vs. Embryo
  misc_feature: MA Experiment ID: 108687 Result: Down-regulated in Transcription
  misc_feature: MA Experiment 108687 PARAMETER Experiment Name: Zm_Embryos-Flowers__P Parameter: Tissue Value: Embryo vs. Aerial+
  misc_feature: MA Experiment ID: 20000492 Result: Down-regulated in Transcription
  misc_feature: MA Experiment 20000492 PARAMETER Experiment Name: Zm_Hybrid_Seed_Dev_P Parameter: DAP Value: 12
  misc_feature: MA Experiment 20000492 PARAMETER Experiment Name: Zm_Hybrid_Seed_Dev_P Parameter: Organism Value: Zea mays
  misc_feature: MA Experiment 20000492 PARAMETER Experiment Name: Zm_Hybrid_Seed_Dev_P Parameter: Plant Line Value: 35A19
  misc_feature: MA Experiment 20000492 PARAMETER Experiment Name: Zm_Hybrid_Seed_Dev_P Parameter: Tissue Value: Fert Kernel vs. Unfert Floret
  misc_feature: MA Experiment ID: 20000535 Result: Down-regulated in Transcription
  misc_feature: MA Experiment 20000535 PARAMETER Experiment Name: Zm_Hybrid_Seed_Dev_P Parameter: DAP Value: 30 vs. 12
  misc_feature: MA Experiment 20000535 PARAMETER Experiment Name: Zm_Hybrid_Seed_Dev_P Parameter: Organism Value: Zea mays
  misc_feature: MA Experiment 20000535 PARAMETER Experiment Name: Zm_Hybrid_Seed_Dev_P Parameter: Plant Line Value: 35A19
  misc_feature: MA Experiment 20000535 PARAMETER Experiment Name: Zm_Hybrid_Seed_Dev_P Parameter: Tissue Value: Embryo vs. Unfert Floret
  misc_feature: MA Experiment ID: 20001608 Result: Down-regulated in Transcription
  misc_feature: MA Experiment 20001608 PARAMETER Experiment Name: Zm_50ppm_KNO3_L-to-H_P Parameter: Age (day) Value: 21
  misc_feature: MA Experiment 20001608 PARAMETER Experiment Name: Zm_50ppm_KNO3_L-to-H_P Parameter: Organism Value: Zea mays
  misc_feature: MA Experiment 20001608 PARAMETER Experiment Name: Zm_50ppm_KNO3_L-to-H_P Parameter: Plant Line Value: 35A19
  misc_feature: MA Experiment 20001608 PARAMETER Experiment Name: Zm_50ppm_KNO3_L-to-H_P Parameter: Timepoint (hr) Value: 48
  misc_feature: MA Experiment 20001608 PARAMETER Experiment Name: Zm_50ppm_KNO3_L-to-H_P Parameter: Tissue Value: Shoots
  misc_feature: MA Experiment 20001608 PARAMETER Experiment Name: Zm_50ppm_KNO3_L-to-H_P Parameter: Treatment Value: 50ppm KNO3 vs. 50ppm KCl
ctctgcttgcttcgcctcgtctgccctacccctgccctgtccacattttcttccattccggttgctcaacaaacaaaatatatatatcctcgctttccttcccgtcgccgcctgaaaccgctgcgctctcggcttggatagcaagggtctcagtctctcagagggagcaagaagaggatctgagggtgagatggcgatcgaccacgagtcccagttcaaggagctccgcctcaagaaccgaaggatcatgggcggcggcggccctgaccctgagccggaggaggagggcgccacggcggcgtacgcggagcggtggccgcggtggctgcagccgctgctgtccgcgcgcttcttcgcgcagtgcaggacgcacagctactccaaccgcagcggcgaatgcaacatgttctgcctggactgctcggccaccggggggcacgggcgcgggcgcgctctgctcgctgtgcctggcgcagcacgggcaccgcgaccaccacaccatccagatccggcgctcctcctaccacgacgtcatccgggtctcggacatccagcgcttcatggacatcgccggcgtgcagacctacgtcatcaacagcgcccgcgtcgtcttcctcaacgagcggccgcagcagcagaagccgggtggcggcaaggccgcgtcgtcgtcgtcggcctccgccaacctctgcgaggtctgcgcccgcagcctcctcgacaacttccgcttctgctccctcggctgcaaggtcgtcggctgctcccccgacgccgccaaggccaggaactggctcctccgggccgccgacggcgacggttccaccacatcctcctcggccccgcgcaacgccgacaggaagctgagcttcacgccgcccacgccgcagccgaccctgccgacgaagcgccgcaagggcatcccgcaccgcgccccgttcggcagcctcatcgtcgagtactagaatctccttctcccccagccatcgctgtccacgtccgttgcttctgcattggcagttggcactacacgcgcgcggtagagtggaagtactcttcaaacgacggaatggaatcgcacagtgagccagtgaatccagattacaggcaagccaataggttggccaccacttgggtggcctggcccgcctttctttgccacggcacttcggttggtgggtgcttatcgagatggatgccatttgctcgctggcttcgctttccagaaaggggagggaggagaaaggaaggtggatggattggatcggacatcggaggaagaatcaaaaccagcttttc

SEQ ID NO: 9044 - protein, 368 aa, Zea mays subsp. mays
  peptide (1)..(368): Ceres Seq. ID no. 12359792
  misc_feature (1)..(79): Homolog of NCBI NO: 37537092 NR Description: unknown protein [Oryza sativa (japonica
  misc_feature (1)..(78): Homolog of NCBI NO: 6714272 NR Description: F6N18.8 [Arabidopsis thaliana]
  misc_feature (33)..(78): Homolog of NCBI NO: 18398555 NR Description: expressed protein; protein id: At1g32700.1,
  misc_feature (16)..(77): Homolog of NCBI NO: 38346725 NR Description: OSJNBa0086O06.23 [Oryza sativa (japonica
  misc_feature (33)..(76): Homolog of NCBI NO: 21554139 NR Description: unknown [Arabidopsis thaliana]
  misc_feature (1)..(78): Homolog of NCBI NO: 15236696 NR Description: putative protein; protein id: At4g17900.1
  misc_feature (1)..(78): Homolog of NCBI NO: 15237491 NR Description: putative protein; protein id: At5g46710.1, by cDNA: 42747. [Arabidopsis thaliana] gene_id:MZA15.12~pir||T05076~similar to unknown protein
MAIDHESQFKELRLKNRRIMGGGGPDPEPEEEGATAAYAERWPRWLQPLLSARFFAQCRTHSYSNRSGECNMFCLDCSATGGHGRGRALLAVPGAARAPRPPHHPDPALLLPRRHPGLGHPALHGHRRRADLRHQQRPRRLPQRAAAAAEAGWRQGRVVVVGLRQPLRGLRPQPPRQLPLLLPRLQGRRLLPRRRQGQELAPPGRRRRRFHHILLGPAQRRQEAELHAAHAAADPADEAPQGHPAPRPVRQPHRRVLESPSPPAIAVHVRCFCIGSWHYTRAVEWKYSSNDGMESHSEPVNPDYRQANRLATTWVAWPAFLCHGTSVGGCLSRWMPFARWLRFPERGGRRKEGGWIGSDIGGRIKTSF

SEQ ID NO: 9045 - protein, 349 aa, Zea mays subsp. mays
  peptide (1)..(349): Ceres Seq. ID no. 12359793
  misc_feature (1)..(60): Homolog of NCBI NO: 37537092 NR Description: unknown protein [Oryza sativa (japonica
  misc_feature (1)..(59): Homolog of NCBI NO: 6714272 NR Description: F6N18.8 [Arabidopsis thaliana]
  misc_feature (14)..(59): Homolog of NCBI NO: 18398555 NR Description: expressed protein; protein id: At1g32700.1,
  misc_feature (1)..(58): Homolog of NCBI NO: 38346725 NR Description: OSJNBa0086O06.23 [Oryza sativa (japonica
  misc_feature (14)..(57): Homolog of NCBI NO: 21554139 NR Description: unknown [Arabidopsis thaliana]
  misc_feature (1)..(59): Homolog of NCBI NO: 15236696 NR Description: putative protein; protein id: At4g17900.1
  misc_feature (1)..(59): Homolog of NCBI NO: 15237491 NR Description: putative protein; protein id: At5g46710.1, by cDNA: 42747. [Arabidopsis thaliana] gene_id:MZA15.12~pir||T05076~similar to unknown protein
MGGGGPDPEPEEEGATAAYAERWPRWLQPLLSARFFAQCRTHSYSNRSGECNMFCLDCSATGGHGRGRALLAVPGAARAPRPPHHPDPALLLPRRHPGLGHPALHGHRRRADLRHQQRPRRLPQRAAAAAEAGWRQGRVVVVGLRQPLRGLRPQPPRQLPLLLPRLQGRRLLPRRRQGQELAPPGRRRRRFHHILLGPAQRRQEAELHAAHAAADPADEAPQGHPAPRPVRQPHRRVLESPSPPAIAVHVRCFCIGSWHYTRAVEWKYSSNDGMESHSEPVNPDYRQANRLATTWVAWPAFLCHGTSVGGCLSRWMPFARWLRFPERGGRRKEGGWIGSDIGGRIKTSF

SEQ ID NO: 9046 - protein, 319 aa, Zea mays subsp. mays
  peptide (1)..(319): Ceres Seq. ID no. 12359794
  misc_feature (148)..(306): Pfam Name: Protein of unknown function, DUF597 Pfam Description: Protein of unknown function, DUF597
  misc_feature (148)..(319): Homolog of NCBI NO: 37537092 NR Description: unknown protein [Oryza sativa (japonica
  misc_feature (149)..(319): Homolog of NCBI NO: 6714272 NR Description: F6N18.8 [Arabidopsis thaliana]
  misc_feature (149)..(319): Homolog of NCBI NO: 18398555 NR Description: expressed protein; protein id: At1g32700.1,
  misc_feature (149)..(319): Homolog of NCBI NO: 38346725 NR Description: OSJNBa0086O06.23 [Oryza sativa (japonica
  misc_feature (149)..(319): Homolog of NCBI NO: 21554139 NR Description: unknown [Arabidopsis thaliana]
  misc_feature (149)..(255): Homolog of NCBI NO: 15236696 NR Description: putative protein; protein id: At4g17900.1
  misc_feature (150)..(312): Homolog of NCBI NO: 15237491 NR Description: putative protein; protein id: At5g46710.1, by cDNA: 42747. [Arabidopsis thaliana] gene_id:MZA15.12~pir||T05076~similar to unknown protein
  misc_feature (150)..(289): Homolog of NCBI NO: 21536890 NR Description: unknown [Arabidopsis thaliana]
  misc_feature (148)..(252): Homolog of NCBI NO: 18394936 NR Description: expressed protein; protein id: At1g21000.1, by cDNA: 119384., supported by cDNA: gi_14030626, supported by gi_16226406 [Arabidopsis thaliana]
  misc_feature (148)..(252): Homolog of NCBI NO: 25337907 NR Description: hypothetical protein F9H16.1 - Arabidopsis >gi|4836888|gb|AAD30591.1|AC007369_1 Unknown protein [Arabidopsis >gi|13877713|gb|AAK43934.1|AF370615_1 Unknown protein
LLASPRLPYPCPVHIFFHSGCSTNKIYISSLSFPSPPETAALSAWIARVSVSQREQEEDLRVRWRSTTSPSSRSSASRTEGSWAAAALTLSRRRRAPRRRTRSGGRGGCSRCCPRASSRSAGRTATPTAAANATCSAWTARPPGGTGAGALCSLCLAQHGHRDHHTIQIRRSSYHDVIRVSDIQRFMDIAGVQTYVINSARVVFLNERPQQQKPGGGKAASSSSASANLCEVCARSLLDNFRFCSLGCKVVGCSPDAAKARNWLLRAADGDGSTTSSSAPRNADRKLSFTPPTPQPTLPTKRRKGIPHRAPFGSLIVEY

SEQ ID NO: 9047 - DNA, 705 bp, Zea mays subsp. mays
  misc_feature (1)..(705): Ceres Seq. ID no. 12354101
  misc_feature: MA Experiment ID: 108522 Result: Down-regulated in Transcription
  misc_feature: MA Experiment 108522 PARAMETER Experiment Name: Zm_42deg_Heat_P Parameter: Age (day) Value: 8
  misc_feature: MA Experiment 108522 PARAMETER Experiment Name: Zm_42deg_Heat_P Parameter: Organism Value: Zea mays
  misc_feature: MA Experiment 108522 PARAMETER Experiment Name: Zm_42deg_Heat_P Parameter: Plant Line Value: 35A19
  misc_feature: MA Experiment 108522 PARAMETER Experiment Name: Zm_42deg_Heat_P Parameter: Temperature (deg C) Value: 42 vs. 22
  misc_feature: MA Experiment 108522 PARAMETER Experiment Name: Zm_42deg_Heat_P Parameter: Timepoint (hr) Value: 1
  misc_feature: MA Experiment 108522 PARAMETER Experiment Name: Zm_42deg_Heat_P Parameter: Tissue Value: Aerial
  misc_feature: MA Experiment ID: 108527 Result: Down-regulated in Transcription
  misc_feature: MA Experiment 108527 PARAMETER Experiment Name: Zm_5mM_NO_P Parameter: Age (day) Value: 8
  misc_feature: MA Experiment 108527 PARAMETER Experiment Name: Zm_5mM_NO_P Parameter: Organism Value: Zea mays
  misc_feature: MA Experiment 108527 PARAMETER Experiment Name: Zm_5mM_NO_P Parameter: Plant Line Value: 35A19
  misc_feature: MA Experiment 108527 PARAMETER Experiment Name: Zm_5mM_NO_P Parameter: Timepoint (hr) Value: 6
  misc_feature: MA Experiment 108527 PARAMETER Experiment Name: Zm_5mM_NO_P Parameter: Tissue Value: Aerial
  misc_feature: MA Experiment 108527 PARAMETER Experiment Name: Zm_5mM_NO_P Parameter: Treatment Value: 5mM NO vs. No Treatment
  misc_feature: MA Experiment ID: 108529 Result: Up-regulated in Transcription
  misc_feature: MA Experiment 108529 PARAMETER Experiment Name: Zm_Imbibed_Seeds_P Parameter: Age (day) Value: 5 vs. 2
  misc_feature: MA Experiment 108529 PARAMETER Experiment Name: Zm_Imbibed_Seeds_P Parameter: Organism Value: Zea mays
  misc_feature: MA Experiment 108529 PARAMETER Experiment Name: Zm_Imbibed_Seeds_P Parameter: Plant Line Value: 35A19
  misc_feature: MA Experiment 108529 PARAMETER Experiment Name: Zm_Imbibed_Seeds_P Parameter: Tissue Value: Roots vs. Embryo
  misc_feature: MA Experiment ID: 108534 Result: Down-regulated in Transcription
  misc_feature: MA Experiment 108534 PARAMETER Experiment Name: Zm_4deg_Cold_P Parameter: Age (hr) Value: 8
  misc_feature: MA Experiment 108534 PARAMETER Experiment Name: Zm_4deg_Cold_P Parameter: Organism Value: Zea mays
  misc_feature: MA Experiment 108534 PARAMETER Experiment Name: Zm_4deg_Cold_P Parameter: Plant Line Value: 35A19
  misc_feature: MA Experiment 108534 PARAMETER Experiment Name: Zm_4deg_Cold_P Parameter: Temperature (deg C) Value: 4 vs. 22
  misc_feature: MA Experiment 108534 PARAMETER Experiment Name: Zm_4deg_Cold_P Parameter: Timepoint (hr) Value: 6
  misc_feature: MA Experiment 108534 PARAMETER Experiment Name: Zm_4deg_Cold_P Parameter: Tissue Value: Aerial
  misc_feature: MA Experiment ID: 108543 Result: Up-regulated in Transcription
  misc_feature: MA Experiment ID: 108546 Result: Up-regulated in Transcription
  misc_feature: MA Experiment 108546 PARAMETER Experiment Name: Zm_Imbibed_Seeds_P Parameter: Age (day) Value: 3 vs. 2
  misc_feature: MA Experiment 108546 PARAMETER Experiment Name: Zm_Imbibed_Seeds_P Parameter: Organism Value: Zea mays
  misc_feature: MA Experiment 108546 PARAMETER Experiment Name: Zm_Imbibed_Seeds_P Parameter: Plant Line Value: 35A19
  misc_feature: MA Experiment 108546 PARAMETER Experiment Name: Zm_Imbibed_Seeds_P Parameter: Tissue Value: Roots vs. Embryo
  misc_feature: MA Experiment ID: 108689 Result: Down-regulated in Transcription
  misc_feature: MA Experiment 108689 PARAMETER Experiment Name: Zm_Drought_Roots_P Parameter: Age (day) Value: 9
  misc_feature: MA Experiment 108689 PARAMETER Experiment Name: Zm_Drought_Roots_P Parameter: Organism Value: Zea mays
  misc_feature: MA Experiment 108689 PARAMETER Experiment Name: Zm_Drought_Roots_P Parameter: Plant Line Value: 35A19
  misc_feature: MA Experiment 108689 PARAMETER Experiment Name: Zm_Drought_Roots_P Parameter: Timepoint (hr) Value: 24
  misc_feature: MA Experiment 108689 PARAMETER Experiment Name: Zm_Drought_Roots_P Parameter: Tissue Value: Roots
  misc_feature: MA Experiment 108689 PARAMETER Experiment Name: Zm_Drought_Roots_P Parameter: Treatment Value: Drought vs. No Drought
  misc_feature: MA Experiment ID: 20000535 Result: Down-regulated in Transcription
  misc_feature: MA Experiment 20000535 PARAMETER Experiment Name: Zm_Hybrid_Seed_Dev_P Parameter: DAP Value: 30 vs. 12
  misc_feature: MA Experiment 20000535 PARAMETER Experiment Name: Zm_Hybrid_Seed_Dev_P Parameter: Organism Value: Zea mays
  misc_feature: MA Experiment 20000535 PARAMETER Experiment Name: Zm_Hybrid_Seed_Dev_P Parameter: Plant Line Value: 35A19
  misc_feature: MA Experiment 20000535 PARAMETER Experiment Name: Zm_Hybrid_Seed_Dev_P Parameter: Tissue Value: Embryo vs. Unfert Floret
  misc_feature: MA Experiment ID: 20001612 Result: Up-regulated in Transcription
  misc_feature: MA Experiment 20001612 PARAMETER Experiment Name: Zm_50ppm_KNO3_L-to-H_P Parameter: Age (day) Value: 19
  misc_feature: MA Experiment 20001612 PARAMETER Experiment Name: Zm_50ppm_KNO3_L-to-H_P Parameter: Organism Value: Zea mays
  misc_feature: MA Experiment 20001612 PARAMETER Experiment Name: Zm_50ppm_KNO3_L-to-H_P Parameter: Plant Line Value: 35A19
  misc_feature: MA Experiment 20001612 PARAMETER Experiment Name: Zm_50ppm_KNO3_L-to-H_P Parameter: Timepoint (hr) Value: 8
  misc_feature: MA Experiment 20001612 PARAMETER Experiment Name: Zm_50ppm_KNO3_L-to-H_P Parameter: Tissue Value: Roots
  misc_feature: MA Experiment 20001612 PARAMETER Experiment Name: Zm_50ppm_KNO3_L-to-H_P Parameter: Treatment Value: 50ppm KNO3 vs. 50ppm KCl
tactttgctctgctctgctcctccatggccagcagctactactccctcatgctgctcctgctgctggcggccacggccgtagcagaagaagcagccgccgaggcgtccggaggcggcggcaacgcgaccgagacgtcgccgccgccgccgacggcgtacgagatgctggagcggtacggcttcccgcggggcatcctgccggcgggcgtgacagggtacgagctcggcgcggacggcgccttcgaggtgtacttcccgcgggcctgcgagttcctgctggcgaggacgtggctggtccgctacgaggcgcgcgtgtccgggtccgtcgccgcgggctcgctcacggcgctgcgggggatcagcgtgaaggtgctgttcctgtggctcggcgtcggcgaggtggaccgcgccggggagacgctcagcttctacatcggccccgtcgccacgtcgttcccgatcgacgacttcgccgagagcccgcgctgccgcggctatgatgccgaggcggcggcctcgtcgtgactcatgacgcagccttcagccggcggtgattattaggactgccttggtgatttagctggctatatatacacgtgtgcatcgatcgagtcggagccggcgattagctatttttcctcgtcctttaatttttgtttatttcgcggactttgagtaagctgtttgcggtgatcttgttgcccc

SEQ ID NO: 9048 - protein, 174 aa, Zea mays subsp. mays
  peptide (1)..(174): Ceres Seq. ID no. 12354102
  misc_feature (50)..(167): Pfam Name: Protein of unknown function, DUF538 Pfam Description: Protein of unknown function, DUF538
  misc_feature (50)..(169): Homolog of NCBI NO: 18379014 NR Description: Expressed protein; protein id: At1g02816.1, by cDNA: 28445., supported by cDNA: gi_14423479, supported by
  misc_feature (43)..(169): Homolog of NCBI NO: 18411923 NR Description: coded for by A. thaliana cDNA R64991; protein id: supported by cDNA: 19543., supported by cDNA: gi_13430841, by cDNA: gi_15810602 [Arabidopsis thaliana]
  misc_feature (43)..(169): Homolog of NCBI NO: 21554037 NR Description: unknown [Arabidopsis thaliana]
  misc_feature (50)..(167): Homolog of NCBI NO: 15235335 NR Description: putative protein; protein id: At4g02360.1
  misc_feature (51)..(174): Homolog of NCBI NO: 18379012 NR Description: Expressed protein; protein id: At1g02813.1,
  misc_feature (51)..(163): Homolog of NCBI NO: 21553750 NR Description: unknown [Arabidopsis thaliana]
  misc_feature (51)..(163): Homolog of NCBI NO: 18420052 NR Description: unknown protein; protein id: At5g19860.1
  misc_feature (18)..(172): Homolog of NCBI NO: 28273408 NR Description: unknown protein [Oryza sativa (japonica
  misc_feature (16)..(161): Homolog of NCBI NO: 28273412 NR Description: hypothetical protein [Oryza sativa (japonica
  misc_feature (51)..(163): Homolog of NCBI NO: 29824472 NR Description: hypothetical protein [Oryza sativa (japonica
YFALLCSSMASSYYSLMLLLLLAATAVAEEAAAEASGGGGNATETSPPPPTAYEMLERYGFPRGILPAGVTGYELGADGAFEVYFPRACEFLLARTWLVRYEARVSGSVAAGSLTALRGISVKVLFLWLGVGEVDRAGETLSFYIGPVATSFPIDDFAESPRCRGYDAEAAASS

SEQ ID NO: 9049 - protein, 166 aa, Zea mays subsp. mays
  peptide (1)..(166): Ceres Seq. ID no. 12354103
  misc_feature (42)..(159): Pfam Name: Protein of unknown function, DUF538 Pfam Description: Protein of unknown function, DUF538
  misc_feature (42)..(161): Homolog of NCBI NO: 18379014 NR Description: Expressed protein; protein id: At1g02816.1, by cDNA: 28445., supported by cDNA: gi_14423479, supported by
  misc_feature (35)..(161): Homolog of NCBI NO: 18411923 NR Description: coded for by A. thaliana cDNA R64991; protein id: supported by cDNA: 19543., supported by cDNA: gi_13430841, by cDNA: gi_15810602 [Arabidopsis thaliana]
  misc_feature (35)..(161): Homolog of NCBI NO: 21554037 NR Description: unknown [Arabidopsis thaliana]
  misc_feature (42)..(159): Homolog of NCBI NO: 15235335 NR Description: putative protein; protein id: At4g02360.1
  misc_feature (43)..(166): Homolog of NCBI NO: 18379012 NR Description: Expressed protein; protein id: At1g02813.1,
  misc_feature (43)..(155): Homolog of NCBI NO: 21553750 NR Description: unknown [Arabidopsis thaliana]
  misc_feature (43)..(155): Homolog of NCBI NO: 18420052 NR Description: unknown protein; protein id: At5g19860.1
  misc_feature (10)..(164): Homolog of NCBI NO: 28273408 NR Description: unknown protein [Oryza sativa (japonica
  misc_feature (8)..(153): Homolog of NCBI NO: 28273412 NR Description: hypothetical protein [Oryza sativa (japonica
  misc_feature (43)..(155): Homolog of NCBI NO: 29824472 NR Description: hypothetical protein [Oryza sativa (japonica
MASSYYSLMLLLLLAATAVAEEAAAEASGGGGNATETSPPPPTAYEMLERYGFPRGILPAGVTGYELGADGAFEVYFPRACEFLLARTWLVRYEARVSGSVAAGSLTALRGISVKVLFLWLGVGEVDRAGETLSFYIGPVATSFPIDDFAESPRCRGYDAEAAASS

SEQ ID NO: 9050 - protein, 165 aa, Zea mays subsp. mays
  peptide (1)..(165): Ceres Seq. ID no. 12354104
LCSALLLHGQQLLLPHAAPAAGGHGRSRRSSRRGVRRRRQRDRDVAAAADGVRDAGAVRLPAGHPAGGRDRVRARRGRRLRGVLPAGLRVPAGEDVAGPLRGARVRVRRRGLAHGAAGDQREGAVPVARRRRGGPRRGDAQLLHRPRRHVVPDRRLRREPALPRL

SEQ ID NO: 9051 - DNA, 882 bp, Zea mays subsp. mays
  misc_feature (1)..(882): Ceres Seq. ID no. 12402126
  misc_feature: MA Experiment ID: 108504 Result: Up-regulated in Transcription
  misc_feature: MA Experiment 108504 PARAMETER Experiment Name: Zm_Drought_P Parameter: Age (day) Value: 8
  misc_feature: MA Experiment 108504 PARAMETER Experiment Name: Zm_Drought_P Parameter: Organism Value: Zea mays
  misc_feature: MA Experiment 108504 PARAMETER Experiment Name: Zm_Drought_P Parameter: Plant Line Value: 35A19
  misc_feature: MA Experiment 108504 PARAMETER Experiment Name: Zm_Drought_P Parameter: Timepoint (hr) Value: 12
  misc_feature: MA Experiment 108504 PARAMETER Experiment Name: Zm_Drought_P Parameter: Tissue Value: Aerial
  misc_feature: MA Experiment 108504 PARAMETER Experiment Name: Zm_Drought_P Parameter: Treatment Value: Drought vs. No Drought
  misc_feature: MA Experiment ID: 108522 Result: Up-regulated in Transcription
  misc_feature: MA Experiment 108522 PARAMETER Experiment Name: Zm_42deg_Heat_P Parameter: Age (day) Value: 8
  misc_feature: MA Experiment 108522 PARAMETER Experiment Name: Zm_42deg_Heat_P Parameter: Organism Value: Zea mays
  misc_feature: MA Experiment 108522 PARAMETER Experiment Name: Zm_42deg_Heat_P Parameter: Plant Line Value: 35A19
  misc_feature: MA Experiment 108522 PARAMETER Experiment Name: Zm_42deg_Heat_P Parameter: Temperature (deg C) Value: 42 vs. 22
  misc_feature: MA Experiment 108522 PARAMETER Experiment Name: Zm_42deg_Heat_P Parameter: Timepoint (hr) Value: 1
  misc_feature: MA Experiment 108522 PARAMETER Experiment Name: Zm_42deg_Heat_P Parameter: Tissue Value: Aerial
  misc_feature: MA Experiment ID: 108523 Result: Up-regulated in Transcription
  misc_feature: MA Experiment 108523 PARAMETER Experiment Name: Zm_42deg_Heat_P Parameter: Age (day) Value: 8
  misc_feature: MA Experiment 108523 PARAMETER Experiment Name: Zm_42deg_Heat_P Parameter: Organism Value: Zea mays
  misc_feature: MA Experiment 108523 PARAMETER Experiment Name: Zm_42deg_Heat_P Parameter: Plant Line Value: 35A19
  misc_feature: MA Experiment 108523 PARAMETER Experiment Name: Zm_42deg_Heat_P Parameter: Temperature (deg C) Value: 42 vs. 22
  misc_feature: MA Experiment 108523 PARAMETER Experiment Name: Zm_42deg_Heat_P Parameter: Timepoint (hr) Value: 6
  misc_feature: MA Experiment 108523 PARAMETER Experiment Name: Zm_42deg_Heat_P Parameter: Tissue Value: Aerial
  misc_feature: MA Experiment ID: 108526 Result: Up-regulated in Transcription
  misc_feature: MA Experiment 108526 PARAMETER Experiment Name: Zm_5mM_NO_P Parameter: Age (day) Value: 8
  misc_feature: MA Experiment 108526 PARAMETER Experiment Name: Zm_5mM_NO_P Parameter: Organism Value: Zea mays
  misc_feature: MA Experiment 108526 PARAMETER Experiment Name: Zm_5mM_NO_P Parameter: Plant Line Value: 35A19
  misc_feature: MA Experiment 108526 PARAMETER Experiment Name: Zm_5mM_NO_P Parameter: Timepoint (hr) Value: 1
  misc_feature: MA Experiment 108526 PARAMETER Experiment Name: Zm_5mM_NO_P Parameter: Tissue Value: Aerial
  misc_feature: MA Experiment 108526 PARAMETER Experiment Name: Zm_5mM_NO_P Parameter: Treatment Value: 5mM NO vs. No Treatment
  misc_feature: MA Experiment ID: 108527 Result: Up-regulated in Transcription
  misc_feature: MA Experiment 108527 PARAMETER Experiment Name: Zm_5mM_NO_P Parameter: Age (day) Value: 8
  misc_feature: MA Experiment 108527 PARAMETER Experiment Name: Zm_5mM_NO_P Parameter: Organism Value: Zea mays
  misc_feature: MA Experiment 108527 PARAMETER Experiment Name: Zm_5mM_NO_P Parameter: Plant Line Value: 35A19
  misc_feature: MA Experiment 108527 PARAMETER Experiment Name: Zm_5mM_NO_P Parameter: Timepoint (hr) Value: 6
  misc_feature: MA Experiment 108527 PARAMETER Experiment Name: Zm_5mM_NO_P Parameter: Tissue Value: Aerial
  misc_feature: MA Experiment 108527 PARAMETER Experiment Name: Zm_5mM_NO_P Parameter: Treatment Value: 5mM NO vs. No Treatment
  misc_feature: MA Experiment ID: 108529 Result: Up-regulated in Transcription
  misc_feature: MA Experiment 108529 PARAMETER Experiment Name: Zm_Imbibed_Seeds_P Parameter: Age (day) Value: 5 vs. 2
  misc_feature: MA Experiment 108529 PARAMETER Experiment Name: Zm_Imbibed_Seeds_P Parameter: Organism Value: Zea mays
  misc_feature: MA Experiment 108529 PARAMETER Experiment Name: Zm_Imbibed_Seeds_P Parameter: Plant Line Value: 35A19
  misc_feature: MA Experiment 108529 PARAMETER Experiment Name: Zm_Imbibed_Seeds_P Parameter: Tissue Value: Roots vs. Embryo
  misc_feature: MA Experiment ID: 108530 Result: Up-regulated in Transcription
  misc_feature: MA Experiment 108530 PARAMETER Experiment Name: Zm_Imbibed_Seeds_P Parameter: Age (day) Value: 6 vs. 2
  misc_feature: MA Experiment 108530 PARAMETER Experiment Name: Zm_Imbibed_Seeds_P Parameter: Organism Value: Zea mays
  misc_feature: MA Experiment 108530 PARAMETER Experiment Name: Zm_Imbibed_Seeds_P Parameter: Plant Line Value: 35A19
  misc_feature: MA Experiment 108530 PARAMETER Experiment Name: Zm_Imbibed_Seeds_P Parameter: Tissue Value: Aerial vs. Embryo
  misc_feature: MA Experiment ID: 108533 Result: Up-regulated in Transcription
  misc_feature: MA Experiment 108533 PARAMETER Experiment Name: Zm_4deg_Cold_P Parameter: Age (hr) Value: 8
  misc_feature: MA Experiment 108533 PARAMETER Experiment Name: Zm_4deg_Cold_P Parameter: Organism Value: Zea mays
  misc_feature: MA Experiment 108533 PARAMETER Experiment Name: Zm_4deg_Cold_P Parameter: Plant Line Value: 35A19
  misc_feature: MA Experiment 108533 PARAMETER Experiment Name: Zm_4deg_Cold_P Parameter: Temperature (deg C) Value: 4 vs. 22
  misc_feature: MA Experiment 108533 PARAMETER Experiment Name: Zm_4deg_Cold_P Parameter: Timepoint (hr) Value: 1
  misc_feature: MA Experiment 108533 PARAMETER Experiment Name: Zm_4deg_Cold_P Parameter: Tissue Value: Aerial
  misc_feature: MA Experiment ID: 108534 Result: Up-regulated in Transcription
  misc_feature: MA Experiment 108534 PARAMETER Experiment Name: Zm_4deg_Cold_P Parameter: Age (hr) Value: 8
  misc_feature: MA Experiment 108534 PARAMETER Experiment Name: Zm_4deg_Cold_P Parameter: Organism Value: Zea mays
  misc_feature: MA Experiment 108534 PARAMETER Experiment Name: Zm_4deg_Cold_P Parameter: Plant Line Value: 35A19
  misc_feature: MA Experiment 108534 PARAMETER Experiment Name: Zm_4deg_Cold_P Parameter: Temperature (deg C) Value: 4 vs. 22
  misc_feature: MA Experiment 108534 PARAMETER Experiment Name: Zm_4deg_Cold_P Parameter: Timepoint (hr) Value: 6
  misc_feature: MA Experiment 108534 PARAMETER Experiment Name: Zm_4deg_Cold_P Parameter: Tissue Value: Aerial
  misc_feature: MA Experiment ID: 108536 Result: Up-regulated in Transcription
  misc_feature: MA Experiment 108536 PARAMETER Experiment Name: Zm_Meristem_P Parameter: Age (day) Value: 8
  misc_feature: MA Experiment 108536 PARAMETER Experiment Name: Zm_Meristem_P Parameter: Organism Value: Zea mays
  misc_feature: MA Experiment 108536 PARAMETER Experiment Name: Zm_Meristem_P Parameter: Plant Line Value: 35A19
  misc_feature: MA Experiment 108536 PARAMETER Experiment Name: Zm_Meristem_P Parameter: Tissue Value: Shoot Meristem vs. Above Shoot Meristem
  misc_feature: MA Experiment ID: 108540 Result: Up-regulated in Transcription
  misc_feature: MA Experiment 108540 PARAMETER Experiment Name: Zm_20percent_PEG_P Parameter: Age (day) Value: 8
  misc_feature: MA Experiment 108540 PARAMETER Experiment Name: Zm_20percent_PEG_P Parameter: Organism Value: Zea mays
  misc_feature: MA Experiment 108540 PARAMETER Experiment Name: Zm_20percent_PEG_P Parameter: Plant Line Value: 35A19
  misc_feature: MA Experiment 108540 PARAMETER Experiment Name: Zm_20percent_PEG_P Parameter: Timepoint (hr) Value: 6
  misc_feature: MA Experiment 108540 PARAMETER Experiment Name: Zm_20percent_PEG_P Parameter: Tissue Value: Aerial
  misc_feature: MA Experiment 108540 PARAMETER Experiment Name: Zm_20percent_PEG_P Parameter: Treatment Value: 20percent PEG vs. No Treatment
  misc_feature: MA Experiment ID: 108542 Result: Up-regulated in Transcription
  misc_feature: MA Experiment 108542 PARAMETER Experiment Name: Zm_150mM_NaCl_P Parameter: Age (day) Value: 8
  misc_feature: MA Experiment 108542 PARAMETER Experiment Name: Zm_150mM_NaCl_P Parameter: Organism Value: Zea mays
  misc_feature: MA Experiment 108542 PARAMETER Experiment Name: Zm_150mM_NaCl_P Parameter: Plant Line Value: 35A19
  misc_feature: MA Experiment 108542 PARAMETER Experiment Name: Zm_150mM_NaCl_P Parameter: Timepoint (hr) Value: 6
  misc_feature: MA Experiment 108542 PARAMETER Experiment Name: Zm_150mM_NaCl_P Parameter: Tissue Value: Aerial
  misc_feature: MA Experiment 108542 PARAMETER Experiment Name: Zm_150mM_NaCl_P Parameter: Treatment Value: 150mM NaCl vs. No Treatment
  misc_feature: MA Experiment ID: 108543 Result: Up-regulated in Transcription
  misc_feature: MA Experiment ID: 108545 Result: Down-regulated in Transcription
  misc_feature: MA Experiment 108545 PARAMETER Experiment Name: Zm_Imbibed_Seeds_P Parameter: Age (day) Value: 3 vs. 2
  misc_feature: MA Experiment 108545 PARAMETER Experiment Name: Zm_Imbibed_Seeds_P Parameter: Organism Value: Zea mays
  misc_feature: MA Experiment 108545 PARAMETER Experiment Name: Zm_Imbibed_Seeds_P Parameter: Plant Line Value: 35A19
  misc_feature: MA Experiment 108545 PARAMETER Experiment Name: Zm_Imbibed_Seeds_P Parameter: Tissue Value: Aerial vs. Embryo
  misc_feature: MA Experiment ID: 108547 Result: Up-regulated in Transcription
  misc_feature: MA Experiment 108547 PARAMETER Experiment Name: Zm_Imbibed_Seeds_P Parameter: Age (day) Value: 4 vs. 2
  misc_feature: MA Experiment 108547 PARAMETER Experiment Name: Zm_Imbibed_Seeds_P Parameter: Organism Value: Zea mays
  misc_feature: MA Experiment 108547 PARAMETER Experiment Name: Zm_Imbibed_Seeds_P Parameter: Plant Line Value: 35A19
  misc_feature: MA Experiment 108547 PARAMETER Experiment Name: Zm_Imbibed_Seeds_P Parameter: Tissue Value: Aerial vs. Embryo
  misc_feature: MA Experiment ID: 20000478 Result: Up-regulated in Transcription
  misc_feature: MA Experiment 20000478 PARAMETER Experiment Name: Zm_5mM_SA_P Parameter: Age (day) Value: 11
  misc_feature: MA Experiment 20000478 PARAMETER Experiment Name: Zm_5mM_SA_P Parameter: Organism Value: Zea mays
  misc_feature: MA Experiment 20000478 PARAMETER Experiment Name: Zm_5mM_SA_P Parameter: Plant Line Value: 35A19
  misc_feature: MA Experiment 20000478 PARAMETER Experiment Name: Zm_5mM_SA_P Parameter: Timepoint (hr) Value: 72
  misc_feature: MA Experiment 20000478 PARAMETER Experiment Name: Zm_5mM_SA_P Parameter: Tissue Value: Aerial
  misc_feature: MA Experiment 20000478 PARAMETER Experiment Name: Zm_5mM_SA_P Parameter: Treatment Value: 5mM SA vs. No Treatment
  misc_feature: MA Experiment ID: 20000479 Result: Up-regulated in Transcription
  misc_feature: MA Experiment 20000479 PARAMETER Experiment Name: Zm_Drought_P Parameter: Age (day) Value: 10
  misc_feature: MA Experiment 20000479 PARAMETER Experiment Name: Zm_Drought_P Parameter: Organism Value: Zea mays
  misc_feature: MA Experiment 20000479 PARAMETER Experiment Name: Zm_Drought_P Parameter: Plant Line Value: 35A19
  misc_feature: MA Experiment 20000479 PARAMETER Experiment Name: Zm_Drought_P Parameter: Timepoint (hr) Value: 48
  misc_feature: MA Experiment 20000479 PARAMETER Experiment Name: Zm_Drought_P Parameter: Tissue Value: Aerial
  misc_feature: MA Experiment 20000479 PARAMETER Experiment Name: Zm_Drought_P Parameter: Treatment Value: Drought vs. No Drought
  misc_feature: MA Experiment ID: 20000480 Result: Up-regulated in Transcription
  misc_feature: MA Experiment 20000480 PARAMETER Experiment Name: Zm_Drought_P Parameter: Age (day) Value: 11
  misc_feature: MA Experiment 20000480 PARAMETER Experiment Name: Zm_Drought_P Parameter: Organism Value: Zea mays
  misc_feature: MA Experiment 20000480 PARAMETER Experiment Name: Zm_Drought_P Parameter: Plant Line Value: 35A19
  misc_feature: MA Experiment 20000480 PARAMETER Experiment Name: Zm_Drought_P Parameter: Timepoint (hr) Value: 72
  misc_feature: MA Experiment 20000480 PARAMETER Experiment Name: Zm_Drought_P Parameter: Tissue Value: Aerial
  misc_feature: MA Experiment 20000480 PARAMETER Experiment Name: Zm_Drought_P Parameter: Treatment Value: Drought vs. No Drought
  misc_feature: MA Experiment ID: 20000532 Result: Up-regulated in Transcription
  misc_feature: MA Experiment 20000532 PARAMETER Experiment Name: Zm_0.001percent_MeJA_P Parameter: Age (day) Value: 10
  misc_feature: MA Experiment 20000532 PARAMETER Experiment Name: Zm_0.001percent_MeJA_P Parameter: Organism Value: Zea mays
  misc_feature: MA Experiment 20000532 PARAMETER Experiment Name: Zm_0.001percent_MeJA_P Parameter: Plant Line Value: 35A19
  misc_feature: MA Experiment 20000532 PARAMETER Experiment Name: Zm_0.001percent_MeJA_P Parameter: Timepoint (hr) Value: 48
  misc_feature: MA Experiment 20000532 PARAMETER Experiment Name: Zm_0.001percent_MeJA_P Parameter: Tissue Value: Aerial
  misc_feature: MA Experiment 20000532 PARAMETER Experiment Name: Zm_0.001percent_MeJA_P Parameter: Treatment Value: 0.001percent MeJA vs. No Treatment
gaatcaattcccacagcaccaccaaaccaataggcaggcagcaaacacaagccaataggcaacacccgcggcgacgcaagagggagaagcgagcgtgcagcggtcctcctctcgatccacatggccatggcggcagcggacggcaagagccggaggttcgcgctggcctgcggggtgctgagccagtacgtcaaggccgagcagcagcagcagcagcagatggcggccccgcgcgccccggccaccacgaccctgagcctgatgcccggcgcggacgtcggcgccgacgagcagcaggaggcggccgccgctggggccgaggagatgcccgggcccgcccccgccgcggcgccgccgctcaccatcttctacggcggcagggtggtggtgttcgaggacttcccggcggagaaggcggccgaggtcatgcgcctcgcggccggcgacgacctgcccatcgcccggaaggcgtcgctgcagcggttcctggccaagcgcaaagatcgcctcgtcgagcgcgcgccctacgcccgcccgtcgtcccccgcggaggcggtcaagccggcctcgggctcggcctcggcctcctggctcgggctccgcagcacggaagccgaccgcctcaccatcgcgctgtgatttactggatcgacctcgaccagtggcgatttaattggctaatgatgggttcatgatcatgcctgcctttggggctggaatgctggatggagatgggagacagagacaggattgtagagatgttttttttttcatttcttacgagagtttcgctgctgtcgtgagatctgattcgataatagagagaagatgaagatcgaacaatttgtgcctttcgttgtgcttgtgcacgtatattctcct

SEQ ID NO: 9052 - protein, 230 aa, Zea mays subsp. mays
  peptide (1)..(230): Ceres Seq. ID no. 12402127
INSHSTTKPIGRQQTQANRQHPRRRKREKRACSGPPLDPHGHGGSGRQEPEVRAGLRGAEPVRQGRAAAAAADGGPARPGHHDPEPDARRGRRRRRAAGGGRRWGRGDARARPRRGAAAHHLLRRQGGGVRGLPGGEGGRGHAPRGRRRPAHRPEGVAAAVPGQAQRSPRRARALRPPVVPRGGGQAGLGLGLGLLARAPQHGSRPPHHRAVIYWIDLDQWRFNWLMMGS

SEQ ID NO: 9053 - protein, 172 aa, Zea mays subsp. mays
  peptide (1)..(172): Ceres Seq. ID no. 12402128
  misc_feature (73)..(107): Pfam Name: ZIM motif Pfam Description: ZIM motif
  misc_feature (7)..(163): Homolog of NCBI NO: 24960746 NR Description: Unknown protein [Oryza sativa (japonica
  misc_feature (3)..(145): Homolog of NCBI NO: 37533948 NR Description: hypothetical protein [Oryza sativa (japonica group)] >gi|15451625|gb|AAK98749.1| Hypothetical protein [Oryza >gi|31431844|gb|AAP53563.1| hypothetical protein [Oryza sativa
  misc_feature (3)..(143): Homolog of NCBI NO: 37533958 NR Description: unknown protein [Oryza sativa (japonica
  misc_feature (1)..(107): Homolog of NCBI NO: 29788814 NR Description: unknown protein [Oryza sativa (japonica
  misc_feature (110)..(160): Homolog of NCBI NO: 29788814 NR Description: unknown protein [Oryza sativa (japonica
  misc_feature (3)..(162): Homolog of NCBI NO: 24960744 NR Description: Unknown protein [Oryza sativa (japonica
  misc_feature (1)..(118): Homolog of NCBI NO: 24960745 NR Description: Unknown protein [Oryza sativa (japonica
  misc_feature (110)..(161): Homolog of NCBI NO: 18410737 NR Description: expressed protein; protein id: At1g74950.1, by cDNA: 3024., supported by cDNA: gi_12744980, supported by gi_14423443 [Arabidopsis thaliana] >gi|25406399|pir||C96779
  misc_feature (110)..(161): Homolog of NCBI NO: 21592605 NR Description: unknown [Arabidopsis thaliana]
  misc_feature (79)..(106): Homolog of NCBI NO: 18410737 NR Description: expressed protein; protein id: At1g74950.1, by cDNA: 3024., supported by cDNA: gi_12744980, supported by gi_14423443 [Arabidopsis thaliana] >gi|25406399|pir||C96779
MAMAAADGKSRRFALACGVLSQYVKAEQQQQQQMAAPRAPATTTLSLMPGADVGADEQQEAAAAGAEEMPGPAPAAAPPLTIFYGGRVVVFEDFPAEKAAEVMRLAAGDDLPIARKASLQRFLAKRKDRLVERAPYARPSSPAEAVKPASGSASASWLGLRSTEADRLTIAL

SEQ ID NO: 9054 - protein, 170 aa, Zea mays subsp. mays
  peptide (1)..(170): Ceres Seq. ID no. 12402129
  misc_feature (71)..(105): Pfam Name: ZIM motif Pfam Description: ZIM motif
  misc_feature (108)..(159): Homolog of NCBI NO: 21592605 NR Description: unknown [Arabidopsis thaliana]
  misc_feature (5)..(161): Homolog of NCBI NO: 24960746 NR Description: Unknown protein [Oryza sativa (japonica
  misc_feature (1)..(141): Homolog of NCBI NO: 37533958 NR Description: unknown protein [Oryza sativa (japonica
  misc_feature (108)..(158): Homolog of NCBI NO: 29788814 NR Description: unknown protein [Oryza sativa (japonica
  misc_feature (1)..(116): Homolog of NCBI NO: 24960745 NR Description: Unknown protein [Oryza sativa (japonica
  misc_feature (108)..(159): Homolog of NCBI NO: 18410737 NR Description: expressed protein; protein id: At1g74950.1, by cDNA: 3024., supported by cDNA: gi_12744980, supported by gi_14423443 [Arabidopsis thaliana] >gi|25406399|pir||C96779
  misc_feature (1)..(160): Homolog of NCBI NO: 24960744 NR Description: Unknown protein [Oryza sativa (japonica
  misc_feature (1)..(105): Homolog of NCBI NO: 29788814 NR Description: unknown protein [Oryza sativa (japonica
  misc_feature (1)..(143): Homolog of NCBI NO: 37533948 NR Description: hypothetical protein [Oryza sativa (japonica group)] >gi|15451625|gb|AAK98749.1| Hypothetical protein [Oryza >gi|31431844|gb|AAP53563.1| hypothetical protein [Oryza sativa
  misc_feature (77)..(104): Homolog of NCBI NO: 18410737 NR Description: expressed protein; protein id: At1g74950.1, by cDNA: 3024., supported by cDNA: gi_12744980, supported by gi_14423443 [Arabidopsis thaliana] >gi|25406399|pir||C96779
MAAADGKSRRFALACGVLSQYVKAEQQQQQQMAAPRAPATTTLSLMPGADVGADEQQEAAAAGAEEMPGPAPAAAPPLTIFYGGRVVVFEDFPAEKAAEVMRLAAGDDLPIARKASLQRFLAKRKDRLVERAPYARPSSPAEAVKPASGSASASWLGLRSTEADRLTIAL

SEQ ID NO: 9055 - DNA, 1568 bp, Zea mays subsp. mays; identical to SEQ ID NO: 5586
  misc_feature (1)..(1568): Ceres Seq. ID no. 12409445
  misc_feature: MA Experiment ID: 108535 Result: Up-regulated in Transcription
  misc_feature: MA Experiment 108535 PARAMETER Experiment Name: Zm_Meristem_P Parameter: Age (day) Value: 8
  misc_feature: MA Experiment 108535 PARAMETER Experiment Name: Zm_Meristem_P Parameter: Organism Value: Zea mays
  misc_feature: MA Experiment 108535 PARAMETER Experiment Name: Zm_Meristem_P Parameter: Plant Line Value: 35A19
  misc_feature: MA Experiment 108535 PARAMETER Experiment Name: Zm_Meristem_P Parameter: Tissue Value: Root Meristem vs. Above Root Meristem

SEQ ID NO: 9056 - protein, 357 aa, Zea mays subsp. mays; identical to SEQ ID NO: 5587
  peptide (1)..(357): Ceres Seq. ID no. 12409446
  misc_feature (1)..(356): Homolog of NCBI NO: 15241535 NR Description: serine/threonine protein kinase; protein id: supported by cDNA: 5323., supported by cDNA: gi_13358242, by cDNA: gi_2109292 [Arabidopsis thaliana]
  misc_feature (1)..(356): Homolog of NCBI NO: 21593866 NR Description: serine/threonine protein kinase [Arabidopsis
  misc_feature (77)..(356): Homolog of NCBI NO: 30682270 NR Description: serine/threonine protein kinase, putative
  misc_feature (1)..(31): Homolog of NCBI NO: 30682270 NR Description: serine/threonine protein kinase, putative
  misc_feature (85)..(351): Homolog of NCBI NO: 10640971 NR Description: F5-2 [Homo sapiens]
  misc_feature (85)..(351): Homolog of NCBI NO: 3372666 NR Description: myristilated and palmitylated serine-threonine
  misc_feature (85)..(351): Homolog of NCBI NO: 27465615 NR Description: serine/threonine kinase 16 [Rattus norvegicus] serine/threonine kinase 16 [Rattus norvegicus] Serine/threonine protein kinase 16 (Protein kinase PKL12)
  misc_feature (65)..(351): Homolog of NCBI NO: 6714558 NR Description: F5-2 [Mus musculus]
  misc_feature (65)..(351): Homolog of NCBI NO: 6729083 NR Description: F5-2 [Mus musculus]
  misc_feature (85)..(351): Homolog of NCBI NO: 4505837 NR Description: serine/threonine kinase 16; protein kinase in day 12 fetal liver [Homo sapiens] >gi|3367705|emb|CAA06700.1|
  misc_feature (1)..(356): Homolog of NCBI NO: 15241535 NR Description: serine/threonine protein kinase; protein id: supported by cDNA: 5323., supported by cDNA: gi_13358242, by cDNA: gi_2109292 [Arabidopsis thaliana]
  misc_feature (1)..(356): Homolog of NCBI NO: 21593866 NR Description: serine/threonine protein kinase [Arabidopsis
  misc_feature (77)..(356): Homolog of NCBI NO: 30682270 NR Description: serine/threonine protein kinase, putative
  misc_feature (1)..(31): Homolog of NCBI NO: 30682270 NR Description: serine/threonine protein kinase, putative
  misc_feature (85)..(351): Homolog of NCBI NO: 10640971 NR Description: F5-2 [Homo sapiens]
  misc_feature (85)..(351): Homolog of NCBI NO: 3372666 NR Description: myristilated and palmitylated serine-threonine
  misc_feature (85)..(351): Homolog of NCBI NO: 27465615 NR Description: serine/threonine kinase 16 [Rattus norvegicus] serine/threonine kinase 16 [Rattus norvegicus] Serine/threonine protein kinase 16 (Protein kinase PKL12)
  misc_feature (65)..(351): Homolog of NCBI NO: 6714558 NR Description: F5-2 [Mus musculus]
  misc_feature (65)..(351): Homolog of NCBI NO: 6729083 NR Description: F5-2 [Mus musculus]
  misc_feature (85)..(351): Homolog of NCBI NO: 4505837 NR Description: serine/threonine kinase 16; protein kinase in day 12 fetal liver [Homo sapiens] >gi|3367705|emb|CAA06700.1|

SEQ ID NO: 9057 - protein, 197 aa, Zea mays subsp. mays; identical to SEQ ID NO: 5588
  peptide (1)..(197): Ceres Seq. ID no. 12409447
  misc_feature (1)..(196): Homolog of NCBI NO: 15241535 NR Description: serine/threonine protein kinase; protein id: supported by cDNA: 5323., supported by cDNA: gi_13358242, by cDNA: gi_2109292 [Arabidopsis thaliana]
  misc_feature (1)..(196): Homolog of NCBI NO: 21593866 NR Description: serine/threonine protein kinase [Arabidopsis
  misc_feature (1)..(196): Homolog of NCBI NO: 30682270 NR Description: serine/threonine protein kinase, putative
  misc_feature (1)..(191): Homolog of NCBI NO: 10640971 NR Description: F5-2 [Homo sapiens]
  misc_feature (1)..(191): Homolog of NCBI NO: 3372666 NR Description: myristilated and palmitylated serine-threonine
  misc_feature (1)..(191): Homolog of NCBI NO: 27465615 NR Description: serine/threonine kinase 16 [Rattus norvegicus] serine/threonine kinase 16 [Rattus norvegicus] Serine/threonine protein kinase 16 (Protein kinase PKL12)
  misc_feature (1)..(191): Homolog of NCBI NO: 6714558 NR Description: F5-2 [Mus musculus]
  misc_feature (1)..(191): Homolog of NCBI NO: 6729083 NR Description: F5-2 [Mus musculus]
  misc_feature (1)..(191): Homolog of NCBI NO: 4505837 NR Description: serine/threonine kinase 16; protein kinase in day 12 fetal liver [Homo sapiens] >gi|3367705|emb|CAA06700.1|
  misc_feature (1)..(191): Homolog of NCBI NO: 13626604 NR Description: SERINE/THREONINE PROTEIN KINASE 16 (PROTEIN
  misc_feature (1)..(196): Homolog of NCBI NO: 15241535 NR Description: serine/threonine protein kinase; protein id: supported by cDNA: 5323., supported by cDNA: gi_13358242, by cDNA: gi_2109292 [Arabidopsis thaliana]
  misc_feature (1)..(196): Homolog of NCBI NO: 21593866 NR Description: serine/threonine protein kinase [Arabidopsis
  misc_feature (1)..(196): Homolog of NCBI NO: 30682270 NR Description: serine/threonine protein kinase, putative
  misc_feature (1)..(191): Homolog of NCBI NO: 10640971 NR Description: F5-2 [Homo sapiens]
  misc_feature (1)..(191): Homolog of NCBI NO: 3372666 NR Description: myristilated and palmitylated serine-threonine
  misc_feature (1)..(191): Homolog of NCBI NO: 27465615 NR Description: serine/threonine kinase 16 [Rattus norvegicus] serine/threonine kinase 16 [Rattus norvegicus] Serine/threonine protein kinase 16 (Protein kinase PKL12)
  misc_feature (1)..(191): Homolog of NCBI NO: 6714558 NR Description: F5-2 [Mus musculus]
  misc_feature (1)..(191): Homolog of NCBI NO: 6729083 NR Description: F5-2 [Mus musculus]
  misc_feature (1)..(191): Homolog of NCBI NO: 4505837 NR Description: serine/threonine kinase 16; protein kinase in day 12 fetal liver [Homo sapiens] >gi|3367705|emb|CAA06700.1|
  misc_feature (1)..(191): Homolog of NCBI NO: 13626604 NR Description: SERINE/THREONINE PROTEIN KINASE 16 (PROTEIN

SEQ ID NO: 9058 - DNA, 1317 bp, Zea mays subsp. mays
  misc_feature (1)..(1317): Ceres Seq. ID no. 12406590
  misc_feature: MA Experiment ID: 108522 Result: Up-regulated in Transcription
  misc_feature: MA Experiment 108522 PARAMETER Experiment Name: Zm_42deg_Heat_P Parameter: Age (day) Value: 8
  misc_feature: MA Experiment 108522 PARAMETER Experiment Name: Zm_42deg_Heat_P Parameter: Organism Value: Zea mays
  misc_feature: MA Experiment 108522 PARAMETER Experiment Name: Zm_42deg_Heat_P Parameter: Plant Line Value: 35A19
  misc_feature: MA Experiment 108522 PARAMETER Experiment Name: Zm_42deg_Heat_P Parameter: Temperature (deg C) Value: 42 vs. 22
  misc_feature: MA Experiment 108522 PARAMETER Experiment Name: Zm_42deg_Heat_P Parameter: Timepoint (hr) Value: 1
  misc_feature: MA Experiment 108522 PARAMETER Experiment Name: Zm_42deg_Heat_P Parameter: Tissue Value: Aerial
gcacgagaccattacctagaacatcctaatcgaaaaaaaaataactcgtcggagtcagtacggtgctctctccgtctcagccgtcgccaactaatctatccccgatcacgcggcgaaccgccgcaacaccactatcaccaatcgcaatggagaaccctccaccgtcctccgccggtccgtactcggcgcccgcgccggcagcgcagcatcaggacgcggcgaaggaggatcaggacgtggcgcagctcgtgctcaacctctgcatcccggagctccgcgagaaggccatcatcatcctttccaagaagcgagaaaaatgtgaagatcttgctctactactatggcactcttttggtacaatggctgcactactccaggaaattgtgtcaatttatcgattactttcacccccacaattatcttttgaccaatcaactcgagtctgcaatgtgcttgtactccttaagtgtgtggcatcacaccctgatactaggatgccatttttaaatgcacagtttccactgtacctgtaccctttcttgaacactacctacaaaacaagagaatatgagttcttgaggattagtagcctgagcgtgatcggtgctcttgtgaagtccgatgatcatgaagtcattgtgaatttgctgtgttctgaaatagttcctttgtgtctgcgtgctattgagatgggcagtgaactttcaaaaaaggtggccacttttattctccaaaagattatgcttgacgacacagggcttgcgtacgtatgcgcttcttctgaacgtttctgcgctgttgccaatgtgctagctcagatggtcgaagcacttgctgaacagccttccccgaggacgcttaagaacacaatccgctgctacctcaggctgacagatgatcgaagggcctgccaagcgttacgtgactacctccccatcgcgttgagggacgggacattcaacggcttaatcgaggtcgatctcacagcaaggctatggctccaccagctgctgcataacgtcatgatgtcagacagtggaggcggccctcgccctgccccgggtcctgtgatggggatgtgaatgaagccggtcgccacgcctcatcatctgtgaagatccaagagcgtgcgttgtagctgtaggtagcgaagtagtaacccacagggaagggaaagcaatcgtggtggtgttcacacccttttggagggaacaaacacaaacagctgagctttgtgccgtttggatggcgaagaagcaacgataacacgcgtcttcttgatacaagtctggctggccattggtcgttgggattttg

SEQ ID NO: 9059 - protein, 311 aa, Zea mays subsp. mays
  peptide (1)..(311): Ceres Seq. ID no. 12406591
  misc_feature (33)..(295): Pfam Name: Cell differentiation family, Rcd1-like Pfam Description: Cell differentiation family, Rcd1-like
  misc_feature (1)..(311): Homolog of NCBI NO: 34897134 NR Description: putative cell differentiation protein [Oryza >gi|14718319|gb|AAK72897.1| putative cell differentiation protein
  misc_feature (1)..(300): Homolog of NCBI NO: 15232369 NR Description: putative cell differentiation protein; protein At3g20800.1, supported by cDNA: 125131. [Arabidopsis thaliana] putative cell differentiation protein differentiation protein
  misc_feature (11)..(300): Homolog of NCBI NO: 9294407 NR Description: RCD1 [Arabidopsis thaliana]
  misc_feature (1)..(300): Homolog of NCBI NO: 21537250 NR Description: putative cell differentiation protein
  misc_feature (1)..(311): Homolog of NCBI NO: 34899762 NR Description: putative cell differentiation protein [Oryza
  misc_feature (1)..(292): Homolog of NCBI NO: 15239962 NR Description: putative protein; protein id: At5g12980.1
  misc_feature (13)..(303): Homolog of NCBI NO: 38174128 NR Description: Unknown (protein for MGC:76003) [Silurana
  misc_feature (13)..(303): Homolog of NCBI NO: 10946722 NR Description: rcd1 (required for cell differentiation) homolog FL10; rcd1 (required for cell differentiation) homolog 1 [Mus musculus] >gi|7385111|gb|AAF61701.1|AF221849_1 FL10 [Mus
  misc_feature (13)..(303): Homolog of NCBI NO: 4885579 NR Description: RCD1 required for cell differentiation1 homolog; involved in sexual development; rcd1 (required for cell S.pombe) homolog 1 [Homo sapiens] >gi|1620898|dbj|BAA13508.1|
  misc_feature (20)..(292): Homolog of NCBI NO: 20129055 NR Description: CG14213-PB [Drosophila melanogaster]
MENPPPSSAGPYSAPAPAAQHQDAAKEDQDVAQLVLNLCIPELREKAIIILSKKREKCEDLALLLWHSFGTMAALLQEIVSIYRLLSPPQLSFDQSTRVCNVLVLLKCVASHPDTRMPFLNAQFPLYLYPFLNTTYKTREYEFLRISSLSVIGALVKSDDHEVIVNLLCSEIVPLCLRAIEMGSELSKKVATFILQKIMLDDTGLAYVCASSERFCAVANVLAQMVEALAEQPSPRTLKNTIRCYLRLTDDRRACQALRDYLPIALRDGTFNGLIEVDLTARLWLHQLLHNVMMSDSGGGPRPAPGPVMGM

SEQ ID NO: 9060 - protein, 240 aa, Zea mays subsp. mays
  peptide (1)..(240): Ceres Seq. ID no. 12406592
  misc_feature (1)..(224): Pfam Name: Cell differentiation family, Rcd1-like Pfam Description: Cell differentiation family, Rcd1-like
  misc_feature (1)..(240): Homolog of NCBI NO: 34897134 NR Description: putative cell differentiation protein [Oryza >gi|14718319|gb|AAK72897.1| putative cell differentiation protein
  misc_feature (1)..(229): Homolog of NCBI NO: 15232369 NR Description: putative cell differentiation protein; protein At3g20800.1, supported by cDNA: 125131. [Arabidopsis thaliana] putative cell differentiation protein differentiation protein
  misc_feature (1)..(229): Homolog of NCBI NO: 9294407 NR Description: RCD1 [Arabidopsis thaliana]
  misc_feature (1)..(229): Homolog of NCBI NO: 21537250 NR Description: putative cell differentiation protein
  misc_feature (1)..(240): Homolog of NCBI NO: 34899762 NR Description: putative cell differentiation protein [Oryza
  misc_feature (1)..(221): Homolog of NCBI NO: 15239962 NR Description: putative protein; protein id: At5g12980.1
  misc_feature (1)..(232): Homolog of NCBI NO: 38174128 NR Description: Unknown (protein for MGC:76003) [Silurana
  misc_feature (1)..(232): Homolog of NCBI NO: 10946722 NR Description: rcd1 (required for cell differentiation) homolog FL10; rcd1 (required for cell differentiation) homolog 1 [Mus musculus] >gi|7385111|gb|AAF61701.1|AF221849_1 FL10 [Mus
  misc_feature (1)..(232): Homolog of NCBI NO: 4885579 NR Description: RCD1 required for cell differentiation1 homolog; involved in sexual development; rcd1 (required for cell S.pombe) homolog 1 [Homo sapiens] >gi|1620898|dbj|BAA13508.1|
  misc_feature (1)..(221): Homolog of NCBI NO: 20129055 NR Description: CG14213-PB [Drosophila melanogaster]
MAALLQEIVSIYRLLSPPQLSFDQSTRVCNVLVLLKCVASHPDTRMPFLNAQFPLYLYPFLNTTYKTREYEFLRISSLSVIGALVKSDDHEVIVNLLCSEIVPLCLRAIEMGSELSKKVATFILQKIMLDDTGLAYVCASSERFCAVANVLAQMVEALAEQPSPRTLKNTIRCYLRLTDDRRACQALRDYLPIALRDGTFNGLIEVDLTARLWLHQLLHNVMMSDSGGGPRPAPGPVMGM

SEQ ID NO: 9061 - protein, 195 aa, Zea mays subsp. mays
  peptide (1)..(195): Ceres Seq. ID no. 12406593
  misc_feature (1)..(179): Pfam Name: Cell differentiation family, Rcd1-like Pfam Description: Cell differentiation family, Rcd1-like
  misc_feature (1)..(195): Homolog of NCBI NO: 34897134 NR Description: putative cell differentiation protein [Oryza >gi|14718319|gb|AAK72897.1| putative cell differentiation protein
  misc_feature (1)..(184): Homolog of NCBI NO: 15232369 NR Description: putative cell differentiation protein; protein At3g20800.1, supported by cDNA: 125131. [Arabidopsis thaliana] putative cell differentiation protein differentiation protein
  misc_feature (1)..(184): Homolog of NCBI NO: 9294407 NR Description: RCD1 [Arabidopsis thaliana]
  misc_feature (1)..(184): Homolog of NCBI NO: 21537250 NR Description: putative cell differentiation protein
  misc_feature (1)..(195): Homolog of NCBI NO: 34899762 NR Description: putative cell differentiation protein [Oryza
  misc_feature (1)..(176): Homolog of NCBI NO: 15239962 NR Description: putative protein; protein id: At5g12980.1
  misc_feature (1)..(187): Homolog of NCBI NO: 38174128 NR Description: Unknown (protein for MGC:76003) [Silurana
  misc_feature (1)..(187): Homolog of NCBI NO: 10946722 NR Description: rcd1 (required for cell differentiation) homolog FL10; rcd1 (required for cell differentiation) homolog 1 [Mus musculus] >gi|7385111|gb|AAF61701.1|AF221849_1 FL10 [Mus
  misc_feature (1)..(187): Homolog of NCBI NO: 4885579 NR Description: RCD1 required for cell differentiation1 homolog; involved in sexual development; rcd1 (required for cell S.pombe) homolog 1 [Homo sapiens] >gi|1620898|dbj|BAA13508.1|
  misc_feature (1)..(176): Homolog of NCBI NO: 20129055 NR Description: CG14213-PB [Drosophila melanogaster]
MPFLNAQFPLYLYPFLNTTYKTREYEFLRISSLSVIGALVKSDDHEVIVNLLCSEIVPLCLRAIEMGSELSKKVATFILQKIMLDDTGLAYVCASSERFCAVANVLAQMVEALAEQPSPRTLKNTIRCYLRLTDDRRACQALRDYLPIALRDGTFNGLIEVDLTARLWLHQLLHNVMMSDSGGGPRPAPGPVMGM

SEQ ID NO: 9062 - DNA, 1097 bp, Zea mays subsp. mays
  misc_feature (1)..(1097): Ceres Seq. ID no. 12363241
  misc_feature: MA Experiment ID: 108535 Result: Up-regulated in Transcription
  misc_feature: MA Experiment 108535 PARAMETER Experiment Name: Zm_Meristem_P Parameter: Age (day) Value: 8
  misc_feature: MA Experiment 108535 PARAMETER Experiment Name: Zm_Meristem_P Parameter: Organism Value: Zea mays
  misc_feature: MA Experiment 108535 PARAMETER Experiment Name: Zm_Meristem_P Parameter: Plant Line Value: 35A19
  misc_feature: MA Experiment 108535 PARAMETER Experiment Name: Zm_Meristem_P Parameter: Tissue Value: Root Meristem vs. Above Root Meristem
  misc_feature: MA Experiment ID: 108536 Result: Up-regulated in Transcription
  misc_feature: MA Experiment 108536 PARAMETER Experiment Name: Zm_Meristem_P Parameter: Age (day) Value: 8
  misc_feature: MA Experiment 108536 PARAMETER Experiment Name: Zm_Meristem_P Parameter: Organism Value: Zea mays
  misc_feature: MA Experiment 108536 PARAMETER Experiment Name: Zm_Meristem_P Parameter: Plant Line Value: 35A19
  misc_feature: MA Experiment 108536 PARAMETER Experiment Name: Zm_Meristem_P Parameter: Tissue Value: Shoot Meristem vs. Above Shoot Meristem
  misc_feature: MA Experiment ID: 20000108 Result: Up-regulated in Transcription
  misc_feature: MA Experiment 20000108 PARAMETER Experiment Name: Zm_Root-Tips_P Parameter: Age (day) Value: 12
  misc_feature: MA Experiment 20000108 PARAMETER Experiment Name: Zm_Root-Tips_P Parameter: Organism Value: Zea mays
  misc_feature: MA Experiment 20000108 PARAMETER Experiment Name: Zm_Root-Tips_P Parameter: Tissue Value: Root tips vs. Root mid region    35
  misc_feature: MA Experiment 20000108 PARAMETER Experiment Name: Zm_Root-Tips_P Parameter: Tissue Value: Root tips vs. Root mid region   Sequence Listing-Misc Features (4)
  misc_feature: MA Experiment ID: 20000477 Result: Down-regulated in Transcription
  misc_feature: MA Experiment 20000477 PARAMETER Experiment Name: Zm_5mM_SA_P Parameter: Age (day) Value: 10
  misc_feature: MA Experiment 20000477 PARAMETER Experiment Name: Zm_5mM_SA_P Parameter: Organism Value: Zea mays
  misc_feature: MA Experiment 20000477 PARAMETER Experiment Name: Zm_5mM_SA_P Parameter: Plant Line Value: 35A19
  misc_feature: MA Experiment 20000477 PARAMETER Experiment Name: Zm_5mM_SA_P Parameter: Timepoint (hr) Value: 48
  misc_feature: MA Experiment 20000477 PARAMETER Experiment Name: Zm_5mM_SA_P Parameter: Tissue Value: Aerial
  misc_feature: MA Experiment 20000477 PARAMETER Experiment Name: Zm_5mM_SA_P Parameter: Treatment Value: 5mM SA vs. No Treatment
  misc_feature: MA Experiment ID: 20000478 Result: Down-regulated in Transcription
  misc_feature: MA Experiment 20000478 PARAMETER Experiment Name: Zm_5mM_SA_P Parameter: Age (day) Value: 11
  misc_feature: MA Experiment 20000478 PARAMETER Experiment Name: Zm_5mM_SA_P Parameter: Organism Value: Zea mays
  misc_feature: MA Experiment 20000478 PARAMETER Experiment Name: Zm_5mM_SA_P Parameter: Plant Line Value: 35A19
  misc_feature: MA Experiment 20000478 PARAMETER Experiment Name: Zm_5mM_SA_P Parameter: Timepoint (hr) Value: 72
  misc_feature: MA Experiment 20000478 PARAMETER Experiment Name: Zm_5mM_SA_P Parameter: Tissue Value: Aerial
  misc_feature: MA Experiment 20000478 PARAMETER Experiment Name: Zm_5mM_SA_P Parameter: Treatment Value: 5mM SA vs. No Treatment
  misc_feature: MA Experiment ID: 20000535 Result: Up-regulated in Transcription
  misc_feature: MA Experiment 20000535 PARAMETER Experiment Name: Zm_Hybrid_Seed_Dev_P Parameter: DAP Value: 30 vs. 12
  misc_feature: MA Experiment 20000535 PARAMETER Experiment Name: Zm_Hybrid_Seed_Dev_P Parameter: Organism Value: Zea mays
  misc_feature: MA Experiment 20000535 PARAMETER Experiment Name: Zm_Hybrid_Seed_Dev_P Parameter: Plant Line Value: 35A19
  misc_feature: MA Experiment 20000535 PARAMETER Experiment Name: Zm_Hybrid_Seed_Dev_P Parameter: Tissue Value: Embryo vs. Unfert Floret
gcacgagaccattacctagaacatcctaatcgaaaagatcacgtactggcacgagctagcgagcagactcactcgaacacacactgaccaaccgctcctctctccttccgttccgtcattccgtgtgcagcagacgcggcgttctgcgtgtgcaagacgggcgtgcccgaccaggcgatgcaggcggcgatcgactacgcctgcgccaagggggccgactgcgcctccgcctccaagggcgcgccctgctacggcaacggcaacaaggtggccgtctgctcctacatctgcaacagctactaccagagccgcagcgccacgggcgccacctgcgacttcaacggcgtcgccacgctcaccggcaccgaccccagctccggcacctgcaagttcgcctccggccccagcagcgcaggcaccggcggtggcatgggcgctggcgcgggtaccggcggtggcatgggcgctggcgctggcaccggcgccgggacaggcgttggcaccggagcaggcacgggcatgggcactgggacggggaccagcaccggcaccggcgccggcgcaggggtcgcgacccccgggagcgccctgagcccaccgttcggcggcactggcgcgtacggcccgtcaggggcaggcagcacggactacaacgacgccgtcgccccgcgcgccgccgggctgcacgtggtggctgccctcgctctcgccgtcgccgtcgccgcacctctccaccgctaggggcggtgccatggcaactgggagctggcgggcacgacactcgcagacgggatcccgcctcggcggcccgccagcgcgggctctggtcgatgtccggcgttagtgcgtgcgcgtacctgatgaagtgatgatgggttttgatcgaccagccgtcagcgtagtgcggtcacggggtttacagtgttattcgaactgacctctctgcttcctcgtgctagtagtggtggctgccatgtgtgtgtgctgctggtagagaactagggattcttttttttttctgtcgcttccttgcttatatgtcccgtcgtgttaggctatgtttactatgcagtgtttggtggtggccgctttccatg

SEQ ID NO: 9063 - protein, 187 aa, Zea mays subsp. mays
  peptide (1)..(187): Ceres Seq. ID no. 12363242
  misc_feature (75)..(160): Pfam Name: Dehydrin Pfam Description: Dehydrin
  misc_feature (1)..(130): Homolog of NCBI NO: 22775658 NR Description: contains ESTs
  misc_feature (1)..(179): Homolog of NCBI NO: 31249724 NR Description: putative glucanase [Oryza sativa (japonica
  misc_feature (1)..(185): Homolog of NCBI NO: 18409239 NR Description: unknown protein; protein id: At1g69295.1, by cDNA: 16467., supported by cDNA: gi_13877780, supported by gi_15724275, supported by cDNA: gi_15912196, supported by cDNA:
  misc_feature (1)..(185): Homolog of NCBI NO: 21553768 NR Description: unknown [Arabidopsis thaliana]
  misc_feature (1)..(72): Homolog of NCBI NO: 34909796 NR Description: P0403C05.4 [Oryza sativa (japonica
  misc_feature (1)..(154): Homolog of NCBI NO: 25404810 NR Description: unknown protein, 45065-49536 [imported] -
  misc_feature (1)..(141): Homolog of NCBI NO: 33146901 NR Description: beta-1,3-glucanase-like protein [Oryza sativa
  misc_feature (1)..(139): Homolog of NCBI NO: 30697478 NR Description: glycosyl hydrolase family 17 [Arabidopsis >gi|9759459|dbj|BAB10375.1| to unknown protein [Arabidopsis thaliana]
  misc_feature (1)..(139): Homolog of NCBI NO: 21592859 NR Description: unknown [Arabidopsis thaliana]
  misc_feature (1)..(139): Homolog of NCBI NO: 15241485 NR Description: glycosyl hydrolase family 17; protein id: supported by cDNA: 33347. [Arabidopsis thaliana]
MQAAIDYACAKGADCASASKGAPCYGNGNKVAVCSYICNSYYQSRSATGATCDFNGVATLTGTDPSSGTCKFASGPSSAGTGGGMGAGAGTGGGMGAGAGTGAGTGVGTGAGTGMGTGTGTSTGTGAGAGVATPGSALSPPFGGTGAYGPSGAGSTDYNDAVAPRAAGLHVVAALALAVAVAAPLHR

SEQ ID NO: 9064 - protein, 103 aa, Zea mays subsp. mays
  peptide (1)..(103): Ceres Seq. ID no. 12363243
  misc_feature (1)..(76): Pfam Name: Dehydrin Pfam Description: Dehydrin
  misc_feature (1)..(46): Homolog of NCBI NO: 22775658 NR Description: contains ESTs
  misc_feature (1)..(95): Homolog of NCBI NO: 31249724 NR Description: putative glucanase [Oryza sativa (japonica
  misc_feature (1)..(101): Homolog of NCBI NO: 18409239 NR Description: unknown protein; protein id: At1g69295.1, by cDNA: 16467., supported by cDNA: gi_13877780, supported by gi_15724275, supported by cDNA: gi_15912196, supported by cDNA:
  misc_feature (1)..(101): Homolog of NCBI NO: 21553768 NR Description: unknown [Arabidopsis thaliana]
  misc_feature (1)..(70): Homolog of NCBI NO: 25404810 NR Description: unknown protein, 45065-49536 [imported] -
  misc_feature (1)..(57): Homolog of NCBI NO: 33146901 NR Description: beta-1,3-glucanase-like protein [Oryza sativa
  misc_feature (1)..(55): Homolog of NCBI NO: 30697478 NR Description: glycosyl hydrolase family 17 [Arabidopsis >gi|9759459|dbj|BAB10375.1| to unknown protein [Arabidopsis thaliana]
  misc_feature (1)..(55): Homolog of NCBI NO: 21592859 NR Description: unknown [Arabidopsis thaliana]
  misc_feature (1)..(55): Homolog of NCBI NO: 15241485 NR Description: glycosyl hydrolase family 17; protein id: supported by cDNA: 33347. [Arabidopsis thaliana]
  misc_feature (1)..(99): Homolog of NCBI NO: 34912962 NR Description: beta-1,3 glucanase-like protein [Oryza sativa
MGAGAGTGGGMGAGAGTGAGTGVGTGAGTGMGTGTGTSTGTGAGAGVATPGSALSPPFGGTGAYGPSGAGSTDYNDAVAPRAAGLHVVAALALAVAVAAPLHR

SEQ ID NO: 9065 - protein, 93 aa, Zea mays subsp. mays
  peptide (1)..(93): Ceres Seq. ID no. 12363244
  misc_feature (1)..(66): Pfam Name: Dehydrin Pfam Description: Dehydrin
  misc_feature (1)..(36): Homolog of NCBI NO: 22775658 NR Description: contains ESTs
  misc_feature (1)..(85): Homolog of NCBI NO: 31249724 NR Description: putative glucanase [Oryza sativa (japonica
  misc_feature (1)..(91): Homolog of NCBI NO: 18409239 NR Description: unknown protein; protein id: At1g69295.1, by cDNA: 16467., supported by cDNA: gi_13877780, supported by gi_15724275, supported by cDNA: gi_15912196, supported by cDNA:
  misc_feature (1)..(91): Homolog of NCBI NO: 21553768 NR Description: unknown [Arabidopsis thaliana]
  misc_feature (1)..(60): Homolog of NCBI NO: 25404810 NR Description: unknown protein, 45065-49536 [imported] -
  misc_feature (1)..(47): Homolog of NCBI NO: 33146901 NR Description: beta-1,3-glucanase-like protein [Oryza sativa
  misc_feature (1)..(45): Homolog of NCBI NO: 30697478 NR Description: glycosyl hydrolase family 17 [Arabidopsis >gi|9759459|dbj|BAB10375.1| to unknown protein [Arabidopsis thaliana]
  misc_feature (1)..(45): Homolog of NCBI NO: 21592859 NR Description: unknown [Arabidopsis thaliana]
  misc_feature (1)..(45): Homolog of NCBI NO: 15241485 NR Description: glycosyl hydrolase family 17; protein id: supported by cDNA: 33347. [Arabidopsis thaliana]
  misc_feature (1)..(89): Homolog of NCBI NO: 34912962 NR Description: beta-1,3 glucanase-like protein [Oryza sativa
MGAGAGTGAGTGVGTGAGTGMGTGTGTSTGTGAGAGVATPGSALSPPFGGTGAYGPSGAGSTDYNDAVAPRAAGLHVVAALALAVAVAAPLHR

SEQ ID NO: 9066 - DNA, 846 bp, Zea mays subsp. mays
  misc_feature (1)..(846): Ceres Seq. ID no. 12594975
  misc_feature: MA Experiment ID: 108522 Result: Up-regulated in Transcription
  misc_feature: MA Experiment 108522 PARAMETER Experiment Name: Zm_42deg_Heat_P Parameter: Age (day) Value: 8
  misc_feature: MA Experiment 108522 PARAMETER Experiment Name: Zm_42deg_Heat_P Parameter: Organism Value: Zea mays
  misc_feature: MA Experiment 108522 PARAMETER Experiment Name: Zm_42deg_Heat_P Parameter: Plant Line Value: 35A19
  misc_feature: MA Experiment 108522 PARAMETER Experiment Name: Zm_42deg_Heat_P Parameter: Temperature (deg C) Value: 42 vs. 22
  misc_feature: MA Experiment 108522 PARAMETER Experiment Name: Zm_42deg_Heat_P Parameter: Timepoint (hr) Value: 1
  misc_feature: MA Experiment 108522 PARAMETER Experiment Name: Zm_42deg_Heat_P Parameter: Tissue Value: Aerial
  misc_feature: MA Experiment ID: 108545 Result: Up-regulated in Transcription
  misc_feature: MA Experiment 108545 PARAMETER Experiment Name: Zm_Imbibed_Seeds_P Parameter: Age (day) Value: 3 vs. 2
  misc_feature: MA Experiment 108545 PARAMETER Experiment Name: Zm_Imbibed_Seeds_P Parameter: Organism Value: Zea mays
  misc_feature: MA Experiment 108545 PARAMETER Experiment Name: Zm_Imbibed_Seeds_P Parameter: Plant Line Value: 35A19
  misc_feature: MA Experiment 108545 PARAMETER Experiment Name: Zm_Imbibed_Seeds_P Parameter: Tissue Value: Aerial vs. Embryo
  misc_feature: MA Experiment ID: 20000477 Result: Down-regulated in Transcription
  misc_feature: MA Experiment 20000477 PARAMETER Experiment Name: Zm_5mM_SA_P Parameter: Age (day) Value: 10
  misc_feature: MA Experiment 20000477 PARAMETER Experiment Name: Zm_5mM_SA_P Parameter: Organism Value: Zea mays
  misc_feature: MA Experiment 20000477 PARAMETER Experiment Name: Zm_5mM_SA_P Parameter: Plant Line Value: 35A19
  misc_feature: MA Experiment 20000477 PARAMETER Experiment Name: Zm_5mM_SA_P Parameter: Timepoint (hr) Value: 48
  misc_feature: MA Experiment 20000477 PARAMETER Experiment Name: Zm_5mM_SA_P Parameter: Tissue Value: Aerial
  misc_feature: MA Experiment 20000477 PARAMETER Experiment Name: Zm_5mM_SA_P Parameter: Treatment Value: 5mM SA vs. No Treatment
  misc_feature: MA Experiment ID: 20000478 Result: Down-regulated in Transcription
  misc_feature: MA Experiment 20000478 PARAMETER Experiment Name: Zm_5mM_SA_P Parameter: Age (day) Value: 11
  misc_feature: MA Experiment 20000478 PARAMETER Experiment Name: Zm_5mM_SA_P Parameter: Organism Value: Zea mays
  misc_feature: MA Experiment 20000478 PARAMETER Experiment Name: Zm_5mM_SA_P Parameter: Plant Line Value: 35A19
  misc_feature: MA Experiment 20000478 PARAMETER Experiment Name: Zm_5mM_SA_P Parameter: Timepoint (hr) Value: 72
  misc_feature: MA Experiment 20000478 PARAMETER Experiment Name: Zm_5mM_SA_P Parameter: Tissue Value: Aerial
  misc_feature: MA Experiment 20000478 PARAMETER Experiment Name: Zm_5mM_SA_P Parameter: Treatment Value: 5mM SA vs. No Treatment
  misc_feature: MA Experiment ID: 20000488 Result: Up-regulated in Transcription
  misc_feature: MA Experiment 20000488 PARAMETER Experiment Name: Zm_50mM_NH4NO3_L_to_H_P Parameter: Organism Value: Zea mays
  misc_feature: MA Experiment 20000488 PARAMETER Experiment Name: Zm_50mM_NH4NO3_L_to_H_P Parameter: Timepoint (hr) Value: 8
  misc_feature: MA Experiment 20000488 PARAMETER Experiment Name: Zm_50mM_NH4NO3_L_to_H_P Parameter: Tissue Value: Leaves
  misc_feature: MA Experiment 20000488 PARAMETER Experiment Name: Zm_50mM_NH4NO3_L_to_H_P Parameter: Treatment Value: 50mM NH4NO3 vs. 100mM Mannitol
attatccgaagttccgaacccaagccaagccccagggtccgaccgcagaaccgacccaaaatgtcgcccgcctgctccatgctcaccaccgcgtcgctctcctccccgctcccagccccgcgcctccgcgccgccgccgccttcgctccgccgcgccgcgcggcagtcacactcgtcgtgcgcgcggcgtccgcatcttccaagtcccctgccacggcggaggcggccccgaagaagaagagggcgaccggcatcacccagccgaagtccgtgtcgccggcgctgcaggcaatcgtgggcgacccggttattccccgcaccgaggtcctcaagcgcctctgggcctatatcaaggagcataacctccaggatccctctgataaaaaggtggtggtttgtgatgagaagctgaaggtcctgttcgcggggcgggagcgagtgggattccttgagatcgccaagcttctcaaccctcacttcgtgaagtgatgaggaggagccaggccacttccaggaatcgagttagcttatatggttggttggttacttgtggctggcctagagggtgcgcgtgcgttgggttttggtagcctgagttggctcgctcgactttgtagaatgctgttgttagcttttattagtagccttcagctcgtagcctggtatgcagttagcgtgtgtggtgttctgctatggtttaagtttaaccactgtccatagtcagtcaatgttagcttccttgtccttgcaatggatgttgctgtgtgaattatggtccaacatggattggttgctctgctatggtttagtcactgcccagtcagtctatatatattttttgatggt

SEQ ID NO: 9067 - protein, 162 aa, Zea mays subsp. mays
  peptide (1)..(162): Ceres Seq. ID no. 12594976
  misc_feature (24)..(162): Homolog of NCBI NO: 14488372 NR Description: hypothetical protein [Oryza sativa (japonica
  misc_feature (30)..(161): Homolog of NCBI NO: 15235320 NR Description: putative protein; protein id: At4g34290.1, by cDNA: 17912., supported by cDNA: gi_14423525 [Arabidopsis
  misc_feature (30)..(161): Homolog of NCBI NO: 14423526 NR Description: putative protein [Arabidopsis thaliana]
  misc_feature (34)..(161): Homolog of NCBI NO: 21553903 NR Description: unknown [Arabidopsis thaliana]
  misc_feature (28)..(161): Homolog of NCBI NO: 18397658 NR Description: expressed protein; protein id: At2g14880.1, by cDNA: 41621., supported by cDNA: gi_13926218, supported by gi_19698858 [Arabidopsis thaliana] >gi|25411585|pir||E84522
  misc_feature (28)..(161): Homolog of NCBI NO: 21593713 NR Description: unknown [Arabidopsis thaliana]
  misc_feature (29)..(161): Homolog of NCBI NO: 19698859 NR Description: unknown protein [Arabidopsis thaliana]
  misc_feature (57)..(162): Homolog of NCBI NO: 33667910 NR Description: SWIb domain-containing protein [Solanum chacoense]
  misc_feature (21)..(162): Homolog of NCBI NO: 21593643 NR Description: unknown [Arabidopsis thaliana]
  misc_feature (21)..(162): Homolog of NCBI NO: 18396594 NR Description: expressed protein; protein id: At3g03590.1, by cDNA: 40813. [Arabidopsis thaliana] hypothetical protein [Arabidopsis thaliana]
IIRSSEPKPSPRVRPQNRPKMSPACSMLTTASLSSPLPAPRLRAAAAFAPPRRAAVTLVVRAASASSKSPATAEAAPKKKRATGITQPKSVSPALQAIVGDPVIPRTEVLKRLWAYIKEHNLQDPSDKKVVVCDEKLKVLFAGRERVGFLEIAKLLNPHFVK

SEQ ID NO: 9068 - protein, 142 aa, Zea mays subsp. mays
  peptide (1)..(142): Ceres Seq. ID no. 12594977
  misc_feature (37)..(142): Homolog of NCBI NO: 33667910 NR Description: SWIb domain-containing protein [Solanum chacoense]
  misc_feature (1)..(142): Homolog of NCBI NO: 21593643 NR Description: unknown [Arabidopsis thaliana]
  misc_feature (1)..(142): Homolog of NCBI NO: 18396594 NR Description: expressed protein; protein id: At3g03590.1, by cDNA: 40813. [Arabidopsis thaliana] hypothetical protein [Arabidopsis thaliana]
  misc_feature (4)..(142): Homolog of NCBI NO: 14488372 NR Description: hypothetical protein [Oryza sativa (japonica
  misc_feature (10)..(141): Homolog of NCBI NO: 15235320 NR Description: putative protein; protein id: At4g34290.1, by cDNA: 17912., supported by cDNA: gi_14423525 [Arabidopsis
  misc_feature (10)..(141): Homolog of NCBI NO: 14423526 NR Description: putative protein [Arabidopsis thaliana]
  misc_feature (14)..(141): Homolog of NCBI NO: 21553903 NR Description: unknown [Arabidopsis thaliana]
  misc_feature (8)..(141): Homolog of NCBI NO: 18397658 NR Description: expressed protein; protein id: At2g14880.1, by cDNA: 41621., supported by cDNA: gi_13926218, supported by gi_19698858 [Arabidopsis thaliana] >gi|25411585|pir||E84522
  misc_feature (8)..(141): Homolog of NCBI NO: 21593713 NR Description: unknown [Arabidopsis thaliana]
  misc_feature (9)..(141): Homolog of NCBI NO: 19698859 NR Description: unknown protein [Arabidopsis thaliana]
MSPACSMLTTASLSSPLPAPRLRAAAAFAPPRRAAVTLVVRAASASSKSPATAEAAPKKKRATGITQPKSVSPALQAIVGDPVIPRTEVLKRLWAYIKEHNLQDPSDKKVVVCDEKLKVLFAGRERVGFLEIAKLLNPHFVK

SEQ ID NO: 9069 - protein, 136 aa, Zea mays subsp. mays
  peptide (1)..(136): Ceres Seq. ID no. 12594978
  misc_feature (1)..(136): Homolog of NCBI NO: 14488372 NR Description: hypothetical protein [Oryza sativa (japonica
  misc_feature (4)..(135): Homolog of NCBI NO: 15235320 NR Description: putative protein; protein id: At4g34290.1, by cDNA: 17912., supported by cDNA: gi_14423525 [Arabidopsis
  misc_feature (4)..(135): Homolog of NCBI NO: 14423526 NR Description: putative protein [Arabidopsis thaliana]
  misc_feature (8)..(135): Homolog of NCBI NO: 21553903 NR Description: unknown [Arabidopsis thaliana]
  misc_feature (2)..(135): Homolog of NCBI NO: 18397658 NR Description: expressed protein; protein id: At2g14880.1, by cDNA: 41621., supported by cDNA: gi_13926218, supported by gi_19698858 [Arabidopsis thaliana] >gi|25411585|pir||E84522
  misc_feature (2)..(135): Homolog of NCBI NO: 21593713 NR Description: unknown [Arabidopsis thaliana]
  misc_feature (3)..(135): Homolog of NCBI NO: 19698859 NR Description: unknown protein [Arabidopsis thaliana]
  misc_feature (31)..(136): Homolog of NCBI NO: 33667910 NR Description: SWIb domain-containing protein [Solanum chacoense]
  misc_feature (1)..(136): Homolog of NCBI NO: 21593643 NR Description: unknown [Arabidopsis thaliana]
  misc_feature (1)..(136): Homolog of NCBI NO: 18396594 NR Description: expressed protein; protein id: At3g03590.1, by cDNA: 40813. [Arabidopsis thaliana] hypothetical protein [Arabidopsis thaliana]
MLTTASLSSPLPAPRLRAAAAFAPPRRAAVTLVVRAASASSKSPATAEAAPKKKRATGITQPKSVSPALQAIVGDPVIPRTEVLKRLWAYIKEHNLQDPSDKKVVVCDEKLKVLFAGRERVGFLEIAKLLNPHFVK

SEQ ID NO: 9070 - DNA, 1280 bp, Zea mays subsp. mays
  misc_feature (1)..(1280): Ceres Seq. ID no. 13492847
  misc_feature: MA Experiment ID: 108527 Result: Up-regulated in Transcription
  misc_feature: MA Experiment 108527 PARAMETER Experiment Name: Zm_5mM_NO_P Parameter: Age (day) Value: 8
  misc_feature: MA Experiment 108527 PARAMETER Experiment Name: Zm_5mM_NO_P Parameter: Organism Value: Zea mays
  misc_feature: MA Experiment 108527 PARAMETER Experiment Name: Zm_5mM_NO_P Parameter: Plant Line Value: 35A19
  misc_feature: MA Experiment 108527 PARAMETER Experiment Name: Zm_5mM_NO_P Parameter: Timepoint (hr) Value: 6
  misc_feature: MA Experiment 108527 PARAMETER Experiment Name: Zm_5mM_NO_P Parameter: Tissue Value: Aerial
  misc_feature: MA Experiment 108527 PARAMETER Experiment Name: Zm_5mM_NO_P Parameter: Treatment Value: 5mM NO vs. No Treatment
  misc_feature: MA Experiment ID: 108535 Result: Down-regulated in Transcription
  misc_feature: MA Experiment 108535 PARAMETER Experiment Name: Zm_Meristem_P Parameter: Age (day) Value: 8
  misc_feature: MA Experiment 108535 PARAMETER Experiment Name: Zm_Meristem_P Parameter: Organism Value: Zea mays
  misc_feature: MA Experiment 108535 PARAMETER Experiment Name: Zm_Meristem_P Parameter: Plant Line Value: 35A19
  misc_feature: MA Experiment 108535 PARAMETER Experiment Name: Zm_Meristem_P Parameter: Tissue Value: Root Meristem vs. Above Root Meristem
  misc_feature: MA Experiment ID: 108542 Result: Up-regulated in Transcription
  misc_feature: MA Experiment 108542 PARAMETER Experiment Name: Zm_150mM_NaCl_P Parameter: Age (day) Value: 8
  misc_feature: MA Experiment 108542 PARAMETER Experiment Name: Zm_150mM_NaCl_P Parameter: Organism Value: Zea mays
  misc_feature: MA Experiment 108542 PARAMETER Experiment Name: Zm_150mM_NaCl_P Parameter: Plant Line Value: 35A19
  misc_feature: MA Experiment 108542 PARAMETER Experiment Name: Zm_150mM_NaCl_P Parameter: Timepoint (hr) Value: 6
  misc_feature: MA Experiment 108542 PARAMETER Experiment Name: Zm_150mM_NaCl_P Parameter: Tissue Value: Aerial
  misc_feature: MA Experiment 108542 PARAMETER Experiment Name: Zm_150mM_NaCl_P Parameter: Treatment Value: 150mM NaCl vs. No Treatment
  misc_feature: MA Experiment ID: 108543 Result: Up-regulated in Transcription
  misc_feature: MA Experiment ID: 108544 Result: Up-regulated in Transcription
  misc_feature: MA Experiment ID: 20000492 Result: Down-regulated in Transcription
  misc_feature: MA Experiment 20000492 PARAMETER Experiment Name: Zm_Hybrid_Seed_Dev_P Parameter: DAP Value: 12
  misc_feature: MA Experiment 20000492 PARAMETER Experiment Name: Zm_Hybrid_Seed_Dev_P Parameter: Organism Value: Zea mays
  misc_feature: MA Experiment 20000492 PARAMETER Experiment Name: Zm_Hybrid_Seed_Dev_P Parameter: Plant Line Value: 35A19
  misc_feature: MA Experiment 20000492 PARAMETER Experiment Name: Zm_Hybrid_Seed_Dev_P Parameter: Tissue Value: Fert Kernel vs. Unfert Floret
  misc_feature: MA Experiment ID: 20000535 Result: Down-regulated in Transcription
  misc_feature: MA Experiment 20000535 PARAMETER Experiment Name: Zm_Hybrid_Seed_Dev_P Parameter: DAP Value: 30 vs. 12
  misc_feature: MA Experiment 20000535 PARAMETER Experiment Name: Zm_Hybrid_Seed_Dev_P Parameter: Organism Value: Zea mays
  misc_feature: MA Experiment 20000535 PARAMETER Experiment Name: Zm_Hybrid_Seed_Dev_P Parameter: Plant Line Value: 35A19
  misc_feature: MA Experiment 20000535 PARAMETER Experiment Name: Zm_Hybrid_Seed_Dev_P Parameter: Tissue Value: Embryo vs. Unfert Floret
aaatccttctctcggctacctccaccactgctctgctcagctcgaacgaacaaaaagaactcccctcggccctctcctcttgtgcttctgcttccccaaccgagtctcctcaaccccaggcactcgccctctttcccctcgcctcggcccgcgactccgatgccgccgccgctcctcgagccgcgcgactacctcggcgccggcgccacctcgtcgtgctgctcgtcgtcctgctcctccggccgcgagggcgcggggccccacctcgcgctgcggctcgggcttccggggtccgacgactcccccggccgcggcgcggacgcggagcacgcccgcgcccacgtcgacgccgcgctcaccctcggccccgcccccgcccccgcccccgcgcctcccaggggcagcgccaagcgcgggttcgccgactccctcgaccggtccgcgaagcgggacggcgttgccgcggatgacgctgctgggggcgtcacacgggtagctgaagctgctgccggagctccgcccgctgccaaggcacaagttgttggatggccgcctgttaggagctaccggaagaataccctagctgccagtgccacaaagacaaatgggggagatgaaggtaggagtgaggcgggatgctgttatgtcaaggtcagcatggatggagccccatacctaaggaaggtggacctcaagacctattcaagctatgaggatctctcgcttggtctggagaaaatgttcagttgcttcatcactggtcaaaacagttcatgcaagacatcaagaagggataggcttactgatggttctagggctgatgcccttcaggaccaagaatatgtcctcacttacgaagataaagatgctgactggatgctcgttggtgatctgccctgggacttgttcaccacattttgccggaaacttaggatcatgagaggctctgatgctgctggcatggctcctccaagaccaccggaacagacagttcggaacaaatgagggcggacagcttacttacctggcgctgaactgaagggagagcgacgctgccttggtcaggccttctttcacttgtgcagtgggaactgcgtcctgctgtctcggacgcccattttgcccacgagctggtcgtcacgtgctgtcgctttttgtctgggaaagatagcgtactgcttgctgtatgatactttcatctgtgttcggaagtttgtagcgcttcatatcctggaagggagtaaagaaaatgtccatgctgtccggtgagaatttcttcc

SEQ ID NO: 9071 - protein, 334 aa, Zea mays subsp. mays
  peptide (1)..(334): Ceres Seq. ID no. 13492848
  misc_feature (91)..(323): Pfam Name: AUX/IAA family Pfam Description: AUX/IAA family
  misc_feature (54)..(334): Homolog of NCBI NO: 34911088 NR Description: OJ1117_G01.11 [Oryza sativa (japonica
  misc_feature (137)..(323): Homolog of NCBI NO: 15227275 NR Description: auxin-responsive protein IAA8 (Indoleacetic
  misc_feature (173)..(333): Homolog of NCBI NO: 20257219 NR Description: auxin-regulated protein [Zinnia elegans]
  misc_feature (168)..(323): Homolog of NCBI NO: 25989504 NR Description: Aux/IAA protein [Solanum tuberosum]
  misc_feature (50)..(333): Homolog of NCBI NO: 34904314 NR Description: unnamed protein product [Oryza sativa (japonica group)] >gi|7340910|dbj|BAA92982.1| unnamed protein product
  misc_feature (137)..(321): Homolog of NCBI NO: 30681782 NR Description: auxin-responsive protein IAA8 (Indoleacetic
KSFSRLPPPLLCSARTNKKNSPRPSPLVLLLPQPSLLNPRHSPSFPSPRPATPMPPPLLEPRDYLGAGATSSCCSSSCSSGREGAGPHLALRLGLPGSDDSPGRGADAEHARAHVDAALTLGPAPAPAPAPPRGSAKRGFADSLDRSAKRDGVAADDAAGGVTRVAEAAAGAPPAAKAQVVGWPPVRSYRKNTLAASATKTNGGDEGRSEAGCCYVKVSMDGAPYLRKVDLKTYSSYEDLSLGLEKMFSCFITGQNSSCKTSRRDRLTDGSRADALQDQEYVLTYEDKDADWMLVGDLPWDLFTTFCRKLRIMRGSDAAGMAPPRPPEQTVRNK

SEQ ID NO: 9072 - protein, 281 aa, Zea mays subsp. mays
  peptide (1)..(281): Ceres Seq. ID no. 13492849
  misc_feature (38)..(270): Pfam Name: AUX/IAA family Pfam Description: AUX/IAA family
  misc_feature (1)..(281): Homolog of NCBI NO: 34911088 NR Description: OJ1117_G01.11 [Oryza sativa (japonica
  misc_feature (84)..(270): Homolog of NCBI NO: 15227275 NR Description: auxin-responsive protein IAA8 (Indoleacetic
  misc_feature (120)..(280): Homolog of NCBI NO: 20257219 NR Description: auxin-regulated protein [Zinnia elegans]
  misc_feature (115)..(270): Homolog of NCBI NO: 25989504 NR Description: Aux/IAA protein [Solanum tuberosum]
  misc_feature (1)..(280): Homolog of NCBI NO: 34904314 NR Description: unnamed protein product [Oryza sativa (japonica group)] >gi|7340910|dbj|BAA92982.1| unnamed protein product
  misc_feature (84)..(268): Homolog of NCBI NO: 30681782 NR Description: auxin-responsive protein IAA8 (Indoleacetic
MPPPLLEPRDYLGAGATSSCCSSSCSSGREGAGPHLALRLGLPGSDDSPGRGADAEHARAHVDAALTLGPAPAPAPAPPRGSAKRGFADSLDRSAKRDGVAADDAAGGVTRVAEAAAGAPPAAKAQVVGWPPVRSYRKNTLAASATKTNGGDEGRSEAGCCYVKVSMDGAPYLRKVDLKTYSSYEDLSLGLEKMFSCFITGQNSSCKTSRRDRLTDGSRADALQDQEYVLTYEDKDADWMLVGDLPWDLFTTFCRKLRIMRGSDAAGMAPPRPPEQTVRNK

SEQ ID NO: 9073 - DNA, 1466 bp, Zea mays subsp. mays
  misc_feature (1)..(1466): Ceres Seq. ID no. 12578918
  misc_feature: MA Experiment ID: 108527 Result: Down-regulated in Transcription
  misc_feature: MA Experiment 108527 PARAMETER Experiment Name: Zm_5mM_NO_P Parameter: Age (day) Value: 8
  misc_feature: MA Experiment 108527 PARAMETER Experiment Name: Zm_5mM_NO_P Parameter: Organism Value: Zea mays
  misc_feature: MA Experiment 108527 PARAMETER Experiment Name: Zm_5mM_NO_P Parameter: Plant Line Value: 35A19
  misc_feature: MA Experiment 108527 PARAMETER Experiment Name: Zm_5mM_NO_P Parameter: Timepoint (hr) Value: 6
  misc_feature: MA Experiment 108527 PARAMETER Experiment Name: Zm_5mM_NO_P Parameter: Tissue Value: Aerial
  misc_feature: MA Experiment 108527 PARAMETER Experiment Name: Zm_5mM_NO_P Parameter: Treatment Value: 5mM NO vs. No Treatment
  misc_feature: MA Experiment ID: 108528 Result: Down-regulated in Transcription
  misc_feature: MA Experiment 108528 PARAMETER Experiment Name: Zm_Imbibed_Seeds_P Parameter: Age (day) Value: 5 vs. 2
  misc_feature: MA Experiment 108528 PARAMETER Experiment Name: Zm_Imbibed_Seeds_P Parameter: Organism Value: Zea mays
  misc_feature: MA Experiment 108528 PARAMETER Experiment Name: Zm_Imbibed_Seeds_P Parameter: Plant Line Value: 35A19
  misc_feature: MA Experiment 108528 PARAMETER Experiment Name: Zm_Imbibed_Seeds_P Parameter: Tissue Value: Aerial vs. Embryo
  misc_feature: MA Experiment ID: 108530 Result: Down-regulated in Transcription
  misc_feature: MA Experiment 108530 PARAMETER Experiment Name: Zm_Imbibed_Seeds_P Parameter: Age (day) Value: 6 vs. 2
  misc_feature: MA Experiment 108530 PARAMETER Experiment Name: Zm_Imbibed_Seeds_P Parameter: Organism Value: Zea mays
  misc_feature: MA Experiment 108530 PARAMETER Experiment Name: Zm_Imbibed_Seeds_P Parameter: Plant Line Value: 35A19
  misc_feature: MA Experiment 108530 PARAMETER Experiment Name: Zm_Imbibed_Seeds_P Parameter: Tissue Value: Aerial vs. Embryo
  misc_feature: MA Experiment ID: 108535 Result: Up-regulated in Transcription
  misc_feature: MA Experiment 108535 PARAMETER Experiment Name: Zm_Meristem_P Parameter: Age (day) Value: 8
  misc_feature: MA Experiment 108535 PARAMETER Experiment Name: Zm_Meristem_P Parameter: Organism Value: Zea mays
  misc_feature: MA Experiment 108535 PARAMETER Experiment Name: Zm_Meristem_P Parameter: Plant Line Value: 35A19
  misc_feature: MA Experiment 108535 PARAMETER Experiment Name: Zm_Meristem_P Parameter: Tissue Value: Root Meristem vs. Above Root Meristem
  misc_feature: MA Experiment ID: 20000487 Result: Up-regulated in Transcription
  misc_feature: MA Experiment 20000487 PARAMETER Experiment Name: Zm_50mM_NH4NO3_L_to_H_P Parameter: Organism Value: Zea mays
  misc_feature: MA Experiment 20000487 PARAMETER Experiment Name: Zm_50mM_NH4NO3_L_to_H_P Parameter: Timepoint (hr) Value: 4
  misc_feature: MA Experiment 20000487 PARAMETER Experiment Name: Zm_50mM_NH4NO3_L_to_H_P Parameter: Tissue Value: Leaves
  misc_feature: MA Experiment 20000487 PARAMETER Experiment Name: Zm_50mM_NH4NO3_L_to_H_P Parameter: Treatment Value: 50mM NH4NO3 vs. 100mM Mannitol
  misc_feature: MA Experiment ID: 20000488 Result: Up-regulated in Transcription
  misc_feature: MA Experiment 20000488 PARAMETER Experiment Name: Zm_50mM_NH4NO3_L_to_H_P Parameter: Organism Value: Zea mays
  misc_feature: MA Experiment 20000488 PARAMETER Experiment Name: Zm_50mM_NH4NO3_L_to_H_P Parameter: Timepoint (hr) Value: 8
  misc_feature: MA Experiment 20000488 PARAMETER Experiment Name: Zm_50mM_NH4NO3_L_to_H_P Parameter: Tissue Value: Leaves
  misc_feature: MA Experiment 20000488 PARAMETER Experiment Name: Zm_50mM_NH4NO3_L_to_H_P Parameter: Treatment Value: 50mM NH4NO3 vs. 100mM Mannitol
  misc_feature: MA Experiment ID: 20000492 Result: Up-regulated in Transcription
  misc_feature: MA Experiment 20000492 PARAMETER Experiment Name: Zm_Hybrid_Seed_Dev_P Parameter: DAP Value: 12
  misc_feature: MA Experiment 20000492 PARAMETER Experiment Name: Zm_Hybrid_Seed_Dev_P Parameter: Organism Value: Zea mays
  misc_feature: MA Experiment 20000492 PARAMETER Experiment Name: Zm_Hybrid_Seed_Dev_P Parameter: Plant Line Value: 35A19
  misc_feature: MA Experiment 20000492 PARAMETER Experiment Name: Zm_Hybrid_Seed_Dev_P Parameter: Tissue Value: Fert Kernel vs. Unfert Floret
  misc_feature: MA Experiment ID: 20000535 Result: Up-regulated in Transcription
  misc_feature: MA Experiment 20000535 PARAMETER Experiment Name: Zm_Hybrid_Seed_Dev_P Parameter: DAP Value: 30 vs. 12
  misc_feature: MA Experiment 20000535 PARAMETER Experiment Name: Zm_Hybrid_Seed_Dev_P Parameter: Organism Value: Zea mays
  misc_feature: MA Experiment 20000535 PARAMETER Experiment Name: Zm_Hybrid_Seed_Dev_P Parameter: Plant Line Value: 35A19
  misc_feature: MA Experiment 20000535 PARAMETER Experiment Name: Zm_Hybrid_Seed_Dev_P Parameter: Tissue Value: Embryo vs. Unfert Floret
  misc_feature: MA Experiment ID: 20000633 Result: Down-regulated in Transcription
  misc_feature: MA Experiment 20000633 PARAMETER Experiment Name: Zm_Herbicide-Treatments_P Parameter: Timepoint (hr) Value: 4
  misc_feature: MA Experiment 20000633 PARAMETER Experiment Name: Zm_Herbicide-Treatments_P Parameter: Tissue Value: Aerial
  misc_feature: MA Experiment 20000633 PARAMETER Experiment Name: Zm_Herbicide-Treatments_P Parameter: Treatment Value: Trimec vs. No Treatment
  misc_feature: MA Experiment ID: 20001613 Result: Up-regulated in Transcription
  misc_feature: MA Experiment 20001613 PARAMETER Experiment Name: Zm_50ppm_KNO3_L-to-H_P Parameter: Age (day) Value: 20
  misc_feature: MA Experiment 20001613 PARAMETER Experiment Name: Zm_50ppm_KNO3_L-to-H_P Parameter: Organism Value: Zea mays
  misc_feature: MA Experiment 20001613 PARAMETER Experiment Name: Zm_50ppm_KNO3_L-to-H_P Parameter: Plant Line Value: 35A19
  misc_feature: MA Experiment 20001613 PARAMETER Experiment Name: Zm_50ppm_KNO3_L-to-H_P Parameter: Timepoint (hr) Value: 24
  misc_feature: MA Experiment 20001613 PARAMETER Experiment Name: Zm_50ppm_KNO3_L-to-H_P Parameter: Tissue Value: Roots
  misc_feature: MA Experiment 20001613 PARAMETER Experiment Name: Zm_50ppm_KNO3_L-to-H_P Parameter: Treatment Value: 50ppm KNO3 vs. 50ppm KCl
gcacgagaccattacctagaacatcctaatcaaaagcattgtggctcctcacttccgcgccgccacccccttcaggtaaggaagaggaggagggcaggatgtcgcaccgtaagttcgagcacccgaggcacggctccctcggcttccttcccaggaagcgctcctcccgccaccgcggcaaggtgaagtcattccccagggatgaccccaagaagccttgccatctcactgccttccttggctacaaggctggcatgactcacattgtccgtgaggttgagaagccaggatccaaactccataagaaggaaacttgtgaggctgttaccatcattgaaacccctcctcttgtcattgttgggctcgtggcatatgtgaagactcctcgtggcctccgcacactcaactctgtttgggcccaacatcttagcgaagaagtgaggagaaggttttacaagaactggtgcaagagcaagaagaaggctttcacaaagtatgctctcaaatatgaaaatgatgctggcaagaaggaaattcagctgcagcttgagaagatgaagaaatatgcttctgttatccgtgtcattgctcatacccagattaggaagatgaagggtttgaagcagaagaaggctcacctgatggagattcaggtcaatggtggtaccattgctgacaaggtggactacggctacaaattttttgagaaagaggtccctgttgatgctgtcttccagaaggatgagatgattgacatcattggtgtgaccaaaggtaaaggttatgagggcgtggtcactcgttggggtgtcacccgccttccccgcaaaacccacaggggtctccgcaaggttgcttgtatcggtgcatggcatcctgctagggtctcctatacagttgcccgtgctggtcagaacgggtaccaccaccgcaccgagatgaacaagaaggtttacaagatcggcaaggctggacaagagacccacgatgcctccacagagtttgacaggaccgagaaggacatcactcccatgggtggcttcccccactatggtatcgtgaagggtgactacctgatgatcaagggatgctgtgtgggtccaaagaagagggtggtgaccctccgccagtccctcctgaagcagacttcccggctggcgctggaggagatcaagctcaagttcatcgacacatcgtccaaatttgggcatggtcgcttccagactaccgatgagaagcagaggttctttggtaagctcaaggcgtaaggtgctgcggtgcagcgacaagtcccatttgtcaaaatcatcaaactgtgaaacttttgtttgttaccttgctgtaccaagttttatagcaggatgatttgggagcatgttctggtcttctatggattgttctacgcttcagaactgcatcgactatgttttgttctattttggttgttttaatgccctaatcattgc

SEQ ID NO: 9074 - protein, 389 aa, Zea mays subsp. mays; identical to SEQ ID NO: 2421
  peptide (1)..(389): Ceres Seq. ID no. 12578919
  misc_feature (50)..(343): Pfam Name: Ribosomal protein L3 Pfam Description: Ribosomal protein L3
  misc_feature (1)..(389): Homolog of NCBI NO: 548770 NR Description: 60S RIBOSOMAL PROTEIN L3 >gi|481228|pir||S38359
  misc_feature (1)..(381): Homolog of NCBI NO: 6688812 NR Description: L3 Ribosomal protein [Medicago sativa subsp. x
  misc_feature (1)..(389): Homolog of NCBI NO: 15220533 NR Description: ribosomal protein; protein id: At1g61580.1 thaliana] >gi|21542436|sp|P22738|RL3B_ARATH 60S ribosomal protein
  misc_feature (1)..(389): Homolog of NCBI NO: 81658 NR Description: ribosomal protein L3.e (clone ARP2), cytosolic -
  misc_feature (1)..(387): Homolog of NCBI NO: 15218306 NR Description: ribosomal protein; protein id: At1g43170.1, by cDNA: 14534., supported by cDNA: gi_11935190, supported by gi_13487799, supported by cDNA: gi_13605656, supported by cDNA:
  misc_feature (1)..(387): Homolog of NCBI NO: 23397228 NR Description: putative ribosomal protein [Arabidopsis thaliana]
  misc_feature (1)..(387): Homolog of NCBI NO: 81657 NR Description: ribosomal protein L3.e (clone ARP1), cytosolic -
  misc_feature (1)..(388): Homolog of NCBI NO: 7305441 NR Description: ribosomal protein L3; ribosomal protein L3 (yeast) [Mus musculus] >gi|132956|sp|P27659|RL3_MOUSE 60S protein L3 (J1 protein) >gi|52741|emb|CAA68370.1| J1 protein [Mus
  misc_feature (1)..(388): Homolog of NCBI NO: 4506649 NR Description: ribosomal protein L3; 60S ribosomal protein L3;
  misc_feature (1)..(388): Homolog of NCBI NO: 22203712 NR Description: ribosomal protein L3 [Chlamys farreri]

SEQ ID NO: 9075 - protein, 337 aa, Zea mays subsp. mays; identical to SEQ ID NO: 2422
  peptide (1)..(337): Ceres Seq. ID no. 12578920
  misc_feature (1)..(291): Pfam Name: Ribosomal protein L3 Pfam Description: Ribosomal protein L3
  misc_feature (1)..(337): Homolog of NCBI NO: 548770 NR Description: 60S RIBOSOMAL PROTEIN L3 >gi|481228|pir||S38359
  misc_feature (1)..(329): Homolog of NCBI NO: 6688812 NR Description: L3 Ribosomal protein [Medicago sativa subsp. x
  misc_feature (1)..(337): Homolog of NCBI NO: 15220533 NR Description: ribosomal protein; protein id: At1g61580.1 thaliana] >gi|21542436|sp|P22738|RL3B_ARATH 60S ribosomal protein
  misc_feature (1)..(337): Homolog of NCBI NO: 81658 NR Description: ribosomal protein L3.e (clone ARP2), cytosolic -
  misc_feature (1)..(335): Homolog of NCBI NO: 15218306 NR Description: ribosomal protein; protein id: At1g43170.1, by cDNA: 14534., supported by cDNA: gi_11935190, supported by gi_13487799, supported by cDNA: gi_13605656, supported by cDNA:
  misc_feature (1)..(335): Homolog of NCBI NO: 23397228 NR Description: putative ribosomal protein [Arabidopsis thaliana]
  misc_feature (1)..(335): Homolog of NCBI NO: 81657 NR Description: ribosomal protein L3.e (clone ARP1), cytosolic -
  misc_feature (1)..(336): Homolog of NCBI NO: 7305441 NR Description: ribosomal protein L3; ribosomal protein L3 (yeast) [Mus musculus] >gi|132956|sp|P27659|RL3_MOUSE 60S protein L3 (J1 protein) >gi|52741|emb|CAA68370.1| J1 protein [Mus
  misc_feature (1)..(336): Homolog of NCBI NO: 4506649 NR Description: ribosomal protein L3; 60S ribosomal protein L3;
  misc_feature (1)..(336): Homolog of NCBI NO: 22203712 NR Description: ribosomal protein L3 [Chlamys farreri]

SEQ ID NO: 9076 - protein, 237 aa, Zea mays subsp. mays; identical to SEQ ID NO: 2423
  peptide (1)..(237): Ceres Seq. ID no. 12578921
  misc_feature (1)..(191): Pfam Name: Ribosomal protein L3 Pfam Description: Ribosomal protein L3
  misc_feature (1)..(237): Homolog of NCBI NO: 548770 NR Description: 60S RIBOSOMAL PROTEIN L3 >gi|481228|pir||S38359
  misc_feature (1)..(229): Homolog of NCBI NO: 6688812 NR Description: L3 Ribosomal protein [Medicago sativa subsp. x
  misc_feature (1)..(237): Homolog of NCBI NO: 15220533 NR Description: ribosomal protein; protein id: At1g61580.1 thaliana] >gi|21542436|sp|P22738|RL3B_ARATH 60S ribosomal protein
  misc_feature (1)..(237): Homolog of NCBI NO: 81658 NR Description: ribosomal protein L3.e (clone ARP2), cytosolic -
  misc_feature (1)..(235): Homolog of NCBI NO: 15218306 NR Description: ribosomal protein; protein id: At1g43170.1, by cDNA: 14534., supported by cDNA: gi_11935190, supported by gi_13487799, supported by cDNA: gi_13605656, supported by cDNA:
  misc_feature (1)..(235): Homolog of NCBI NO: 23397228 NR Description: putative ribosomal protein [Arabidopsis thaliana]
  misc_feature (1)..(235): Homolog of NCBI NO: 81657 NR Description: ribosomal protein L3.e (clone ARP1), cytosolic -
  misc_feature (1)..(236): Homolog of NCBI NO: 7305441 NR Description: ribosomal protein L3; ribosomal protein L3 (yeast) [Mus musculus] >gi|132956|sp|P27659|RL3_MOUSE 60S protein L3 (J1 protein) >gi|52741|emb|CAA68370.1| J1 protein [Mus
  misc_feature (1)..(236): Homolog of NCBI NO: 4506649 NR Description: ribosomal protein L3; 60S ribosomal protein L3;
  misc_feature (1)..(236): Homolog of NCBI NO: 22203712 NR Description: ribosomal protein L3 [Chlamys farreri]

SEQ ID NO: 9077 - DNA, 1013 bp, Zea mays subsp. mays
  misc_feature (1)..(1013): Ceres Seq. ID no. 12356700
  misc_feature: MA Experiment ID: 108556 Result: Down-regulated in Transcription
  misc_feature: MA Experiment 108556 PARAMETER Experiment Name: Zm_Drought_P Parameter: Age (day) Value: 9
  misc_feature: MA Experiment 108556 PARAMETER Experiment Name: Zm_Drought_P Parameter: Organism Value: Zea mays
  misc_feature: MA Experiment 108556 PARAMETER Experiment Name: Zm_Drought_P Parameter: Plant Line Value: 35A19
  misc_feature: MA Experiment 108556 PARAMETER Experiment Name: Zm_Drought_P Parameter: Timepoint (hr) Value: 24
  misc_feature: MA Experiment 108556 PARAMETER Experiment Name: Zm_Drought_P Parameter: Tissue Value: Aerial
  misc_feature: MA Experiment 108556 PARAMETER Experiment Name: Zm_Drought_P Parameter: Treatment Value: Drought vs. No Drought
  misc_feature: MA Experiment ID: 20000534 Result: Down-regulated in Transcription
  misc_feature: MA Experiment 20000534 PARAMETER Experiment Name: Zm_Hybrid_Pollen_P Parameter: Age (day) Value: 8
  misc_feature: MA Experiment 20000534 PARAMETER Experiment Name: Zm_Hybrid_Pollen_P Parameter: Organism Value: Zea mays
  misc_feature: MA Experiment 20000534 PARAMETER Experiment Name: Zm_Hybrid_Pollen_P Parameter: Plant Line Value: 35A19
  misc_feature: MA Experiment 20000534 PARAMETER Experiment Name: Zm_Hybrid_Pollen_P Parameter: Tissue Value: Pollen vs. Aerial
aattcgcttctctgtcaacttcacttcctcgtcgacgcctccggcccaccaaccatgccggcggctgcggcggcgcagaggctcctcgcggcgagcacgaaaatcatcggcgttgggcgcaactacatagcccactccaaggagctcggcaatccggtccccaaggagcccgtcctgttcctgaagccgacctcgtcgtttctccacgctgggtggcgtcctcctacctaggggtggtgtcgccggggtagcggccaacggatggagtggtagcggcccagggctccgcttggctcgaaggctctgcacctacgacgagagagatgacagggcactagaggaagaagttgagaagaaatttggatggatattgaagataatcttcctaggaactgctggcctagttggttaccaattctttccatacatgggtgataacctgcttcaacaatctatctcgcttttgcgtgtcaaggatcccttgttcaagcggatgggagcttctcgtttagctcgttttgcagtggatgaccaaagaagaatgaaggtggtagagatagggggagctcaggaactgcttaatgtattggaaggtgctaaagatgataaaacacgaaaagaaactctaaaagctcttgctgcgctttcaaaatctgaagaagctgcaggatttttggacaaggtcggcgcctacgctatagtcagttccactcccgactctcaagaatatgctgagatccaaacttacaagaccagtcttctgacggcatttgatcaactgaagtcatgatgtccaaatgccaatgggtatattaagcaacattttaactctgcactttgccgtggcggttaatgttctagtttcttgaatcgactcaatttatctctagaacatgctggacctcctttgttgaccaagtgggttgctgatggaaatgcatgtctggttcatttgtttcaaacaggacagtacattctttccttctgtgggccaataacaagagctttaattt

SEQ ID NO: 9078 - protein, 120 aa, Zea mays subsp. mays
  peptide (1)..(120): Ceres Seq. ID no. 12356701
  misc_feature (1)..(120): Homolog of NCBI NO: 40538927 NR Description: expressed protein [Oryza sativa (japonica
  misc_feature (1)..(112): Homolog of NCBI NO: 30694398 NR Description: expressed protein [Arabidopsis thaliana]
  misc_feature (23)..(112): Homolog of NCBI NO: 11281187 NR Description: hypothetical protein F18O21.170 - Arabidopsis >gi|7572919|emb|CAB87420.1| hypothetical protein [Arabidopsis
MGDNLLQQSISLLRVKDPLFKRMGASRLARFAVDDQRRMKVVEIGGAQELLNVLEGAKDDKTRKETLKALAALSKSEEAAGFLDKVGAYAIVSSTPDSQEYAEIQTYKTSLLTAFDQLKS

SEQ ID NO: 9079 - protein, 98 aa, Zea mays subsp. mays
  peptide (1)..(98): Ceres Seq. ID no. 12356702
  misc_feature (1)..(98): Homolog of NCBI NO: 40538927 NR Description: expressed protein [Oryza sativa (japonica
  misc_feature (1)..(90): Homolog of NCBI NO: 30694398 NR Description: expressed protein [Arabidopsis thaliana]
  misc_feature (1)..(90): Homolog of NCBI NO: 11281187 NR Description: hypothetical protein F18O21.170 - Arabidopsis >gi|7572919|emb|CAB87420.1| hypothetical protein [Arabidopsis
MGASRLARFAVDDQRRMKVVEIGGAQELLNVLEGAKDDKTRKETLKALAALSKSEEAAGFLDKVGAYAIVSSTPDSQEYAEIQTYKTSLLTAFDQLKS

SEQ ID NO: 9080 - protein, 82 aa, Zea mays subsp. mays
  peptide (1)..(82): Ceres Seq. ID no. 12356703
FASLSTSLPRRRLRPTNHAGGCGGAEAPRGEHENHRRWAQLHSPLQGARQSGPQGARPVPEADLVVSPRWVASSYLGVVSPG

SEQ ID NO: 9081 - DNA, 746 bp, Zea mays subsp. mays
  misc_feature (1)..(746): Ceres Seq. ID no. 12578762
  misc_feature: MA Experiment ID: 108504 Result: Down-regulated in Transcription
  misc_feature: MA Experiment 108504 PARAMETER Experiment Name: Zm_Drought_P Parameter: Age (day) Value: 8
  misc_feature: MA Experiment 108504 PARAMETER Experiment Name: Zm_Drought_P Parameter: Organism Value: Zea mays
  misc_feature: MA Experiment 108504 PARAMETER Experiment Name: Zm_Drought_P Parameter: Plant Line Value: 35A19
  misc_feature: MA Experiment 108504 PARAMETER Experiment Name: Zm_Drought_P Parameter: Timepoint (hr) Value: 12
  misc_feature: MA Experiment 108504 PARAMETER Experiment Name: Zm_Drought_P Parameter: Tissue Value: Aerial
  misc_feature: MA Experiment 108504 PARAMETER Experiment Name: Zm_Drought_P Parameter: Treatment Value: Drought vs. No Drought
  misc_feature: MA Experiment ID: 108523 Result: Down-regulated in Transcription
  misc_feature: MA Experiment 108523 PARAMETER Experiment Name: Zm_42deg_Heat_P Parameter: Age (day) Value: 8
  misc_feature: MA Experiment 108523 PARAMETER Experiment Name: Zm_42deg_Heat_P Parameter: Organism Value: Zea mays
  misc_feature: MA Experiment 108523 PARAMETER Experiment Name: Zm_42deg_Heat_P Parameter: Plant Line Value: 35A19
  misc_feature: MA Experiment 108523 PARAMETER Experiment Name: Zm_42deg_Heat_P Parameter: Temperature (deg C) Value: 42 vs. 22
  misc_feature: MA Experiment 108523 PARAMETER Experiment Name: Zm_42deg_Heat_P Parameter: Timepoint (hr) Value: 6
  misc_feature: MA Experiment 108523 PARAMETER Experiment Name: Zm_42deg_Heat_P Parameter: Tissue Value: Aerial
  misc_feature: MA Experiment ID: 108535 Result: Up-regulated in Transcription
  misc_feature: MA Experiment 108535 PARAMETER Experiment Name: Zm_Meristem_P Parameter: Age (day) Value: 8
  misc_feature: MA Experiment 108535 PARAMETER Experiment Name: Zm_Meristem_P Parameter: Organism Value: Zea mays
  misc_feature: MA Experiment 108535 PARAMETER Experiment Name: Zm_Meristem_P Parameter: Plant Line Value: 35A19
  misc_feature: MA Experiment 108535 PARAMETER Experiment Name: Zm_Meristem_P Parameter: Tissue Value: Root Meristem vs. Above Root Meristem
  misc_feature: MA Experiment ID: 108543 Result: Up-regulated in Transcription
  misc_feature: MA Experiment ID: 108544 Result: Down-regulated in Transcription
  misc_feature: MA Experiment ID: 108556 Result: Down-regulated in Transcription
  misc_feature: MA Experiment 108556 PARAMETER Experiment Name: Zm_Drought_P Parameter: Age (day) Value: 9
  misc_feature: MA Experiment 108556 PARAMETER Experiment Name: Zm_Drought_P Parameter: Organism Value: Zea mays
  misc_feature: MA Experiment 108556 PARAMETER Experiment Name: Zm_Drought_P Parameter: Plant Line Value: 35A19
  misc_feature: MA Experiment 108556 PARAMETER Experiment Name: Zm_Drought_P Parameter: Timepoint (hr) Value: 24
  misc_feature: MA Experiment 108556 PARAMETER Experiment Name: Zm_Drought_P Parameter: Tissue Value: Aerial
  misc_feature: MA Experiment 108556 PARAMETER Experiment Name: Zm_Drought_P Parameter: Treatment Value: Drought vs. No Drought
  misc_feature: MA Experiment ID: 108597 Result: Down-regulated in Transcription
  misc_feature: MA Experiment 108597 PARAMETER Experiment Name: Zm_100uM_ABA_P Parameter: Age (day) Value: 9
  misc_feature: MA Experiment 108597 PARAMETER Experiment Name: Zm_100uM_ABA_P Parameter: Organism Value: Zea mays
  misc_feature: MA Experiment 108597 PARAMETER Experiment Name: Zm_100uM_ABA_P Parameter: Plant Line Value: 35A19
  misc_feature: MA Experiment 108597 PARAMETER Experiment Name: Zm_100uM_ABA_P Parameter: Timepoint (hr) Value: 24
  misc_feature: MA Experiment 108597 PARAMETER Experiment Name: Zm_100uM_ABA_P Parameter: Tissue Value: Aerial
  misc_feature: MA Experiment 108597 PARAMETER Experiment Name: Zm_100uM_ABA_P Parameter: Treatment Value: 100uM ABA vs. No Treatment
  misc_feature: MA Experiment ID: 20000478 Result: Down-regulated in Transcription
  misc_feature: MA Experiment 20000478 PARAMETER Experiment Name: Zm_5mM_SA_P Parameter: Age (day) Value: 11
  misc_feature: MA Experiment 20000478 PARAMETER Experiment Name: Zm_5mM_SA_P Parameter: Organism Value: Zea mays
  misc_feature: MA Experiment 20000478 PARAMETER Experiment Name: Zm_5mM_SA_P Parameter: Plant Line Value: 35A19
  misc_feature: MA Experiment 20000478 PARAMETER Experiment Name: Zm_5mM_SA_P Parameter: Timepoint (hr) Value: 72
  misc_feature: MA Experiment 20000478 PARAMETER Experiment Name: Zm_5mM_SA_P Parameter: Tissue Value: Aerial
  misc_feature: MA Experiment 20000478 PARAMETER Experiment Name: Zm_5mM_SA_P Parameter: Treatment Value: 5mM SA vs. No Treatment
  misc_feature: MA Experiment ID: 20000492 Result: Up-regulated in Transcription
  misc_feature: MA Experiment 20000492 PARAMETER Experiment Name: Zm_Hybrid_Seed_Dev_P Parameter: DAP Value: 12
  misc_feature: MA Experiment 20000492 PARAMETER Experiment Name: Zm_Hybrid_Seed_Dev_P Parameter: Organism Value: Zea mays
  misc_feature: MA Experiment 20000492 PARAMETER Experiment Name: Zm_Hybrid_Seed_Dev_P Parameter: Plant Line Value: 35A19
  misc_feature: MA Experiment 20000492 PARAMETER Experiment Name: Zm_Hybrid_Seed_Dev_P Parameter: Tissue Value: Fert Kernel vs. Unfert Floret
  misc_feature: MA Experiment ID: 20000626 Result: Down-regulated in Transcription
  misc_feature: MA Experiment 20000626 PARAMETER Experiment Name: Zm_Herbicide-Treatments_P Parameter: Timepoint (hr) Value: 12
  misc_feature: MA Experiment 20000626 PARAMETER Experiment Name: Zm_Herbicide-Treatments_P Parameter: Tissue Value: Aerial
  misc_feature: MA Experiment 20000626 PARAMETER Experiment Name: Zm_Herbicide-Treatments_P Parameter: Treatment Value: Roundup vs. No Treatment
  misc_feature: MA Experiment ID: 20000627 Result: Down-regulated in Transcription
  misc_feature: MA Experiment 20000627 PARAMETER Experiment Name: Zm_Herbicide-Treatments_P Parameter: Timepoint (hr) Value: 12
  misc_feature: MA Experiment 20000627 PARAMETER Experiment Name: Zm_Herbicide-Treatments_P Parameter: Tissue Value: Aerial
  misc_feature: MA Experiment 20000627 PARAMETER Experiment Name: Zm_Herbicide-Treatments_P Parameter: Treatment Value: Finale vs. No Treatment
  misc_feature: MA Experiment ID: 20000629 Result: Down-regulated in Transcription
  misc_feature: MA Experiment 20000629 PARAMETER Experiment Name: Zm_Herbicide-Treatments_P Parameter: Timepoint (hr) Value: 12
  misc_feature: MA Experiment 20000629 PARAMETER Experiment Name: Zm_Herbicide-Treatments_P Parameter: Tissue Value: Aerial
  misc_feature: MA Experiment 20000629 PARAMETER Experiment Name: Zm_Herbicide-Treatments_P Parameter: Treatment Value: Trimec vs. No Treatment
cacaacgatctcaatctccctagcagcagatcctcgtgcaacgcaaagcgctagccttcctactgtcccgatggcccgcacgaagcagacggcgaggaagtccactggcggcaaggcgccaaggaagcagctggccaccaaggcggcgcgcaagtctgccccggcgaccggcggagtgaagaagccccaccgtttccgccccggcaccgtcgcgctccgggagatccgcaagtaccagaagagcacggagctgctgatccgcaagctgccgttccagcgcctggtgcgtgagatcgcccaggacttcaagaccgaccttcgcttccagagctccgccgtcgccgcgctgcaggaggcgtccgaggcctacctcgtcggtctcttcgaggacaccaacctctgcgccattcacgccaagcgcgtcaccatcatgcccaaggacatccagctcgcccgccgtatccgtgtggagagggcctaggcgtcgtggcggtggaggtcgaagtagtagtcgcagtttctgtcatcaccgtctggctagaaggtgtagagatgtgcccgggttctggagtttgggttatcggtcgaatcatgatgtagttggttcttcacagctgtaatttaactatgacgatgccatggcaatgaagttctcagctatgagttcccgtaaaaaaaaaaaaaaaaaatcgggtggacccggtcaacttcaagctcctaagccactgcctgctggtgagcccatc

SEQ ID NO: 9082 - protein, 159 aa, Zea mays subsp. mays
  peptide (1)..(159): Ceres Seq. ID no. 12578763
  misc_feature (40)..(158): Pfam Name: Core histone H2A/H2B/H3/H4 Pfam Description: Core histone H2A/H2B/H3/H4
  misc_feature (12)..(159): Homolog of NCBI NO: 31210957 NR Description: ENSANGP00000016056 [Anopheles gambiae] ENSANGP00000014197 [Anopheles gambiae] ENSANGP00000014197 [Anopheles gambiae str. PEST]
  misc_feature (24)..(159): Homolog of NCBI NO: 15232146 NR Description: histone H3, putative; protein id: At3g27360.1, by cDNA: gi_14335141, supported by cDNA: gi_18655352 [Arabidopsis >gi|15238433|ref|NP_201339.1| histone H3 (sp|P05203); id:
  misc_feature (5)..(159): Homolog of NCBI NO: 31239843 NR Description: ENSANGP00000014183 [Anopheles gambiae]
  misc_feature (5)..(159): Homolog of NCBI NO: 31210959 NR Description: ENSANGP00000016066 [Anopheles gambiae]
  misc_feature (24)..(159): Homolog of NCBI NO: 122087 NR Description: Histone H3 >gi|81849|pir||S04520 histone H3
  misc_feature (3)..(159): Homolog of NCBI NO: 34858254 NR Description: similar to histone protein Hist2h3c1 [Rattus
  misc_feature (18)..(159): Homolog of NCBI NO: 34876364 NR Description: similar to CG31613-PA [Rattus norvegicus]
  misc_feature (24)..(159): Homolog of NCBI NO: 1362108 NR Description: histone H3 homolog - common tobacco
  misc_feature (24)..(159): Homolog of NCBI NO: 166384 NR Description: histone H3 (H3-1.1)
  misc_feature (2)..(159): Homolog of NCBI NO: 37546835 NR Description: similar to histone protein Hist2h3c1 [Homo
TTISISLAADPRATQSASLPTVPMARTKQTARKSTGGKAPRKQLATKAARKSAPATGGVKKPHRFRPGTVALREIRKYQKSTELLIRKLPFQRLVREIAQDFKTDLRFQSSAVAALQEASEAYLVGLFEDTNLCAIHAKRVTIMPKDIQLARRIRVERA

SEQ ID NO: 9083 - protein, 136 aa, Zea mays subsp. mays
  peptide (1)..(136): Ceres Seq. ID no. 12578764
  misc_feature (17)..(135): Pfam Name: Core histone H2A/H2B/H3/H4 Pfam Description: Core histone H2A/H2B/H3/H4
  misc_feature (1)..(136): Homolog of NCBI NO: 31210957 NR Description: ENSANGP00000016056 [Anopheles gambiae] ENSANGP00000014197 [Anopheles gambiae] ENSANGP00000014197 [Anopheles gambiae str. PEST]
  misc_feature (1)..(136): Homolog of NCBI NO: 15232146 NR Description: histone H3, putative; protein id: At3g27360.1, by cDNA: gi_14335141, supported by cDNA: gi_18655352 [Arabidopsis >gi|15238433|ref|NP_201339.1| histone H3 (sp|P05203); id:
  misc_feature (1)..(136): Homolog of NCBI NO: 31239843 NR Description: ENSANGP00000014183 [Anopheles gambiae]
  misc_feature (1)..(136): Homolog of NCBI NO: 31210959 NR Description: ENSANGP00000016066 [Anopheles gambiae]
  misc_feature (1)..(136): Homolog of NCBI NO: 122087 NR Description: Histone H3 >gi|81849|pir||S04520 histone H3
  misc_feature (1)..(136): Homolog of NCBI NO: 34858254 NR Description: similar to histone protein Hist2h3c1 [Rattus
  misc_feature (1)..(136): Homolog of NCBI NO: 34876364 NR Description: similar to CG31613-PA [Rattus norvegicus]
  misc_feature (1)..(136): Homolog of NCBI NO: 1362108 NR Description: histone H3 homolog - common tobacco
  misc_feature (1)..(136): Homolog of NCBI NO: 166384 NR Description: histone H3 (H3-1.1)
  misc_feature (1)..(136): Homolog of NCBI NO: 37546835 NR Description: similar to histone protein Hist2h3c1 [Homo
MARTKQTARKSTGGKAPRKQLATKAARKSAPATGGVKKPHRFRPGTVALREIRKYQKSTELLIRKLPFQRLVREIAQDFKTDLRFQSSAVAALQEASEAYLVGLFEDTNLCAIHAKRVTIMPKDIQLARRIRVERA

SEQ ID NO: 9084 - DNA, 1476 bp, Zea mays subsp. mays
  misc_feature (1)..(1476): Ceres Seq. ID no. 12349426
  misc_feature: MA Experiment ID: 108528 Result: Up-regulated in Transcription
  misc_feature: MA Experiment 108528 PARAMETER Experiment Name: Zm_Imbibed_Seeds_P Parameter: Age (day) Value: 5 vs. 2
  misc_feature: MA Experiment 108528 PARAMETER Experiment Name: Zm_Imbibed_Seeds_P Parameter: Organism Value: Zea mays
  misc_feature: MA Experiment 108528 PARAMETER Experiment Name: Zm_Imbibed_Seeds_P Parameter: Plant Line Value: 35A19
  misc_feature: MA Experiment 108528 PARAMETER Experiment Name: Zm_Imbibed_Seeds_P Parameter: Tissue Value: Aerial vs. Embryo
  misc_feature: MA Experiment ID: 108530 Result: Up-regulated in Transcription
  misc_feature: MA Experiment 108530 PARAMETER Experiment Name: Zm_Imbibed_Seeds_P Parameter: Age (day) Value: 6 vs. 2
  misc_feature: MA Experiment 108530 PARAMETER Experiment Name: Zm_Imbibed_Seeds_P Parameter: Organism Value: Zea mays
  misc_feature: MA Experiment 108530 PARAMETER Experiment Name: Zm_Imbibed_Seeds_P Parameter: Plant Line Value: 35A19
  misc_feature: MA Experiment 108530 PARAMETER Experiment Name: Zm_Imbibed_Seeds_P Parameter: Tissue Value: Aerial vs. Embryo
  misc_feature: MA Experiment ID: 108534 Result: Down-regulated in Transcription
  misc_feature: MA Experiment 108534 PARAMETER Experiment Name: Zm_4deg_Cold_P Parameter: Age (hr) Value: 8
  misc_feature: MA Experiment 108534 PARAMETER Experiment Name: Zm_4deg_Cold_P Parameter: Organism Value: Zea mays
  misc_feature: MA Experiment 108534 PARAMETER Experiment Name: Zm_4deg_Cold_P Parameter: Plant Line Value: 35A19
  misc_feature: MA Experiment 108534 PARAMETER Experiment Name: Zm_4deg_Cold_P Parameter: Temperature (deg C) Value: 4 vs. 22
  misc_feature: MA Experiment 108534 PARAMETER Experiment Name: Zm_4deg_Cold_P Parameter: Timepoint (hr) Value: 6
  misc_feature: MA Experiment 108534 PARAMETER Experiment Name: Zm_4deg_Cold_P Parameter: Tissue Value: Aerial
  misc_feature: MA Experiment ID: 108543 Result: Down-regulated in Transcription
  misc_feature: MA Experiment ID: 108545 Result: Up-regulated in Transcription
  misc_feature: MA Experiment 108545 PARAMETER Experiment Name: Zm_Imbibed_Seeds_P Parameter: Age (day) Value: 3 vs. 2
  misc_feature: MA Experiment 108545 PARAMETER Experiment Name: Zm_Imbibed_Seeds_P Parameter: Organism Value: Zea mays
  misc_feature: MA Experiment 108545 PARAMETER Experiment Name: Zm_Imbibed_Seeds_P Parameter: Plant Line Value: 35A19
  misc_feature: MA Experiment 108545 PARAMETER Experiment Name: Zm_Imbibed_Seeds_P Parameter: Tissue Value: Aerial vs. Embryo
  misc_feature: MA Experiment ID: 108547 Result: Up-regulated in Transcription
  misc_feature: MA Experiment 108547 PARAMETER Experiment Name: Zm_Imbibed_Seeds_P Parameter: Age (day) Value: 4 vs. 2
  misc_feature: MA Experiment 108547 PARAMETER Experiment Name: Zm_Imbibed_Seeds_P Parameter: Organism Value: Zea mays
  misc_feature: MA Experiment 108547 PARAMETER Experiment Name: Zm_Imbibed_Seeds_P Parameter: Plant Line Value: 35A19
  misc_feature: MA Experiment 108547 PARAMETER Experiment Name: Zm_Imbibed_Seeds_P Parameter: Tissue Value: Aerial vs. Embryo
  misc_feature: MA Experiment ID: 20000492 Result: Up-regulated in Transcription
  misc_feature: MA Experiment 20000492 PARAMETER Experiment Name: Zm_Hybrid_Seed_Dev_P Parameter: DAP Value: 12
  misc_feature: MA Experiment 20000492 PARAMETER Experiment Name: Zm_Hybrid_Seed_Dev_P Parameter: Organism Value: Zea mays
  misc_feature: MA Experiment 20000492 PARAMETER Experiment Name: Zm_Hybrid_Seed_Dev_P Parameter: Plant Line Value: 35A19
  misc_feature: MA Experiment 20000492 PARAMETER Experiment Name: Zm_Hybrid_Seed_Dev_P Parameter: Tissue Value: Fert Kernel vs. Unfert Floret
gacaaatcctctcttggacaagccgaaccttcgctcgggtgcctcgggttcagccaacctcgcacatggcgcgctgctccgtcgcgaaaccgctctgcgccaccaccgcgactccccgccttacccgtcgctgccggcagctctccgcgaacgccaccaccccggccatggccaccagtaaagcacggttgccggccctaaacaaaccggccaaaccgccgccgcctctcctctcgcgtccgaagctccccgtgcccaccaacaccgccactgacaccactagcggcaaggattgcaccaagaaaccaccgccggaagctacggactcacatccgccctcgtccggcgccggcgacgtgctccgcctgatggacgcgctgggcatccctcccgacgaggacatctacatatccctcctcagggagtgcgccgacgcagcagaggtggcctccgtgcacgcgcacataaccgctcgtcgcgcctccgatggactcccgtcgccggtcgccaaccggctcctgctttcttacccgcgtgtggggacatcgaagctgcccgccgggtgttcgacggaatgcccaccaccaacggcatggcttgggcgaccatggtgtccgcctactcggatggctgcctccaccatgaagcgatgcgtctgttcgcccacatgtgccatagaacgccggtcctggacggcgattgctactcccatgccatcgtggccgtgctgcggtcatgtacccgtgcaggcgagctacgtctcggtgagcaggtacacgctctcgtcgtcaagaaaggcaggatccacggtgacattggcagctcgctagtgcagctgtactgcgatggaggcggttttcacagaagcgcgcggcgagttctcgcgacgacgatgcagcaccactgtcaggaaccagtccctgaggcggcctggacgagcctgatcacatcctgccaccgtgaaagcctactgagcgaggctgtggatgtcttcagggacatggcgtcctcgggcgttccaaggagcagcttctccctgtcgagcatcctcgcggtgttcgcagagtcacaggacccagggtgctgctgcgggcagcaggtgcacgccgacgccatcaagcgcggcgtggacacgaaccagttcgttggctccgggctcatacacatgtacgcgaagcaagggcggctggcggacgccgccagggcgttcgagacgatcggtggcaagcctgacgccgcgtgcttgagtgccctggccatggcctatgctcgcggcggacggtacagagaggccaccagaatcatgtaccagatgaaagctgccgggatgaatccttctaaggagatggccgatgcggttaggttggcttgtttcagatgatcctgaactagtagtcgagtaggagtgccaaagagtgagttactttgattgtacaattgtgttaagcagacgccagtgcactggtgtctgattcc

SEQ ID NO: 9085 - protein, 275 aa, Zea mays subsp. mays
  peptide (1)..(275): Ceres Seq. ID no. 12349427
  misc_feature (22)..(180): Homolog of NCBI NO: 34900752 NR Description: OJ1341_A08.34 [Oryza sativa (japonica
  misc_feature (104)..(180): Homolog of NCBI NO: 15222460 NR Description: hypothetical protein; protein id: At1g31790.1
QILSWTSRTFARVPRVQPTSHMARCSVAKPLCATTATPRLTRRCRQLSANATTPAMATSKARLPALNKPAKPPPPLLSRPKLPVPTNTATDTTSGKDCTKKPPPEATDSHPPSSGAGDVLRLMDALGIPPDEDIYISLLRECADAAEVASVHAHITARRASDGLPSPVANRLLLSYPRVGTSKLPAGCSTECPPPTAWLGRPWCPPTRMAASTMKRCVCSPTCAIERRSWTAIATPMPSWPCCGHVPVQASYVSVSRYTLSSSRKAGSTVTLAAR

SEQ ID NO: 9086 - protein, 268 aa, Zea mays subsp. mays
  peptide (1)..(268): Ceres Seq. ID no. 12349428
  misc_feature (223)..(256): Pfam Name: PPR repeat Pfam Description: PPR repeat
  misc_feature (1)..(268): Homolog of NCBI NO: 34900752 NR Description: OJ1341_A08.34 [Oryza sativa (japonica
  misc_feature (1)..(264): Homolog of NCBI NO: 15222460 NR Description: hypothetical protein; protein id: At1g31790.1
  misc_feature (1)..(266): Homolog of NCBI NO: 15221304 NR Description: hypothetical protein; protein id: At1g74600.1
  misc_feature (1)..(266): Homolog of NCBI NO: 15240591 NR Description: putative protein; protein id: At5g13270.1
  misc_feature (66)..(251): Homolog of NCBI NO: 30684439 NR Description: pentatricopeptide (PPR) repeat-containing protein
  misc_feature (1)..(35): Homolog of NCBI NO: 30684439 NR Description: pentatricopeptide (PPR) repeat-containing protein
  misc_feature (1)..(266): Homolog of NCBI NO: 34914806 NR Description: B1045D11.13 [Oryza sativa (japonica
  misc_feature (1)..(248): Homolog of NCBI NO: 7486295 NR Description: hypothetical protein F28J12.180 - Arabidopsis >gi|2832657|emb|CAA16732.1| putative protein [Arabidopsis >gi|7268645|emb|CAB78854.1| putative protein [Arabidopsis
  misc_feature (1)..(248): Homolog of NCBI NO: 30684439 NR Description: pentatricopeptide (PPR) repeat-containing protein
  misc_feature (119)..(266): Homolog of NCBI NO: 34896896 NR Description: hypothetical protein [Oryza sativa (japonica group)] >gi|24899461|gb|AAN65031.1| hypothetical protein [Oryza
MPTTNGMAWATMVSAYSDGCLHHEAMRLFAHMCHRTPVLDGDCYSHAIVAVLRSCTRAGELRLGEQVHALVVKKGRIHGDIGSSLVQLYCDGGGFHRSARRVLATTMQHHCQEPVPEAAWTSLITSCHRESLLSEAVDVFRDMASSGVPRSSFSLSSILAVFAESQDPGCCCGQQVHADAIKRGVDTNQFVGSGLIHMYAKQGRLADAARAFETIGGKPDAACLSALAMAYARGGRYREATRIMYQMKAAGMNPSKEMADAVRLACFR

SEQ ID NO: 9087 - protein, 262 aa, Zea mays subsp. mays
  peptide (1)..(262): Ceres Seq. ID no. 12349429
  misc_feature (217)..(250): Pfam Name: PPR repeat Pfam Description: PPR repeat
  misc_feature (1)..(262): Homolog of NCBI NO: 34900752 NR Description: OJ1341_A08.34 [Oryza sativa (japonica
  misc_feature (1)..(258): Homolog of NCBI NO: 15222460 NR Description: hypothetical protein; protein id: At1g31790.1
  misc_feature (1)..(260): Homolog of NCBI NO: 15221304 NR Description: hypothetical protein; protein id: At1g74600.1
  misc_feature (1)..(260): Homolog of NCBI NO: 15240591 NR Description: putative protein; protein id: At5g13270.1
  misc_feature (60)..(245): Homolog of NCBI NO: 30684439 NR Description: pentatricopeptide (PPR) repeat-containing protein
  misc_feature (1)..(29): Homolog of NCBI NO: 30684439 NR Description: pentatricopeptide (PPR) repeat-containing protein
  misc_feature (1)..(260): Homolog of NCBI NO: 34914806 NR Description: B1045D11.13 [Oryza sativa (japonica
  misc_feature (1)..(242): Homolog of NCBI NO: 7486295 NR Description: hypothetical protein F28J12.180 - Arabidopsis >gi|2832657|emb|CAA16732.1| putative protein [Arabidopsis >gi|7268645|emb|CAB78854.1| putative protein [Arabidopsis
  misc_feature (1)..(242): Homolog of NCBI NO: 30684439 NR Description: pentatricopeptide (PPR) repeat-containing protein
  misc_feature (113)..(260): Homolog of NCBI NO: 34896896 NR Description: hypothetical protein [Oryza sativa (japonica group)] >gi|24899461|gb|AAN65031.1| hypothetical protein [Oryza
MAWATMVSAYSDGCLHHEAMRLFAHMCHRTPVLDGDCYSHAIVAVLRSCTRAGELRLGEQVHALVVKKGRIHGDIGSSLVQLYCDGGGFHRSARRVLATTMQHHCQEPVPEAAWTSLITSCHRESLLSEAVDVFRDMASSGVPRSSFSLSSILAVFAESQDPGCCCGQQVHADAIKRGVDTNQFVGSGLIHMYAKQGRLADAARAFETIGGKPDAACLSALAMAYARGGRYREATRIMYQMKAAGMNPSKEMADAVRLACFR

SEQ ID NO: 9088 - DNA, 1222 bp, Zea mays subsp. mays
  misc_feature (1)..(1222): Ceres Seq. ID no. 12405362
  misc_feature: MA Experiment ID: 108528 Result: Up-regulated in Transcription
  misc_feature: MA Experiment 108528 PARAMETER Experiment Name: Zm_Imbibed_Seeds_P Parameter: Age (day) Value: 5 vs. 2
  misc_feature: MA Experiment 108528 PARAMETER Experiment Name: Zm_Imbibed_Seeds_P Parameter: Organism Value: Zea mays
  misc_feature: MA Experiment 108528 PARAMETER Experiment Name: Zm_Imbibed_Seeds_P Parameter: Plant Line Value: 35A19
  misc_feature: MA Experiment 108528 PARAMETER Experiment Name: Zm_Imbibed_Seeds_P Parameter: Tissue Value: Aerial vs. Embryo
  misc_feature: MA Experiment ID: 108530 Result: Up-regulated in Transcription
  misc_feature: MA Experiment 108530 PARAMETER Experiment Name: Zm_Imbibed_Seeds_P Parameter: Age (day) Value: 6 vs. 2
  misc_feature: MA Experiment 108530 PARAMETER Experiment Name: Zm_Imbibed_Seeds_P Parameter: Organism Value: Zea mays
  misc_feature: MA Experiment 108530 PARAMETER Experiment Name: Zm_Imbibed_Seeds_P Parameter: Plant Line Value: 35A19
  misc_feature: MA Experiment 108530 PARAMETER Experiment Name: Zm_Imbibed_Seeds_P Parameter: Tissue Value: Aerial vs. Embryo
  misc_feature: MA Experiment ID: 108545 Result: Up-regulated in Transcription
  misc_feature: MA Experiment 108545 PARAMETER Experiment Name: Zm_Imbibed_Seeds_P Parameter: Age (day) Value: 3 vs. 2
  misc_feature: MA Experiment 108545 PARAMETER Experiment Name: Zm_Imbibed_Seeds_P Parameter: Organism Value: Zea mays
  misc_feature: MA Experiment 108545 PARAMETER Experiment Name: Zm_Imbibed_Seeds_P Parameter: Plant Line Value: 35A19
  misc_feature: MA Experiment 108545 PARAMETER Experiment Name: Zm_Imbibed_Seeds_P Parameter: Tissue Value: Aerial vs. Embryo
  misc_feature: MA Experiment ID: 108547 Result: Up-regulated in Transcription
  misc_feature: MA Experiment 108547 PARAMETER Experiment Name: Zm_Imbibed_Seeds_P Parameter: Age (day) Value: 4 vs. 2
  misc_feature: MA Experiment 108547 PARAMETER Experiment Name: Zm_Imbibed_Seeds_P Parameter: Organism Value: Zea mays
  misc_feature: MA Experiment 108547 PARAMETER Experiment Name: Zm_Imbibed_Seeds_P Parameter: Plant Line Value: 35A19
  misc_feature: MA Experiment 108547 PARAMETER Experiment Name: Zm_Imbibed_Seeds_P Parameter: Tissue Value: Aerial vs. Embryo
  misc_feature: MA Experiment ID: 108556 Result: Down-regulated in Transcription
  misc_feature: MA Experiment 108556 PARAMETER Experiment Name: Zm_Drought_P Parameter: Age (day) Value: 9
  misc_feature: MA Experiment 108556 PARAMETER Experiment Name: Zm_Drought_P Parameter: Organism Value: Zea mays
  misc_feature: MA Experiment 108556 PARAMETER Experiment Name: Zm_Drought_P Parameter: Plant Line Value: 35A19
  misc_feature: MA Experiment 108556 PARAMETER Experiment Name: Zm_Drought_P Parameter: Timepoint (hr) Value: 24
  misc_feature: MA Experiment 108556 PARAMETER Experiment Name: Zm_Drought_P Parameter: Tissue Value: Aerial
  misc_feature: MA Experiment 108556 PARAMETER Experiment Name: Zm_Drought_P Parameter: Treatment Value: Drought vs. No Drought
  misc_feature: MA Experiment ID: 20000478 Result: Down-regulated in Transcription
  misc_feature: MA Experiment 20000478 PARAMETER Experiment Name: Zm_5mM_SA_P Parameter: Age (day) Value: 11
  misc_feature: MA Experiment 20000478 PARAMETER Experiment Name: Zm_5mM_SA_P Parameter: Organism Value: Zea mays
  misc_feature: MA Experiment 20000478 PARAMETER Experiment Name: Zm_5mM_SA_P Parameter: Plant Line Value: 35A19
  misc_feature: MA Experiment 20000478 PARAMETER Experiment Name: Zm_5mM_SA_P Parameter: Timepoint (hr) Value: 72
  misc_feature: MA Experiment 20000478 PARAMETER Experiment Name: Zm_5mM_SA_P Parameter: Tissue Value: Aerial
  misc_feature: MA Experiment 20000478 PARAMETER Experiment Name: Zm_5mM_SA_P Parameter: Treatment Value: 5mM SA vs. No Treatment
aaaagtctgtcccgttctgttcgtgaacgtgggcctcctcaaccctttcccaccaaaaaatgcggtggcacacacatactgtactgtagcatcggccatggtcgcggccgccgccaccaccacctccaactcggactgacctctccccggtcccagctcccgaacaaaaccctagctaaccctatccgccgatggcgttcgcgacgccgcgcctcctcccgctgccccctcctccggcggcggcatccacgcgggccgtctccgcgcgcaaccacggggggcgcacggcgcccgagctctcgggcccgaccccgcgcgtggtggtcgtcacctccggcaagggcggcgtcggaaagacgaccaccaccgncaacttcgccgcctctctcgcgcgcctcggcctcccagccgtcgccgtcgacgccgatgctggcctccgcaacctcgacctcctgctcggcctcgagaaccgcgtccacctcaccgccgccgacgtcctcgcgggagactgccgactcgaccaggcgctcgtccgccaccgcgcgctccacgacctccacctcctctgcctctccaagccccgctccaagctgcccctcgcgttcggatccaagaccctcacctgggtcgcggacgcgctacgacgctcgaccagcccacccgcattcatcctcatcgactgccccgcaggtgttgatgctgggtttgtcactgccattgcacccgcagaagaggcggtgctcgttaccactcccgacattacggctctccgcgatgctgaccgtgtcgcgggactgctggagtgcgatggcatcaaagacatcaagatcgttgtcaaccgagtgcggccagacctggtgaagggggaggacatgatgtcagcgctggacgtgcaggaaatgctcgggttgcctttactaggcgtggtgccagaggacacggaggtgatccggagtacgaataggggcgtgccgctggtgctgaatgacccgcccacgcctgctggccttgctctggagcaggctacttggagattggtggaaagagatgcgatgacggcggtcatggtcgaagagcaggagaggcccgagaagaaaggaggcggaggcggcttcttctcgttcttcggcggcaggtgatgagtcaagtcagtctttaggctgtagatggtgtacaggctcggagtttatgaatgctttctaggctagtgcccgattcattc

SEQ ID NO: 9089 - protein, 315 aa, Zea mays subsp. mays
  peptide (1)..(315): Ceres Seq. ID no. 12405363
  misc_feature (42)..(76): Pfam Name: 4Fe-4S iron sulfur cluster binding proteins, Pfam Description: 4Fe-4S iron sulfur cluster binding proteins,
  misc_feature (1)..(170): Homolog of NCBI NO: 6002788 NR Description: cell division inhibitor MinD homolog [Oryza
  misc_feature (35)..(283): Homolog of NCBI NO: 11467859 NR Description: septum-site determining protein [Nephroselmis
  misc_feature (42)..(283): Homolog of NCBI NO: 23452400 NR Description: cell division inhibitor MinD [Chlamydomonas
  misc_feature (34)..(314): Homolog of NCBI NO: 15237874 NR Description: septum site-determining MinD (dbj|BAA90261.1); id: At5g24020.1, supported by cDNA: gi_6759276 [Arabidopsis
  misc_feature (42)..(285): Homolog of NCBI NO: 11466429 NR Description: septum-site determining protein [Mesostigma
  misc_feature (42)..(283): Homolog of NCBI NO: 7524873 NR Description: septum site-determining protein [Chlorella
  misc_feature (74)..(314): Homolog of NCBI NO: 9971822 NR Description: minD [Tagetes erecta]
  misc_feature (1)..(314): Homolog of NCBI NO: 34897748 NR Description: Similar to Chlorella vulgaris C-27 chloroplast
  misc_feature (41)..(286): Homolog of NCBI NO: 5748667 NR Description: cell division inhibitor MinD [Prototheca
  misc_feature (42)..(282): Homolog of NCBI NO: 11467635 NR Description: septum-site determining protein [Guillardia theta]
  misc_feature (60)..(60): Xaa is any aa, unknown or other
MAFATPRLLPLPPPPAAASTRAVSARNHGGRTAPELSGPTPRVVVVTSGKGGVGKTTTTXNFAASLARLGLPAVAVDADAGLRNLDLLLGLENRVHLTAADVLAGDCRLDQALVRHRALHDLHLLCLSKPRSKLPLAFGSKTLTWVADALRRSTSPPAFILIDCPAGVDAGFVTAIAPAEEAVLVTTPDITALRDADRVAGLLECDGIKDIKIVVNRVRPDLVKGEDMMSALDVQEMLGLPLLGVVPEDTEVIRSTNRGVPLVLNDPPTPAGLALEQATWRLVERDAMTAVMVEEQERPEKKGGGGGFFSFFGGR

SEQ ID NO: 9090 - protein, 286 aa, Zea mays subsp. mays
  peptide (1)..(286): Ceres Seq. ID no. 12405364
  misc_feature (76)..(251): Pfam Name: Formin Homology 2 Domain Pfam Description: Formin Homology 2 Domain
  misc_feature (51)..(229): Homolog of NCBI NO: 11359723 NR Description: proteophosphoglycan, membrane-associated - Leishmania major (fragment) >gi|5420389|emb|CAB46680.1|
  misc_feature (51)..(229): Homolog of NCBI NO: 5420387 NR Description: proteophosphoglycan [Leishmania major]
  misc_feature (81)..(252): Homolog of NCBI NO: 18138528 NR Description: hypothetical protein [Grapevine fleck virus]
  misc_feature (71)..(280): Homolog of NCBI NO: 13592175 NR Description: ppg3 [Leishmania major]
  misc_feature (87)..(229): Homolog of NCBI NO: 11359723 NR Description: proteophosphoglycan, membrane-associated - Leishmania major (fragment) >gi|5420389|emb|CAB46680.1|
  misc_feature (71)..(280): Homolog of NCBI NO: 5420387 NR Description: proteophosphoglycan [Leishmania major]
  misc_feature (87)..(229): Homolog of NCBI NO: 13592175 NR Description: ppg3 [Leishmania major]
  misc_feature (87)..(229): Homolog of NCBI NO: 11359723 NR Description: proteophosphoglycan, membrane-associated - Leishmania major (fragment) >gi|5420389|emb|CAB46680.1|
  misc_feature (47)..(285): Homolog of NCBI NO: 2136504 NR Description: gastric mucin (clone PGM-2A) - pig (fragment)
  misc_feature (83)..(243): Homolog of NCBI NO: 23017082 NR Description: hypothetical protein [Thermobifida fusca]
  misc_feature (124)..(124): Xaa is any aa, unknown or other
KSLSRSVRERGPPQPFPTKKCGGTHILYCSIGHGRGRRHHHLQLGLTSPRSQLPNKTLANPIRRWRSRRRASSRCPLLRRRHPRGPSPRATTGGARRPSSRARPRAWWSSPPARAASERRPPPXTSPPLSRASASQPSPSTPMLASATSTSCSASRTASTSPPPTSSRETADSTRRSSATARSTTSTSSASPSPAPSCPSRSDPRPSPGSRTRYDARPAHPHSSSSTAPQVLMLGLSLPLHPQKRRCSLPLPTLRLSAMLTVSRDCWSAMASKTSRSLSTECGQTW

SEQ ID NO: 9091 - DNA, 1122 bp, Zea mays subsp. mays
  misc_feature (1)..(1122): Ceres Seq. ID no. 12360011
  misc_feature: MA Experiment ID: 108504 Result: Up-regulated in Transcription
  misc_feature: MA Experiment 108504 PARAMETER Experiment Name: Zm_Drought_P Parameter: Age (day) Value: 8
  misc_feature: MA Experiment 108504 PARAMETER Experiment Name: Zm_Drought_P Parameter: Organism Value: Zea mays
  misc_feature: MA Experiment 108504 PARAMETER Experiment Name: Zm_Drought_P Parameter: Plant Line Value: 35A19
  misc_feature: MA Experiment 108504 PARAMETER Experiment Name: Zm_Drought_P Parameter: Timepoint (hr) Value: 12
  misc_feature: MA Experiment 108504 PARAMETER Experiment Name: Zm_Drought_P Parameter: Tissue Value: Aerial
  misc_feature: MA Experiment 108504 PARAMETER Experiment Name: Zm_Drought_P Parameter: Treatment Value: Drought vs. No Drought
  misc_feature: MA Experiment ID: 108527 Result: Up-regulated in Transcription
  misc_feature: MA Experiment 108527 PARAMETER Experiment Name: Zm_5mM_NO_P Parameter: Age (day) Value: 8
  misc_feature: MA Experiment 108527 PARAMETER Experiment Name: Zm_5mM_NO_P Parameter: Organism Value: Zea mays
  misc_feature: MA Experiment 108527 PARAMETER Experiment Name: Zm_5mM_NO_P Parameter: Plant Line Value: 35A19
  misc_feature: MA Experiment 108527 PARAMETER Experiment Name: Zm_5mM_NO_P Parameter: Timepoint (hr) Value: 6
  misc_feature: MA Experiment 108527 PARAMETER Experiment Name: Zm_5mM_NO_P Parameter: Tissue Value: Aerial
  misc_feature: MA Experiment 108527 PARAMETER Experiment Name: Zm_5mM_NO_P Parameter: Treatment Value: 5mM NO vs. No Treatment
  misc_feature: MA Experiment ID: 108530 Result: Up-regulated in Transcription
  misc_feature: MA Experiment 108530 PARAMETER Experiment Name: Zm_Imbibed_Seeds_P Parameter: Age (day) Value: 6 vs. 2
  misc_feature: MA Experiment 108530 PARAMETER Experiment Name: Zm_Imbibed_Seeds_P Parameter: Organism Value: Zea mays
  misc_feature: MA Experiment 108530 PARAMETER Experiment Name: Zm_Imbibed_Seeds_P Parameter: Plant Line Value: 35A19
  misc_feature: MA Experiment 108530 PARAMETER Experiment Name: Zm_Imbibed_Seeds_P Parameter: Tissue Value: Aerial vs. Embryo
  misc_feature: MA Experiment ID: 108597 Result: Up-regulated in Transcription
  misc_feature: MA Experiment 108597 PARAMETER Experiment Name: Zm_100uM_ABA_P Parameter: Age (day) Value: 9
  misc_feature: MA Experiment 108597 PARAMETER Experiment Name: Zm_100uM_ABA_P Parameter: Organism Value: Zea mays
  misc_feature: MA Experiment 108597 PARAMETER Experiment Name: Zm_100uM_ABA_P Parameter: Plant Line Value: 35A19
  misc_feature: MA Experiment 108597 PARAMETER Experiment Name: Zm_100uM_ABA_P Parameter: Timepoint (hr) Value: 24
  misc_feature: MA Experiment 108597 PARAMETER Experiment Name: Zm_100uM_ABA_P Parameter: Tissue Value: Aerial
  misc_feature: MA Experiment 108597 PARAMETER Experiment Name: Zm_100uM_ABA_P Parameter: Treatment Value: 100uM ABA vs. No Treatment
  misc_feature: MA Experiment ID: 20000492 Result: Down-regulated in Transcription
  misc_feature: MA Experiment 20000492 PARAMETER Experiment Name: Zm_Hybrid_Seed_Dev_P Parameter: DAP Value: 12
  misc_feature: MA Experiment 20000492 PARAMETER Experiment Name: Zm_Hybrid_Seed_Dev_P Parameter: Organism Value: Zea mays
  misc_feature: MA Experiment 20000492 PARAMETER Experiment Name: Zm_Hybrid_Seed_Dev_P Parameter: Plant Line Value: 35A19
  misc_feature: MA Experiment 20000492 PARAMETER Experiment Name: Zm_Hybrid_Seed_Dev_P Parameter: Tissue Value: Fert Kernel vs. Unfert Floret
  misc_feature: MA Experiment ID: 20000535 Result: Down-regulated in Transcription
  misc_feature: MA Experiment 20000535 PARAMETER Experiment Name: Zm_Hybrid_Seed_Dev_P Parameter: DAP Value: 30 vs. 12
  misc_feature: MA Experiment 20000535 PARAMETER Experiment Name: Zm_Hybrid_Seed_Dev_P Parameter: Organism Value: Zea mays
  misc_feature: MA Experiment 20000535 PARAMETER Experiment Name: Zm_Hybrid_Seed_Dev_P Parameter: Plant Line Value: 35A19
  misc_feature: MA Experiment 20000535 PARAMETER Experiment Name: Zm_Hybrid_Seed_Dev_P Parameter: Tissue Value: Embryo vs. Unfert Floret
  misc_feature: MA Experiment ID: 20000630 Result: Up-regulated in Transcription
  misc_feature: MA Experiment 20000630 PARAMETER Experiment Name: Zm_Herbicide-Treatments_P Parameter: Timepoint (hr) Value: 4
  misc_feature: MA Experiment 20000630 PARAMETER Experiment Name: Zm_Herbicide-Treatments_P Parameter: Tissue Value: Aerial
  misc_feature: MA Experiment 20000630 PARAMETER Experiment Name: Zm_Herbicide-Treatments_P Parameter: Treatment Value: Roundup vs. No Treatment
atcccccgcaccgcacgtctcagcccacctcctcctaccaccctcgccgcggccgcgccacacaaaagcgtcacgccgtctgacagcggggaaaaaaaaggaggccatggaggagaacattcctcacccgagggaggcacaagggcccaccgtcgcccaaccggccccggcggtcgtcacgccccgcgacgacgctctagctcccgtagcccagctgctgtcgtcctcgggcgacgatgagtcgtccgacgacgagggggagctcgagctggaggtcgagttcgagttcccgttcgtctgcagggactcccccgcgggcacggccgccccggccgacgagctcttcgcggacggccggatcagggccttctacccggtgttcggccgcggcacggccgggtgcgtcccccgtggcggcggcggcggcggcagcggcagctgctgcacggcgctgccggccgctccgccgcgggtgaggggccagctgggacgcctgttccaggaggagacacgggagcgcagcacctccgccagctttacggcgtcgttcgggcccgccacggacgaggacggcggcctggatggcgcggcgccggggagctactgcgtgtggcgcccgggtccgtccgcgtccgcgtcgccctccccgccgccgcccaggaagagtgggtccacggggtccatggcgcggtggcgccgcatcagcgacctcgtcgtgggccgcagccacagcgacggcagggacaagttcctcttcctcgccgccgcgcccaggagggggcccaaggacaaggagcctgccgccactgccccgcccgcggtcgccgcccaccagatggcggcgtacctcgccaggggcgtcccaccgcggcgcacgttcctgccgtaccgcgaggagctcgtgggcttcttcgccaacgtgaacggcatcagtcggagccaccaccgtccgccgttctgacgtcttgtcagtggcctatgccatcggttaattaccctgattaattattcggtaatgtgattagcacttttcttagcagtagtggataagtaggcggtttgtataggtaatgattttgggtggatcacgcgacgcgatgaatggagaggcgttttctgtcg

SEQ ID NO: 9092 - protein, 319 aa, Zea mays subsp. mays
  peptide (1)..(319): Ceres Seq. ID no. 12360012
  misc_feature (91)..(275): Homolog of NCBI NO: 34911600 NR Description: P0004A09.25 [Oryza sativa (japonica
  misc_feature (158)..(319): Homolog of NCBI NO: 34912066 NR Description: P0445H04.35 [Oryza sativa (japonica
  misc_feature (78)..(317): Homolog of NCBI NO: 15241966 NR Description: putative protein; protein id: At5g62770.1 thaliana] >gi|10177455|dbj|BAB10846.1|
SPAPHVSAHLLLPPSPRPRHTKASRRLTAGKKKEAMEENIPHPREAQGPTVAQPAPAVVTPRDDALAPVAQLLSSSGDDESSDDEGELELEVEFEFPFVCRDSPAGTAAPADELFADGRIRAFYPVFGRGTAGCVPRGGGGGGSGSCCTALPAAPPRVRGQLGRLFQEETRERSTSASFTASFGPATDEDGGLDGAAPGSYCVWRPGPSASASPSPPPPRKSGSTGSMARWRRISDLVVGRSHSDGRDKFLFLAAAPRRGPKDKEPAATAPPAVAAHQMAAYLARGVPPRRTFLPYREELVGFFANVNGISRSHHRPPF

SEQ ID NO: 9093 - protein, 284 aa, Zea mays subsp. mays
  peptide (1)..(284): Ceres Seq. ID no. 12360013
  misc_feature (56)..(240): Homolog of NCBI NO: 34911600 NR Description: P0004A09.25 [Oryza sativa (japonica
  misc_feature (123)..(284): Homolog of NCBI NO: 34912066 NR Description: P0445H04.35 [Oryza sativa (japonica
  misc_feature (43)..(282): Homolog of NCBI NO: 15241966 NR Description: putative protein; protein id: At5g62770.1 thaliana] >gi|10177455|dbj|BAB10846.1|
MEENIPHPREAQGPTVAQPAPAVVTPRDDALAPVAQLLSSSGDDESSDDEGELELEVEFEFPFVCRDSPAGTAAPADELFADGRIRAFYPVFGRGTAGCVPRGGGGGGSGSCCTALPAAPPRVRGQLGRLFQEETRERSTSASFTASFGPATDEDGGLDGAAPGSYCVWRPGPSASASPSPPPPRKSGSTGSMARWRRISDLVVGRSHSDGRDKFLFLAAAPRRGPKDKEPAATAPPAVAAHQMAAYLARGVPPRRTFLPYREELVGFFANVNGISRSHHRPPF

SEQ ID NO: 9094 - DNA, 444 bp, Zea mays subsp. mays
  misc_feature (1)..(444): Ceres Seq. ID no. 12545648
  misc_feature: MA Experiment ID: 20000487 Result: Up-regulated in Transcription
  misc_feature: MA Experiment 20000487 PARAMETER Experiment Name: Zm_50mM_NH4NO3_L_to_H_P Parameter: Organism Value: Zea mays
  misc_feature: MA Experiment 20000487 PARAMETER Experiment Name: Zm_50mM_NH4NO3_L_to_H_P Parameter: Timepoint (hr) Value: 4
  misc_feature: MA Experiment 20000487 PARAMETER Experiment Name: Zm_50mM_NH4NO3_L_to_H_P Parameter: Tissue Value: Leaves
  misc_feature: MA Experiment 20000487 PARAMETER Experiment Name: Zm_50mM_NH4NO3_L_to_H_P Parameter: Treatment Value: 50mM NH4NO3 vs. 100mM Mannitol
aaaaccactcggtccgctcccagcgtcccttcgcccacagccagcggcgaactcgatcgagcaggatggggtttatcggcgcgcacggcgtggagacgctgaagcggtataggtacagcggagaggaccgctcggtggtggccaagtacgtgctgcagcccttctggagccgatgcgtcactctcttcccgctctggatgccaccaaacatgatcacacttacaggattttcgtttctagtactatcagcgctgcttggctatatatgttcgcctcaccttgacactgctccccctaggtgggtccatcttgcccatggattacttctcttcttgtaccagacttttgatgctgttgatggtaaacaagcaaggcgtactagctcatcgagtcctcttggagaactttttgatcatggatgtgatgcacttgcgtgtgcttttg

SEQ ID NO: 9095 - protein, 147 aa, Zea mays subsp. mays
  peptide (1)..(147): Ceres Seq. ID no. 13565141
  misc_feature (22)..(146): Homolog of NCBI NO: 18390098 NR Description: aminoalcoholphosphotransferase [Sorghum bicolor]
  misc_feature (22)..(146): Homolog of NCBI NO: 7488701 NR Description: probable ethanolaminephosphotransferase (EC - soybean >gi|530088|gb|AAA67719.1|
  misc_feature (22)..(146): Homolog of NCBI NO: 7488522 NR Description: ethanolaminephosphotransferase homolog - turnip
  misc_feature (22)..(146): Homolog of NCBI NO: 15222885 NR Description: aminoalcoholphosphotransferase; protein id: supported by cDNA: gi_19347829, supported by cDNA: gi_21280904, by cDNA: gi_3661592 [Arabidopsis thaliana]
  misc_feature (22)..(146): Homolog of NCBI NO: 3927806 NR Description: aminoalcoholphosphotransferase [Pimpinella
  misc_feature (22)..(146): Homolog of NCBI NO: 30313359 NR Description: aminoalcoholphosphotransferase [Brassica rapa
  misc_feature (22)..(146): Homolog of NCBI NO: 15229490 NR Description: hypothetical protein; protein id: At3g25585.1, by cDNA: gi_13430477, supported by cDNA: gi_15810001, supported cDNA: gi_3661594, supported by cDNA: gi_13430477, supported by
  misc_feature (22)..(146): Homolog of NCBI NO: 5917787 NR Description: aminoalcoholphosphotransferase [Brassica rapa]
  misc_feature (22)..(143): Homolog of NCBI NO: 6321915 NR Description: sn-1,2-diacylglycerol ethanolamine- and Ept1p [Saccharomyces cerevisiae] >gi|729432|sp|P22140|EPT1_YEAST (ETHPT) >gi|626142|pir||S48967 ethanolaminephosphotransferase (EC
  misc_feature (22)..(146): Homolog of NCBI NO: 27762264 NR Description: aminoalcoholphosphotransferase [Brassica napus]
NHSVRSQRPFAHSQRRTRSSRMGFIGAHGVETLKRYRYSGEDRSVVAKYVLQPFWSRCVTLFPLWMPPNMITLTGFSFLVLSALLGYICSPHLDTAPPRWVHLAHGLLLFLYQTFDAVDGKQARRTSSSSPLGELFDHGCDALACAF

SEQ ID NO: 9096 - protein, 126 aa, Zea mays subsp. mays
  peptide (1)..(126): Ceres Seq. ID no. 13565142
  misc_feature (1)..(125): Homolog of NCBI NO: 18390098 NR Description: aminoalcoholphosphotransferase [Sorghum bicolor]
  misc_feature (1)..(125): Homolog of NCBI NO: 7488701 NR Description: probable ethanolaminephosphotransferase (EC - soybean >gi|530088|gb|AAA67719.1|
  misc_feature (1)..(125): Homolog of NCBI NO: 7488522 NR Description: ethanolaminephosphotransferase homolog - turnip
  misc_feature (1)..(125): Homolog of NCBI NO: 15222885 NR Description: aminoalcoholphosphotransferase; protein id: supported by cDNA: gi_19347829, supported by cDNA: gi_21280904, by cDNA: gi_3661592 [Arabidopsis thaliana]
  misc_feature (1)..(125): Homolog of NCBI NO: 3927806 NR Description: aminoalcoholphosphotransferase [Pimpinella
  misc_feature (1)..(125): Homolog of NCBI NO: 30313359 NR Description: aminoalcoholphosphotransferase [Brassica rapa
  misc_feature (1)..(125): Homolog of NCBI NO: 15229490 NR Description: hypothetical protein; protein id: At3g25585.1, by cDNA: gi_13430477, supported by cDNA: gi_15810001, supported cDNA: gi_3661594, supported by cDNA: gi_13430477, supported by
  misc_feature (1)..(125): Homolog of NCBI NO: 5917787 NR Description: aminoalcoholphosphotransferase [Brassica rapa]
  misc_feature (1)..(122): Homolog of NCBI NO: 6321915 NR Description: sn-1,2-diacylglycerol ethanolamine- and Ept1p [Saccharomyces cerevisiae] >gi|729432|sp|P22140|EPT1_YEAST (ETHPT) >gi|626142|pir||S48967 ethanolaminephosphotransferase (EC
  misc_feature (1)..(125): Homolog of NCBI NO: 27762264 NR Description: aminoalcoholphosphotransferase [Brassica napus]
MGFIGAHGVETLKRYRYSGEDRSVVAKYVLQPFWSRCVTLFPLWMPPNMITLTGFSFLVLSALLGYICSPHLDTAPPRWVHLAHGLLLFLYQTFDAVDGKQARRTSSSSPLGELFDHGCDALACAF

SEQ ID NO: 9097 - protein, 82 aa, Zea mays subsp. mays
  peptide (1)..(82): Ceres Seq. ID no. 13565143
  misc_feature (1)..(81): Homolog of NCBI NO: 18390098 NR Description: aminoalcoholphosphotransferase [Sorghum bicolor]
  misc_feature (1)..(81): Homolog of NCBI NO: 7488701 NR Description: probable ethanolaminephosphotransferase (EC - soybean >gi|530088|gb|AAA67719.1|
  misc_feature (1)..(81): Homolog of NCBI NO: 7488522 NR Description: ethanolaminephosphotransferase homolog - turnip
  misc_feature (1)..(81): Homolog of NCBI NO: 15222885 NR Description: aminoalcoholphosphotransferase; protein id: supported by cDNA: gi_19347829, supported by cDNA: gi_21280904, by cDNA: gi_3661592 [Arabidopsis thaliana]
  misc_feature (1)..(81): Homolog of NCBI NO: 3927806 NR Description: aminoalcoholphosphotransferase [Pimpinella
  misc_feature (1)..(81): Homolog of NCBI NO: 30313359 NR Description: aminoalcoholphosphotransferase [Brassica rapa
  misc_feature (1)..(81): Homolog of NCBI NO: 15229490 NR Description: hypothetical protein; protein id: At3g25585.1, by cDNA: gi_13430477, supported by cDNA: gi_15810001, supported cDNA: gi_3661594, supported by cDNA: gi_13430477, supported by
  misc_feature (1)..(81): Homolog of NCBI NO: 5917787 NR Description: aminoalcoholphosphotransferase [Brassica rapa]
  misc_feature (1)..(78): Homolog of NCBI NO: 6321915 NR Description: sn-1,2-diacylglycerol ethanolamine- and Ept1p [Saccharomyces cerevisiae] >gi|729432|sp|P22140|EPT1_YEAST (ETHPT) >gi|626142|pir||S48967 ethanolaminephosphotransferase (EC
  misc_feature (1)..(81): Homolog of NCBI NO: 27762264 NR Description: aminoalcoholphosphotransferase [Brassica napus]
MPPNMITLTGFSFLVLSALLGYICSPHLDTAPPRWVHLAHGLLLFLYQTFDAVDGKQARRTSSSSPLGELFDHGCDALACAF

SEQ ID NO: 9098 - DNA, 1850 bp, Zea mays subsp. mays
  misc_feature (1)..(1850): Ceres Seq. ID no. 12386893
  misc_feature: MA Experiment ID: 108535 Result: Down-regulated in Transcription
  misc_feature: MA Experiment 108535 PARAMETER Experiment Name: Zm_Meristem_P Parameter: Age (day) Value: 8
  misc_feature: MA Experiment 108535 PARAMETER Experiment Name: Zm_Meristem_P Parameter: Organism Value: Zea mays
  misc_feature: MA Experiment 108535 PARAMETER Experiment Name: Zm_Meristem_P Parameter: Plant Line Value: 35A19
  misc_feature: MA Experiment 108535 PARAMETER Experiment Name: Zm_Meristem_P Parameter: Tissue Value: Root Meristem vs. Above Root Meristem
aaggagcagctgggaaacggagcgccacaagcccacaactctcgcgcaggcttctctcccatctccgcccttcccgaagcagcacggtgcaggccgcggacccgcggtttctccacagaatcccgctccacgcacgtcgcccccgtcgccggcgaggcggctgtgctgctgcgtactcccctggttccaactctgaaccggccaccctctcctgctccgcgacctcgagtaactttttgagtaccagtgatgcaaagggacacaagctctagcgatgtttctgcttctcatgtaggacgtgtaagacgtcgcaaacatccaactgaggctaccacagatgggaatagagctaatggacagccattgcttgtcaatgatcagaacaaatataaatcaatgcttacccgtacgtattctacagtatggatgattggaggctttgcctttattatttatatgggtcatctatatatctgggctatggtggttgtgattcaaatatacatggcaagagaacttttcaatttactcagaaaatccagtgaagagaaacaactgccagggttcagggtcctgaattggcacttctttttcacggcaatgctgtacacttatgggcgctttcttagtcgtcagctggtgaatacagtgacttcagatcacttgctttataaggtcgtcagtggcctaattaagtatcagatgtttatctgctatttcctttatattgcagggtttgtatggtttattttgactctcaagaaaaagacatacaagtatcagttcaaacagtatgcctggacacacatgatacttttaacagtttttgcacagtctgctttcactgtggcaaacatatttgaagggatattctggtttcttttgcctgcttcacttattgtgatcaacgatatttttgcttatttatttgggttctttcttgggagaacaccattaatcaagttgtctccaaagaaaacttgggaaggttttattggtgcatcagtgacaactatcatctctgcgtttctgttagcaaatgtaatgggccattcgcaatggttgacatgcccaagaaaggatctgttgactgggtggctttattgtgatcctggtccaatgtttaagccagagcattactcattgggagagtgggtgccgcattggttcccatggaaagaactagctattatgcctgtgcagtggcatgctttagccctaggtttatttgcatcaataatagcaccatttggaggattttttgcgagtggcttcaagagggcttttaaaattaaggattttggtgacagcatacctgggcatggtggaattactgacagaatggattgtcaaatggttatggcagtgtttgcatacatataccaccaatcattcattgcacctcagaacttctctgttgagataatcttggatcagattataagaaacctaacctatgaggagcaaaaatatgtatatgaacaacttggggaaatgttccgtgagaggcaattggctcattggctgaaagctgagagttagcgtgcttatgaaatgcatgatatgttgtgcatttagttcatgtatggcagcatgccagcatgttatgaatgtatacggagcccttgcccaaaccattgtatagaatggtagaatggagagaatgaatgggttgtaggtgctttattcactctctagtctccactgacgctgcctataattcactccccctgtcatcgtttctgcagtctgtgtaaaagggaacctggaaagttttattctttccacttcgtggtgctgggctcagatcaaatattcgaggattcacaatatatccccgatgttttacc

SEQ ID NO: 9099 - protein, 430 aa, Zea mays subsp. mays
  peptide (1)..(430): Ceres Seq. ID no. 12386894
  misc_feature (4)..(416): Homolog of NCBI NO: 20303635 NR Description: putative CDP-diacylglycerol synthetase [Oryza
  misc_feature (1)..(420): Homolog of NCBI NO: 3121837 NR Description: Phosphatidate cytidylyltransferase
  misc_feature (1)..(420): Homolog of NCBI NO: 30696710 NR Description: phosphatidate cytidylyltransferase (CDS) thaliana] >gi|3121836|sp|O04928|CDS1_ARATH Phosphatidate
  misc_feature (1)..(420): Homolog of NCBI NO: 15235611 NR Description: CDP-diacylglycerol synthetase-like protein; id: At4g22340.1, supported by cDNA: 112115., supported by cDNA:
  misc_feature (1)..(420): Homolog of NCBI NO: 7484839 NR Description: CDP-diacylglycerol synthetase homolog F24O1.17 -
  misc_feature (1)..(420): Homolog of NCBI NO: 15236874 NR Description: putative CDP-diacylglycerol synthetase; protein
  misc_feature (4)..(133): Homolog of NCBI NO: 37532798 NR Description: putative phosphatidate cytidylyltransferase
  misc_feature (278)..(368): Homolog of NCBI NO: 37532798 NR Description: putative phosphatidate cytidylyltransferase
  misc_feature (386)..(416): Homolog of NCBI NO: 37532798 NR Description: putative phosphatidate cytidylyltransferase
  misc_feature (3)..(412): Homolog of NCBI NO: 40743157 NR Description: hypothetical protein AN5166.2 [Aspergillus
MQRDTSSSDVSASHVGRVRRRKHPTEATTDGNRANGQPLLVNDQNKYKSMLTRTYSTVWMIGGFAFIIYMGHLYIWAMVVVIQIYMARELFNLLRKSSEEKQLPGFRVLNWHFFFTAMLYTYGRFLSRQLVNTVTSDHLLYKVVSGLIKYQMFICYFLYIAGFVWFILTLKKKTYKYQFKQYAWTHMILLTVFAQSAFTVANIFEGIFWFLLPASLIVINDIFAYLFGFFLGRTPLIKLSPKKTWEGFIGASVTTIISAFLLANVMGHSQWLTCPRKDLLTGWLYCDPGPMFKPEHYSLGEWVPHWFPWKELAIMPVQWHALALGLFASIIAPFGGFFASGFKRAFKIKDFGDSIPGHGGITDRMDCQMVMAVFAYIYHQSFIAPQNFSVEIILDQIIRNLTYEEQKYVYEQLGEMFRERQLAHWLKAES

SEQ ID NO: 9100 - protein, 381 aa, Zea mays subsp. mays
  peptide (1)..(381): Ceres Seq. ID no. 12386895
  misc_feature (1)..(367): Homolog of NCBI NO: 20303635 NR Description: putative CDP-diacylglycerol synthetase [Oryza
  misc_feature (1)..(371): Homolog of NCBI NO: 3121837 NR Description: Phosphatidate cytidylyltransferase
  misc_feature (1)..(371): Homolog of NCBI NO: 30696710 NR Description: phosphatidate cytidylyltransferase (CDS) thaliana] >gi|3121836|sp|O04928|CDS1_ARATH Phosphatidate
  misc_feature (1)..(371): Homolog of NCBI NO: 15235611 NR Description: CDP-diacylglycerol synthetase-like protein; id: At4g22340.1, supported by cDNA: 112115., supported by cDNA:
  misc_feature (1)..(371): Homolog of NCBI NO: 7484839 NR Description: CDP-diacylglycerol synthetase homolog F24O1.17 -
  misc_feature (1)..(371): Homolog of NCBI NO: 15236874 NR Description: putative CDP-diacylglycerol synthetase; protein
  misc_feature (1)..(84): Homolog of NCBI NO: 37532798 NR Description: putative phosphatidate cytidylyltransferase
  misc_feature (229)..(319): Homolog of NCBI NO: 37532798 NR Description: putative phosphatidate cytidylyltransferase
  misc_feature (337)..(367): Homolog of NCBI NO: 37532798 NR Description: putative phosphatidate cytidylyltransferase
  misc_feature (1)..(363): Homolog of NCBI NO: 40743157 NR Description: hypothetical protein AN5166.2 [Aspergillus
MLTRTYSTVWMIGGFAFIIYMGHLYIWAMVVVIQIYMARELFNLLRKSSEEKQLPGFRVLNWHFFFTAMLYTYGRFLSRQLVNTVTSDHLLYKVVSGLIKYQMFICYFLYIAGFVWFILTLKKKTYKYQFKQYAWTHMILLTVFAQSAFTVANIFEGIFWFLLPASLIVINDIFAYLFGFFLGRTPLIKLSPKKTWEGFIGASVTTIISAFLLANVMGHSQWLTCPRKDLLTGWLYCDPGPMFKPEHYSLGEWVPHWFPWKELAIMPVQWHALALGLFASIIAPFGGFFASGFKRAFKIKDFGDSIPGHGGITDRMDCQMVMAVFAYIYHQSFIAPQNFSVEIILDQIIRNLTYEEQKYVYEQLGEMFRERQLAHWLKAES

SEQ ID NO: 9101 - protein, 371 aa, Zea mays subsp. mays
  peptide (1)..(371): Ceres Seq. ID no. 12386896
  misc_feature (1)..(357): Homolog of NCBI NO: 20303635 NR Description: putative CDP-diacylglycerol synthetase [Oryza
  misc_feature (1)..(361): Homolog of NCBI NO: 3121837 NR Description: Phosphatidate cytidylyltransferase
  misc_feature (1)..(361): Homolog of NCBI NO: 30696710 NR Description: phosphatidate cytidylyltransferase (CDS) thaliana] >gi|3121836|sp|O04928|CDS1_ARATH Phosphatidate
  misc_feature (1)..(361): Homolog of NCBI NO: 15235611 NR Description: CDP-diacylglycerol synthetase-like protein; id: At4g22340.1, supported by cDNA: 112115., supported by cDNA:
  misc_feature (1)..(361): Homolog of NCBI NO: 7484839 NR Description: CDP-diacylglycerol synthetase homolog F24O1.17 -
  misc_feature (1)..(361): Homolog of NCBI NO: 15236874 NR Description: putative CDP-diacylglycerol synthetase; protein
  misc_feature (1)..(74): Homolog of NCBI NO: 37532798 NR Description: putative phosphatidate cytidylyltransferase
  misc_feature (219)..(309): Homolog of NCBI NO: 37532798 NR Description: putative phosphatidate cytidylyltransferase
  misc_feature (327)..(357): Homolog of NCBI NO: 37532798 NR Description: putative phosphatidate cytidylyltransferase
  misc_feature (1)..(353): Homolog of NCBI NO: 40743157 NR Description: hypothetical protein AN5166.2 [Aspergillus
MIGGFAFIIYMGHLYIWAMVVVIQIYMARELFNLLRKSSEEKQLPGFRVLNWHFFFTAMLYTYGRFLSRQLVNTVTSDHLLYKVVSGLIKYQMFICYFLYIAGFVWFILTLKKKTYKYQFKQYAWTHMILLTVFAQSAFTVANIFEGIFWFLLPASLIVINDIFAYLFGFFLGRTPLIKLSPKKTWEGFIGASVTTIISAFLLANVMGHSQWLTCPRKDLLTGWLYCDPGPMFKPEHYSLGEWVPHWFPWKELAIMPVQWHALALGLFASIIAPFGGFFASGFKRAFKIKDFGDSIPGHGGITDRMDCQMVMAVFAYIYHQSFIAPQNFSVEIILDQIIRNLTYEEQKYVYEQLGEMFRERQLAHWLKAES

SEQ ID NO: 9102 - DNA, 943 bp, Zea mays subsp. mays
  misc_feature (1)..(943): Ceres Seq. ID no. 12348152
  misc_feature: MA Experiment ID: 108534 Result: Down-regulated in Transcription
  misc_feature: MA Experiment 108534 PARAMETER Experiment Name: Zm_4deg_Cold_P Parameter: Age (hr) Value: 8
  misc_feature: MA Experiment 108534 PARAMETER Experiment Name: Zm_4deg_Cold_P Parameter: Organism Value: Zea mays
  misc_feature: MA Experiment 108534 PARAMETER Experiment Name: Zm_4deg_Cold_P Parameter: Plant Line Value: 35A19
  misc_feature: MA Experiment 108534 PARAMETER Experiment Name: Zm_4deg_Cold_P Parameter: Temperature (deg C) Value: 4 vs. 22
  misc_feature: MA Experiment 108534 PARAMETER Experiment Name: Zm_4deg_Cold_P Parameter: Timepoint (hr) Value: 6
  misc_feature: MA Experiment 108534 PARAMETER Experiment Name: Zm_4deg_Cold_P Parameter: Tissue Value: Aerial
agctcgcctctcctctcattctctcgtgctctccacccgtttcccgcaaaaccctagctctgcgacatgcaccgcggcggcgatcgctccggcggcccctcgagcggcggagaccgctctggagcccggttccagcggggtccctcccgctggtctggcagcagcggcggcggattagggggtagcccgcccaatcgctactcctcccgcggcgcggcagatggaggtggtggagggggcggtggcgggaggttccacccttaccgtggttcttccgactattctagcggcggtggagggtacagaggcggtagtggcgttggtaacgacttcggcgaccagaggcaacgttacggcggcggcactagaggcggaggccgtggggatttccaagatcatgatagtagaagtaactatgtcaaactttttgtcggatctgttccgaggacagcgactgaagaagacgttcgtcctttatttgaggaacatggagatgttcttgaagttgctctaattaaggataggaagaccggtgaacaacaaggtatgctatgtctttgtttttcttgtattatcacaattgagtatctcttttgttttcaggtttctgagaggttataggagcaacaaggttgcatcttctctcagttagattggcggttgttgattttcatttcctgcgcttccattctgtccgtctcctgtggattcagtagaagactagaatggacgcgactaactgcccgccgattactggaacctaactagccacaacttcactgctacacaaggcagcaaatttggtaccaacagctgtgtttagatgatattgaccttctggatgtcctgtagttctagagcaatgagcttgtagtttcacctttgcatctgtgtgccttgattttgttgcaagaacttatataatcttataatgaattaatac

SEQ ID NO: 9103 - protein, 184 aa, Zea mays subsp. mays
  peptide (1)..(184): Ceres Seq. ID no. 12348153
  misc_feature (6)..(106): Pfam Name: Dehydrin Pfam Description: Dehydrin
  misc_feature (1)..(173): Homolog of NCBI NO: 33390912 NR Description: gamma flowering time control protein [Oryza
  misc_feature (1)..(173): Homolog of NCBI NO: 34555648 NR Description: flowering time control protein isoform rFCA-2
  misc_feature (102)..(173): Homolog of NCBI NO: 34555650 NR Description: flowering time control protein isoform rFCA-4
  misc_feature (102)..(173): Homolog of NCBI NO: 34555646 NR Description: flowering time control protein isoform rFCA-3
  misc_feature (56)..(173): Homolog of NCBI NO: 11045077 NR Description: putative FCA orthologue [Brassica napus]
  misc_feature (93)..(184): Homolog of NCBI NO: 25407543 NR Description: FCA alpha and beta protein [imported] - thaliana >gi|2204093|emb|CAB05390.1| FCA beta [Arabidopsis >gi|2204097|emb|CAB05393.1| FCA alpha and FCA beta [Arabidopsis
  misc_feature (38)..(173): Homolog of NCBI NO: 18150431 NR Description: FCA gamma [Brassica napus]
  misc_feature (93)..(166): Homolog of NCBI NO: 2204091 NR Description: FCA delta [Arabidopsis thaliana]
  misc_feature (93)..(166): Homolog of NCBI NO: 30683603 NR Description: Flowering time control protein (FCA) [Arabidopsis
  misc_feature (93)..(166): Homolog of NCBI NO: 2204089 NR Description: FCA gamma [Arabidopsis thaliana]
MHRGGDRSGGPSSGGDRSGARFQRGPSRWSGSSGGGLGGSPPNRYSSRGAADGGGGGGGGGRFHPYRGSSDYSSGGGGYRGGSGVGNDFGDQRQRYGGGTRGGGRGDFQDHDSRSNYVKLFVGSVPRTATEEDVRPLFEEHGDVLEVALIKDRKTGEQQGMLCLCFSCIITIEYLFCFQVSERL

SEQ ID NO: 9104 - protein, 97 aa, Zea mays subsp. mays
  peptide (1)..(97): Ceres Seq. ID no. 12348154
MEVVEGAVAGGSTLTVVLPTILAAVEGTEAVVALVTTSATRGNVTAAALEAEAVGISKIMIVEVTMSNFLSDLFRGQRLKKTFVLYLRNMEMFLKLL

SEQ ID NO: 9105 - DNA, 1286 bp, Zea mays subsp. mays
  misc_feature (1)..(1286): Ceres Seq. ID no. 12413176
  misc_feature: MA Experiment ID: 108556 Result: Up-regulated in Transcription
  misc_feature: MA Experiment 108556 PARAMETER Experiment Name: Zm_Drought_P Parameter: Age (day) Value: 9
  misc_feature: MA Experiment 108556 PARAMETER Experiment Name: Zm_Drought_P Parameter: Organism Value: Zea mays
  misc_feature: MA Experiment 108556 PARAMETER Experiment Name: Zm_Drought_P Parameter: Plant Line Value: 35A19
  misc_feature: MA Experiment 108556 PARAMETER Experiment Name: Zm_Drought_P Parameter: Timepoint (hr) Value: 24
  misc_feature: MA Experiment 108556 PARAMETER Experiment Name: Zm_Drought_P Parameter: Tissue Value: Aerial
  misc_feature: MA Experiment 108556 PARAMETER Experiment Name: Zm_Drought_P Parameter: Treatment Value: Drought vs. No Drought
  misc_feature: MA Experiment ID: 20000479 Result: Up-regulated in Transcription
  misc_feature: MA Experiment 20000479 PARAMETER Experiment Name: Zm_Drought_P Parameter: Age (day) Value: 10
  misc_feature: MA Experiment 20000479 PARAMETER Experiment Name: Zm_Drought_P Parameter: Organism Value: Zea mays
  misc_feature: MA Experiment 20000479 PARAMETER Experiment Name: Zm_Drought_P Parameter: Plant Line Value: 35A19
  misc_feature: MA Experiment 20000479 PARAMETER Experiment Name: Zm_Drought_P Parameter: Timepoint (hr) Value: 48
  misc_feature: MA Experiment 20000479 PARAMETER Experiment Name: Zm_Drought_P Parameter: Tissue Value: Aerial
  misc_feature: MA Experiment 20000479 PARAMETER Experiment Name: Zm_Drought_P Parameter: Treatment Value: Drought vs. No Drought
  misc_feature: MA Experiment ID: 20000480 Result: Up-regulated in Transcription
  misc_feature: MA Experiment 20000480 PARAMETER Experiment Name: Zm_Drought_P Parameter: Age (day) Value: 11
  misc_feature: MA Experiment 20000480 PARAMETER Experiment Name: Zm_Drought_P Parameter: Organism Value: Zea mays
  misc_feature: MA Experiment 20000480 PARAMETER Experiment Name: Zm_Drought_P Parameter: Plant Line Value: 35A19
  misc_feature: MA Experiment 20000480 PARAMETER Experiment Name: Zm_Drought_P Parameter: Timepoint (hr) Value: 72
  misc_feature: MA Experiment 20000480 PARAMETER Experiment Name: Zm_Drought_P Parameter: Tissue Value: Aerial
  misc_feature: MA Experiment 20000480 PARAMETER Experiment Name: Zm_Drought_P Parameter: Treatment Value: Drought vs. No Drought
gcacgagaccattacctagaacatcctaatcgaaaaccaccgttccacgcgtccacggtccacccacacgcaaggtcgcaggtcgcaacccgcgggcggaggggcaggcacaggaccgttgcgttgctgccgccgccggcacgagatcgaggagggatcccccgctctcacgccgctccaggtcgagggccgagcgagatggtgaacaccttcttcctcttctgcgggtgcgtggaccaggccagcgtggcggtggtggagaagtggggccgcttcctccgcctcgccgacccgggcctccacttcttcaaccccctcgccggggagtgcgtcgcgggctccctcaccacacgcgtccagtccctcgacgtccgcgtcgagaccaagaccaaggataatgtcttcgtccaactgatctgcacaatccagtaccgtgttgtcaaggaaaatgcagatgatgctttctatgagttgcagaatccccagcagcaaatccaggcctacgtctttgatgttgttcgggccatagtgccgagaatgaatctggacgatctctttgagcagaagaacgatgtggccaaagctgtattggaggagcttgaaaaggtgatggcagattatggttacagcattgagcacattctcatggttgatatcatccctgacgctgctgttcgtaaggcaatgaacgacataaatgcagcccaaaggcttcaactggcaagtgtttacaagggagaagcagagaagatccttatggtgaagaaagcggaggcagaagcagaggcgaaatatctttctggtgtcggtatcgctaaacagcggcaggcgataaccgacggccttagagagaacatcctgaacttctcacactcggtgtcgggcaccagcgcgaaggaggtcatggacctgatcatggtcacgcagtacttcgacaccatcaaggagctcggggacggctccaagaacaccacgatcttcataccccacggaccaggccacgtgaaggacatcagcgagcagatccgcgacggcatgatgcaggcctcaagcagcaacgtgtaaatcaccgactctctgcacgattggagacggctcggctcaggatgaggcctggagtaccatgttcatagtgttaggttgttgttagtggtaaataatgagtgctggggcttttggcgagtcttgagttacatgcggttgtacaactagtgtggtttgttttatatataaaaatgtatatttacatggttctgctcctggaattttgactttttatggtttgg

SEQ ID NO: 9106 - protein, 354 aa, Zea mays subsp. mays
  peptide (1)..(354): Ceres Seq. ID no. 12413177
  misc_feature (75)..(250): Pfam Name: SPFH domain / Band 7 family Pfam Description: SPFH domain / Band 7 family
  misc_feature (67)..(354): Homolog of NCBI NO: 23345038 NR Description: hypersensitive-induced reaction protein 4
  misc_feature (67)..(352): Homolog of NCBI NO: 15242123 NR Description: putative protein; protein id: At5g51570.1 thaliana] >gi|9758199|dbj|BAB08673.1|
  misc_feature (73)..(354): Homolog of NCBI NO: 15241939 NR Description: putative protein; protein id: At5g62740.1, by cDNA: 2641., supported by cDNA: gi_17065547 [Arabidopsis
  misc_feature (76)..(354): Homolog of NCBI NO: 3928150 NR Description: hypothetical protein [Cicer arietinum]
  misc_feature (78)..(349): Homolog of NCBI NO: 14150732 NR Description: hypersensitive-induced response protein [Oryza
  misc_feature (78)..(350): Homolog of NCBI NO: 7716466 NR Description: hypersensitive-induced response protein [Zea mays]
  misc_feature (78)..(350): Homolog of NCBI NO: 7716468 NR Description: hypersensitive-induced response protein [Zea mays]
  misc_feature (78)..(348): Homolog of NCBI NO: 23345042 NR Description: hypersensitive-induced reaction protein 1
  misc_feature (73)..(353): Homolog of NCBI NO: 18395770 NR Description: expressed protein; protein id: At3g01290.1, by cDNA: 108086. [Arabidopsis thaliana] unknown protein [Arabidopsis thaliana]
  misc_feature (75)..(351): Homolog of NCBI NO: 7716470 NR Description: hypersensitive-induced response protein [Zea mays]
ARDHYLEHPNRKPPFHASTVHPHARSQVATRGRRGRHRTVALLPPPARDRGGIPRSHAAPGRGPSEMVNTFFLFCGCVDQASVAVVEKWGRFLRLADPGLHFFNPLAGECVAGSLTTRVQSLDVRVETKTKDNVFVQLICTIQYRVVKENADDAFYELQNPQQQIQAYVFDVVRAIVPRMNLDDLFEQKNDVAKAVLEELEKVMADYGYSIEHILMVDIIPDAAVRKAMNDINAAQRLQLASVYKGEAEKILMVKKAEAEAEAKYLSGVGIAKQRQAITDGLRENILNFSHSVSGTSAKEVMDLIMVTQYFDTIKELGDGSKNTTIFIPHGPGHVKDISEQIRDGMMQASSSNV

SEQ ID NO: 9107 - protein, 288 aa, Zea mays subsp. mays
  peptide (1)..(288): Ceres Seq. ID no. 12413178
  misc_feature (9)..(184): Pfam Name: SPFH domain / Band 7 family Pfam Description: SPFH domain / Band 7 family
  misc_feature (1)..(288): Homolog of NCBI NO: 23345038 NR Description: hypersensitive-induced reaction protein 4
  misc_feature (1)..(286): Homolog of NCBI NO: 15242123 NR Description: putative protein; protein id: At5g51570.1 thaliana] >gi|9758199|dbj|BAB08673.1|
  misc_feature (7)..(288): Homolog of NCBI NO: 15241939 NR Description: putative protein; protein id: At5g62740.1, by cDNA: 2641., supported by cDNA: gi_17065547 [Arabidopsis
  misc_feature (10)..(288): Homolog of NCBI NO: 3928150 NR Description: hypothetical protein [Cicer arietinum]
  misc_feature (12)..(283): Homolog of NCBI NO: 14150732 NR Description: hypersensitive-induced response protein [Oryza
  misc_feature (12)..(284): Homolog of NCBI NO: 7716466 NR Description: hypersensitive-induced response protein [Zea mays]
  misc_feature (12)..(284): Homolog of NCBI NO: 7716468 NR Description: hypersensitive-induced response protein [Zea mays]
  misc_feature (12)..(282): Homolog of NCBI NO: 23345042 NR Description: hypersensitive-induced reaction protein 1
  misc_feature (7)..(287): Homolog of NCBI NO: 18395770 NR Description: expressed protein; protein id: At3g01290.1, by cDNA: 108086. [Arabidopsis thaliana] unknown protein [Arabidopsis thaliana]
  misc_feature (9)..(285): Homolog of NCBI NO: 7716470 NR Description: hypersensitive-induced response protein [Zea mays]
MVNTFFLFCGCVDQASVAVVEKWGRFLRLADPGLHFFNPLAGECVAGSLTTRVQSLDVRVETKTKDNVFVQLICTIQYRVVKENADDAFYELQNPQQQIQAYVFDVVRAIVPRMNLDDLFEQKNDVAKAVLEELEKVMADYGYSIEHILMVDIIPDAAVRKAMNDINAAQRLQLASVYKGEAEKILMVKKAEAEAEAKYLSGVGIAKQRQAITDGLRENILNFSHSVSGTSAKEVMDLIMVTQYFDTIKELGDGSKNTTIFIPHGPGHVKDISEQIRDGMMQASSSNV

SEQ ID NO: 9108 - DNA, 852 bp, Zea mays subsp. mays
  misc_feature (1)..(852): Ceres Seq. ID no. 12383140
  misc_feature: MA Experiment ID: 108523 Result: Down-regulated in Transcription
  misc_feature: MA Experiment 108523 PARAMETER Experiment Name: Zm_42deg_Heat_P Parameter: Age (day) Value: 8
  misc_feature: MA Experiment 108523 PARAMETER Experiment Name: Zm_42deg_Heat_P Parameter: Organism Value: Zea mays
  misc_feature: MA Experiment 108523 PARAMETER Experiment Name: Zm_42deg_Heat_P Parameter: Plant Line Value: 35A19
  misc_feature: MA Experiment 108523 PARAMETER Experiment Name: Zm_42deg_Heat_P Parameter: Temperature (deg C) Value: 42 vs. 22
  misc_feature: MA Experiment 108523 PARAMETER Experiment Name: Zm_42deg_Heat_P Parameter: Timepoint (hr) Value: 6
  misc_feature: MA Experiment 108523 PARAMETER Experiment Name: Zm_42deg_Heat_P Parameter: Tissue Value: Aerial
  misc_feature: MA Experiment ID: 108527 Result: Down-regulated in Transcription
  misc_feature: MA Experiment 108527 PARAMETER Experiment Name: Zm_5mM_NO_P Parameter: Age (day) Value: 8
  misc_feature: MA Experiment 108527 PARAMETER Experiment Name: Zm_5mM_NO_P Parameter: Organism Value: Zea mays
  misc_feature: MA Experiment 108527 PARAMETER Experiment Name: Zm_5mM_NO_P Parameter: Plant Line Value: 35A19
  misc_feature: MA Experiment 108527 PARAMETER Experiment Name: Zm_5mM_NO_P Parameter: Timepoint (hr) Value: 6
  misc_feature: MA Experiment 108527 PARAMETER Experiment Name: Zm_5mM_NO_P Parameter: Tissue Value: Aerial
  misc_feature: MA Experiment 108527 PARAMETER Experiment Name: Zm_5mM_NO_P Parameter: Treatment Value: 5mM NO vs. No Treatment
  misc_feature: MA Experiment ID: 108528 Result: Up-regulated in Transcription
  misc_feature: MA Experiment 108528 PARAMETER Experiment Name: Zm_Imbibed_Seeds_P Parameter: Age (day) Value: 5 vs. 2
  misc_feature: MA Experiment 108528 PARAMETER Experiment Name: Zm_Imbibed_Seeds_P Parameter: Organism Value: Zea mays
  misc_feature: MA Experiment 108528 PARAMETER Experiment Name: Zm_Imbibed_Seeds_P Parameter: Plant Line Value: 35A19
  misc_feature: MA Experiment 108528 PARAMETER Experiment Name: Zm_Imbibed_Seeds_P Parameter: Tissue Value: Aerial vs. Embryo
  misc_feature: MA Experiment ID: 108529 Result: Up-regulated in Transcription
  misc_feature: MA Experiment 108529 PARAMETER Experiment Name: Zm_Imbibed_Seeds_P Parameter: Age (day) Value: 5 vs. 2
  misc_feature: MA Experiment 108529 PARAMETER Experiment Name: Zm_Imbibed_Seeds_P Parameter: Organism Value: Zea mays
  misc_feature: MA Experiment 108529 PARAMETER Experiment Name: Zm_Imbibed_Seeds_P Parameter: Plant Line Value: 35A19
  misc_feature: MA Experiment 108529 PARAMETER Experiment Name: Zm_Imbibed_Seeds_P Parameter: Tissue Value: Roots vs. Embryo
  misc_feature: MA Experiment ID: 108530 Result: Up-regulated in Transcription
  misc_feature: MA Experiment 108530 PARAMETER Experiment Name: Zm_Imbibed_Seeds_P Parameter: Age (day) Value: 6 vs. 2
  misc_feature: MA Experiment 108530 PARAMETER Experiment Name: Zm_Imbibed_Seeds_P Parameter: Organism Value: Zea mays
  misc_feature: MA Experiment 108530 PARAMETER Experiment Name: Zm_Imbibed_Seeds_P Parameter: Plant Line Value: 35A19
  misc_feature: MA Experiment 108530 PARAMETER Experiment Name: Zm_Imbibed_Seeds_P Parameter: Tissue Value: Aerial vs. Embryo
  misc_feature: MA Experiment ID: 108534 Result: Down-regulated in Transcription
  misc_feature: MA Experiment 108534 PARAMETER Experiment Name: Zm_4deg_Cold_P Parameter: Age (hr) Value: 8
  misc_feature: MA Experiment 108534 PARAMETER Experiment Name: Zm_4deg_Cold_P Parameter: Organism Value: Zea mays
  misc_feature: MA Experiment 108534 PARAMETER Experiment Name: Zm_4deg_Cold_P Parameter: Plant Line Value: 35A19
  misc_feature: MA Experiment 108534 PARAMETER Experiment Name: Zm_4deg_Cold_P Parameter: Temperature (deg C) Value: 4 vs. 22
  misc_feature: MA Experiment 108534 PARAMETER Experiment Name: Zm_4deg_Cold_P Parameter: Timepoint (hr) Value: 6
  misc_feature: MA Experiment 108534 PARAMETER Experiment Name: Zm_4deg_Cold_P Parameter: Tissue Value: Aerial
  misc_feature: MA Experiment ID: 108535 Result: Down-regulated in Transcription
  misc_feature: MA Experiment 108535 PARAMETER Experiment Name: Zm_Meristem_P Parameter: Age (day) Value: 8
  misc_feature: MA Experiment 108535 PARAMETER Experiment Name: Zm_Meristem_P Parameter: Organism Value: Zea mays
  misc_feature: MA Experiment 108535 PARAMETER Experiment Name: Zm_Meristem_P Parameter: Plant Line Value: 35A19
  misc_feature: MA Experiment 108535 PARAMETER Experiment Name: Zm_Meristem_P Parameter: Tissue Value: Root Meristem vs. Above Root Meristem
  misc_feature: MA Experiment ID: 108556 Result: Up-regulated in Transcription
  misc_feature: MA Experiment 108556 PARAMETER Experiment Name: Zm_Drought_P Parameter: Age (day) Value: 9
  misc_feature: MA Experiment 108556 PARAMETER Experiment Name: Zm_Drought_P Parameter: Organism Value: Zea mays
  misc_feature: MA Experiment 108556 PARAMETER Experiment Name: Zm_Drought_P Parameter: Plant Line Value: 35A19
  misc_feature: MA Experiment 108556 PARAMETER Experiment Name: Zm_Drought_P Parameter: Timepoint (hr) Value: 24
  misc_feature: MA Experiment 108556 PARAMETER Experiment Name: Zm_Drought_P Parameter: Tissue Value: Aerial
  misc_feature: MA Experiment 108556 PARAMETER Experiment Name: Zm_Drought_P Parameter: Treatment Value: Drought vs. No Drought
  misc_feature: MA Experiment ID: 108559 Result: Down-regulated in Transcription
  misc_feature: MA Experiment 108559 PARAMETER Experiment Name: Zm_5mM_NO_P Parameter: Age (day) Value: 8
  misc_feature: MA Experiment 108559 PARAMETER Experiment Name: Zm_5mM_NO_P Parameter: Organism Value: Zea mays
  misc_feature: MA Experiment 108559 PARAMETER Experiment Name: Zm_5mM_NO_P Parameter: Plant Line Value: 35A19
  misc_feature: MA Experiment 108559 PARAMETER Experiment Name: Zm_5mM_NO_P Parameter: Timepoint (hr) Value: 12
  misc_feature: MA Experiment 108559 PARAMETER Experiment Name: Zm_5mM_NO_P Parameter: Tissue Value: Aerial
  misc_feature: MA Experiment 108559 PARAMETER Experiment Name: Zm_5mM_NO_P Parameter: Treatment Value: 5mM NO vs. No Treatment
  misc_feature: MA Experiment ID: 108689 Result: Up-regulated in Transcription
  misc_feature: MA Experiment 108689 PARAMETER Experiment Name: Zm_Drought_Roots_P Parameter: Age (day) Value: 9
  misc_feature: MA Experiment 108689 PARAMETER Experiment Name: Zm_Drought_Roots_P Parameter: Organism Value: Zea mays
  misc_feature: MA Experiment 108689 PARAMETER Experiment Name: Zm_Drought_Roots_P Parameter: Plant Line Value: 35A19
  misc_feature: MA Experiment 108689 PARAMETER Experiment Name: Zm_Drought_Roots_P Parameter: Timepoint (hr) Value: 24
  misc_feature: MA Experiment 108689 PARAMETER Experiment Name: Zm_Drought_Roots_P Parameter: Tissue Value: Roots
  misc_feature: MA Experiment 108689 PARAMETER Experiment Name: Zm_Drought_Roots_P Parameter: Treatment Value: Drought vs. No Drought
  misc_feature: MA Experiment ID: 20000488 Result: Down-regulated in Transcription
  misc_feature: MA Experiment 20000488 PARAMETER Experiment Name: Zm_50mM_NH4NO3_L_to_H_P Parameter: Organism Value: Zea mays
  misc_feature: MA Experiment 20000488 PARAMETER Experiment Name: Zm_50mM_NH4NO3_L_to_H_P Parameter: Timepoint (hr) Value: 8
  misc_feature: MA Experiment 20000488 PARAMETER Experiment Name: Zm_50mM_NH4NO3_L_to_H_P Parameter: Tissue Value: Leaves
  misc_feature: MA Experiment 20000488 PARAMETER Experiment Name: Zm_50mM_NH4NO3_L_to_H_P Parameter: Treatment Value: 50mM NH4NO3 vs. 100mM Mannitol
  misc_feature: MA Experiment ID: 20000492 Result: Down-regulated in Transcription
  misc_feature: MA Experiment 20000492 PARAMETER Experiment Name: Zm_Hybrid_Seed_Dev_P Parameter: DAP Value: 12
  misc_feature: MA Experiment 20000492 PARAMETER Experiment Name: Zm_Hybrid_Seed_Dev_P Parameter: Organism Value: Zea mays
  misc_feature: MA Experiment 20000492 PARAMETER Experiment Name: Zm_Hybrid_Seed_Dev_P Parameter: Plant Line Value: 35A19
  misc_feature: MA Experiment 20000492 PARAMETER Experiment Name: Zm_Hybrid_Seed_Dev_P Parameter: Tissue Value: Fert Kernel vs. Unfert Floret
  misc_feature: MA Experiment ID: 20001606 Result: Down-regulated in Transcription
  misc_feature: MA Experiment 20001606 PARAMETER Experiment Name: Zm_50ppm_KNO3_L-to-H_P Parameter: Age (day) Value: 19
  misc_feature: MA Experiment 20001606 PARAMETER Experiment Name: Zm_50ppm_KNO3_L-to-H_P Parameter: Organism Value: Zea mays
  misc_feature: MA Experiment 20001606 PARAMETER Experiment Name: Zm_50ppm_KNO3_L-to-H_P Parameter: Plant Line Value: 35A19
  misc_feature: MA Experiment 20001606 PARAMETER Experiment Name: Zm_50ppm_KNO3_L-to-H_P Parameter: Timepoint (hr) Value: 8
  misc_feature: MA Experiment 20001606 PARAMETER Experiment Name: Zm_50ppm_KNO3_L-to-H_P Parameter: Tissue Value: Shoots
  misc_feature: MA Experiment 20001606 PARAMETER Experiment Name: Zm_50ppm_KNO3_L-to-H_P Parameter: Treatment Value: 50ppm KNO3 vs. 50ppm KCl
  misc_feature: MA Experiment ID: 20001608 Result: Down-regulated in Transcription
  misc_feature: MA Experiment 20001608 PARAMETER Experiment Name: Zm_50ppm_KNO3_L-to-H_P Parameter: Age (day) Value: 21
  misc_feature: MA Experiment 20001608 PARAMETER Experiment Name: Zm_50ppm_KNO3_L-to-H_P Parameter: Organism Value: Zea mays
  misc_feature: MA Experiment 20001608 PARAMETER Experiment Name: Zm_50ppm_KNO3_L-to-H_P Parameter: Plant Line Value: 35A19
  misc_feature: MA Experiment 20001608 PARAMETER Experiment Name: Zm_50ppm_KNO3_L-to-H_P Parameter: Timepoint (hr) Value: 48
  misc_feature: MA Experiment 20001608 PARAMETER Experiment Name: Zm_50ppm_KNO3_L-to-H_P Parameter: Tissue Value: Shoots
  misc_feature: MA Experiment 20001608 PARAMETER Experiment Name: Zm_50ppm_KNO3_L-to-H_P Parameter: Treatment Value: 50ppm KNO3 vs. 50ppm KCl
agactccagactccagagagatagagcctagagcacagctagccccgccagccatggccgccgcggcgcgcgcgatcatctgcgagctggcgccgcagaaggtgtcgtcgacagcgccgaagaaacgtgacgccgggacgaaggtggtgctccagccccggctctgcacgctgcggtcgtacggcgccggcagcggcgttgtgacgcggaggattctggccggggaggaggacgggagcggggccgccgactcgggcggctcctcggcgtcaccgttcttcgcctcgctcgccaactacatcgagagctcccgcaagagccaggacttcgagaccatctccggccgcctcgccatggtggcgttcgcggcggcagtggccgtggagacgacgacgggcagctcgctgttcaagaagctggacacggtggagatcgaggaggccgcgggggtgtgtgtggcggtggtcgcctgcgccgcggcgttcgcgtgggcgtccagagcgcgcaacaggatcggccagatgttcacgctggggtgcaacgccttcgtcgactccctcatcgacaacatcgtcgaggcgctcttctccgagggcgagctgcaggactggtccgatgacatataaacaaatatgcacatatgtatacgcatatagagaataatagtatttgtagatagagagcacgtatatacagtgtatatatagtaagtagatgaaactgtcaagtgaggtccaagctgtcaagtatatatagcaagtagatgaagctgtcaagtatttatagtaactagttgaagataaagagaaggaatctcatagaatcaatactagaaattacaagtaacccttt

SEQ ID NO: 9109 - protein, 207 aa, Zea mays subsp. mays
  peptide (1)..(207): Ceres Seq. ID no. 12383141
  misc_feature (10)..(207): Homolog of NCBI NO: 18399845 NR Description: expressed protein; protein id: At2g21970.1, by cDNA: 10672., supported by cDNA: gi_7384979 [Arabidopsis >gi|25371323|pir||D84607 hypothetical protein At2g21970
  misc_feature (47)..(207): Homolog of NCBI NO: 14423380 NR Description: Unknown protein [Arabidopsis thaliana]
  misc_feature (18)..(65): Homolog of NCBI NO: 38345615 NR Description: OSJNBb0003B01.7 [Oryza sativa (japonica
TPDSREIEPRAQLAPPAMAAAARAIICELAPQKVSSTAPKKRDAGTKVVLQPRLCTLRSYGAGSGVVTRRILAGEEDGSGAADSGGSSASPFFASLANYIESSRKSQDFETISGRLAMVAFAAAVAVETTTGSSLFKKLDTVEIEEAAGVCVAVVACAAAFAWASRARNRIGQMFTLGCNAFVDSLIDNIVEALFSEGELQDWSDDI

SEQ ID NO: 9110 - protein, 190 aa, Zea mays subsp. mays
  peptide (1)..(190): Ceres Seq. ID no. 12383142
  misc_feature (1)..(48): Homolog of NCBI NO: 38345615 NR Description: OSJNBb0003B01.7 [Oryza sativa (japonica
  misc_feature (1)..(190): Homolog of NCBI NO: 18399845 NR Description: expressed protein; protein id: At2g21970.1, by cDNA: 10672., supported by cDNA: gi_7384979 [Arabidopsis >gi|25371323|pir||D84607 hypothetical protein At2g21970
  misc_feature (30)..(190): Homolog of NCBI NO: 14423380 NR Description: Unknown protein [Arabidopsis thaliana]
MAAAARAIICELAPQKVSSTAPKKRDAGTKVVLQPRLCTLRSYGAGSGVVTRRILAGEEDGSGAADSGGSSASPFFASLANYIESSRKSQDFETISGRLAMVAFAAAVAVETTTGSSLFKKLDTVEIEEAAGVCVAVVACAAAFAWASRARNRIGQMFTLGCNAFVDSLIDNIVEALFSEGELQDWSDDI

SEQ ID NO: 9111 - DNA, 984 bp, Zea mays subsp. mays
  misc_feature (1)..(984): Ceres Seq. ID no. 12368845
  misc_feature: MA Experiment ID: 108689 Result: Down-regulated in Transcription
  misc_feature: MA Experiment 108689 PARAMETER Experiment Name: Zm_Drought_Roots_P Parameter: Age (day) Value: 9
  misc_feature: MA Experiment 108689 PARAMETER Experiment Name: Zm_Drought_Roots_P Parameter: Organism Value: Zea mays
  misc_feature: MA Experiment 108689 PARAMETER Experiment Name: Zm_Drought_Roots_P Parameter: Plant Line Value: 35A19
  misc_feature: MA Experiment 108689 PARAMETER Experiment Name: Zm_Drought_Roots_P Parameter: Timepoint (hr) Value: 24
  misc_feature: MA Experiment 108689 PARAMETER Experiment Name: Zm_Drought_Roots_P Parameter: Tissue Value: Roots
  misc_feature: MA Experiment 108689 PARAMETER Experiment Name: Zm_Drought_Roots_P Parameter: Treatment Value: Drought vs. No Drought
gcacgagaccattacctagaacatcctaatcgaaaaatgatcggtgcaaggcgagacgttggcgacataggaacaggaggcgaagaggcgacggtgcatagctccaatggtgaccctccccgtcgccttctcactatacttctggttgccccttcggtgagggttgccattttatccattactttcttagtggctaccaggccgtttaaaaatgaccaacctcctggaagtatgatgatggatgggtcacctacacccgtcgtgaagactcgcttgtgcaacaagtacaacactgcaaagggatgcaaatgggggacaaatgctactttgcacatggtgaaagggagcttggcaagtctatgatggacaactatatgccaccccaatcgaaccaagacccactggttattttgcgcctccacctatggcctaccctggcttggccactctaactagatttggcgcttctgccacaaccaagatcggtgttgatacgtcctttgcaggtagcatcattgggagggggtggagctaacacaaagcaaatatctttcgtcataggagccaagctggccatctgagaccatgaatcatacaccagcttgaaaacattgaacttgagggcacctttgatcagatcaggaacgctagcgctatggtcagtgagttgattgtcagtgttagtggcattgctcccccacaggtcaagaacccaactgatagaactcatcatggtggaggcataggaagcaacttcaagaccaaaatgtgtgagaacttgtcggtaaatgccactttgcacacagtgagagtgagctgcgcatgcctactgctgcttgagatccatgccttgtttcatacctcgtagtcattagtcaatgtaactctaaacttggccaccgatgatggatttgctggcttctttaggcctacgctactgaattggtgtcttcagtcctactattgaatttactgacttctttc

SEQ ID NO: 9112 - protein, 120 aa, Zea mays subsp. mays
  peptide (1)..(120): Ceres Seq. ID no. 12368846
  misc_feature (88)..(115): Pfam Name: Zinc finger C-x8-C-x5-C-x3-H type (and similar) Pfam Description: Zinc finger C-x8-C-x5-C-x3-H type (and similar)
  misc_feature (23)..(115): Homolog of NCBI NO: 5441893 NR Description: ESTs C99174(E10437),D22295(C10709) correspond to region of the predicted gene.~Similar to Arabidopsis thaliana BAC
ARDHYLEHPNRKMIGARRDVGDIGTGGEEATVHSSNGDPPRRLLTILLVAPSVRVAILSITFLVATRPFKNDQPPGSMMMDGSPTPVVKTRLCNKYNTAKGCKWGTNATLHMVKGSLASL

SEQ ID NO: 9113 - protein, 108 aa, Zea mays subsp. mays
  peptide (1)..(108): Ceres Seq. ID no. 12368847
  misc_feature (76)..(103): Pfam Name: Zinc finger C-x8-C-x5-C-x3-H type (and similar) Pfam Description: Zinc finger C-x8-C-x5-C-x3-H type (and similar)
  misc_feature (11)..(103): Homolog of NCBI NO: 5441893 NR Description: ESTs C99174(E10437),D22295(C10709) correspond to region of the predicted gene.~Similar to Arabidopsis thaliana BAC
MIGARRDVGDIGTGGEEATVHSSNGDPPRRLLTILLVAPSVRVAILSITFLVATRPFKNDQPPGSMMMDGSPTPVVKTRLCNKYNTAKGCKWGTNATLHMVKGSLASL

SEQ ID NO: 9114 - protein, 70 aa, Zea mays subsp. mays
  peptide (1)..(70): Ceres Seq. ID no. 12368848
  misc_feature (1)..(43): Homolog of NCBI NO: 5441893 NR Description: ESTs C99174(E10437),D22295(C10709) correspond to region of the predicted gene.~Similar to Arabidopsis thaliana BAC
  misc_feature (1)..(43): Homolog of NCBI NO: 15240145 NR Description: KH domain/zinc finger protein; protein id: supported by cDNA: 27460. [Arabidopsis thaliana] contains similarity to unknown
  misc_feature (1)..(43): Homolog of NCBI NO: 21555233 NR Description: unknown [Arabidopsis thaliana]
  misc_feature (1)..(43): Homolog of NCBI NO: 9294110 NR Description: contains similarity to unknown
  misc_feature (1)..(43): Homolog of NCBI NO: 18399496 NR Description: KH domain/zinc finger protein; protein id: [Arabidopsis thaliana] >gi|12322002|gb|AAG51040.1|AC069473_2
MVSELIVSVSGIAPPQVKNPTDRTHHGGGIGSNFKTKMCENLSVNATLHTVRVSCACLLLLEIHALFHTS

SEQ ID NO: 9115 - DNA, 1317 bp, Zea mays subsp. mays
  misc_feature (1)..(1317): Ceres Seq. ID no. 12462269
  misc_feature: MA Experiment ID: 108504 Result: Down-regulated in Transcription
  misc_feature: MA Experiment 108504 PARAMETER Experiment Name: Zm_Drought_P Parameter: Age (day) Value: 8
  misc_feature: MA Experiment 108504 PARAMETER Experiment Name: Zm_Drought_P Parameter: Organism Value: Zea mays
  misc_feature: MA Experiment 108504 PARAMETER Experiment Name: Zm_Drought_P Parameter: Plant Line Value: 35A19
  misc_feature: MA Experiment 108504 PARAMETER Experiment Name: Zm_Drought_P Parameter: Timepoint (hr) Value: 12
  misc_feature: MA Experiment 108504 PARAMETER Experiment Name: Zm_Drought_P Parameter: Tissue Value: Aerial
  misc_feature: MA Experiment 108504 PARAMETER Experiment Name: Zm_Drought_P Parameter: Treatment Value: Drought vs. No Drought
  misc_feature: MA Experiment ID: 108522 Result: Up-regulated in Transcription
  misc_feature: MA Experiment 108522 PARAMETER Experiment Name: Zm_42deg_Heat_P Parameter: Age (day) Value: 8
  misc_feature: MA Experiment 108522 PARAMETER Experiment Name: Zm_42deg_Heat_P Parameter: Organism Value: Zea mays
  misc_feature: MA Experiment 108522 PARAMETER Experiment Name: Zm_42deg_Heat_P Parameter: Plant Line Value: 35A19
  misc_feature: MA Experiment 108522 PARAMETER Experiment Name: Zm_42deg_Heat_P Parameter: Temperature (deg C) Value: 42 vs. 22
  misc_feature: MA Experiment 108522 PARAMETER Experiment Name: Zm_42deg_Heat_P Parameter: Timepoint (hr) Value: 1
  misc_feature: MA Experiment 108522 PARAMETER Experiment Name: Zm_42deg_Heat_P Parameter: Tissue Value: Aerial
  misc_feature: MA Experiment ID: 108527 Result: Up-regulated in Transcription
  misc_feature: MA Experiment 108527 PARAMETER Experiment Name: Zm_5mM_NO_P Parameter: Age (day) Value: 8
  misc_feature: MA Experiment 108527 PARAMETER Experiment Name: Zm_5mM_NO_P Parameter: Organism Value: Zea mays
  misc_feature: MA Experiment 108527 PARAMETER Experiment Name: Zm_5mM_NO_P Parameter: Plant Line Value: 35A19
  misc_feature: MA Experiment 108527 PARAMETER Experiment Name: Zm_5mM_NO_P Parameter: Timepoint (hr) Value: 6
  misc_feature: MA Experiment 108527 PARAMETER Experiment Name: Zm_5mM_NO_P Parameter: Tissue Value: Aerial
  misc_feature: MA Experiment 108527 PARAMETER Experiment Name: Zm_5mM_NO_P Parameter: Treatment Value: 5mM NO vs. No Treatment
  misc_feature: MA Experiment ID: 108528 Result: Down-regulated in Transcription
  misc_feature: MA Experiment 108528 PARAMETER Experiment Name: Zm_Imbibed_Seeds_P Parameter: Age (day) Value: 5 vs. 2
  misc_feature: MA Experiment 108528 PARAMETER Experiment Name: Zm_Imbibed_Seeds_P Parameter: Organism Value: Zea mays
  misc_feature: MA Experiment 108528 PARAMETER Experiment Name: Zm_Imbibed_Seeds_P Parameter: Plant Line Value: 35A19
  misc_feature: MA Experiment 108528 PARAMETER Experiment Name: Zm_Imbibed_Seeds_P Parameter: Tissue Value: Aerial vs. Embryo
  misc_feature: MA Experiment ID: 108530 Result: Down-regulated in Transcription
  misc_feature: MA Experiment 108530 PARAMETER Experiment Name: Zm_Imbibed_Seeds_P Parameter: Age (day) Value: 6 vs. 2
  misc_feature: MA Experiment 108530 PARAMETER Experiment Name: Zm_Imbibed_Seeds_P Parameter: Organism Value: Zea mays
  misc_feature: MA Experiment 108530 PARAMETER Experiment Name: Zm_Imbibed_Seeds_P Parameter: Plant Line Value: 35A19
  misc_feature: MA Experiment 108530 PARAMETER Experiment Name: Zm_Imbibed_Seeds_P Parameter: Tissue Value: Aerial vs. Embryo
  misc_feature: MA Experiment ID: 108543 Result: Up-regulated in Transcription
  misc_feature: MA Experiment ID: 108545 Result: Down-regulated in Transcription
  misc_feature: MA Experiment 108545 PARAMETER Experiment Name: Zm_Imbibed_Seeds_P Parameter: Age (day) Value: 3 vs. 2
  misc_feature: MA Experiment 108545 PARAMETER Experiment Name: Zm_Imbibed_Seeds_P Parameter: Organism Value: Zea mays
  misc_feature: MA Experiment 108545 PARAMETER Experiment Name: Zm_Imbibed_Seeds_P Parameter: Plant Line Value: 35A19
  misc_feature: MA Experiment 108545 PARAMETER Experiment Name: Zm_Imbibed_Seeds_P Parameter: Tissue Value: Aerial vs. Embryo
  misc_feature: MA Experiment ID: 108547 Result: Down-regulated in Transcription
  misc_feature: MA Experiment 108547 PARAMETER Experiment Name: Zm_Imbibed_Seeds_P Parameter: Age (day) Value: 4 vs. 2
  misc_feature: MA Experiment 108547 PARAMETER Experiment Name: Zm_Imbibed_Seeds_P Parameter: Organism Value: Zea mays
  misc_feature: MA Experiment 108547 PARAMETER Experiment Name: Zm_Imbibed_Seeds_P Parameter: Plant Line Value: 35A19
  misc_feature: MA Experiment 108547 PARAMETER Experiment Name: Zm_Imbibed_Seeds_P Parameter: Tissue Value: Aerial vs. Embryo
  misc_feature: MA Experiment ID: 108556 Result: Down-regulated in Transcription
  misc_feature: MA Experiment 108556 PARAMETER Experiment Name: Zm_Drought_P Parameter: Age (day) Value: 9
  misc_feature: MA Experiment 108556 PARAMETER Experiment Name: Zm_Drought_P Parameter: Organism Value: Zea mays
  misc_feature: MA Experiment 108556 PARAMETER Experiment Name: Zm_Drought_P Parameter: Plant Line Value: 35A19
  misc_feature: MA Experiment 108556 PARAMETER Experiment Name: Zm_Drought_P Parameter: Timepoint (hr) Value: 24
  misc_feature: MA Experiment 108556 PARAMETER Experiment Name: Zm_Drought_P Parameter: Tissue Value: Aerial
  misc_feature: MA Experiment 108556 PARAMETER Experiment Name: Zm_Drought_P Parameter: Treatment Value: Drought vs. No Drought
  misc_feature: MA Experiment ID: 108559 Result: Up-regulated in Transcription
  misc_feature: MA Experiment 108559 PARAMETER Experiment Name: Zm_5mM_NO_P Parameter: Age (day) Value: 8
  misc_feature: MA Experiment 108559 PARAMETER Experiment Name: Zm_5mM_NO_P Parameter: Organism Value: Zea mays
  misc_feature: MA Experiment 108559 PARAMETER Experiment Name: Zm_5mM_NO_P Parameter: Plant Line Value: 35A19
  misc_feature: MA Experiment 108559 PARAMETER Experiment Name: Zm_5mM_NO_P Parameter: Timepoint (hr) Value: 12
  misc_feature: MA Experiment 108559 PARAMETER Experiment Name: Zm_5mM_NO_P Parameter: Tissue Value: Aerial
  misc_feature: MA Experiment 108559 PARAMETER Experiment Name: Zm_5mM_NO_P Parameter: Treatment Value: 5mM NO vs. No Treatment
  misc_feature: MA Experiment ID: 108597 Result: Down-regulated in Transcription
  misc_feature: MA Experiment 108597 PARAMETER Experiment Name: Zm_100uM_ABA_P Parameter: Age (day) Value: 9
  misc_feature: MA Experiment 108597 PARAMETER Experiment Name: Zm_100uM_ABA_P Parameter: Organism Value: Zea mays
  misc_feature: MA Experiment 108597 PARAMETER Experiment Name: Zm_100uM_ABA_P Parameter: Plant Line Value: 35A19
  misc_feature: MA Experiment 108597 PARAMETER Experiment Name: Zm_100uM_ABA_P Parameter: Timepoint (hr) Value: 24
  misc_feature: MA Experiment 108597 PARAMETER Experiment Name: Zm_100uM_ABA_P Parameter: Tissue Value: Aerial
  misc_feature: MA Experiment 108597 PARAMETER Experiment Name: Zm_100uM_ABA_P Parameter: Treatment Value: 100uM ABA vs. No Treatment
  misc_feature: MA Experiment ID: 20000478 Result: Down-regulated in Transcription
  misc_feature: MA Experiment 20000478 PARAMETER Experiment Name: Zm_5mM_SA_P Parameter: Age (day) Value: 11
  misc_feature: MA Experiment 20000478 PARAMETER Experiment Name: Zm_5mM_SA_P Parameter: Organism Value: Zea mays
  misc_feature: MA Experiment 20000478 PARAMETER Experiment Name: Zm_5mM_SA_P Parameter: Plant Line Value: 35A19
  misc_feature: MA Experiment 20000478 PARAMETER Experiment Name: Zm_5mM_SA_P Parameter: Timepoint (hr) Value: 72
  misc_feature: MA Experiment 20000478 PARAMETER Experiment Name: Zm_5mM_SA_P Parameter: Tissue Value: Aerial
  misc_feature: MA Experiment 20000478 PARAMETER Experiment Name: Zm_5mM_SA_P Parameter: Treatment Value: 5mM SA vs. No Treatment
  misc_feature: MA Experiment ID: 20000480 Result: Down-regulated in Transcription
  misc_feature: MA Experiment 20000480 PARAMETER Experiment Name: Zm_Drought_P Parameter: Age (day) Value: 11
  misc_feature: MA Experiment 20000480 PARAMETER Experiment Name: Zm_Drought_P Parameter: Organism Value: Zea mays
  misc_feature: MA Experiment 20000480 PARAMETER Experiment Name: Zm_Drought_P Parameter: Plant Line Value: 35A19
  misc_feature: MA Experiment 20000480 PARAMETER Experiment Name: Zm_Drought_P Parameter: Timepoint (hr) Value: 72
  misc_feature: MA Experiment 20000480 PARAMETER Experiment Name: Zm_Drought_P Parameter: Tissue Value: Aerial
  misc_feature: MA Experiment 20000480 PARAMETER Experiment Name: Zm_Drought_P Parameter: Treatment Value: Drought vs. No Drought
  misc_feature: MA Experiment ID: 20000492 Result: Up-regulated in Transcription
  misc_feature: MA Experiment 20000492 PARAMETER Experiment Name: Zm_Hybrid_Seed_Dev_P Parameter: DAP Value: 12
  misc_feature: MA Experiment 20000492 PARAMETER Experiment Name: Zm_Hybrid_Seed_Dev_P Parameter: Organism Value: Zea mays
  misc_feature: MA Experiment 20000492 PARAMETER Experiment Name: Zm_Hybrid_Seed_Dev_P Parameter: Plant Line Value: 35A19
  misc_feature: MA Experiment 20000492 PARAMETER Experiment Name: Zm_Hybrid_Seed_Dev_P Parameter: Tissue Value: Fert Kernel vs. Unfert Floret
atatatggccccttcgatccattggccgcatcacactcgccaaccccgtcatcgatctcgtttcaaatccatccatcctcgtttcctccgtcccgcagcatctcaaccccatggccaagatcaagatcgggatcaatgggttcggcaggatcggaaggctggtggccagggtggccctgcagagtgacgatgtcgagctcgtcgccgtgaacgaccccttcatcagcaccgactacatgacctacatgttcaagtacgacactgtgcacggacagtggaagcaccatgaagtcaaggtgaaggactccaaaacccttctctttggtgagaaggaggttgctgtgtttggctgcaggaaccctgaggagatcccgtggggttcggttggtgctgaatatgttgttgagtctactggtgttttcactgaccaagagaaggctgcagctcacttgaagggtggtgccaagaaggttgtcatttctgctcctagcaaggatgcccccatgttcgttgttggtgtcaacgagaaggagtacaagtctgacatcaacattgtctctaatgctagctgcacaaccaactgccttgctccgcttgctaaggtcatcaatgacaagttcggtattgttgagggtctgatgaccactgttcatgccatcactgctacccagaagactgttgatgggccctcatctaaggactggaggggtggaagggctgctagtttcaacatcattcccagcagcactggagctgctaaggctgttggcaaagtgcttcctgtcctcaatggaaagttgactggaatgtctttccgtgtcccaactgtcgatgtttctgttgttgatctaactgttaggcttgagaagtctgccacctatgatgagatcaaggctgcggtcaaggccgaggcagagggtagcctcaagggcattctgggttatgtcgaggaggaccttgtttccaccgatttccagggtgacagcaggtctagcatctttgatgcgaaggctggcattgccttgaacggcaactttgtgaagcttgtgtcctggtacgacaacgagtggggatacagcacccgagtggtcgacctgatccgccacatgaacagcaccaagtaaatgaacaaactgatgaaagcatgcaaagagtgatgaaagcatgcaaagagagttgtgtttcttccccggaagtgcttccgagaataaatttttcttatctgattgtctaaaacctataacgggtgtatcgtagtggttgttatcgttaaacttttaacggtcattctatttcaaaagttttgcattttgactc

SEQ ID NO: 9116 - protein, 373 aa, Zea mays subsp. mays
  peptide (1)..(373): Ceres Seq. ID no. 12462270
  misc_feature (191)..(352): Pfam Name: Glyceraldehyde 3-phosphate dehydrogenase, Pfam Description: Glyceraldehyde 3-phosphate dehydrogenase,
  misc_feature (37)..(373): Homolog of NCBI NO: 6166167 NR Description: Glyceraldehyde 3-phosphate dehydrogenase,
  misc_feature (37)..(372): Homolog of NCBI NO: 7431535 NR Description: glyceraldehyde-3-phosphate dehydrogenase
  misc_feature (79)..(373): Homolog of NCBI NO: 29150193 NR Description: putative glyceraldehydes 3-phosphate
  misc_feature (37)..(83): Homolog of NCBI NO: 29150193 NR Description: putative glyceraldehydes 3-phosphate
  misc_feature (37)..(373): Homolog of NCBI NO: 462141 NR Description: Glyceraldehyde 3-phosphate dehydrogenase (GAPDH)
  misc_feature (37)..(373): Homolog of NCBI NO: 4539543 NR Description: glyceraldehyde-3-phosphate dehydrogenase
  misc_feature (39)..(373): Homolog of NCBI NO: 462140 NR Description: Glyceraldehyde 3-phosphate dehydrogenase,
  misc_feature (37)..(373): Homolog of NCBI NO: 120666 NR Description: Glyceraldehyde 3-phosphate dehydrogenase,
  misc_feature (37)..(373): Homolog of NCBI NO: 120680 NR Description: Glyceraldehyde 3-phosphate dehydrogenase,
  misc_feature (37)..(373): Homolog of NCBI NO: 6016075 NR Description: Glyceraldehyde 3-phosphate dehydrogenase,
IWPLRSIGRITLANPVIDLVSNPSILVSSVPQHLNPMAKIKIGINGFGRIGRLVARVALQSDDVELVAVNDPFISTDYMTYMFKYDTVHGQWKHHEVKVKDSKTLLFGEKEVAVFGCRNPEEIPWGSVGAEYVVESTGVFTDQEKAAAHLKGGAKKVVISAPSKDAPMFVVGVNEKEYKSDINIVSNASCTTNCLAPLAKVINDKFGIVEGLMTTVHAITATQKTVDGPSSKDWRGGRAASFNIIPSSTGAAKAVGKVLPVLNGKLTGMSFRVPTVDVSVVDLTVRLEKSATYDEIKAAVKAEAEGSLKGILGYVEEDLVSTDFQGDSRSSIFDAKAGIALNGNFVKLVSWYDNEWGYSTRVVDLIRHMNSTK

SEQ ID NO: 9117 - protein, 337 aa, Zea mays subsp. mays
  peptide (1)..(337): Ceres Seq. ID no. 12462271
  misc_feature (155)..(316): Pfam Name: Glyceraldehyde 3-phosphate dehydrogenase, Pfam Description: Glyceraldehyde 3-phosphate dehydrogenase,
  misc_feature (1)..(337): Homolog of NCBI NO: 6166167 NR Description: Glyceraldehyde 3-phosphate dehydrogenase,
  misc_feature (1)..(336): Homolog of NCBI NO: 7431535 NR Description: glyceraldehyde-3-phosphate dehydrogenase
  misc_feature (43)..(337): Homolog of NCBI NO: 29150193 NR Description: putative glyceraldehydes 3-phosphate
  misc_feature (1)..(47): Homolog of NCBI NO: 29150193 NR Description: putative glyceraldehydes 3-phosphate
  misc_feature (1)..(337): Homolog of NCBI NO: 462141 NR Description: Glyceraldehyde 3-phosphate dehydrogenase (GAPDH)
  misc_feature (1)..(337): Homolog of NCBI NO: 4539543 NR Description: glyceraldehyde-3-phosphate dehydrogenase
  misc_feature (3)..(337): Homolog of NCBI NO: 462140 NR Description: Glyceraldehyde 3-phosphate dehydrogenase,
  misc_feature (1)..(337): Homolog of NCBI NO: 120666 NR Description: Glyceraldehyde 3-phosphate dehydrogenase,
  misc_feature (1)..(337): Homolog of NCBI NO: 120680 NR Description: Glyceraldehyde 3-phosphate dehydrogenase,
  misc_feature (1)..(337): Homolog of NCBI NO: 6016075 NR Description: Glyceraldehyde 3-phosphate dehydrogenase,
MAKIKIGINGFGRIGRLVARVALQSDDVELVAVNDPFISTDYMTYMFKYDTVHGQWKHHEVKVKDSKTLLFGEKEVAVFGCRNPEEIPWGSVGAEYVVESTGVFTDQEKAAAHLKGGAKKVVISAPSKDAPMFVVGVNEKEYKSDINIVSNASCTTNCLAPLAKVINDKFGIVEGLMTTVHAITATQKTVDGPSSKDWRGGRAASFNIIPSSTGAAKAVGKVLPVLNGKLTGMSFRVPTVDVSVVDLTVRLEKSATYDEIKAAVKAEAEGSLKGILGYVEEDLVSTDFQGDSRSSIFDAKAGIALNGNFVKLVSWYDNEWGYSTRVVDLIRHMNSTK

SEQ ID NO: 9118 - protein, 295 aa, Zea mays subsp. mays
  peptide (1)..(295): Ceres Seq. ID no. 12462272
  misc_feature (113)..(274): Pfam Name: Glyceraldehyde 3-phosphate dehydrogenase, Pfam Description: Glyceraldehyde 3-phosphate dehydrogenase,
  misc_feature (1)..(295): Homolog of NCBI NO: 6166167 NR Description: Glyceraldehyde 3-phosphate dehydrogenase,
  misc_feature (1)..(294): Homolog of NCBI NO: 7431535 NR Description: glyceraldehyde-3-phosphate dehydrogenase
  misc_feature (1)..(295): Homolog of NCBI NO: 29150193 NR Description: putative glyceraldehydes 3-phosphate
  misc_feature (1)..(295): Homolog of NCBI NO: 462141 NR Description: Glyceraldehyde 3-phosphate dehydrogenase (GAPDH)
  misc_feature (1)..(295): Homolog of NCBI NO: 4539543 NR Description: glyceraldehyde-3-phosphate dehydrogenase
  misc_feature (1)..(295): Homolog of NCBI NO: 462140 NR Description: Glyceraldehyde 3-phosphate dehydrogenase,
  misc_feature (1)..(295): Homolog of NCBI NO: 120666 NR Description: Glyceraldehyde 3-phosphate dehydrogenase,
  misc_feature (1)..(295): Homolog of NCBI NO: 120680 NR Description: Glyceraldehyde 3-phosphate dehydrogenase,
  misc_feature (1)..(295): Homolog of NCBI NO: 6016075 NR Description: Glyceraldehyde 3-phosphate dehydrogenase,
  misc_feature (1)..(294): Homolog of NCBI NO: 3023812 NR Description: Glyceraldehyde 3-phosphate dehydrogenase,
MTYMFKYDTVHGQWKHHEVKVKDSKTLLFGEKEVAVFGCRNPEEIPWGSVGAEYVVESTGVFTDQEKAAAHLKGGAKKVVISAPSKDAPMFVVGVNEKEYKSDINIVSNASCTTNCLAPLAKVINDKFGIVEGLMTTVHAITATQKTVDGPSSKDWRGGRAASFNIIPSSTGAAKAVGKVLPVLNGKLTGMSFRVPTVDVSVVDLTVRLEKSATYDEIKAAVKAEAEGSLKGILGYVEEDLVSTDFQGDSRSSIFDAKAGIALNGNFVKLVSWYDNEWGYSTRVVDLIRHMNSTK

SEQ ID NO: 9119 - DNA, 1600 bp, Zea mays subsp. mays
  misc_feature (1)..(1600): Ceres Seq. ID no. 12352722
  misc_feature: MA Experiment ID: 108527 Result: Up-regulated in Transcription
  misc_feature: MA Experiment 108527 PARAMETER Experiment Name: Zm_5mM_NO_P Parameter: Age (day) Value: 8
  misc_feature: MA Experiment 108527 PARAMETER Experiment Name: Zm_5mM_NO_P Parameter: Organism Value: Zea mays
  misc_feature: MA Experiment 108527 PARAMETER Experiment Name: Zm_5mM_NO_P Parameter: Plant Line Value: 35A19
  misc_feature: MA Experiment 108527 PARAMETER Experiment Name: Zm_5mM_NO_P Parameter: Timepoint (hr) Value: 6
  misc_feature: MA Experiment 108527 PARAMETER Experiment Name: Zm_5mM_NO_P Parameter: Tissue Value: Aerial
  misc_feature: MA Experiment 108527 PARAMETER Experiment Name: Zm_5mM_NO_P Parameter: Treatment Value: 5mM NO vs. No Treatment
  misc_feature: MA Experiment ID: 108535 Result: Down-regulated in Transcription
  misc_feature: MA Experiment 108535 PARAMETER Experiment Name: Zm_Meristem_P Parameter: Age (day) Value: 8
  misc_feature: MA Experiment 108535 PARAMETER Experiment Name: Zm_Meristem_P Parameter: Organism Value: Zea mays
  misc_feature: MA Experiment 108535 PARAMETER Experiment Name: Zm_Meristem_P Parameter: Plant Line Value: 35A19
  misc_feature: MA Experiment 108535 PARAMETER Experiment Name: Zm_Meristem_P Parameter: Tissue Value: Root Meristem vs. Above Root Meristem
  misc_feature: MA Experiment ID: 108543 Result: Down-regulated in Transcription
  misc_feature: MA Experiment ID: 108559 Result: Up-regulated in Transcription
  misc_feature: MA Experiment 108559 PARAMETER Experiment Name: Zm_5mM_NO_P Parameter: Age (day) Value: 8
  misc_feature: MA Experiment 108559 PARAMETER Experiment Name: Zm_5mM_NO_P Parameter: Organism Value: Zea mays
  misc_feature: MA Experiment 108559 PARAMETER Experiment Name: Zm_5mM_NO_P Parameter: Plant Line Value: 35A19
  misc_feature: MA Experiment 108559 PARAMETER Experiment Name: Zm_5mM_NO_P Parameter: Timepoint (hr) Value: 12
  misc_feature: MA Experiment 108559 PARAMETER Experiment Name: Zm_5mM_NO_P Parameter: Tissue Value: Aerial
  misc_feature: MA Experiment 108559 PARAMETER Experiment Name: Zm_5mM_NO_P Parameter: Treatment Value: 5mM NO vs. No Treatment
  misc_feature: MA Experiment ID: 20000108 Result: Down-regulated in Transcription
  misc_feature: MA Experiment 20000108 PARAMETER Experiment Name: Zm_Root-Tips_P Parameter: Age (day) Value: 12
  misc_feature: MA Experiment 20000108 PARAMETER Experiment Name: Zm_Root-Tips_P Parameter: Organism Value: Zea mays
  misc_feature: MA Experiment 20000108 PARAMETER Experiment Name: Zm_Root-Tips_P Parameter: Tissue Value: Root tips vs. Root mid region    35
  misc_feature: MA Experiment 20000108 PARAMETER Experiment Name: Zm_Root-Tips_P Parameter: Tissue Value: Root tips vs. Root mid region   Sequence Listing-Misc Features (4)
  misc_feature: MA Experiment ID: 20000534 Result: Down-regulated in Transcription
  misc_feature: MA Experiment 20000534 PARAMETER Experiment Name: Zm_Hybrid_Pollen_P Parameter: Age (day) Value: 8
  misc_feature: MA Experiment 20000534 PARAMETER Experiment Name: Zm_Hybrid_Pollen_P Parameter: Organism Value: Zea mays
  misc_feature: MA Experiment 20000534 PARAMETER Experiment Name: Zm_Hybrid_Pollen_P Parameter: Plant Line Value: 35A19
  misc_feature: MA Experiment 20000534 PARAMETER Experiment Name: Zm_Hybrid_Pollen_P Parameter: Tissue Value: Pollen vs. Aerial
  misc_feature: MA Experiment ID: 20000535 Result: Down-regulated in Transcription
  misc_feature: MA Experiment 20000535 PARAMETER Experiment Name: Zm_Hybrid_Seed_Dev_P Parameter: DAP Value: 30 vs. 12
  misc_feature: MA Experiment 20000535 PARAMETER Experiment Name: Zm_Hybrid_Seed_Dev_P Parameter: Organism Value: Zea mays
  misc_feature: MA Experiment 20000535 PARAMETER Experiment Name: Zm_Hybrid_Seed_Dev_P Parameter: Plant Line Value: 35A19
  misc_feature: MA Experiment 20000535 PARAMETER Experiment Name: Zm_Hybrid_Seed_Dev_P Parameter: Tissue Value: Embryo vs. Unfert Floret
  misc_feature: MA Experiment ID: 20000626 Result: Up-regulated in Transcription
  misc_feature: MA Experiment 20000626 PARAMETER Experiment Name: Zm_Herbicide-Treatments_P Parameter: Timepoint (hr) Value: 12
  misc_feature: MA Experiment 20000626 PARAMETER Experiment Name: Zm_Herbicide-Treatments_P Parameter: Tissue Value: Aerial
  misc_feature: MA Experiment 20000626 PARAMETER Experiment Name: Zm_Herbicide-Treatments_P Parameter: Treatment Value: Roundup vs. No Treatment
  misc_feature: MA Experiment ID: 20001610 Result: Up-regulated in Transcription
  misc_feature: MA Experiment 20001610 PARAMETER Experiment Name: Zm_50ppm_KNO3_L-to-H_P Parameter: Age (day) Value: 19
  misc_feature: MA Experiment 20001610 PARAMETER Experiment Name: Zm_50ppm_KNO3_L-to-H_P Parameter: Organism Value: Zea mays
  misc_feature: MA Experiment 20001610 PARAMETER Experiment Name: Zm_50ppm_KNO3_L-to-H_P Parameter: Plant Line Value: 35A19
  misc_feature: MA Experiment 20001610 PARAMETER Experiment Name: Zm_50ppm_KNO3_L-to-H_P Parameter: Timepoint (hr) Value: 2
  misc_feature: MA Experiment 20001610 PARAMETER Experiment Name: Zm_50ppm_KNO3_L-to-H_P Parameter: Tissue Value: Roots
  misc_feature: MA Experiment 20001610 PARAMETER Experiment Name: Zm_50ppm_KNO3_L-to-H_P Parameter: Treatment Value: 50ppm KNO3 vs. 50ppm KCl
atcctcaacctcatccgcccccgcccgcaccccgcaggcaccatcaccaaaaaggtccccgccttcttcttcttcttcttcttctcctctgcccctgcttgtcgtttgctcgtgctcccccaccccctttctgattcagcaagggttccttccgcggcgcggcgcgtcgccatgggcaactgctggggcgccaagatcagctccgacagcccgtcccgcggcgcctcatccccgtcagggacggcgtccaagttggcgagcaggaacggggcggcggcagccctgagcgggtgcagcagccacgcgtcgtccgcgtccatgctgccgacgccccgcagcgaggacgagatcctggagtcggccaacgtcagggccttcagcttcaacgagctgaggaccgccaccaggaacttcaggccggacagcgtgctgggcgagggcgggttcggatccgtcttcaagggctgggtcgacgagaagacgctcgccccggctaggcccggcacggggatggtcattgccgtcaagaagctcaaccaggatggataccagggccacaaggagtggctgactgaagtgaactaccttggaacgctgtcgcacccctaccttgtgaagctcgttggctactgcctcgaggacgaacagcgcctcctcgtctacgagttcatgccacgcgggagtctggagaaccatctgttcaggaggagctcctatttccagcctctgtcctggaacctacggatgaagattgcgctcggagcagctaaaggcctcgcgtatctccacagcgacgaggctaaagtcatctaccgtgacttcaagacatctaatgtccttctagatgcgaacttcaatgcaaagctctctgatttcgggctggcgaaggatggtccgaccggcgacaagagccatgtctccactagggtgatggggactcacgggtatgcagctccagaataccttgcgacaggtcatctgaccaccaagagcgacgtgtacagctttggggtggtgctcctagagatgctgtcagggcggcgggcgctggacaagaaccgcccgaacggggagcacaacctggtggagtgggctaggccatacctgagaagcaagcggcgcatatttcgcatcctggacccacggctgggcgggcagtactcccttgccagggcgcagaaggctgcggcgctcgccctgcaatgcctctcggtggagtccaggcacaggcccagcatggacgaggtggtcacagcgttagagcagctccaggacaccaaagaaggaggtaaccatcacctacagaagaggccaggcagccggagcttggataacaatggcggcaaagcggcagggaaggggaagcctgctcctcatgtaaaaccagtttgagtgattggattttatatgccagagtatctctctttttttttcccatccatttgtaggtgtaggtaatatagtagggttcttagagggatttgtaaagaggcaggcagagttctggatgttttctgtctattatgtagttttttttacatcttcaagtctctgtaaagtacgctatgtaaatacataatgacatccagttcggagtgcg

SEQ ID NO: 9120 - protein, 463 aa, Zea mays subsp. mays
  peptide (1)..(463): Ceres Seq. ID no. 12352723
  misc_feature (58)..(457): Homolog of NCBI NO: 14719339 NR Description: putative protein kinase [Oryza sativa]
  misc_feature (57)..(462): Homolog of NCBI NO: 34906046 NR Description: putative serine/threonine-specific protein kinase
  misc_feature (58)..(458): Homolog of NCBI NO: 34897424 NR Description: putative protein kinase [Oryza sativa (japonica group)] >gi|27545044|gb|AAO18450.1| putative protein kinase
  misc_feature (58)..(454): Homolog of NCBI NO: 15222437 NR Description: protein kinase APK1A; protein id: At1g07570.1
  misc_feature (58)..(325): Homolog of NCBI NO: 8778537 NR Description: F22G5.5 [Arabidopsis thaliana]
  misc_feature (325)..(454): Homolog of NCBI NO: 8778537 NR Description: F22G5.5 [Arabidopsis thaliana]
  misc_feature (58)..(442): Homolog of NCBI NO: 15227001 NR Description: putative protein kinase; protein id: At2g28930.1
  misc_feature (58)..(445): Homolog of NCBI NO: 15241749 NR Description: serine/threonine-specific protein kinase NAK; id: At5g02290.1, supported by cDNA: 27477., supported by cDNA:
  misc_feature (58)..(445): Homolog of NCBI NO: 166809 NR Description: protein kinase
  misc_feature (58)..(462): Homolog of NCBI NO: 15227042 NR Description: putative protein kinase; protein id: At2g02800.1, by cDNA: gi_16226562, supported by cDNA: gi_2852448 [Arabidopsis
ILNLIRPRPHPAGTITKKVPAFFFFFFFSSAPACRLLVLPHPLSDSARVPSAARRVAMGNCWGAKISSDSPSRGASSPSGTASKLASRNGAAAALSGCSSHASSASMLPTPRSEDEILESANVRAFSFNELRTATRNFRPDSVLGEGGFGSVFKGWVDEKTLAPARPGTGMVIAVKKLNQDGYQGHKEWLTEVNYLGTLSHPYLVKLVGYCLEDEQRLLVYEFMPRGSLENHLFRRSSYFQPLSWNLRMKIALGAAKGLAYLHSDEAKVIYRDFKTSNVLLDANFNAKLSDFGLAKDGPTGDKSHVSTRVMGTHGYAAPEYLATGHLTTKSDVYSFGVVLLEMLSGRRALDKNRPNGEHNLVEWARPYLRSKRRIFRILDPRLGGQYSLARAQKAAALALQCLSVESRHRPSMDEVVTALEQLQDTKEGGNHHLQKRPGSRSLDNNGGKAAGKGKPAPHVKPV

SEQ ID NO: 9121 - protein, 406 aa, Zea mays subsp. mays
  peptide (1)..(406): Ceres Seq. ID no. 12352724
  misc_feature (1)..(400): Homolog of NCBI NO: 14719339 NR Description: putative protein kinase [Oryza sativa]
  misc_feature (1)..(405): Homolog of NCBI NO: 34906046 NR Description: putative serine/threonine-specific protein kinase
  misc_feature (1)..(401): Homolog of NCBI NO: 34897424 NR Description: putative protein kinase [Oryza sativa (japonica group)] >gi|27545044|gb|AAO18450.1| putative protein kinase
  misc_feature (1)..(397): Homolog of NCBI NO: 15222437 NR Description: protein kinase APK1A; protein id: At1g07570.1
  misc_feature (1)..(268): Homolog of NCBI NO: 8778537 NR Description: F22G5.5 [Arabidopsis thaliana]
  misc_feature (268)..(397): Homolog of NCBI NO: 8778537 NR Description: F22G5.5 [Arabidopsis thaliana]
  misc_feature (1)..(385): Homolog of NCBI NO: 15227001 NR Description: putative protein kinase; protein id: At2g28930.1
  misc_feature (1)..(388): Homolog of NCBI NO: 15241749 NR Description: serine/threonine-specific protein kinase NAK; id: At5g02290.1, supported by cDNA: 27477., supported by cDNA:
  misc_feature (1)..(388): Homolog of NCBI NO: 166809 NR Description: protein kinase
  misc_feature (1)..(405): Homolog of NCBI NO: 15227042 NR Description: putative protein kinase; protein id: At2g02800.1, by cDNA: gi_16226562, supported by cDNA: gi_2852448 [Arabidopsis
MGNCWGAKISSDSPSRGASSPSGTASKLASRNGAAAALSGCSSHASSASMLPTPRSEDEILESANVRAFSFNELRTATRNFRPDSVLGEGGFGSVFKGWVDEKTLAPARPGTGMVIAVKKLNQDGYQGHKEWLTEVNYLGTLSHPYLVKLVGYCLEDEQRLLVYEFMPRGSLENHLFRRSSYFQPLSWNLRMKIALGAAKGLAYLHSDEAKVIYRDFKTSNVLLDANFNAKLSDFGLAKDGPTGDKSHVSTRVMGTHGYAAPEYLATGHLTTKSDVYSFGVVLLEMLSGRRALDKNRPNGEHNLVEWARPYLRSKRRIFRILDPRLGGQYSLARAQKAAALALQCLSVESRHRPSMDEVVTALEQLQDTKEGGNHHLQKRPGSRSLDNNGGKAAGKGKPAPHVKPV

SEQ ID NO: 9122 - protein, 357 aa, Zea mays subsp. mays
  peptide (1)..(357): Ceres Seq. ID no. 12352725
  misc_feature (1)..(351): Homolog of NCBI NO: 14719339 NR Description: putative protein kinase [Oryza sativa]
  misc_feature (1)..(356): Homolog of NCBI NO: 34906046 NR Description: putative serine/threonine-specific protein kinase
  misc_feature (1)..(352): Homolog of NCBI NO: 34897424 NR Description: putative protein kinase [Oryza sativa (japonica group)] >gi|27545044|gb|AAO18450.1| putative protein kinase
  misc_feature (1)..(348): Homolog of NCBI NO: 15222437 NR Description: protein kinase APK1A; protein id: At1g07570.1
  misc_feature (1)..(219): Homolog of NCBI NO: 8778537 NR Description: F22G5.5 [Arabidopsis thaliana]
  misc_feature (219)..(348): Homolog of NCBI NO: 8778537 NR Description: F22G5.5 [Arabidopsis thaliana]
  misc_feature (1)..(336): Homolog of NCBI NO: 15227001 NR Description: putative protein kinase; protein id: At2g28930.1
  misc_feature (1)..(339): Homolog of NCBI NO: 15241749 NR Description: serine/threonine-specific protein kinase NAK; id: At5g02290.1, supported by cDNA: 27477., supported by cDNA:
  misc_feature (1)..(339): Homolog of NCBI NO: 166809 NR Description: protein kinase
  misc_feature (1)..(356): Homolog of NCBI NO: 15227042 NR Description: putative protein kinase; protein id: At2g02800.1, by cDNA: gi_16226562, supported by cDNA: gi_2852448 [Arabidopsis
MLPTPRSEDEILESANVRAFSFNELRTATRNFRPDSVLGEGGFGSVFKGWVDEKTLAPARPGTGMVIAVKKLNQDGYQGHKEWLTEVNYLGTLSHPYLVKLVGYCLEDEQRLLVYEFMPRGSLENHLFRRSSYFQPLSWNLRMKIALGAAKGLAYLHSDEAKVIYRDFKTSNVLLDANFNAKLSDFGLAKDGPTGDKSHVSTRVMGTHGYAAPEYLATGHLTTKSDVYSFGVVLLEMLSGRRALDKNRPNGEHNLVEWARPYLRSKRRIFRILDPRLGGQYSLARAQKAAALALQCLSVESRHRPSMDEVVTALEQLQDTKEGGNHHLQKRPGSRSLDNNGGKAAGKGKPAPHVKPV

SEQ ID NO: 9123 - DNA, 1580 bp, Zea mays subsp. mays
  misc_feature (1)..(1580): Ceres Seq. ID no. 12379450
  misc_feature: MA Experiment ID: 108535 Result: Down-regulated in Transcription
  misc_feature: MA Experiment 108535 PARAMETER Experiment Name: Zm_Meristem_P Parameter: Age (day) Value: 8
  misc_feature: MA Experiment 108535 PARAMETER Experiment Name: Zm_Meristem_P Parameter: Organism Value: Zea mays
  misc_feature: MA Experiment 108535 PARAMETER Experiment Name: Zm_Meristem_P Parameter: Plant Line Value: 35A19
  misc_feature: MA Experiment 108535 PARAMETER Experiment Name: Zm_Meristem_P Parameter: Tissue Value: Root Meristem vs. Above Root Meristem
  misc_feature: MA Experiment ID: 108543 Result: Up-regulated in Transcription
  misc_feature: MA Experiment ID: 108546 Result: Up-regulated in Transcription
  misc_feature: MA Experiment 108546 PARAMETER Experiment Name: Zm_Imbibed_Seeds_P Parameter: Age (day) Value: 3 vs. 2
  misc_feature: MA Experiment 108546 PARAMETER Experiment Name: Zm_Imbibed_Seeds_P Parameter: Organism Value: Zea mays
  misc_feature: MA Experiment 108546 PARAMETER Experiment Name: Zm_Imbibed_Seeds_P Parameter: Plant Line Value: 35A19
  misc_feature: MA Experiment 108546 PARAMETER Experiment Name: Zm_Imbibed_Seeds_P Parameter: Tissue Value: Roots vs. Embryo
  misc_feature: MA Experiment ID: 108556 Result: Down-regulated in Transcription
  misc_feature: MA Experiment 108556 PARAMETER Experiment Name: Zm_Drought_P Parameter: Age (day) Value: 9
  misc_feature: MA Experiment 108556 PARAMETER Experiment Name: Zm_Drought_P Parameter: Organism Value: Zea mays
  misc_feature: MA Experiment 108556 PARAMETER Experiment Name: Zm_Drought_P Parameter: Plant Line Value: 35A19
  misc_feature: MA Experiment 108556 PARAMETER Experiment Name: Zm_Drought_P Parameter: Timepoint (hr) Value: 24
  misc_feature: MA Experiment 108556 PARAMETER Experiment Name: Zm_Drought_P Parameter: Tissue Value: Aerial
  misc_feature: MA Experiment 108556 PARAMETER Experiment Name: Zm_Drought_P Parameter: Treatment Value: Drought vs. No Drought
  misc_feature: MA Experiment ID: 20000478 Result: Down-regulated in Transcription
  misc_feature: MA Experiment 20000478 PARAMETER Experiment Name: Zm_5mM_SA_P Parameter: Age (day) Value: 11
  misc_feature: MA Experiment 20000478 PARAMETER Experiment Name: Zm_5mM_SA_P Parameter: Organism Value: Zea mays
  misc_feature: MA Experiment 20000478 PARAMETER Experiment Name: Zm_5mM_SA_P Parameter: Plant Line Value: 35A19
  misc_feature: MA Experiment 20000478 PARAMETER Experiment Name: Zm_5mM_SA_P Parameter: Timepoint (hr) Value: 72
  misc_feature: MA Experiment 20000478 PARAMETER Experiment Name: Zm_5mM_SA_P Parameter: Tissue Value: Aerial
  misc_feature: MA Experiment 20000478 PARAMETER Experiment Name: Zm_5mM_SA_P Parameter: Treatment Value: 5mM SA vs. No Treatment
  misc_feature: MA Experiment ID: 20000479 Result: Down-regulated in Transcription
  misc_feature: MA Experiment 20000479 PARAMETER Experiment Name: Zm_Drought_P Parameter: Age (day) Value: 10
  misc_feature: MA Experiment 20000479 PARAMETER Experiment Name: Zm_Drought_P Parameter: Organism Value: Zea mays
  misc_feature: MA Experiment 20000479 PARAMETER Experiment Name: Zm_Drought_P Parameter: Plant Line Value: 35A19
  misc_feature: MA Experiment 20000479 PARAMETER Experiment Name: Zm_Drought_P Parameter: Timepoint (hr) Value: 48
  misc_feature: MA Experiment 20000479 PARAMETER Experiment Name: Zm_Drought_P Parameter: Tissue Value: Aerial
  misc_feature: MA Experiment 20000479 PARAMETER Experiment Name: Zm_Drought_P Parameter: Treatment Value: Drought vs. No Drought
  misc_feature: MA Experiment ID: 20000480 Result: Down-regulated in Transcription
  misc_feature: MA Experiment 20000480 PARAMETER Experiment Name: Zm_Drought_P Parameter: Age (day) Value: 11
  misc_feature: MA Experiment 20000480 PARAMETER Experiment Name: Zm_Drought_P Parameter: Organism Value: Zea mays
  misc_feature: MA Experiment 20000480 PARAMETER Experiment Name: Zm_Drought_P Parameter: Plant Line Value: 35A19
  misc_feature: MA Experiment 20000480 PARAMETER Experiment Name: Zm_Drought_P Parameter: Timepoint (hr) Value: 72
  misc_feature: MA Experiment 20000480 PARAMETER Experiment Name: Zm_Drought_P Parameter: Tissue Value: Aerial
  misc_feature: MA Experiment 20000480 PARAMETER Experiment Name: Zm_Drought_P Parameter: Treatment Value: Drought vs. No Drought
  misc_feature: MA Experiment ID: 20000535 Result: Down-regulated in Transcription
  misc_feature: MA Experiment 20000535 PARAMETER Experiment Name: Zm_Hybrid_Seed_Dev_P Parameter: DAP Value: 30 vs. 12
  misc_feature: MA Experiment 20000535 PARAMETER Experiment Name: Zm_Hybrid_Seed_Dev_P Parameter: Organism Value: Zea mays
  misc_feature: MA Experiment 20000535 PARAMETER Experiment Name: Zm_Hybrid_Seed_Dev_P Parameter: Plant Line Value: 35A19
  misc_feature: MA Experiment 20000535 PARAMETER Experiment Name: Zm_Hybrid_Seed_Dev_P Parameter: Tissue Value: Embryo vs. Unfert Floret
agttgtatcctctcctcctccttggacctcccatcttccttcctcttcgttcgtttctccaaccgaagcttaccggcattcgctcctggttttccggccaagaaccgatttttttccggttccggcgtagcagcaggcagctagcttgccaccagctgattcattgcctctactagtgtttttcctgagctcggtggggtgatcggtcgatcggccgccgctcgagacacgtacgtacgtacgtacccgatcgagggtcgctccaagatgatgatgagcgggaaccggaagcagagggtggcattgtcgccggtgaaggaggccgccgcggtgcccaaggaggaggtgtgggaggtccggcccggcgggatgctggtgcagaagcggagccccgacgcggacccgccgcctgtgcccaccatccgcgtcaaggtcaagttcaacggcgtctaccacgagatctacatcaattcccaggcatccttcggcgagctgaagaagctggtgtcggagaagacgggcctgcacccggacgaccagaaggtggtgtacaaggacaaggagagggactccaaggcgttcctggacatggccggcgtcaaggaccggtccaagatggtgatgctggaggaccccgccgccaaggccaagcgcctcctggaggagcgccggaccagcaaggccgagcgcgccgccaaggccatcgcccgcgtcgccctcgacgtcgacaagctcgccaccaaggtgtcggcgctggagacggtcgcgagcaagggcggcgaggtcgtggacgcggacgtggcgacgctgacggaggcgctgatgcgcgagctggtggagctggactccatcgccgccgacggggacgccaaggcgcagcggcgggcgcaggagaggcgtgtgcagaggcacgtggagacgctggacgccatccgcgccaagaacaaggcggcggcgcccagcagcaacaggacacggcggccagcgcacctcccgccgcgcccgcagaaccagcagcggcggcagttccagccgccggcgcccaccacggcgacggcgccggcgccgcagacccagacggcggcgagctgggactcgttcgacctcctgtcgtcggtgccgccgtcgacgtcggcggcggccccagtgacgagcaccaccacgccgtccccgcggttggagtgggagctcttctagagggctccaggcgccagcctgcctgtctgggccgtgggcccctggccccctctcctcccgccacatgtgtgcttgtccatcggctcggctcggctgggccggtaccttggccatggtgtgcatgtttgtcaatcgccattctttgctttcccgtcccttttgttctttcgttctttcttttttttcctcatgtcctttttattaagtatattgtgcatgatctccatgcatccactaaaaaaggggcaacaactgcagtagctagctagtagtagtgaacacaacagaagcgtgcgtccatggtgtctgtcgtcgtctgcaaataagtggtgtggccttgttgcaaccgtaccgatgatgatgaaggatttttttttttggcc

SEQ ID NO: 9124 - protein, 309 aa, Zea mays subsp. mays
  peptide (1)..(309): Ceres Seq. ID no. 12379451
  misc_feature (50)..(123): Pfam Name: Ubiquitin family Pfam Description: Ubiquitin family
  misc_feature (22)..(309): Homolog of NCBI NO: 25553557 NR Description: OSJNBa0038F22.4 [Oryza sativa (japonica
  misc_feature (22)..(309): Homolog of NCBI NO: 34898024 NR Description: ESTs AU082174(S13676),AU032395(R3986) correspond a region of the predicted gene.~Similar to Arabidopsis thaliana
  misc_feature (29)..(265): Homolog of NCBI NO: 15242267 NR Description: putative protein; protein id: At5g52060.1 thaliana] >gi|10177741|dbj|BAB11054.1| contains similarity to
  misc_feature (28)..(309): Homolog of NCBI NO: 21537107 NR Description: unknown [Arabidopsis thaliana]
  misc_feature (8)..(309): Homolog of NCBI NO: 15240726 NR Description: putative protein; protein id: At5g07220.1, by cDNA: 12022., supported by cDNA: gi_16226482 [Arabidopsis
  misc_feature (29)..(309): Homolog of NCBI NO: 30697630 NR Description: BAG domain containing protein [Arabidopsis
  misc_feature (29)..(309): Homolog of NCBI NO: 21553443 NR Description: unknown [Arabidopsis thaliana]
  misc_feature (29)..(309): Homolog of NCBI NO: 30697627 NR Description: BAG domain containing protein [Arabidopsis
  misc_feature (29)..(309): Homolog of NCBI NO: 10176928 NR Description: contains similarity to unknown
  misc_feature (14)..(226): Homolog of NCBI NO: 38344334 NR Description: OSJNBa0058K23.16 [Oryza sativa (japonica
MMMSGNRKQRVALSPVKEAAAVPKEEVWEVRPGGMLVQKRSPDADPPPVPTIRVKVKFNGVYHEIYINSQASFGELKKLVSEKTGLHPDDQKVVYKDKERDSKAFLDMAGVKDRSKMVMLEDPAAKAKRLLEERRTSKAERAAKAIARVALDVDKLATKVSALETVASKGGEVVDADVATLTEALMRELVELDSIAADGDAKAQRRAQERRVQRHVETLDAIRAKNKAAAPSSNRTRRPAHLPPRPQNQQRRQFQPPAPTTATAPAPQTQTAASWDSFDLLSSVPPSTSAAAPVTSTTTPSPRLEWELF

SEQ ID NO: 9125 - protein, 308 aa, Zea mays subsp. mays
  peptide (1)..(308): Ceres Seq. ID no. 12379452
  misc_feature (49)..(122): Pfam Name: Ubiquitin family Pfam Description: Ubiquitin family
  misc_feature (21)..(308): Homolog of NCBI NO: 25553557 NR Description: OSJNBa0038F22.4 [Oryza sativa (japonica
  misc_feature (21)..(308): Homolog of NCBI NO: 34898024 NR Description: ESTs AU082174(S13676),AU032395(R3986) correspond a region of the predicted gene.~Similar to Arabidopsis thaliana
  misc_feature (28)..(264): Homolog of NCBI NO: 15242267 NR Description: putative protein; protein id: At5g52060.1 thaliana] >gi|10177741|dbj|BAB11054.1| contains similarity to
  misc_feature (27)..(308): Homolog of NCBI NO: 21537107 NR Description: unknown [Arabidopsis thaliana]
  misc_feature (7)..(308): Homolog of NCBI NO: 15240726 NR Description: putative protein; protein id: At5g07220.1, by cDNA: 12022., supported by cDNA: gi_16226482 [Arabidopsis
  misc_feature (28)..(308): Homolog of NCBI NO: 30697630 NR Description: BAG domain containing protein [Arabidopsis
  misc_feature (28)..(308): Homolog of NCBI NO: 21553443 NR Description: unknown [Arabidopsis thaliana]
  misc_feature (28)..(308): Homolog of NCBI NO: 30697627 NR Description: BAG domain containing protein [Arabidopsis
  misc_feature (28)..(308): Homolog of NCBI NO: 10176928 NR Description: contains similarity to unknown
  misc_feature (13)..(225): Homolog of NCBI NO: 38344334 NR Description: OSJNBa0058K23.16 [Oryza sativa (japonica
MMSGNRKQRVALSPVKEAAAVPKEEVWEVRPGGMLVQKRSPDADPPPVPTIRVKVKFNGVYHEIYINSQASFGELKKLVSEKTGLHPDDQKVVYKDKERDSKAFLDMAGVKDRSKMVMLEDPAAKAKRLLEERRTSKAERAAKAIARVALDVDKLATKVSALETVASKGGEVVDADVATLTEALMRELVELDSIAADGDAKAQRRAQERRVQRHVETLDAIRAKNKAAAPSSNRTRRPAHLPPRPQNQQRRQFQPPAPTTATAPAPQTQTAASWDSFDLLSSVPPSTSAAAPVTSTTTPSPRLEWELF

SEQ ID NO: 9126 - protein, 307 aa, Zea mays subsp. mays
  peptide (1)..(307): Ceres Seq. ID no. 12379453
  misc_feature (48)..(121): Pfam Name: Ubiquitin family Pfam Description: Ubiquitin family
  misc_feature (20)..(307): Homolog of NCBI NO: 25553557 NR Description: OSJNBa0038F22.4 [Oryza sativa (japonica
  misc_feature (20)..(307): Homolog of NCBI NO: 34898024 NR Description: ESTs AU082174(S13676),AU032395(R3986) correspond a region of the predicted gene.~Similar to Arabidopsis thaliana
  misc_feature (27)..(263): Homolog of NCBI NO: 15242267 NR Description: putative protein; protein id: At5g52060.1 thaliana] >gi|10177741|dbj|BAB11054.1| contains similarity to
  misc_feature (26)..(307): Homolog of NCBI NO: 21537107 NR Description: unknown [Arabidopsis thaliana]
  misc_feature (6)..(307): Homolog of NCBI NO: 15240726 NR Description: putative protein; protein id: At5g07220.1, by cDNA: 12022., supported by cDNA: gi_16226482 [Arabidopsis
  misc_feature (27)..(307): Homolog of NCBI NO: 30697630 NR Description: BAG domain containing protein [Arabidopsis
  misc_feature (27)..(307): Homolog of NCBI NO: 21553443 NR Description: unknown [Arabidopsis thaliana]
  misc_feature (27)..(307): Homolog of NCBI NO: 30697627 NR Description: BAG domain containing protein [Arabidopsis
  misc_feature (27)..(307): Homolog of NCBI NO: 10176928 NR Description: contains similarity to unknown
  misc_feature (12)..(224): Homolog of NCBI NO: 38344334 NR Description: OSJNBa0058K23.16 [Oryza sativa (japonica
MSGNRKQRVALSPVKEAAAVPKEEVWEVRPGGMLVQKRSPDADPPPVPTIRVKVKFNGVYHEIYINSQASFGELKKLVSEKTGLHPDDQKVVYKDKERDSKAFLDMAGVKDRSKMVMLEDPAAKAKRLLEERRTSKAERAAKAIARVALDVDKLATKVSALETVASKGGEVVDADVATLTEALMRELVELDSIAADGDAKAQRRAQERRVQRHVETLDAIRAKNKAAAPSSNRTRRPAHLPPRPQNQQRRQFQPPAPTTATAPAPQTQTAASWDSFDLLSSVPPSTSAAAPVTSTTTPSPRLEWELF

SEQ ID NO: 9127 - DNA, 756 bp, Zea mays subsp. mays
  misc_feature (1)..(756): Ceres Seq. ID no. 12406829
  misc_feature: MA Experiment ID: 108504 Result: Up-regulated in Transcription
  misc_feature: MA Experiment 108504 PARAMETER Experiment Name: Zm_Drought_P Parameter: Age (day) Value: 8
  misc_feature: MA Experiment 108504 PARAMETER Experiment Name: Zm_Drought_P Parameter: Organism Value: Zea mays
  misc_feature: MA Experiment 108504 PARAMETER Experiment Name: Zm_Drought_P Parameter: Plant Line Value: 35A19
  misc_feature: MA Experiment 108504 PARAMETER Experiment Name: Zm_Drought_P Parameter: Timepoint (hr) Value: 12
  misc_feature: MA Experiment 108504 PARAMETER Experiment Name: Zm_Drought_P Parameter: Tissue Value: Aerial
  misc_feature: MA Experiment 108504 PARAMETER Experiment Name: Zm_Drought_P Parameter: Treatment Value: Drought vs. No Drought
  misc_feature: MA Experiment ID: 108523 Result: Up-regulated in Transcription
  misc_feature: MA Experiment 108523 PARAMETER Experiment Name: Zm_42deg_Heat_P Parameter: Age (day) Value: 8
  misc_feature: MA Experiment 108523 PARAMETER Experiment Name: Zm_42deg_Heat_P Parameter: Organism Value: Zea mays
  misc_feature: MA Experiment 108523 PARAMETER Experiment Name: Zm_42deg_Heat_P Parameter: Plant Line Value: 35A19
  misc_feature: MA Experiment 108523 PARAMETER Experiment Name: Zm_42deg_Heat_P Parameter: Temperature (deg C) Value: 42 vs. 22
  misc_feature: MA Experiment 108523 PARAMETER Experiment Name: Zm_42deg_Heat_P Parameter: Timepoint (hr) Value: 6
  misc_feature: MA Experiment 108523 PARAMETER Experiment Name: Zm_42deg_Heat_P Parameter: Tissue Value: Aerial
  misc_feature: MA Experiment ID: 108526 Result: Up-regulated in Transcription
  misc_feature: MA Experiment 108526 PARAMETER Experiment Name: Zm_5mM_NO_P Parameter: Age (day) Value: 8
  misc_feature: MA Experiment 108526 PARAMETER Experiment Name: Zm_5mM_NO_P Parameter: Organism Value: Zea mays
  misc_feature: MA Experiment 108526 PARAMETER Experiment Name: Zm_5mM_NO_P Parameter: Plant Line Value: 35A19
  misc_feature: MA Experiment 108526 PARAMETER Experiment Name: Zm_5mM_NO_P Parameter: Timepoint (hr) Value: 1
  misc_feature: MA Experiment 108526 PARAMETER Experiment Name: Zm_5mM_NO_P Parameter: Tissue Value: Aerial
  misc_feature: MA Experiment 108526 PARAMETER Experiment Name: Zm_5mM_NO_P Parameter: Treatment Value: 5mM NO vs. No Treatment
  misc_feature: MA Experiment ID: 108527 Result: Up-regulated in Transcription
  misc_feature: MA Experiment 108527 PARAMETER Experiment Name: Zm_5mM_NO_P Parameter: Age (day) Value: 8
  misc_feature: MA Experiment 108527 PARAMETER Experiment Name: Zm_5mM_NO_P Parameter: Organism Value: Zea mays
  misc_feature: MA Experiment 108527 PARAMETER Experiment Name: Zm_5mM_NO_P Parameter: Plant Line Value: 35A19
  misc_feature: MA Experiment 108527 PARAMETER Experiment Name: Zm_5mM_NO_P Parameter: Timepoint (hr) Value: 6
  misc_feature: MA Experiment 108527 PARAMETER Experiment Name: Zm_5mM_NO_P Parameter: Tissue Value: Aerial
  misc_feature: MA Experiment 108527 PARAMETER Experiment Name: Zm_5mM_NO_P Parameter: Treatment Value: 5mM NO vs. No Treatment
  misc_feature: MA Experiment ID: 108529 Result: Up-regulated in Transcription
  misc_feature: MA Experiment 108529 PARAMETER Experiment Name: Zm_Imbibed_Seeds_P Parameter: Age (day) Value: 5 vs. 2
  misc_feature: MA Experiment 108529 PARAMETER Experiment Name: Zm_Imbibed_Seeds_P Parameter: Organism Value: Zea mays
  misc_feature: MA Experiment 108529 PARAMETER Experiment Name: Zm_Imbibed_Seeds_P Parameter: Plant Line Value: 35A19
  misc_feature: MA Experiment 108529 PARAMETER Experiment Name: Zm_Imbibed_Seeds_P Parameter: Tissue Value: Roots vs. Embryo
  misc_feature: MA Experiment ID: 108530 Result: Up-regulated in Transcription
  misc_feature: MA Experiment 108530 PARAMETER Experiment Name: Zm_Imbibed_Seeds_P Parameter: Age (day) Value: 6 vs. 2
  misc_feature: MA Experiment 108530 PARAMETER Experiment Name: Zm_Imbibed_Seeds_P Parameter: Organism Value: Zea mays
  misc_feature: MA Experiment 108530 PARAMETER Experiment Name: Zm_Imbibed_Seeds_P Parameter: Plant Line Value: 35A19
  misc_feature: MA Experiment 108530 PARAMETER Experiment Name: Zm_Imbibed_Seeds_P Parameter: Tissue Value: Aerial vs. Embryo
  misc_feature: MA Experiment ID: 108534 Result: Up-regulated in Transcription
  misc_feature: MA Experiment 108534 PARAMETER Experiment Name: Zm_4deg_Cold_P Parameter: Age (hr) Value: 8
  misc_feature: MA Experiment 108534 PARAMETER Experiment Name: Zm_4deg_Cold_P Parameter: Organism Value: Zea mays
  misc_feature: MA Experiment 108534 PARAMETER Experiment Name: Zm_4deg_Cold_P Parameter: Plant Line Value: 35A19
  misc_feature: MA Experiment 108534 PARAMETER Experiment Name: Zm_4deg_Cold_P Parameter: Temperature (deg C) Value: 4 vs. 22
  misc_feature: MA Experiment 108534 PARAMETER Experiment Name: Zm_4deg_Cold_P Parameter: Timepoint (hr) Value: 6
  misc_feature: MA Experiment 108534 PARAMETER Experiment Name: Zm_4deg_Cold_P Parameter: Tissue Value: Aerial
  misc_feature: MA Experiment ID: 108536 Result: Up-regulated in Transcription
  misc_feature: MA Experiment 108536 PARAMETER Experiment Name: Zm_Meristem_P Parameter: Age (day) Value: 8
  misc_feature: MA Experiment 108536 PARAMETER Experiment Name: Zm_Meristem_P Parameter: Organism Value: Zea mays
  misc_feature: MA Experiment 108536 PARAMETER Experiment Name: Zm_Meristem_P Parameter: Plant Line Value: 35A19
  misc_feature: MA Experiment 108536 PARAMETER Experiment Name: Zm_Meristem_P Parameter: Tissue Value: Shoot Meristem vs. Above Shoot Meristem
  misc_feature: MA Experiment ID: 108539 Result: Up-regulated in Transcription
  misc_feature: MA Experiment 108539 PARAMETER Experiment Name: Zm_20percent_PEG_P Parameter: Age (day) Value: 8
  misc_feature: MA Experiment 108539 PARAMETER Experiment Name: Zm_20percent_PEG_P Parameter: Organism Value: Zea mays
  misc_feature: MA Experiment 108539 PARAMETER Experiment Name: Zm_20percent_PEG_P Parameter: Plant Line Value: 35A19
  misc_feature: MA Experiment 108539 PARAMETER Experiment Name: Zm_20percent_PEG_P Parameter: Timepoint (hr) Value: 1
  misc_feature: MA Experiment 108539 PARAMETER Experiment Name: Zm_20percent_PEG_P Parameter: Tissue Value: Aerial
  misc_feature: MA Experiment 108539 PARAMETER Experiment Name: Zm_20percent_PEG_P Parameter: Treatment Value: 20percent PEG vs. No Treatment
  misc_feature: MA Experiment ID: 108542 Result: Up-regulated in Transcription
  misc_feature: MA Experiment 108542 PARAMETER Experiment Name: Zm_150mM_NaCl_P Parameter: Age (day) Value: 8
  misc_feature: MA Experiment 108542 PARAMETER Experiment Name: Zm_150mM_NaCl_P Parameter: Organism Value: Zea mays
  misc_feature: MA Experiment 108542 PARAMETER Experiment Name: Zm_150mM_NaCl_P Parameter: Plant Line Value: 35A19
  misc_feature: MA Experiment 108542 PARAMETER Experiment Name: Zm_150mM_NaCl_P Parameter: Timepoint (hr) Value: 6
  misc_feature: MA Experiment 108542 PARAMETER Experiment Name: Zm_150mM_NaCl_P Parameter: Tissue Value: Aerial
  misc_feature: MA Experiment 108542 PARAMETER Experiment Name: Zm_150mM_NaCl_P Parameter: Treatment Value: 150mM NaCl vs. No Treatment
  misc_feature: MA Experiment ID: 108556 Result: Up-regulated in Transcription
  misc_feature: MA Experiment 108556 PARAMETER Experiment Name: Zm_Drought_P Parameter: Age (day) Value: 9
  misc_feature: MA Experiment 108556 PARAMETER Experiment Name: Zm_Drought_P Parameter: Organism Value: Zea mays
  misc_feature: MA Experiment 108556 PARAMETER Experiment Name: Zm_Drought_P Parameter: Plant Line Value: 35A19
  misc_feature: MA Experiment 108556 PARAMETER Experiment Name: Zm_Drought_P Parameter: Timepoint (hr) Value: 24
  misc_feature: MA Experiment 108556 PARAMETER Experiment Name: Zm_Drought_P Parameter: Tissue Value: Aerial
  misc_feature: MA Experiment 108556 PARAMETER Experiment Name: Zm_Drought_P Parameter: Treatment Value: Drought vs. No Drought
  misc_feature: MA Experiment ID: 20000479 Result: Up-regulated in Transcription
  misc_feature: MA Experiment 20000479 PARAMETER Experiment Name: Zm_Drought_P Parameter: Age (day) Value: 10
  misc_feature: MA Experiment 20000479 PARAMETER Experiment Name: Zm_Drought_P Parameter: Organism Value: Zea mays
  misc_feature: MA Experiment 20000479 PARAMETER Experiment Name: Zm_Drought_P Parameter: Plant Line Value: 35A19
  misc_feature: MA Experiment 20000479 PARAMETER Experiment Name: Zm_Drought_P Parameter: Timepoint (hr) Value: 48
  misc_feature: MA Experiment 20000479 PARAMETER Experiment Name: Zm_Drought_P Parameter: Tissue Value: Aerial
  misc_feature: MA Experiment 20000479 PARAMETER Experiment Name: Zm_Drought_P Parameter: Treatment Value: Drought vs. No Drought
  misc_feature: MA Experiment ID: 20000480 Result: Up-regulated in Transcription
  misc_feature: MA Experiment 20000480 PARAMETER Experiment Name: Zm_Drought_P Parameter: Age (day) Value: 11
  misc_feature: MA Experiment 20000480 PARAMETER Experiment Name: Zm_Drought_P Parameter: Organism Value: Zea mays
  misc_feature: MA Experiment 20000480 PARAMETER Experiment Name: Zm_Drought_P Parameter: Plant Line Value: 35A19
  misc_feature: MA Experiment 20000480 PARAMETER Experiment Name: Zm_Drought_P Parameter: Timepoint (hr) Value: 72
  misc_feature: MA Experiment 20000480 PARAMETER Experiment Name: Zm_Drought_P Parameter: Tissue Value: Aerial
  misc_feature: MA Experiment 20000480 PARAMETER Experiment Name: Zm_Drought_P Parameter: Treatment Value: Drought vs. No Drought
  misc_feature: MA Experiment ID: 20000626 Result: Up-regulated in Transcription
  misc_feature: MA Experiment 20000626 PARAMETER Experiment Name: Zm_Herbicide-Treatments_P Parameter: Timepoint (hr) Value: 12
  misc_feature: MA Experiment 20000626 PARAMETER Experiment Name: Zm_Herbicide-Treatments_P Parameter: Tissue Value: Aerial
  misc_feature: MA Experiment 20000626 PARAMETER Experiment Name: Zm_Herbicide-Treatments_P Parameter: Treatment Value: Roundup vs. No Treatment
cgccgaggccgcggcgcgcgcctacgacgccgccgcgctccacttccgcgggcccaaggccaagaccaacttccccgtcgcgttcgccgcgcttccgccgccgccgccgcccaagaagccggccgccgtgaccgtgagccccagcagcagcagcaccgtggagtcctcctcctcctcctcctcccgggactcgcccgccacgccgcccagggccgcgtctccgtgccagcaggccccgtcgctcgacctcagcctaggcggcacaccggccatggtggccgcccagccgttcctcttcctggacccgaggctcgcggtgaccgtggccgtgccggcgcccgtgccctaccggccgaccgcggtcgccgccggtgccaacaagcgtgacgcggcatcctgccgtgaagaggagcagagcgacaccgggtcgtcgtcatccgtggtggacgcctccccagcggtcggcgtggggttcgacctcaacatgccgccgccggccgaggtggcgtaggtggaccgaccggtgacacgagacgagacggctccgagaggtcgcgtagatgattagaaaaaagctgtattagtatgaggttgggtacttgatcgttcaatttgccgcgatgggttactgctagccaggtgtacatagacctttttgcatcggcacctaatagctatttgccgatgttacaaaaaaaaagaacgaatcgttttgtagttcgttgtaatatgtaacatattaaccgctaattaaat

SEQ ID NO: 9128 - protein, 169 aa, Zea mays subsp. mays
  peptide (1)..(169): Ceres Seq. ID no. 12406830
  misc_feature (1)..(169): Homolog of NCBI NO: 38345793 NR Description: OSJNBa0085I10.10 [Oryza sativa (japonica
  misc_feature (1)..(169): Homolog of NCBI NO: 15232526 NR Description: ethylene responsive element binding factor 4 protein id: At3g15210.1, supported by cDNA: 22775., supported by gi_2281634, supported by cDNA: gi_3434972 [Arabidopsis thaliana]
  misc_feature (1)..(169): Homolog of NCBI NO: 4099914 NR Description: ethylene-responsive element binding protein
  misc_feature (1)..(46): Homolog of NCBI NO: 15240610 NR Description: putative protein; protein id: At5g50080.1 thaliana] >gi|10177219|dbj|BAB10294.1| contains similarity to AP2
  misc_feature (1)..(46): Homolog of NCBI NO: 34221731 NR Description: putative AP2 domain transcription factor
AEAAARAYDAAALHFRGPKAKTNFPVAFAALPPPPPPKKPAAVTVSPSSSSTVESSSSSSSRDSPATPPRAASPCQQAPSLDLSLGGTPAMVAAQPFLFLDPRLAVTVAVPAPVPYRPTAVAAGANKRDAASCREEEQSDTGSSSSVVDASPAVGVGFDLNMPPPAEVA

SEQ ID NO: 9129 - protein, 128 aa, Zea mays subsp. mays
  peptide (1)..(128): Ceres Seq. ID no. 12406831
RRGRGARLRRRRAPLPRAQGQDQLPRRVRRASAAAAAQEAGRRDREPQQQQHRGVLLLLLLPGLARHAAQGRVSVPAGPVARPQPRRHTGHGGRPAVPLPGPEARGDRGRAGARALPADRGRRRCQQA

SEQ ID NO: 9130 - DNA, 657 bp, Zea mays subsp. mays
  misc_feature (1)..(657): Ceres Seq. ID no. 12356849
  misc_feature: MA Experiment ID: 20000534 Result: Down-regulated in Transcription
  misc_feature: MA Experiment 20000534 PARAMETER Experiment Name: Zm_Hybrid_Pollen_P Parameter: Age (day) Value: 8
  misc_feature: MA Experiment 20000534 PARAMETER Experiment Name: Zm_Hybrid_Pollen_P Parameter: Organism Value: Zea mays
  misc_feature: MA Experiment 20000534 PARAMETER Experiment Name: Zm_Hybrid_Pollen_P Parameter: Plant Line Value: 35A19
  misc_feature: MA Experiment 20000534 PARAMETER Experiment Name: Zm_Hybrid_Pollen_P Parameter: Tissue Value: Pollen vs. Aerial
acaatatcgttgaatacatcgagatcatatcaaaagttctcaaggatggtggggtctggattaatttgggtccccttctgtatcactttgctgattcatatgggccagatgatgatatgtctattgaattaagtttggaagatgtgaaaaaggttgcttaccattatggatttacaatggaggtgagggtttctgcattaaatctattttttttaaagagttgttgtgatagcatacttcgatatgtgatttgcaggtggagaaaatgatcgagactacttacactgcaaacatgaaagcaatgatgcagaatcggtaccgtgcagcattctggacaatgaggaaagatgcatctcggtcaaaagcttgtaagcctctttgaagtgaagatcatccatggcggacgatcaatttgtgccatcattattcactgttgtattcaaactccacacaggccgtgccagactaagttagatagatatatcagatgagctgcctgattcacagaatataattggcttaacataggaaaggaggtactgagccacgctagctagctcatccttttctcctatattacagatattcaaactgtactatggactctgtaagaatgagcaataaactaagcagacagaagttaaaaatagaagtaac

SEQ ID NO: 9131 - protein, 88 aa, Zea mays subsp. mays
  peptide (1)..(88): Ceres Seq. ID no. 12356850
  misc_feature (1)..(81): Homolog of NCBI NO: 22748889 NR Description: hypothetical protein FLJ25795 [Homo sapiens]
  misc_feature (1)..(81): Homolog of NCBI NO: 20886869 NR Description: RIKEN cDNA 2410127L17 [Mus musculus] similar to data source:SPTR, source key:O46078, to EG:39E1.1 PROTEIN (CG11596 PROTEIN) [Mus musculus]
  misc_feature (1)..(81): Homolog of NCBI NO: 34861686 NR Description: similar to RIKEN cDNA 2410127L17 [Rattus
  misc_feature (1)..(81): Homolog of NCBI NO: 38074728 NR Description: similar to RIKEN cDNA 2410127L17 [Mus musculus]
  misc_feature (1)..(60): Homolog of NCBI NO: 25408215 NR Description: hypothetical protein At2g32170 [imported] - thaliana >gi|4263702|gb|AAD15388.1| hypothetical protein
  misc_feature (1)..(60): Homolog of NCBI NO: 30685202 NR Description: expressed protein [Arabidopsis thaliana] unknown protein [Arabidopsis thaliana]
  misc_feature (1)..(60): Homolog of NCBI NO: 25349707 NR Description: hypothetical protein At2g32160 [imported] - thaliana >gi|4263703|gb|AAD15389.1| hypothetical protein
  misc_feature (1)..(60): Homolog of NCBI NO: 30685200 NR Description: expressed protein [Arabidopsis thaliana]
  misc_feature (1)..(60): Homolog of NCBI NO: 30685195 NR Description: expressed protein [Arabidopsis thaliana]
  misc_feature (1)..(81): Homolog of NCBI NO: 21758737 NR Description: unnamed protein product [Homo sapiens]
NIVEYIEIISKVLKDGGVWINLGPLLYHFADSYGPDDDMSIELSLEDVKKVAYHYGFTMEVRVSALNLFFLKSCCDSILRYVICRWRK

SEQ ID NO: 9132 - protein, 50 aa, Zea mays subsp. mays
  peptide (1)..(50): Ceres Seq. ID no. 12356851
  misc_feature (1)..(22): Homolog of NCBI NO: 25408215 NR Description: hypothetical protein At2g32170 [imported] - thaliana >gi|4263702|gb|AAD15388.1| hypothetical protein
  misc_feature (1)..(22): Homolog of NCBI NO: 30685202 NR Description: expressed protein [Arabidopsis thaliana] unknown protein [Arabidopsis thaliana]
  misc_feature (1)..(22): Homolog of NCBI NO: 25349707 NR Description: hypothetical protein At2g32160 [imported] - thaliana >gi|4263703|gb|AAD15389.1| hypothetical protein
  misc_feature (1)..(22): Homolog of NCBI NO: 30685200 NR Description: expressed protein [Arabidopsis thaliana]
  misc_feature (1)..(22): Homolog of NCBI NO: 30685195 NR Description: expressed protein [Arabidopsis thaliana]
  misc_feature (1)..(43): Homolog of NCBI NO: 21758737 NR Description: unnamed protein product [Homo sapiens]
  misc_feature (1)..(43): Homolog of NCBI NO: 22748889 NR Description: hypothetical protein FLJ25795 [Homo sapiens]
  misc_feature (1)..(43): Homolog of NCBI NO: 20886869 NR Description: RIKEN cDNA 2410127L17 [Mus musculus] similar to data source:SPTR, source key:O46078, to EG:39E1.1 PROTEIN (CG11596 PROTEIN) [Mus musculus]
  misc_feature (1)..(43): Homolog of NCBI NO: 34861686 NR Description: similar to RIKEN cDNA 2410127L17 [Rattus
  misc_feature (1)..(43): Homolog of NCBI NO: 38074728 NR Description: similar to RIKEN cDNA 2410127L17 [Mus musculus]
MSIELSLEDVKKVAYHYGFTMEVRVSALNLFFLKSCCDSILRYVICRWRK

SEQ ID NO: 9133 - protein, 47 aa, Zea mays subsp. mays
  peptide (1)..(47): Ceres Seq. ID no. 12356852
MHLGQKLVSLFEVKIIHGGRSICAIIIHCCIQTPHRPCQTKLDRYIR

SEQ ID NO: 9134 - DNA, 1848 bp, Zea mays subsp. mays
  misc_feature (1)..(1848): Ceres Seq. ID no. 12566326
  misc_feature: MA Experiment ID: 108530 Result: Up-regulated in Transcription
  misc_feature: MA Experiment 108530 PARAMETER Experiment Name: Zm_Imbibed_Seeds_P Parameter: Age (day) Value: 6 vs. 2
  misc_feature: MA Experiment 108530 PARAMETER Experiment Name: Zm_Imbibed_Seeds_P Parameter: Organism Value: Zea mays
  misc_feature: MA Experiment 108530 PARAMETER Experiment Name: Zm_Imbibed_Seeds_P Parameter: Plant Line Value: 35A19
  misc_feature: MA Experiment 108530 PARAMETER Experiment Name: Zm_Imbibed_Seeds_P Parameter: Tissue Value: Aerial vs. Embryo
  misc_feature: MA Experiment ID: 108536 Result: Down-regulated in Transcription
  misc_feature: MA Experiment 108536 PARAMETER Experiment Name: Zm_Meristem_P Parameter: Age (day) Value: 8
  misc_feature: MA Experiment 108536 PARAMETER Experiment Name: Zm_Meristem_P Parameter: Organism Value: Zea mays
  misc_feature: MA Experiment 108536 PARAMETER Experiment Name: Zm_Meristem_P Parameter: Plant Line Value: 35A19
  misc_feature: MA Experiment 108536 PARAMETER Experiment Name: Zm_Meristem_P Parameter: Tissue Value: Shoot Meristem vs. Above Shoot Meristem
  misc_feature: MA Experiment ID: 20000480 Result: Up-regulated in Transcription
  misc_feature: MA Experiment 20000480 PARAMETER Experiment Name: Zm_Drought_P Parameter: Age (day) Value: 11
  misc_feature: MA Experiment 20000480 PARAMETER Experiment Name: Zm_Drought_P Parameter: Organism Value: Zea mays
  misc_feature: MA Experiment 20000480 PARAMETER Experiment Name: Zm_Drought_P Parameter: Plant Line Value: 35A19
  misc_feature: MA Experiment 20000480 PARAMETER Experiment Name: Zm_Drought_P Parameter: Timepoint (hr) Value: 72
  misc_feature: MA Experiment 20000480 PARAMETER Experiment Name: Zm_Drought_P Parameter: Tissue Value: Aerial
  misc_feature: MA Experiment 20000480 PARAMETER Experiment Name: Zm_Drought_P Parameter: Treatment Value: Drought vs. No Drought
  misc_feature: MA Experiment ID: 20000492 Result: Down-regulated in Transcription
  misc_feature: MA Experiment 20000492 PARAMETER Experiment Name: Zm_Hybrid_Seed_Dev_P Parameter: DAP Value: 12
  misc_feature: MA Experiment 20000492 PARAMETER Experiment Name: Zm_Hybrid_Seed_Dev_P Parameter: Organism Value: Zea mays
  misc_feature: MA Experiment 20000492 PARAMETER Experiment Name: Zm_Hybrid_Seed_Dev_P Parameter: Plant Line Value: 35A19
  misc_feature: MA Experiment 20000492 PARAMETER Experiment Name: Zm_Hybrid_Seed_Dev_P Parameter: Tissue Value: Fert Kernel vs. Unfert Floret
gcacgagaccattacctagaacatcctaatcgaaaaacaatctttcttgtatcactaagctagtggccacaactcgttggcaacgaggaagcagcaataagccgagaagctatgccgccgccatatatggcacaggctgccggcaccgccgatgccactgatgaggctccactgctgctggcctcgtcggcggcggggtcgacgccgtcgccgccagctgcagcaccgcgccggaacaggttcgccttcgtctgcgccacgctcgcctccgtcaccaccatgctacatggctacaacctgacgctgatgagcggcgcggagctgttcatgcgggaggacgtggggctcaccgacggcgaggtcgaggtgctggcggggtccatgaacgtgttcatgctcgcgtccatcctcgccgccggctgagtggccgaccacctgggacgccgccgcaccctcgtgctcgccaacgccttcctcatggccggcgcgctcgccatgtcgctcggcaccagcttcgccgcgctcatggcggcgcgcttcgtcaccagcgtcggctccgggttcgcgcgcgtcgtcgcccccgtctacaacgccgagatatcgcaggcggctacgcgtggcgtcctctcatccatgctcgatatattcatcaacgtcggcatcctgctcagctacgtgtccaactacgcgttcgcgggcctcccggtgcacatcgggtggcgtctcatgtacgccgtcggcgtcatcccgcccgtgctcatcgccgccggggtgctcgtcatcatgccagagtcaccgcggtggctcgcgatgcagggccgccacgccgacgcgcgcgcggtgctgctgcgcacgtcggacagcccggcagacgccgacttccggctcggggagatcaagcgagccgccgacgcgccgtcgcccgctgctgcggcgcgccacggtggcggcggtgtctggagggagctcttcgtccggccatccaccacaaccacgagcgtgcggcgcatcctcggctgcgtcctcggcctgcagttcttcgtgcaggcgtccggcgtcgacgccatcctcctctacagcccgctggtcttcaaggcggtcggcgtggcgtccacctccgccgtgctcggcgccaccgtgtccatcggagccgtcaagacgtgcttcatcctcgtcgccatgctcttcaccgaccgcctcggccggcgcccgctcctcctcgccagcaccgccggcgtcgccgtgaccgtgaccgccctcgccgtgacgctgtgcgtgggcacggcgtcgccggcgacggccgcggcgtgcctggcgtccgtgctggccttcgtggccgcgtactccatcggctacgggtccgtggtgtcgacgtacagcgcggaggtcttgccgctacggctgcgcgcgcagggctccagcctgggcgtggccgtgaacaggctcacgtgcggggtggtcagcatgacgttcatctcgctcgccgacgccatcaccatgcccgggtgcttcttcctctacgctgcggtgacggcggctgcgtttgtgttcgtgtacacgcggctgccggagaccaagggccggagcctagaagacatggaagtgctcttccgcaagtgagggtggccggtggccacgtatagttgccattagcacaaggtcgcgtttggcagagttagtagaaattatccacaattaccagcagatttggaactccggtaccgcgcgctcgtcggtcgcaccgtcgcagtcgcagctacccccacggtcccacctagagatctcaacatcagatttaaacaccatatactacccatacctatgaagttatatctatctctatctccg

SEQ ID NO: 9135 - protein, 380 aa, Zea mays subsp. mays
  peptide (1)..(380): Ceres Seq. ID no. 12566327
  misc_feature (1)..(378): Pfam Name: Sugar (and other) transporter Pfam Description: Sugar (and other) transporter
  misc_feature (1)..(380): Homolog of NCBI NO: 30025133 NR Description: putative sorbitol transporter [Prunus cerasus]
  misc_feature (1)..(380): Homolog of NCBI NO: 28316433 NR Description: sorbitol transporter [Prunus cerasus]
  misc_feature (1)..(380): Homolog of NCBI NO: 15230212 NR Description: sugar transport, putative; protein id: [Arabidopsis thaliana] >gi|9293909|dbj|BAB01812.1| sugar
  misc_feature (1)..(378): Homolog of NCBI NO: 16118827 NR Description: putative sugar transporter [Oryza sativa]
  misc_feature (1)..(378): Homolog of NCBI NO: 34393630 NR Description: putative sorbitol transporter [Oryza sativa
  misc_feature (1)..(380): Homolog of NCBI NO: 1778095 NR Description: putative sugar transporter; member of major
  misc_feature (1)..(380): Homolog of NCBI NO: 7484647 NR Description: probable sugar transport protein 205 - beet putative sugar transporter; member of major facilitative
  misc_feature (1)..(378): Homolog of NCBI NO: 34393631 NR Description: putative sorbitol transporter [Oryza sativa
  misc_feature (1)..(378): Homolog of NCBI NO: 15226682 NR Description: putative sugar transporter; protein id: [Arabidopsis thaliana] >gi|25308957|pir||H84536 probable sugar
MAGALAMSLGTSFAALMAARFVTSVGSGFARVVAPVYNAEISQAATRGVLSSMLDIFINVGILLSYVSNYAFAGLPVHIGWRLMYAVGVIPPVLIAAGVLVIMPESPRWLAMQGRHADARAVLLRTSDSPADADFRLGEIKRAADAPSPAAAARHGGGGVWRELFVRPSTTTTSVRRILGCVLGLQFFVQASGVDAILLYSPLVFKAVGVASTSAVLGATVSIGAVKTCFILVAMLFTDRLGRRPLLLASTAGVAVTVTALAVTLCVGTASPATAAACLASVLAFVAAYSIGYGSVVSTYSAEVLPLRLRAQGSSLGVAVNRLTCGVVSMTFISLADAITMPGCFFLYAAVTAAAFVFVYTRLPETKGRSLEDMEVLFRK

SEQ ID NO: 9136 - protein, 374 aa, Zea mays subsp. mays
  peptide (1)..(374): Ceres Seq. ID no. 12566328
  misc_feature (1)..(372): Pfam Name: Sugar (and other) transporter Pfam Description: Sugar (and other) transporter
  misc_feature (1)..(374): Homolog of NCBI NO: 30025133 NR Description: putative sorbitol transporter [Prunus cerasus]
  misc_feature (1)..(374): Homolog of NCBI NO: 28316433 NR Description: sorbitol transporter [Prunus cerasus]
  misc_feature (1)..(374): Homolog of NCBI NO: 15230212 NR Description: sugar transport, putative; protein id: [Arabidopsis thaliana] >gi|9293909|dbj|BAB01812.1| sugar
  misc_feature (1)..(372): Homolog of NCBI NO: 16118827 NR Description: putative sugar transporter [Oryza sativa]
  misc_feature (1)..(372): Homolog of NCBI NO: 34393630 NR Description: putative sorbitol transporter [Oryza sativa
  misc_feature (1)..(374): Homolog of NCBI NO: 1778095 NR Description: putative sugar transporter; member of major
  misc_feature (1)..(374): Homolog of NCBI NO: 7484647 NR Description: probable sugar transport protein 205 - beet putative sugar transporter; member of major facilitative
  misc_feature (1)..(372): Homolog of NCBI NO: 34393631 NR Description: putative sorbitol transporter [Oryza sativa
  misc_feature (1)..(372): Homolog of NCBI NO: 15226682 NR Description: putative sugar transporter; protein id: [Arabidopsis thaliana] >gi|25308957|pir||H84536 probable sugar
MSLGTSFAALMAARFVTSVGSGFARVVAPVYNAEISQAATRGVLSSMLDIFINVGILLSYVSNYAFAGLPVHIGWRLMYAVGVIPPVLIAAGVLVIMPESPRWLAMQGRHADARAVLLRTSDSPADADFRLGEIKRAADAPSPAAAARHGGGGVWRELFVRPSTTTTSVRRILGCVLGLQFFVQASGVDAILLYSPLVFKAVGVASTSAVLGATVSIGAVKTCFILVAMLFTDRLGRRPLLLASTAGVAVTVTALAVTLCVGTASPATAAACLASVLAFVAAYSIGYGSVVSTYSAEVLPLRLRAQGSSLGVAVNRLTCGVVSMTFISLADAITMPGCFFLYAAVTAAAFVFVYTRLPETKGRSLEDMEVLFRK

SEQ ID NO: 9137 - protein, 364 aa, Zea mays subsp. mays
  peptide (1)..(364): Ceres Seq. ID no. 12566329
  misc_feature (1)..(362): Pfam Name: Sugar (and other) transporter Pfam Description: Sugar (and other) transporter
  misc_feature (1)..(364): Homolog of NCBI NO: 30025133 NR Description: putative sorbitol transporter [Prunus cerasus]
  misc_feature (1)..(364): Homolog of NCBI NO: 28316433 NR Description: sorbitol transporter [Prunus cerasus]
  misc_feature (1)..(364): Homolog of NCBI NO: 15230212 NR Description: sugar transport, putative; protein id: [Arabidopsis thaliana] >gi|9293909|dbj|BAB01812.1| sugar
  misc_feature (1)..(362): Homolog of NCBI NO: 16118827 NR Description: putative sugar transporter [Oryza sativa]
  misc_feature (1)..(362): Homolog of NCBI NO: 34393630 NR Description: putative sorbitol transporter [Oryza sativa
  misc_feature (1)..(364): Homolog of NCBI NO: 1778095 NR Description: putative sugar transporter; member of major
  misc_feature (1)..(364): Homolog of NCBI NO: 7484647 NR Description: probable sugar transport protein 205 - beet putative sugar transporter; member of major facilitative
  misc_feature (1)..(362): Homolog of NCBI NO: 34393631 NR Description: putative sorbitol transporter [Oryza sativa
  misc_feature (1)..(362): Homolog of NCBI NO: 15226682 NR Description: putative sugar transporter; protein id: [Arabidopsis thaliana] >gi|25308957|pir||H84536 probable sugar
MAARFVTSVGSGFARVVAPVYNAEISQAATRGVLSSMLDIFINVGILLSYVSNYAFAGLPVHIGWRLMYAVGVIPPVLIAAGVLVIMPESPRWLAMQGRHADARAVLLRTSDSPADADFRLGEIKRAADAPSPAAAARHGGGGVWRELFVRPSTTTTSVRRILGCVLGLQFFVQASGVDAILLYSPLVFKAVGVASTSAVLGATVSIGAVKTCFILVAMLFTDRLGRRPLLLASTAGVAVTVTALAVTLCVGTASPATAAACLASVLAFVAAYSIGYGSVVSTYSAEVLPLRLRAQGSSLGVAVNRLTCGVVSMTFISLADAITMPGCFFLYAAVTAAAFVFVYTRLPETKGRSLEDMEVLFRK

SEQ ID NO: 9138 - DNA, 1315 bp, Zea mays subsp. mays
  misc_feature (1)..(1315): Ceres Seq. ID no. 12412494
  misc_feature: MA Experiment ID: 108543 Result: Up-regulated in Transcription
  misc_feature: MA Experiment ID: 108544 Result: Up-regulated in Transcription
  misc_feature: MA Experiment ID: 20000477 Result: Down-regulated in Transcription
  misc_feature: MA Experiment 20000477 PARAMETER Experiment Name: Zm_5mM_SA_P Parameter: Age (day) Value: 10
  misc_feature: MA Experiment 20000477 PARAMETER Experiment Name: Zm_5mM_SA_P Parameter: Organism Value: Zea mays
  misc_feature: MA Experiment 20000477 PARAMETER Experiment Name: Zm_5mM_SA_P Parameter: Plant Line Value: 35A19
  misc_feature: MA Experiment 20000477 PARAMETER Experiment Name: Zm_5mM_SA_P Parameter: Timepoint (hr) Value: 48
  misc_feature: MA Experiment 20000477 PARAMETER Experiment Name: Zm_5mM_SA_P Parameter: Tissue Value: Aerial
  misc_feature: MA Experiment 20000477 PARAMETER Experiment Name: Zm_5mM_SA_P Parameter: Treatment Value: 5mM SA vs. No Treatment
  misc_feature: MA Experiment ID: 20000492 Result: Down-regulated in Transcription
  misc_feature: MA Experiment 20000492 PARAMETER Experiment Name: Zm_Hybrid_Seed_Dev_P Parameter: DAP Value: 12
  misc_feature: MA Experiment 20000492 PARAMETER Experiment Name: Zm_Hybrid_Seed_Dev_P Parameter: Organism Value: Zea mays
  misc_feature: MA Experiment 20000492 PARAMETER Experiment Name: Zm_Hybrid_Seed_Dev_P Parameter: Plant Line Value: 35A19
  misc_feature: MA Experiment 20000492 PARAMETER Experiment Name: Zm_Hybrid_Seed_Dev_P Parameter: Tissue Value: Fert Kernel vs. Unfert Floret
  misc_feature: MA Experiment ID: 20000535 Result: Down-regulated in Transcription
  misc_feature: MA Experiment 20000535 PARAMETER Experiment Name: Zm_Hybrid_Seed_Dev_P Parameter: DAP Value: 30 vs. 12
  misc_feature: MA Experiment 20000535 PARAMETER Experiment Name: Zm_Hybrid_Seed_Dev_P Parameter: Organism Value: Zea mays
  misc_feature: MA Experiment 20000535 PARAMETER Experiment Name: Zm_Hybrid_Seed_Dev_P Parameter: Plant Line Value: 35A19
  misc_feature: MA Experiment 20000535 PARAMETER Experiment Name: Zm_Hybrid_Seed_Dev_P Parameter: Tissue Value: Embryo vs. Unfert Floret
actttataccgcccgcccaccactcccctccccgtttctctctgcttcatccttcgctttcccctgcgccaggcccgccccgcccttccagaacgacatcctccttccccgccccctccgatggggaacccgccggagctgtaccacaagatcctcaacatccccaaggacacctcgccgcacgaaatccgcgccgcgtacaagaacctcgtcaagaagtggcaccccgacaagcacccgccgtcgtccaggccggaggccgaggcgcgcttcaaggccatcagcgaggcctacgaggcgctcctggatcagcaggagaacaggggtgtgttcgagctgtgcaacgacggccgggcgggtgagaggacgcgcggcgccttcggcgacggcggcggtggcggcggcggcggaggaggaggcctcggcgccggcgtcggggcccgcatggaggacgcgcagcgacgggttctgcacgaggagcgcgcccggcacgccggcgagggagttcaagaaggtgtacagctccggcgaccccggcgggcgccgcgccttcgccgagttctccagctccatcgtgcgcaaggcgccaccgctggagcgcaagctcgagtgcaccctcgaggagctctgccgcggctgcaagaaggaggtcagcttcacccgcgacgtcgtcaccaagaacgggtcaaccgtgaagaaggaggtgacacagacggtggtggtgaagccagggtggaggaaagggaagcaggtggtgctggaaggcatgggggacgagcgggcggggtgcctgcccggcgacgccatcctcacggtgtccgagaagaggcacccggcgttcaagcgggtgggcgacgacctggtgctcaaggcggaggtgccgctggtgggcgcgctcacgggctggtccttctcgttccgcctcctcggcggcaggaaggtgagctgctcgttccaggacgaggtcgtccgccccggctacgagaaggtgatcgccggcgagggcatgccggtccccgggcagaagggcgcgcgcggcgacctgagggtcaagttggacgtcgtcttccccaaggagctcaccgcagagcagcgcgccggcctcgccgagatcctcagagggtcctgctgatccatcggccccagttccaagcgtatcaggttttcttggccgtgtccgtgtgttaagttttaatatgtatactcatagcgcgtgtgatgagtatataagtacataaagagagagggggcgtcgttgtacatacaggtcgtttatattatatatatataaggataaaaagaaatatgaaacgtg

SEQ ID NO: 9139 - protein, 395 aa, Zea mays subsp. mays
  peptide (1)..(395): Ceres Seq. ID no. 12412495
  misc_feature (47)..(105): Pfam Name: DnaJ domain Pfam Description: DnaJ domain
  misc_feature (41)..(149): Homolog of NCBI NO: 34907316 NR Description: putative heat shock protein [Oryza sativa
  misc_feature (48)..(139): Homolog of NCBI NO: 15231987 NR Description: putative heat shock protein; protein id: supported by cDNA: 96785. [Arabidopsis thaliana]
  misc_feature (48)..(139): Homolog of NCBI NO: 21618097 NR Description: putative heat shock protein [Arabidopsis thaliana]
  misc_feature (48)..(151): Homolog of NCBI NO: 15240968 NR Description: heat shock protein 40-like; protein id: supported by cDNA: 114622. [Arabidopsis thaliana]
  misc_feature (48)..(146): Homolog of NCBI NO: 6179940 NR Description: DnaJ-like protein [Nicotiana tabacum]
  misc_feature (48)..(146): Homolog of NCBI NO: 11863723 NR Description: DnaJ like protein [Lycopersicon esculentum]
  misc_feature (48)..(132): Homolog of NCBI NO: 15225377 NR Description: putative heat shock protein; protein id: supported by cDNA: 25528., supported by cDNA: gi_15982894 thaliana] >gi|25296018|pir||G84590 probable heat shock protein
  misc_feature (48)..(138): Homolog of NCBI NO: 34905276 NR Description: putative heat shock protein [Oryza sativa
  misc_feature (48)..(112): Homolog of NCBI NO: 15235310 NR Description: heat-shock protein; protein id: At4g28480.1, by cDNA: gi_14596114, supported by cDNA: gi_20148388 [Arabidopsis
  misc_feature (48)..(135): Homolog of NCBI NO: 15239455 NR Description: heat-shock protein - like; protein id:
TLYRPPTTPLPVSLCFILRFPLRQARPALPERHPPSPPPPMGNPPELYHKILNIPKDTSPHEIRAAYKNLVKKWHPDKHPPSSRPEAEARFKAISEAYEALLDQQENRGVFELCNDGRAGERTRGAFGDGGGGGGGGGGGLGAGVGARMEDAQRRVLHEERARHAGEGVQEGVQLRRPRRAPRLRRVLQLHRAQGATAGAQARVHPRGALPRLQEGGQLHPRRRHQERVNREEGGDTDGGGEARVEEREAGGAGRHGGRAGGVPARRRHPHGVREEAPGVQAGGRRPGAQGGGAAGGRAHGLVLLVPPPRRQEGELLVPGRGRPPRLREGDRRRGHAGPRAEGRARRPEGQVGRRLPQGAHRRAARRPRRDPQRVLLIHRPQFQAYQVFLAVSVC

SEQ ID NO: 9140 - protein, 376 aa, Zea mays subsp. mays
  peptide (1)..(376): Ceres Seq. ID no. 12412496
  misc_feature (250)..(372): Pfam Name: DnaJ C terminal region Pfam Description: DnaJ C terminal region
  misc_feature (150)..(374): Homolog of NCBI NO: 34907316 NR Description: putative heat shock protein [Oryza sativa
  misc_feature (167)..(375): Homolog of NCBI NO: 15231987 NR Description: putative heat shock protein; protein id: supported by cDNA: 96785. [Arabidopsis thaliana]
  misc_feature (167)..(375): Homolog of NCBI NO: 21618097 NR Description: putative heat shock protein [Arabidopsis thaliana]
  misc_feature (193)..(372): Homolog of NCBI NO: 15240968 NR Description: heat shock protein 40-like; protein id: supported by cDNA: 114622. [Arabidopsis thaliana]
  misc_feature (172)..(375): Homolog of NCBI NO: 6179940 NR Description: DnaJ-like protein [Nicotiana tabacum]
  misc_feature (174)..(375): Homolog of NCBI NO: 11863723 NR Description: DnaJ like protein [Lycopersicon esculentum]
  misc_feature (172)..(372): Homolog of NCBI NO: 15225377 NR Description: putative heat shock protein; protein id: supported by cDNA: 25528., supported by cDNA: gi_15982894 thaliana] >gi|25296018|pir||G84590 probable heat shock protein
  misc_feature (140)..(374): Homolog of NCBI NO: 34905276 NR Description: putative heat shock protein [Oryza sativa
  misc_feature (193)..(372): Homolog of NCBI NO: 15235310 NR Description: heat-shock protein; protein id: At4g28480.1, by cDNA: gi_14596114, supported by cDNA: gi_20148388 [Arabidopsis
  misc_feature (182)..(374): Homolog of NCBI NO: 15239455 NR Description: heat-shock protein - like; protein id:
LYTARPPLPSPFLSASSFAFPCARPAPPFQNDILLPRPLRWGTRRSCTTRSSTSPRTPRRTKSAPRTRTSSRSGTPTSTRRRPGRRPRRASRPSARPTRRSWISRRTGVCSSCATTAGRVRGRAAPSATAAVAAAAEEEASAPASGPAWRTRSDGFCTRSAPGTPAREFKKVYSSGDPGGRRAFAEFSSSIVRKAPPLERKLECTLEELCRGCKKEVSFTRDVVTKNGSTVKKEVTQTVVVKPGWRKGKQVVLEGMGDERAGCLPGDAILTVSEKRHPAFKRVGDDLVLKAEVPLVGALTGWSFSFRLLGGRKVSCSFQDEVVRPGYEKVIAGEGMPVPGQKGARGDLRVKLDVVFPKELTAEQRAGLAEILRGSC

SEQ ID NO: 9141 - protein, 355 aa, Zea mays subsp. mays
  peptide (1)..(355): Ceres Seq. ID no. 12412497
  misc_feature (7)..(65): Pfam Name: DnaJ domain Pfam Description: DnaJ domain
  misc_feature (1)..(109): Homolog of NCBI NO: 34907316 NR Description: putative heat shock protein [Oryza sativa
  misc_feature (8)..(99): Homolog of NCBI NO: 15231987 NR Description: putative heat shock protein; protein id: supported by cDNA: 96785. [Arabidopsis thaliana]
  misc_feature (8)..(99): Homolog of NCBI NO: 21618097 NR Description: putative heat shock protein [Arabidopsis thaliana]
  misc_feature (8)..(111): Homolog of NCBI NO: 15240968 NR Description: heat shock protein 40-like; protein id: supported by cDNA: 114622. [Arabidopsis thaliana]
  misc_feature (8)..(106): Homolog of NCBI NO: 6179940 NR Description: DnaJ-like protein [Nicotiana tabacum]
  misc_feature (8)..(106): Homolog of NCBI NO: 11863723 NR Description: DnaJ like protein [Lycopersicon esculentum]
  misc_feature (8)..(92): Homolog of NCBI NO: 15225377 NR Description: putative heat shock protein; protein id: supported by cDNA: 25528., supported by cDNA: gi_15982894 thaliana] >gi|25296018|pir||G84590 probable heat shock protein
  misc_feature (8)..(98): Homolog of NCBI NO: 34905276 NR Description: putative heat shock protein [Oryza sativa
  misc_feature (8)..(72): Homolog of NCBI NO: 15235310 NR Description: heat-shock protein; protein id: At4g28480.1, by cDNA: gi_14596114, supported by cDNA: gi_20148388 [Arabidopsis
  misc_feature (8)..(95): Homolog of NCBI NO: 15239455 NR Description: heat-shock protein - like; protein id:
MGNPPELYHKILNIPKDTSPHEIRAAYKNLVKKWHPDKHPPSSRPEAEARFKAISEAYEALLDQQENRGVFELCNDGRAGERTRGAFGDGGGGGGGGGGGLGAGVGARMEDAQRRVLHEERARHAGEGVQEGVQLRRPRRAPRLRRVLQLHRAQGATAGAQARVHPRGALPRLQEGGQLHPRRRHQERVNREEGGDTDGGGEARVEEREAGGAGRHGGRAGGVPARRRHPHGVREEAPGVQAGGRRPGAQGGGAAGGRAHGLVLLVPPPRRQEGELLVPGRGRPPRLREGDRRRGHAGPRAEGRARRPEGQVGRRLPQGAHRRAARRPRRDPQRVLLIHRPQFQAYQVFLAVSVC

SEQ ID NO: 9142 - DNA, 1097 bp, Zea mays subsp. mays
  misc_feature (1)..(1097): Ceres Seq. ID no. 12355286
  misc_feature: MA Experiment ID: 108504 Result: Down-regulated in Transcription
  misc_feature: MA Experiment 108504 PARAMETER Experiment Name: Zm_Drought_P Parameter: Age (day) Value: 8
  misc_feature: MA Experiment 108504 PARAMETER Experiment Name: Zm_Drought_P Parameter: Organism Value: Zea mays
  misc_feature: MA Experiment 108504 PARAMETER Experiment Name: Zm_Drought_P Parameter: Plant Line Value: 35A19
  misc_feature: MA Experiment 108504 PARAMETER Experiment Name: Zm_Drought_P Parameter: Timepoint (hr) Value: 12
  misc_feature: MA Experiment 108504 PARAMETER Experiment Name: Zm_Drought_P Parameter: Tissue Value: Aerial
  misc_feature: MA Experiment 108504 PARAMETER Experiment Name: Zm_Drought_P Parameter: Treatment Value: Drought vs. No Drought
  misc_feature: MA Experiment ID: 108523 Result: Down-regulated in Transcription
  misc_feature: MA Experiment 108523 PARAMETER Experiment Name: Zm_42deg_Heat_P Parameter: Age (day) Value: 8
  misc_feature: MA Experiment 108523 PARAMETER Experiment Name: Zm_42deg_Heat_P Parameter: Organism Value: Zea mays
  misc_feature: MA Experiment 108523 PARAMETER Experiment Name: Zm_42deg_Heat_P Parameter: Plant Line Value: 35A19
  misc_feature: MA Experiment 108523 PARAMETER Experiment Name: Zm_42deg_Heat_P Parameter: Temperature (deg C) Value: 42 vs. 22
  misc_feature: MA Experiment 108523 PARAMETER Experiment Name: Zm_42deg_Heat_P Parameter: Timepoint (hr) Value: 6
  misc_feature: MA Experiment 108523 PARAMETER Experiment Name: Zm_42deg_Heat_P Parameter: Tissue Value: Aerial
  misc_feature: MA Experiment ID: 108528 Result: Up-regulated in Transcription
  misc_feature: MA Experiment 108528 PARAMETER Experiment Name: Zm_Imbibed_Seeds_P Parameter: Age (day) Value: 5 vs. 2
  misc_feature: MA Experiment 108528 PARAMETER Experiment Name: Zm_Imbibed_Seeds_P Parameter: Organism Value: Zea mays
  misc_feature: MA Experiment 108528 PARAMETER Experiment Name: Zm_Imbibed_Seeds_P Parameter: Plant Line Value: 35A19
  misc_feature: MA Experiment 108528 PARAMETER Experiment Name: Zm_Imbibed_Seeds_P Parameter: Tissue Value: Aerial vs. Embryo
  misc_feature: MA Experiment ID: 108529 Result: Down-regulated in Transcription
  misc_feature: MA Experiment 108529 PARAMETER Experiment Name: Zm_Imbibed_Seeds_P Parameter: Age (day) Value: 5 vs. 2
  misc_feature: MA Experiment 108529 PARAMETER Experiment Name: Zm_Imbibed_Seeds_P Parameter: Organism Value: Zea mays
  misc_feature: MA Experiment 108529 PARAMETER Experiment Name: Zm_Imbibed_Seeds_P Parameter: Plant Line Value: 35A19
  misc_feature: MA Experiment 108529 PARAMETER Experiment Name: Zm_Imbibed_Seeds_P Parameter: Tissue Value: Roots vs. Embryo
  misc_feature: MA Experiment ID: 108530 Result: Up-regulated in Transcription
  misc_feature: MA Experiment 108530 PARAMETER Experiment Name: Zm_Imbibed_Seeds_P Parameter: Age (day) Value: 6 vs. 2
  misc_feature: MA Experiment 108530 PARAMETER Experiment Name: Zm_Imbibed_Seeds_P Parameter: Organism Value: Zea mays
  misc_feature: MA Experiment 108530 PARAMETER Experiment Name: Zm_Imbibed_Seeds_P Parameter: Plant Line Value: 35A19
  misc_feature: MA Experiment 108530 PARAMETER Experiment Name: Zm_Imbibed_Seeds_P Parameter: Tissue Value: Aerial vs. Embryo
  misc_feature: MA Experiment ID: 108535 Result: Up-regulated in Transcription
  misc_feature: MA Experiment 108535 PARAMETER Experiment Name: Zm_Meristem_P Parameter: Age (day) Value: 8
  misc_feature: MA Experiment 108535 PARAMETER Experiment Name: Zm_Meristem_P Parameter: Organism Value: Zea mays
  misc_feature: MA Experiment 108535 PARAMETER Experiment Name: Zm_Meristem_P Parameter: Plant Line Value: 35A19
  misc_feature: MA Experiment 108535 PARAMETER Experiment Name: Zm_Meristem_P Parameter: Tissue Value: Root Meristem vs. Above Root Meristem
  misc_feature: MA Experiment ID: 108536 Result: Down-regulated in Transcription
  misc_feature: MA Experiment 108536 PARAMETER Experiment Name: Zm_Meristem_P Parameter: Age (day) Value: 8
  misc_feature: MA Experiment 108536 PARAMETER Experiment Name: Zm_Meristem_P Parameter: Organism Value: Zea mays
  misc_feature: MA Experiment 108536 PARAMETER Experiment Name: Zm_Meristem_P Parameter: Plant Line Value: 35A19
  misc_feature: MA Experiment 108536 PARAMETER Experiment Name: Zm_Meristem_P Parameter: Tissue Value: Shoot Meristem vs. Above Shoot Meristem
  misc_feature: MA Experiment ID: 108543 Result: Up-regulated in Transcription
  misc_feature: MA Experiment ID: 108544 Result: Down-regulated in Transcription
  misc_feature: MA Experiment ID: 108545 Result: Up-regulated in Transcription
  misc_feature: MA Experiment 108545 PARAMETER Experiment Name: Zm_Imbibed_Seeds_P Parameter: Age (day) Value: 3 vs. 2
  misc_feature: MA Experiment 108545 PARAMETER Experiment Name: Zm_Imbibed_Seeds_P Parameter: Organism Value: Zea mays
  misc_feature: MA Experiment 108545 PARAMETER Experiment Name: Zm_Imbibed_Seeds_P Parameter: Plant Line Value: 35A19
  misc_feature: MA Experiment 108545 PARAMETER Experiment Name: Zm_Imbibed_Seeds_P Parameter: Tissue Value: Aerial vs. Embryo
  misc_feature: MA Experiment ID: 108547 Result: Up-regulated in Transcription
  misc_feature: MA Experiment 108547 PARAMETER Experiment Name: Zm_Imbibed_Seeds_P Parameter: Age (day) Value: 4 vs. 2
  misc_feature: MA Experiment 108547 PARAMETER Experiment Name: Zm_Imbibed_Seeds_P Parameter: Organism Value: Zea mays
  misc_feature: MA Experiment 108547 PARAMETER Experiment Name: Zm_Imbibed_Seeds_P Parameter: Plant Line Value: 35A19
  misc_feature: MA Experiment 108547 PARAMETER Experiment Name: Zm_Imbibed_Seeds_P Parameter: Tissue Value: Aerial vs. Embryo
  misc_feature: MA Experiment ID: 108556 Result: Down-regulated in Transcription
  misc_feature: MA Experiment 108556 PARAMETER Experiment Name: Zm_Drought_P Parameter: Age (day) Value: 9
  misc_feature: MA Experiment 108556 PARAMETER Experiment Name: Zm_Drought_P Parameter: Organism Value: Zea mays
  misc_feature: MA Experiment 108556 PARAMETER Experiment Name: Zm_Drought_P Parameter: Plant Line Value: 35A19
  misc_feature: MA Experiment 108556 PARAMETER Experiment Name: Zm_Drought_P Parameter: Timepoint (hr) Value: 24
  misc_feature: MA Experiment 108556 PARAMETER Experiment Name: Zm_Drought_P Parameter: Tissue Value: Aerial
  misc_feature: MA Experiment 108556 PARAMETER Experiment Name: Zm_Drought_P Parameter: Treatment Value: Drought vs. No Drought
  misc_feature: MA Experiment ID: 108559 Result: Down-regulated in Transcription
  misc_feature: MA Experiment 108559 PARAMETER Experiment Name: Zm_5mM_NO_P Parameter: Age (day) Value: 8
  misc_feature: MA Experiment 108559 PARAMETER Experiment Name: Zm_5mM_NO_P Parameter: Organism Value: Zea mays
  misc_feature: MA Experiment 108559 PARAMETER Experiment Name: Zm_5mM_NO_P Parameter: Plant Line Value: 35A19
  misc_feature: MA Experiment 108559 PARAMETER Experiment Name: Zm_5mM_NO_P Parameter: Timepoint (hr) Value: 12
  misc_feature: MA Experiment 108559 PARAMETER Experiment Name: Zm_5mM_NO_P Parameter: Tissue Value: Aerial
  misc_feature: MA Experiment 108559 PARAMETER Experiment Name: Zm_5mM_NO_P Parameter: Treatment Value: 5mM NO vs. No Treatment
  misc_feature: MA Experiment ID: 108597 Result: Down-regulated in Transcription
  misc_feature: MA Experiment 108597 PARAMETER Experiment Name: Zm_100uM_ABA_P Parameter: Age (day) Value: 9
  misc_feature: MA Experiment 108597 PARAMETER Experiment Name: Zm_100uM_ABA_P Parameter: Organism Value: Zea mays
  misc_feature: MA Experiment 108597 PARAMETER Experiment Name: Zm_100uM_ABA_P Parameter: Plant Line Value: 35A19
  misc_feature: MA Experiment 108597 PARAMETER Experiment Name: Zm_100uM_ABA_P Parameter: Timepoint (hr) Value: 24
  misc_feature: MA Experiment 108597 PARAMETER Experiment Name: Zm_100uM_ABA_P Parameter: Tissue Value: Aerial
  misc_feature: MA Experiment 108597 PARAMETER Experiment Name: Zm_100uM_ABA_P Parameter: Treatment Value: 100uM ABA vs. No Treatment
  misc_feature: MA Experiment ID: 108687 Result: Down-regulated in Transcription
  misc_feature: MA Experiment 108687 PARAMETER Experiment Name: Zm_Embryos-Flowers__P Parameter: Tissue Value: Embryo vs. Aerial+
  misc_feature: MA Experiment ID: 108688 Result: Down-regulated in Transcription
  misc_feature: MA Experiment 108688 PARAMETER Experiment Name: Zm_Embryos-Flowers__P Parameter: Tissue Value: Immature Flowers vs. Aerial+
  misc_feature: MA Experiment ID: 20000108 Result: Up-regulated in Transcription
  misc_feature: MA Experiment 20000108 PARAMETER Experiment Name: Zm_Root-Tips_P Parameter: Age (day) Value: 12
  misc_feature: MA Experiment 20000108 PARAMETER Experiment Name: Zm_Root-Tips_P Parameter: Organism Value: Zea mays
  misc_feature: MA Experiment 20000108 PARAMETER Experiment Name: Zm_Root-Tips_P Parameter: Tissue Value: Root tips vs. Root mid region    35
  misc_feature: MA Experiment 20000108 PARAMETER Experiment Name: Zm_Root-Tips_P Parameter: Tissue Value: Root tips vs. Root mid region   Sequence Listing-Misc Features (4)
  misc_feature: MA Experiment ID: 20000478 Result: Down-regulated in Transcription
  misc_feature: MA Experiment 20000478 PARAMETER Experiment Name: Zm_5mM_SA_P Parameter: Age (day) Value: 11
  misc_feature: MA Experiment 20000478 PARAMETER Experiment Name: Zm_5mM_SA_P Parameter: Organism Value: Zea mays
  misc_feature: MA Experiment 20000478 PARAMETER Experiment Name: Zm_5mM_SA_P Parameter: Plant Line Value: 35A19
  misc_feature: MA Experiment 20000478 PARAMETER Experiment Name: Zm_5mM_SA_P Parameter: Timepoint (hr) Value: 72
  misc_feature: MA Experiment 20000478 PARAMETER Experiment Name: Zm_5mM_SA_P Parameter: Tissue Value: Aerial
  misc_feature: MA Experiment 20000478 PARAMETER Experiment Name: Zm_5mM_SA_P Parameter: Treatment Value: 5mM SA vs. No Treatment
  misc_feature: MA Experiment ID: 20000480 Result: Down-regulated in Transcription
  misc_feature: MA Experiment 20000480 PARAMETER Experiment Name: Zm_Drought_P Parameter: Age (day) Value: 11
  misc_feature: MA Experiment 20000480 PARAMETER Experiment Name: Zm_Drought_P Parameter: Organism Value: Zea mays
  misc_feature: MA Experiment 20000480 PARAMETER Experiment Name: Zm_Drought_P Parameter: Plant Line Value: 35A19
  misc_feature: MA Experiment 20000480 PARAMETER Experiment Name: Zm_Drought_P Parameter: Timepoint (hr) Value: 72
  misc_feature: MA Experiment 20000480 PARAMETER Experiment Name: Zm_Drought_P Parameter: Tissue Value: Aerial
  misc_feature: MA Experiment 20000480 PARAMETER Experiment Name: Zm_Drought_P Parameter: Treatment Value: Drought vs. No Drought
  misc_feature: MA Experiment ID: 20000535 Result: Down-regulated in Transcription
  misc_feature: MA Experiment 20000535 PARAMETER Experiment Name: Zm_Hybrid_Seed_Dev_P Parameter: DAP Value: 30 vs. 12
  misc_feature: MA Experiment 20000535 PARAMETER Experiment Name: Zm_Hybrid_Seed_Dev_P Parameter: Organism Value: Zea mays
  misc_feature: MA Experiment 20000535 PARAMETER Experiment Name: Zm_Hybrid_Seed_Dev_P Parameter: Plant Line Value: 35A19
  misc_feature: MA Experiment 20000535 PARAMETER Experiment Name: Zm_Hybrid_Seed_Dev_P Parameter: Tissue Value: Embryo vs. Unfert Floret
  misc_feature: MA Experiment ID: 20000626 Result: Down-regulated in Transcription
  misc_feature: MA Experiment 20000626 PARAMETER Experiment Name: Zm_Herbicide-Treatments_P Parameter: Timepoint (hr) Value: 12
  misc_feature: MA Experiment 20000626 PARAMETER Experiment Name: Zm_Herbicide-Treatments_P Parameter: Tissue Value: Aerial
  misc_feature: MA Experiment 20000626 PARAMETER Experiment Name: Zm_Herbicide-Treatments_P Parameter: Treatment Value: Roundup vs. No Treatment
tcttgaagtgtggaggtgtggtgttaggaacagctatccaccacgccgccacagacgtttcaagcgcgttccacttttttcagacatggtcggcgttctgcaagcatggtgacagtgctgccgtggagctcccgtgccacgaccgcaccctactccgcgcacggtccccgcccacagtccaccccgacgcgctctccacattgcagcctcggctcgtcctcactgaacccgaggggcctcttgccatcgaaatctttaccatttccagggatcatgtcgcctccctgaagcagctctgcggtggcacgagcaccttttgcgccgtcagcgctctcatctggcagtgcgcgtgcgttgcacgacggatcccaccggactctcaggtgcgcgtgatgttcccggccgacgtccgccgccggatgaggccgcccctcccgacccactacttcggcaacgcagtgatcaggctatacgccgctggcccggcaggggacattggcacggcggcgttggcatccgtcgctgcccgcatcaagggcgccgtcgagcggatggatgacgagctggtgcggtccgcgattgactactacgagatggccgagacgaacaagagacggactgggacaggcatcttaccaccgacggacctgaatattaccagctggttgggtaggccacagcacgacgcagattttggctggggaaagccgcaatccatgtcgcgggcggagtctgtccgcggcggctctatgcacttgatgaacgacgacggtggtaccggcaacgtccgcgtgctcgtgtgcttggaggctgaaaatataaaggagctaggacggctgctttatgcaaagctctagcaagctgctagtgctatgcactaaaaataatattaataataataaggtttgttactttgcttaaggggaaccatactttttccctcgcgatttattattattaattatggcagtttgaataatgaaaaccatttgtaattcctgtgacaattagtttatgcgtccacactagaaataaaaacttgtttgtaataaactacagtttttttttgttatggcagtttcaataatgaaatccgt

SEQ ID NO: 9143 - protein, 284 aa, Zea mays subsp. mays
  peptide (1)..(284): Ceres Seq. ID no. 12355287
  misc_feature (2)..(281): Pfam Name: Transferase family Pfam Description: Transferase family
  misc_feature (1)..(205): Homolog of NCBI NO: 40253398 NR Description: putative hydroxyanthranilate
  misc_feature (2)..(281): Homolog of NCBI NO: 32400293 NR Description: hydroxyanthranilate hydroxycinnamoyltransferase 2
  misc_feature (2)..(281): Homolog of NCBI NO: 32400295 NR Description: hydroxyanthranilate hydroxycinnamoyltransferase 3
  misc_feature (2)..(281): Homolog of NCBI NO: 32400291 NR Description: hydroxyanthranilate hydroxycinnamoyltransferase 1
  misc_feature (2)..(281): Homolog of NCBI NO: 38345030 NR Description: OSJNBa0029H02.14 [Oryza sativa (japonica
  misc_feature (2)..(281): Homolog of NCBI NO: 6469032 NR Description: N-hydroxycinnamoyl/benzoyltransferase [Ipomoea
  misc_feature (2)..(281): Homolog of NCBI NO: 40644899 NR Description: hydroxycinnamoyl CoA quinate transferase
  misc_feature (2)..(281): Homolog of NCBI NO: 27475616 NR Description: hydroxycinnamoyl transferase [Nicotiana tabacum]
  misc_feature (2)..(281): Homolog of NCBI NO: 40644084 NR Description: hydroxycinnamoyl CoA quinate transferase
  misc_feature (2)..(280): Homolog of NCBI NO: 32400297 NR Description: hydroxyanthranilate hydroxycinnamoyltransferase 4
LKCGGVVLGTAIHHAATDVSSAFHFFQTWSAFCKHGDSAAVELPCHDRTLLRARSPPTVHPDALSTLQPRLVLTEPEGPLAIEIFTISRDHVASLKQLCGGTSTFCAVSALIWQCACVARRIPPDSQVRVMFPADVRRRMRPPLPTHYFGNAVIRLYAAGPAGDIGTAALASVAARIKGAVERMDDELVRSAIDYYEMAETNKRRTGTGILPPTDLNITSWLGRPQHDADFGWGKPQSMSRAESVRGGSMHLMNDDGGTGNVRVLVCLEAENIKELGRLLYAKL

SEQ ID NO: 9144 - protein, 154 aa, Zea mays subsp. mays
  peptide (1)..(154): Ceres Seq. ID no. 12355288
  misc_feature (1)..(151): Pfam Name: Transferase family Pfam Description: Transferase family
  misc_feature (1)..(75): Homolog of NCBI NO: 40253398 NR Description: putative hydroxyanthranilate
  misc_feature (1)..(151): Homolog of NCBI NO: 32400293 NR Description: hydroxyanthranilate hydroxycinnamoyltransferase 2
  misc_feature (1)..(151): Homolog of NCBI NO: 32400295 NR Description: hydroxyanthranilate hydroxycinnamoyltransferase 3
  misc_feature (1)..(151): Homolog of NCBI NO: 32400291 NR Description: hydroxyanthranilate hydroxycinnamoyltransferase 1
  misc_feature (1)..(151): Homolog of NCBI NO: 38345030 NR Description: OSJNBa0029H02.14 [Oryza sativa (japonica
  misc_feature (1)..(151): Homolog of NCBI NO: 6469032 NR Description: N-hydroxycinnamoyl/benzoyltransferase [Ipomoea
  misc_feature (1)..(151): Homolog of NCBI NO: 40644899 NR Description: hydroxycinnamoyl CoA quinate transferase
  misc_feature (1)..(151): Homolog of NCBI NO: 27475616 NR Description: hydroxycinnamoyl transferase [Nicotiana tabacum]
  misc_feature (1)..(151): Homolog of NCBI NO: 40644084 NR Description: hydroxycinnamoyl CoA quinate transferase
  misc_feature (1)..(150): Homolog of NCBI NO: 32400297 NR Description: hydroxyanthranilate hydroxycinnamoyltransferase 4
MFPADVRRRMRPPLPTHYFGNAVIRLYAAGPAGDIGTAALASVAARIKGAVERMDDELVRSAIDYYEMAETNKRRTGTGILPPTDLNITSWLGRPQHDADFGWGKPQSMSRAESVRGGSMHLMNDDGGTGNVRVLVCLEAENIKELGRLLYAKL

SEQ ID NO: 9145 - protein, 145 aa, Zea mays subsp. mays
  peptide (1)..(145): Ceres Seq. ID no. 12355289
  misc_feature (1)..(142): Pfam Name: Transferase family Pfam Description: Transferase family
  misc_feature (1)..(66): Homolog of NCBI NO: 40253398 NR Description: putative hydroxyanthranilate
  misc_feature (1)..(142): Homolog of NCBI NO: 32400293 NR Description: hydroxyanthranilate hydroxycinnamoyltransferase 2
  misc_feature (1)..(142): Homolog of NCBI NO: 32400295 NR Description: hydroxyanthranilate hydroxycinnamoyltransferase 3
  misc_feature (1)..(142): Homolog of NCBI NO: 32400291 NR Description: hydroxyanthranilate hydroxycinnamoyltransferase 1
  misc_feature (1)..(142): Homolog of NCBI NO: 38345030 NR Description: OSJNBa0029H02.14 [Oryza sativa (japonica
  misc_feature (1)..(142): Homolog of NCBI NO: 6469032 NR Description: N-hydroxycinnamoyl/benzoyltransferase [Ipomoea
  misc_feature (1)..(142): Homolog of NCBI NO: 40644899 NR Description: hydroxycinnamoyl CoA quinate transferase
  misc_feature (1)..(142): Homolog of NCBI NO: 27475616 NR Description: hydroxycinnamoyl transferase [Nicotiana tabacum]
  misc_feature (1)..(142): Homolog of NCBI NO: 40644084 NR Description: hydroxycinnamoyl CoA quinate transferase
  misc_feature (1)..(141): Homolog of NCBI NO: 32400297 NR Description: hydroxyanthranilate hydroxycinnamoyltransferase 4
MRPPLPTHYFGNAVIRLYAAGPAGDIGTAALASVAARIKGAVERMDDELVRSAIDYYEMAETNKRRTGTGILPPTDLNITSWLGRPQHDADFGWGKPQSMSRAESVRGGSMHLMNDDGGTGNVRVLVCLEAENIKELGRLLYAKL

SEQ ID NO: 9146 - DNA, 847 bp, Zea mays subsp. mays
  misc_feature (1)..(847): Ceres Seq. ID no. 12346394
  misc_feature: MA Experiment ID: 108515 Result: Down-regulated in Transcription
  misc_feature: MA Experiment 108515 PARAMETER Experiment Name: Zm_2mM_SA_P Parameter: Age (day) Value: 8
  misc_feature: MA Experiment 108515 PARAMETER Experiment Name: Zm_2mM_SA_P Parameter: Organism Value: Zea mays
  misc_feature: MA Experiment 108515 PARAMETER Experiment Name: Zm_2mM_SA_P Parameter: Plant Line Value: 35A19
  misc_feature: MA Experiment 108515 PARAMETER Experiment Name: Zm_2mM_SA_P Parameter: Timepoint (hr) Value: 12
  misc_feature: MA Experiment 108515 PARAMETER Experiment Name: Zm_2mM_SA_P Parameter: Tissue Value: Aerial
  misc_feature: MA Experiment 108515 PARAMETER Experiment Name: Zm_2mM_SA_P Parameter: Treatment Value: 2mM SA vs. No Treatment
  misc_feature: MA Experiment ID: 108528 Result: Up-regulated in Transcription
  misc_feature: MA Experiment 108528 PARAMETER Experiment Name: Zm_Imbibed_Seeds_P Parameter: Age (day) Value: 5 vs. 2
  misc_feature: MA Experiment 108528 PARAMETER Experiment Name: Zm_Imbibed_Seeds_P Parameter: Organism Value: Zea mays
  misc_feature: MA Experiment 108528 PARAMETER Experiment Name: Zm_Imbibed_Seeds_P Parameter: Plant Line Value: 35A19
  misc_feature: MA Experiment 108528 PARAMETER Experiment Name: Zm_Imbibed_Seeds_P Parameter: Tissue Value: Aerial vs. Embryo
  misc_feature: MA Experiment ID: 108529 Result: Down-regulated in Transcription
  misc_feature: MA Experiment 108529 PARAMETER Experiment Name: Zm_Imbibed_Seeds_P Parameter: Age (day) Value: 5 vs. 2
  misc_feature: MA Experiment 108529 PARAMETER Experiment Name: Zm_Imbibed_Seeds_P Parameter: Organism Value: Zea mays
  misc_feature: MA Experiment 108529 PARAMETER Experiment Name: Zm_Imbibed_Seeds_P Parameter: Plant Line Value: 35A19
  misc_feature: MA Experiment 108529 PARAMETER Experiment Name: Zm_Imbibed_Seeds_P Parameter: Tissue Value: Roots vs. Embryo
  misc_feature: MA Experiment ID: 108530 Result: Up-regulated in Transcription
  misc_feature: MA Experiment 108530 PARAMETER Experiment Name: Zm_Imbibed_Seeds_P Parameter: Age (day) Value: 6 vs. 2
  misc_feature: MA Experiment 108530 PARAMETER Experiment Name: Zm_Imbibed_Seeds_P Parameter: Organism Value: Zea mays
  misc_feature: MA Experiment 108530 PARAMETER Experiment Name: Zm_Imbibed_Seeds_P Parameter: Plant Line Value: 35A19
  misc_feature: MA Experiment 108530 PARAMETER Experiment Name: Zm_Imbibed_Seeds_P Parameter: Tissue Value: Aerial vs. Embryo
  misc_feature: MA Experiment ID: 108536 Result: Down-regulated in Transcription
  misc_feature: MA Experiment 108536 PARAMETER Experiment Name: Zm_Meristem_P Parameter: Age (day) Value: 8
  misc_feature: MA Experiment 108536 PARAMETER Experiment Name: Zm_Meristem_P Parameter: Organism Value: Zea mays
  misc_feature: MA Experiment 108536 PARAMETER Experiment Name: Zm_Meristem_P Parameter: Plant Line Value: 35A19
  misc_feature: MA Experiment 108536 PARAMETER Experiment Name: Zm_Meristem_P Parameter: Tissue Value: Shoot Meristem vs. Above Shoot Meristem
  misc_feature: MA Experiment ID: 108543 Result: Up-regulated in Transcription
  misc_feature: MA Experiment ID: 108544 Result: Up-regulated in Transcription
  misc_feature: MA Experiment ID: 108545 Result: Up-regulated in Transcription
  misc_feature: MA Experiment 108545 PARAMETER Experiment Name: Zm_Imbibed_Seeds_P Parameter: Age (day) Value: 3 vs. 2
  misc_feature: MA Experiment 108545 PARAMETER Experiment Name: Zm_Imbibed_Seeds_P Parameter: Organism Value: Zea mays
  misc_feature: MA Experiment 108545 PARAMETER Experiment Name: Zm_Imbibed_Seeds_P Parameter: Plant Line Value: 35A19
  misc_feature: MA Experiment 108545 PARAMETER Experiment Name: Zm_Imbibed_Seeds_P Parameter: Tissue Value: Aerial vs. Embryo
  misc_feature: MA Experiment ID: 108547 Result: Up-regulated in Transcription
  misc_feature: MA Experiment 108547 PARAMETER Experiment Name: Zm_Imbibed_Seeds_P Parameter: Age (day) Value: 4 vs. 2
  misc_feature: MA Experiment 108547 PARAMETER Experiment Name: Zm_Imbibed_Seeds_P Parameter: Organism Value: Zea mays
  misc_feature: MA Experiment 108547 PARAMETER Experiment Name: Zm_Imbibed_Seeds_P Parameter: Plant Line Value: 35A19
  misc_feature: MA Experiment 108547 PARAMETER Experiment Name: Zm_Imbibed_Seeds_P Parameter: Tissue Value: Aerial vs. Embryo
  misc_feature: MA Experiment ID: 108556 Result: Down-regulated in Transcription
  misc_feature: MA Experiment 108556 PARAMETER Experiment Name: Zm_Drought_P Parameter: Age (day) Value: 9
  misc_feature: MA Experiment 108556 PARAMETER Experiment Name: Zm_Drought_P Parameter: Organism Value: Zea mays
  misc_feature: MA Experiment 108556 PARAMETER Experiment Name: Zm_Drought_P Parameter: Plant Line Value: 35A19
  misc_feature: MA Experiment 108556 PARAMETER Experiment Name: Zm_Drought_P Parameter: Timepoint (hr) Value: 24
  misc_feature: MA Experiment 108556 PARAMETER Experiment Name: Zm_Drought_P Parameter: Tissue Value: Aerial
  misc_feature: MA Experiment 108556 PARAMETER Experiment Name: Zm_Drought_P Parameter: Treatment Value: Drought vs. No Drought
  misc_feature: MA Experiment ID: 108559 Result: Down-regulated in Transcription
  misc_feature: MA Experiment 108559 PARAMETER Experiment Name: Zm_5mM_NO_P Parameter: Age (day) Value: 8
  misc_feature: MA Experiment 108559 PARAMETER Experiment Name: Zm_5mM_NO_P Parameter: Organism Value: Zea mays
  misc_feature: MA Experiment 108559 PARAMETER Experiment Name: Zm_5mM_NO_P Parameter: Plant Line Value: 35A19
  misc_feature: MA Experiment 108559 PARAMETER Experiment Name: Zm_5mM_NO_P Parameter: Timepoint (hr) Value: 12
  misc_feature: MA Experiment 108559 PARAMETER Experiment Name: Zm_5mM_NO_P Parameter: Tissue Value: Aerial
  misc_feature: MA Experiment 108559 PARAMETER Experiment Name: Zm_5mM_NO_P Parameter: Treatment Value: 5mM NO vs. No Treatment
  misc_feature: MA Experiment ID: 108687 Result: Down-regulated in Transcription
  misc_feature: MA Experiment 108687 PARAMETER Experiment Name: Zm_Embryos-Flowers__P Parameter: Tissue Value: Embryo vs. Aerial+
  misc_feature: MA Experiment ID: 108688 Result: Down-regulated in Transcription
  misc_feature: MA Experiment 108688 PARAMETER Experiment Name: Zm_Embryos-Flowers__P Parameter: Tissue Value: Immature Flowers vs. Aerial+
  misc_feature: MA Experiment ID: 20000478 Result: Down-regulated in Transcription
  misc_feature: MA Experiment 20000478 PARAMETER Experiment Name: Zm_5mM_SA_P Parameter: Age (day) Value: 11
  misc_feature: MA Experiment 20000478 PARAMETER Experiment Name: Zm_5mM_SA_P Parameter: Organism Value: Zea mays
  misc_feature: MA Experiment 20000478 PARAMETER Experiment Name: Zm_5mM_SA_P Parameter: Plant Line Value: 35A19
  misc_feature: MA Experiment 20000478 PARAMETER Experiment Name: Zm_5mM_SA_P Parameter: Timepoint (hr) Value: 72
  misc_feature: MA Experiment 20000478 PARAMETER Experiment Name: Zm_5mM_SA_P Parameter: Tissue Value: Aerial
  misc_feature: MA Experiment 20000478 PARAMETER Experiment Name: Zm_5mM_SA_P Parameter: Treatment Value: 5mM SA vs. No Treatment
  misc_feature: MA Experiment ID: 20000535 Result: Down-regulated in Transcription
  misc_feature: MA Experiment 20000535 PARAMETER Experiment Name: Zm_Hybrid_Seed_Dev_P Parameter: DAP Value: 30 vs. 12
  misc_feature: MA Experiment 20000535 PARAMETER Experiment Name: Zm_Hybrid_Seed_Dev_P Parameter: Organism Value: Zea mays
  misc_feature: MA Experiment 20000535 PARAMETER Experiment Name: Zm_Hybrid_Seed_Dev_P Parameter: Plant Line Value: 35A19
  misc_feature: MA Experiment 20000535 PARAMETER Experiment Name: Zm_Hybrid_Seed_Dev_P Parameter: Tissue Value: Embryo vs. Unfert Floret
  misc_feature: MA Experiment ID: 20001608 Result: Up-regulated in Transcription
  misc_feature: MA Experiment 20001608 PARAMETER Experiment Name: Zm_50ppm_KNO3_L-to-H_P Parameter: Age (day) Value: 21
  misc_feature: MA Experiment 20001608 PARAMETER Experiment Name: Zm_50ppm_KNO3_L-to-H_P Parameter: Organism Value: Zea mays
  misc_feature: MA Experiment 20001608 PARAMETER Experiment Name: Zm_50ppm_KNO3_L-to-H_P Parameter: Plant Line Value: 35A19
  misc_feature: MA Experiment 20001608 PARAMETER Experiment Name: Zm_50ppm_KNO3_L-to-H_P Parameter: Timepoint (hr) Value: 48
  misc_feature: MA Experiment 20001608 PARAMETER Experiment Name: Zm_50ppm_KNO3_L-to-H_P Parameter: Tissue Value: Shoots
  misc_feature: MA Experiment 20001608 PARAMETER Experiment Name: Zm_50ppm_KNO3_L-to-H_P Parameter: Treatment Value: 50ppm KNO3 vs. 50ppm KCl
agtctggggataataatccacactccacaagcagccatggcgccacccatcacgtccctgtcgtctctcatggcgtcggcgggcaggagggggctgctggcgctgggcgccgggttcctggcctcggccgcgctgctgtccccggcgggcgacgccggcgccacgcgcatcgagtactacgcgacggtcggggacaagatgtgcgacctgagcctcgtcaagtccggcctcgcgtactgcgacgtcgaggtcggcaccggcgtccagcccctcgcgcggcgagctcatcaatgtgcactacaccgcgagatttcccgacggtacgctgttcgacagcagctacaagcgcgggaggccactgacgatgcgcataggcgcaggcaagatcctccgagggcttgaacaggggatcagtggcggcggccggtgtgccgcccatgcttgttggtggaaagcgcaagctgatgatacctgcgtcactggcgtacgggcctgaaccggcaggctgcttctcaggagactgcaacatccccggaaactccacacttctatatgaccttttcctcgtcgggatctacaagtgagccctcgatgacagggaatgttcagaacctaagtgtgtcacacatggagggtttcaggaggaattcttggcggtgaaagcacctgcagaggcagagccacttgcagaagcttctgtactccagagagctacctggattgaataaaatgatgatatataaaccatccttgttacataataacgccattgtggaactttgtaaagaccaatcatattgttgacttatatagcagtttgatacagccaaagcgagcaagttatcgc

SEQ ID NO: 9147 - protein, 133 aa, Zea mays subsp. mays
  peptide (1)..(133): Ceres Seq. ID no. 12346395
  misc_feature (29)..(87): Homolog of NCBI NO: 18420509 NR Description: FKBP-type peptidyl-prolyl cis-trans isomerase, protein id: At4g39710.1, supported by cDNA: gi_15529203 thaliana] >gi|6686798|emb|CAB64721.1| FKBP like protein
  misc_feature (29)..(87): Homolog of NCBI NO: 7487207 NR Description: hypothetical protein T19P19.100 - Arabidopsis >gi|3080440|emb|CAA18757.1| hypothetical protein [Arabidopsis >gi|7270955|emb|CAB80634.1| hypothetical protein [Arabidopsis
SLGIIIHTPQAAMAPPITSLSSLMASAGRRGLLALGAGFLASAALLSPAGDAGATRIEYYATVGDKMCDLSLVKSGLAYCDVEVGTGVQPLARRAHQCALHREISRRYAVRQQLQAREATDDAHRRRQDPPRA

SEQ ID NO: 9148 - protein, 121 aa, Zea mays subsp. mays
  peptide (1)..(121): Ceres Seq. ID no. 12346396
  misc_feature (17)..(75): Homolog of NCBI NO: 18420509 NR Description: FKBP-type peptidyl-prolyl cis-trans isomerase, protein id: At4g39710.1, supported by cDNA: gi_15529203 thaliana] >gi|6686798|emb|CAB64721.1| FKBP like protein
  misc_feature (17)..(75): Homolog of NCBI NO: 7487207 NR Description: hypothetical protein T19P19.100 - Arabidopsis >gi|3080440|emb|CAA18757.1| hypothetical protein [Arabidopsis >gi|7270955|emb|CAB80634.1| hypothetical protein [Arabidopsis
MAPPITSLSSLMASAGRRGLLALGAGFLASAALLSPAGDAGATRIEYYATVGDKMCDLSLVKSGLAYCDVEVGTGVQPLARRAHQCALHREISRRYAVRQQLQAREATDDAHRRRQDPPRA

SEQ ID NO: 9149 - protein, 119 aa, Zea mays subsp. mays
  peptide (1)..(119): Ceres Seq. ID no. 12346397
SGDNNPHSTSSHGATHHVPVVSHGVGGQEGAAGAGRRVPGLGRAAVPGGRRRRHAHRVLRDGRGQDVRPEPRQVRPRVLRRRGRHRRPAPRAASSSMCTTPRDFPTVRCSTAATSAGGH

SEQ ID NO: 9150 - DNA, 1443 bp, Zea mays subsp. mays
  misc_feature (1)..(1443): Ceres Seq. ID no. 12351752
  misc_feature: MA Experiment ID: 108528 Result: Down-regulated in Transcription
  misc_feature: MA Experiment 108528 PARAMETER Experiment Name: Zm_Imbibed_Seeds_P Parameter: Age (day) Value: 5 vs. 2
  misc_feature: MA Experiment 108528 PARAMETER Experiment Name: Zm_Imbibed_Seeds_P Parameter: Organism Value: Zea mays
  misc_feature: MA Experiment 108528 PARAMETER Experiment Name: Zm_Imbibed_Seeds_P Parameter: Plant Line Value: 35A19
  misc_feature: MA Experiment 108528 PARAMETER Experiment Name: Zm_Imbibed_Seeds_P Parameter: Tissue Value: Aerial vs. Embryo
  misc_feature: MA Experiment ID: 108529 Result: Down-regulated in Transcription
  misc_feature: MA Experiment 108529 PARAMETER Experiment Name: Zm_Imbibed_Seeds_P Parameter: Age (day) Value: 5 vs. 2
  misc_feature: MA Experiment 108529 PARAMETER Experiment Name: Zm_Imbibed_Seeds_P Parameter: Organism Value: Zea mays
  misc_feature: MA Experiment 108529 PARAMETER Experiment Name: Zm_Imbibed_Seeds_P Parameter: Plant Line Value: 35A19
  misc_feature: MA Experiment 108529 PARAMETER Experiment Name: Zm_Imbibed_Seeds_P Parameter: Tissue Value: Roots vs. Embryo
  misc_feature: MA Experiment ID: 108530 Result: Down-regulated in Transcription
  misc_feature: MA Experiment 108530 PARAMETER Experiment Name: Zm_Imbibed_Seeds_P Parameter: Age (day) Value: 6 vs. 2
  misc_feature: MA Experiment 108530 PARAMETER Experiment Name: Zm_Imbibed_Seeds_P Parameter: Organism Value: Zea mays
  misc_feature: MA Experiment 108530 PARAMETER Experiment Name: Zm_Imbibed_Seeds_P Parameter: Plant Line Value: 35A19
  misc_feature: MA Experiment 108530 PARAMETER Experiment Name: Zm_Imbibed_Seeds_P Parameter: Tissue Value: Aerial vs. Embryo
  misc_feature: MA Experiment ID: 108536 Result: Up-regulated in Transcription
  misc_feature: MA Experiment 108536 PARAMETER Experiment Name: Zm_Meristem_P Parameter: Age (day) Value: 8
  misc_feature: MA Experiment 108536 PARAMETER Experiment Name: Zm_Meristem_P Parameter: Organism Value: Zea mays
  misc_feature: MA Experiment 108536 PARAMETER Experiment Name: Zm_Meristem_P Parameter: Plant Line Value: 35A19
  misc_feature: MA Experiment 108536 PARAMETER Experiment Name: Zm_Meristem_P Parameter: Tissue Value: Shoot Meristem vs. Above Shoot Meristem
  misc_feature: MA Experiment ID: 108543 Result: Down-regulated in Transcription
  misc_feature: MA Experiment ID: 108546 Result: Down-regulated in Transcription
  misc_feature: MA Experiment 108546 PARAMETER Experiment Name: Zm_Imbibed_Seeds_P Parameter: Age (day) Value: 3 vs. 2
  misc_feature: MA Experiment 108546 PARAMETER Experiment Name: Zm_Imbibed_Seeds_P Parameter: Organism Value: Zea mays
  misc_feature: MA Experiment 108546 PARAMETER Experiment Name: Zm_Imbibed_Seeds_P Parameter: Plant Line Value: 35A19
  misc_feature: MA Experiment 108546 PARAMETER Experiment Name: Zm_Imbibed_Seeds_P Parameter: Tissue Value: Roots vs. Embryo
  misc_feature: MA Experiment ID: 20000479 Result: Up-regulated in Transcription
  misc_feature: MA Experiment 20000479 PARAMETER Experiment Name: Zm_Drought_P Parameter: Age (day) Value: 10
  misc_feature: MA Experiment 20000479 PARAMETER Experiment Name: Zm_Drought_P Parameter: Organism Value: Zea mays
  misc_feature: MA Experiment 20000479 PARAMETER Experiment Name: Zm_Drought_P Parameter: Plant Line Value: 35A19
  misc_feature: MA Experiment 20000479 PARAMETER Experiment Name: Zm_Drought_P Parameter: Timepoint (hr) Value: 48
  misc_feature: MA Experiment 20000479 PARAMETER Experiment Name: Zm_Drought_P Parameter: Tissue Value: Aerial
  misc_feature: MA Experiment 20000479 PARAMETER Experiment Name: Zm_Drought_P Parameter: Treatment Value: Drought vs. No Drought
  misc_feature: MA Experiment ID: 20000535 Result: Up-regulated in Transcription
  misc_feature: MA Experiment 20000535 PARAMETER Experiment Name: Zm_Hybrid_Seed_Dev_P Parameter: DAP Value: 30 vs. 12
  misc_feature: MA Experiment 20000535 PARAMETER Experiment Name: Zm_Hybrid_Seed_Dev_P Parameter: Organism Value: Zea mays
  misc_feature: MA Experiment 20000535 PARAMETER Experiment Name: Zm_Hybrid_Seed_Dev_P Parameter: Plant Line Value: 35A19
  misc_feature: MA Experiment 20000535 PARAMETER Experiment Name: Zm_Hybrid_Seed_Dev_P Parameter: Tissue Value: Embryo vs. Unfert Floret
atctctagttctctacacaccgacacgcatgcagatcggttgccggggcacgatgaggaccgcgtggccgctgctcctcgtggcgacggcgctgctttcgacttcggcagcaagggccaggaggacctgcaggttccctgccgtcttcaacttcggcgactccaactccgacaccggcggcttctgggcggccttcccggcgcagcagggcccgttcggcatgacgtacttcggcaggccggccggccgcgcctccgacggccgcctcgtcatcgacttcatagcgcaagcgatggggctgccgctgctgagcccctacctgcagtccatagggtcggactaccggcacggcgccaacttcgcgacgctggcgtcgacggcgctgctgcccaacacgtcggtgttcgtcaccgggaccagccccttctccctcggcatccagctcaaccagatgaaggagttcaggaacagagtgctcgcctccaaaggaaacaacggccaactccctggcccggaaatcttgggcgacgctctgtacacaatcgacatcgggcagaacgacttcacctcgaaccttggatccctcggggtcgaaagcgtcaagcgaagcctaccttcagtcgtcagccagatctcctggacgatacagcatcggagctcgcaacttcatggtgttcaacatggcgcccgtaggatgctacccggcattcctcgcggggcttcctcgtgacagcaaggacctggacgagttcgggtgcgtgaaaagctacaacggcggggtcacgtactacaaccagctgctgaacgacagcctagccgagatgaggaagacgctgcaggacgcgtcggtcgtgtacgtcgacaagcatgctgtgacgctcgaactgttccagcacccaaccgctcacgggctgaagcacggggctagagcttgctgcgggtacggcggtggaacctacaatttcgatcgagatgtttattgtggtgacagcaaggtagtgaatggagaagctgcgacggcgggggcttgtgcagacccgcaaaactatgtcagctgggacgggatacatgccactgaagctgcaaatagtaggatagcgtatgctgtgatcagcggctcctattcgtacccacctttcgatctttcaaagctatgtagcccttaggcatcatcagtcgtgaaagggagtacagcatcaccatacaccgcatttctntgaaacaagcagccacatttctttcattgacagcatcaacacacaggacaaaagctacgaactcaagaacgacgcacgcctacaacgagtcacgacgagaacagaggctaaagacctactccctctgccctagaaatgaagtcgtttgacttttttaagacaagtttgactggtttgttttattcaaaatatttatgaaaatatagaaaaaaaacatttgatagtc

SEQ ID NO: 9151 - protein, 242 aa, Zea mays subsp. mays
  peptide (1)..(242): Ceres Seq. ID no. 12351753
  misc_feature (48)..(233): Pfam Name: GDSL-like Lipase/Acylhydrolase Pfam Description: GDSL-like Lipase/Acylhydrolase
  misc_feature (48)..(233): Pfam Name: GDSL-like Lipase/Acylhydrolase Pfam Description: GDSL-like Lipase/Acylhydrolase
  misc_feature (19)..(233): Homolog of NCBI NO: 34898314 NR Description: ESTs AU075322(C11109),D22430(C11109) correspond
  misc_feature (19)..(233): Homolog of NCBI NO: 15234074 NR Description: putative acetyltransferase; protein id: [Arabidopsis thaliana] >gi|25407083|pir||H85014 probable
  misc_feature (19)..(216): Homolog of NCBI NO: 7485222 NR Description: hypothetical protein A_IG002N01.17 - Arabidopsis >gi|2191137|gb|AAB61024.1| similar to the GDSL family of
  misc_feature (7)..(216): Homolog of NCBI NO: 33147015 NR Description: putative early nodulin 8 precursor [Oryza sativa
  misc_feature (7)..(216): Homolog of NCBI NO: 34901120 NR Description: contains ESTs
  misc_feature (31)..(217): Homolog of NCBI NO: 33147016 NR Description: putative early nodulin 8 precursor [Oryza sativa
  misc_feature (23)..(216): Homolog of NCBI NO: 30909057 NR Description: ENSP-like protein [Hevea brasiliensis]
  misc_feature (24)..(216): Homolog of NCBI NO: 15231558 NR Description: nodulin, putative; protein id: At3g26430.1,
  misc_feature (23)..(224): Homolog of NCBI NO: 18390045 NR Description: Enod8.1 [Medicago truncatula]
  misc_feature (23)..(224): Homolog of NCBI NO: 25457244 NR Description: early nodule-specific protein ENOD8 [imported] -
  misc_feature (19)..(216): Homolog of NCBI NO: 7485222 NR Description: hypothetical protein A_IG002N01.17 - Arabidopsis >gi|2191137|gb|AAB61024.1| similar to the GDSL family of
  misc_feature (7)..(216): Homolog of NCBI NO: 33147015 NR Description: putative early nodulin 8 precursor [Oryza sativa
  misc_feature (7)..(216): Homolog of NCBI NO: 34901120 NR Description: contains ESTs
  misc_feature (31)..(217): Homolog of NCBI NO: 33147016 NR Description: putative early nodulin 8 precursor [Oryza sativa
  misc_feature (23)..(216): Homolog of NCBI NO: 30909057 NR Description: ENSP-like protein [Hevea brasiliensis]
  misc_feature (24)..(216): Homolog of NCBI NO: 15231558 NR Description: nodulin, putative; protein id: At3g26430.1,
  misc_feature (19)..(233): Homolog of NCBI NO: 15234074 NR Description: putative acetyltransferase; protein id: [Arabidopsis thaliana] >gi|25407083|pir||H85014 probable
  misc_feature (19)..(233): Homolog of NCBI NO: 34898314 NR Description: ESTs AU075322(C11109),D22430(C11109) correspond
  misc_feature (23)..(224): Homolog of NCBI NO: 18390045 NR Description: Enod8.1 [Medicago truncatula]
  misc_feature (23)..(224): Homolog of NCBI NO: 25457244 NR Description: early nodule-specific protein ENOD8 [imported] -
SLVLYTPTRMQIGCRGTMRTAWPLLLVATALLSTSAARARRTCRFPAVFNFGDSNSDTGGFWAAFPAQQGPFGMTYFGRPAGRASDGRLVIDFIAQAMGLPLLSPYLQSIGSDYRHGANFATLASTALLPNTSVFVTGTSPFSLGIQLNQMKEFRNRVLASKGNNGQLPGPEILGDALYTIDIGQNDFTSNLGSLGVESVKRSLPSVVSQISWTIQHRSSQLHGVQHGARRMLPGIPRGASS

SEQ ID NO: 9152 - protein, 233 aa, Zea mays subsp. mays
  peptide (1)..(233): Ceres Seq. ID no. 12351754
  misc_feature (39)..(224): Pfam Name: GDSL-like Lipase/Acylhydrolase Pfam Description: GDSL-like Lipase/Acylhydrolase
  misc_feature (39)..(224): Pfam Name: GDSL-like Lipase/Acylhydrolase Pfam Description: GDSL-like Lipase/Acylhydrolase
  misc_feature (10)..(224): Homolog of NCBI NO: 34898314 NR Description: ESTs AU075322(C11109),D22430(C11109) correspond
  misc_feature (10)..(224): Homolog of NCBI NO: 15234074 NR Description: putative acetyltransferase; protein id: [Arabidopsis thaliana] >gi|25407083|pir||H85014 probable
  misc_feature (10)..(207): Homolog of NCBI NO: 7485222 NR Description: hypothetical protein A_IG002N01.17 - Arabidopsis >gi|2191137|gb|AAB61024.1| similar to the GDSL family of
  misc_feature (1)..(207): Homolog of NCBI NO: 33147015 NR Description: putative early nodulin 8 precursor [Oryza sativa
  misc_feature (1)..(207): Homolog of NCBI NO: 34901120 NR Description: contains ESTs
  misc_feature (10)..(224): Homolog of NCBI NO: 15234074 NR Description: putative acetyltransferase; protein id: [Arabidopsis thaliana] >gi|25407083|pir||H85014 probable
  misc_feature (1)..(207): Homolog of NCBI NO: 33147015 NR Description: putative early nodulin 8 precursor [Oryza sativa
  misc_feature (14)..(215): Homolog of NCBI NO: 25457244 NR Description: early nodule-specific protein ENOD8 [imported] -
  misc_feature (14)..(215): Homolog of NCBI NO: 18390045 NR Description: Enod8.1 [Medicago truncatula]
  misc_feature (15)..(207): Homolog of NCBI NO: 15231558 NR Description: nodulin, putative; protein id: At3g26430.1,
  misc_feature (14)..(207): Homolog of NCBI NO: 30909057 NR Description: ENSP-like protein [Hevea brasiliensis]
  misc_feature (22)..(208): Homolog of NCBI NO: 33147016 NR Description: putative early nodulin 8 precursor [Oryza sativa
  misc_feature (1)..(207): Homolog of NCBI NO: 34901120 NR Description: contains ESTs
  misc_feature (10)..(207): Homolog of NCBI NO: 7485222 NR Description: hypothetical protein A_IG002N01.17 - Arabidopsis >gi|2191137|gb|AAB61024.1| similar to the GDSL family of
  misc_feature (10)..(224): Homolog of NCBI NO: 34898314 NR Description: ESTs AU075322(C11109),D22430(C11109) correspond
  misc_feature (22)..(208): Homolog of NCBI NO: 33147016 NR Description: putative early nodulin 8 precursor [Oryza sativa
  misc_feature (14)..(207): Homolog of NCBI NO: 30909057 NR Description: ENSP-like protein [Hevea brasiliensis]
  misc_feature (15)..(207): Homolog of NCBI NO: 15231558 NR Description: nodulin, putative; protein id: At3g26430.1,
  misc_feature (14)..(215): Homolog of NCBI NO: 18390045 NR Description: Enod8.1 [Medicago truncatula]
  misc_feature (14)..(215): Homolog of NCBI NO: 25457244 NR Description: early nodule-specific protein ENOD8 [imported] -
MQIGCRGTMRTAWPLLLVATALLSTSAARARRTCRFPAVFNFGDSNSDTGGFWAAFPAQQGPFGMTYFGRPAGRASDGRLVIDFIAQAMGLPLLSPYLQSIGSDYRHGANFATLASTALLPNTSVFVTGTSPFSLGIQLNQMKEFRNRVLASKGNNGQLPGPEILGDALYTIDIGQNDFTSNLGSLGVESVKRSLPSVVSQISWTIQHRSSQLHGVQHGARRMLPGIPRGASS

SEQ ID NO: 9153 - protein, 230 aa, Zea mays subsp. mays
  peptide (1)..(230): Ceres Seq. ID no. 12351755
ISSSLHTDTHADRLPGHDEDRVAAAPRGDGAAFDFGSKGQEDLQVPCRLQLRRLQLRHRRLLGGLPGAAGPVRHDVLRQAGRPRLRRPPRHRLHSASDGAAAAEPLPAVHRVGLPARRQLRDAGVDGAAAQHVGVRHRDQPLLPRHPAQPDEGVQEQSARLQRKQRPTPWPGNLGRRSVHNRHRAERLHLEPWIPRGRKRQAKPTFSRQPDLLDDTASELATSWCSTWRP

SEQ ID NO: 9154 - DNA, 1958 bp, Zea mays subsp. mays
  misc_feature (1)..(1958): Ceres Seq. ID no. 12360014
  misc_feature: MA Experiment ID: 108534 Result: Up-regulated in Transcription
  misc_feature: MA Experiment 108534 PARAMETER Experiment Name: Zm_4deg_Cold_P Parameter: Age (hr) Value: 8
  misc_feature: MA Experiment 108534 PARAMETER Experiment Name: Zm_4deg_Cold_P Parameter: Organism Value: Zea mays
  misc_feature: MA Experiment 108534 PARAMETER Experiment Name: Zm_4deg_Cold_P Parameter: Plant Line Value: 35A19
  misc_feature: MA Experiment 108534 PARAMETER Experiment Name: Zm_4deg_Cold_P Parameter: Temperature (deg C) Value: 4 vs. 22
  misc_feature: MA Experiment 108534 PARAMETER Experiment Name: Zm_4deg_Cold_P Parameter: Timepoint (hr) Value: 6
  misc_feature: MA Experiment 108534 PARAMETER Experiment Name: Zm_4deg_Cold_P Parameter: Tissue Value: Aerial
  misc_feature: MA Experiment ID: 108687 Result: Up-regulated in Transcription
  misc_feature: MA Experiment 108687 PARAMETER Experiment Name: Zm_Embryos-Flowers__P Parameter: Tissue Value: Embryo vs. Aerial+
  misc_feature: MA Experiment ID: 20000534 Result: Down-regulated in Transcription
  misc_feature: MA Experiment 20000534 PARAMETER Experiment Name: Zm_Hybrid_Pollen_P Parameter: Age (day) Value: 8
  misc_feature: MA Experiment 20000534 PARAMETER Experiment Name: Zm_Hybrid_Pollen_P Parameter: Organism Value: Zea mays
  misc_feature: MA Experiment 20000534 PARAMETER Experiment Name: Zm_Hybrid_Pollen_P Parameter: Plant Line Value: 35A19
  misc_feature: MA Experiment 20000534 PARAMETER Experiment Name: Zm_Hybrid_Pollen_P Parameter: Tissue Value: Pollen vs. Aerial
accccttcgccccgtatcgttcccttcctcctctcttttccccaccgccccctttcttggcgtctacccggcgcgaccaggaccgaatcctaaggccgccggccgccgccgccgccgcctgctcccgttggacacggtaaaacctcctccctcctcgtccgtgtcgccggggtccggggtccaagcggctgcgcgcgcggtctcgccgccggcgccgatctgggcgccgccggcgttgaccctgtccgattcgccccgggctgcgagacctctgcctccctgaccggttactcggaacttctactcgcctgtgggatcctccagcggatcagatgagcacatcgacttgagcaccacgctttttggttggaaggcgaatcgtagagctttcctgggtttctctgagggctcttctcagatgtggcgtcctccagagtctaccacatactgtttgaggagtcctggttcttttcggaatccggactaaccaagggctcctactgtgcacgactgcttgacaggatatttcggattattattatgtgcgtgcgagcgcgcgtgtgcgccttctagagagtttggagtaaagaaaccaaccctgcatctgtattctgtctgtctgtgctgcttcgaataagccttgcatctcgctgacttgggatataactatgccgaaggacaggagctcccgcgtttcctcttatgagagccgccgggctggtgcctccccatacttctcatcgtctcatggacagagcagttcttgtcgccggtccgaggagtcttgtggggcagcagcggcggcagcagcaaagcaagctgcagagtgggaggatgttcggtgcccggtgtgcatggaccacccgcacaacgccgtcctgctggtctgctcctcacacgagaagggctgccgccccttcatgtgcgacaccagctcgcggcactcgaactgctatgaccagtaccggaaggcctccaaggattcaaggacagagtgcagcgagtgccagcagcaggttcagctctcgtgcccactgtgccgtgggccggtcagcgattgcatcaaggactacagcgcgcggaggttcatgaacaccaaggtccggtcgtgcaccacggagtcgtgcgagttcaggggcgcctaccaggagctgaggaagcatgctagggtggagcatccaacaggaaggccaatggaggtagaccctgagcggcagcgggactggcgccggatggagcagcaacgggaccttggagacttgatgagcatgctgcgttcagggttcaacagcaatattgaggacgacagtggcgggcttggagacaccgaagaagggggagaggaagctgaaatgactccggcctccataaccatggtcttcatcatgccatctagaggctcaatcatgcagtacctatcggaacgcagcagaacgatcattctggtcagtcggaggcgagcaagcagcagcagcggtggcgacgctgaagccactgctccagacagcgaggaaggtgatgaccctatgccatcggcagaggcatctgctggttcacagcattcttccgaacaagaggaggctgacggtgaccctgcccaatgacgtaagtcagctggcaagaggtgtgccatggcatcttcttagcctgaagatcccgaccaacatggcaacatggtatgtggcgaagaaaaacatggatgcaggtgccaccaaggcgtagccaggacaatctgtctacgcaggaaaatcgaggggaatcagcatcgcgcgaaggcttcagaaacgtggtggcctctagtaccaattctaatgtttccgcggggttctgtggcaatggagagagagaaacaattgggtggtagctatcttgtctgaatggatttcattttccttgcattgtaattctctaatatatattatcatatgaaatagattcggccgtatttgcactgcgtg

SEQ ID NO: 9155 - protein, 311 aa, Zea mays subsp. mays
  peptide (1)..(311): Ceres Seq. ID no. 12360015
  misc_feature (1)..(310): Homolog of NCBI NO: 34912600 NR Description: P0046B10.17 [Oryza sativa (japonica
  misc_feature (109)..(308): Homolog of NCBI NO: 18404727 NR Description: expressed protein; protein id: At3g25910.1, by cDNA: gi_15983782 [Arabidopsis thaliana] gb|AAF16548.1~gene_id:MPE11.8~similar to unknown protein
  misc_feature (34)..(105): Homolog of NCBI NO: 18404727 NR Description: expressed protein; protein id: At3g25910.1, by cDNA: gi_15983782 [Arabidopsis thaliana] gb|AAF16548.1~gene_id:MPE11.8~similar to unknown protein
  misc_feature (98)..(239): Homolog of NCBI NO: 38346521 NR Description: OSJNBa0027H09.16 [Oryza sativa (japonica
  misc_feature (43)..(112): Homolog of NCBI NO: 38346521 NR Description: OSJNBa0027H09.16 [Oryza sativa (japonica
  misc_feature (1)..(240): Homolog of NCBI NO: 15221290 NR Description: unknown protein; protein id: At1g68140.1, by cDNA: gi_17064999 [Arabidopsis thaliana]
  misc_feature (112)..(245): Homolog of NCBI NO: 15230170 NR Description: unknown protein; protein id: At3g24740.1, by cDNA: gi_19715578 [Arabidopsis thaliana] gb|AAF16548.1~gene_id:K7P8.3~similar to unknown protein
  misc_feature (53)..(109): Homolog of NCBI NO: 15230170 NR Description: unknown protein; protein id: At3g24740.1, by cDNA: gi_19715578 [Arabidopsis thaliana] gb|AAF16548.1~gene_id:K7P8.3~similar to unknown protein
  misc_feature (1)..(200): Homolog of NCBI NO: 18394245 NR Description: expressed protein; protein id: At1g15430.1, by cDNA: gi_13430773, supported by cDNA: gi_15293248 [Arabidopsis >gi|13430774|gb|AAK26009.1|AF360299_1 unknown protein
  misc_feature (32)..(200): Homolog of NCBI NO: 5103842 NR Description: F9L1.39 [Arabidopsis thaliana]
MPKDRSSRVSSYESRRAGASPYFSSSHGQSSSCRRSEESCGAAAAAAAKQAAEWEDVRCPVCMDHPHNAVLLVCSSHEKGCRPFMCDTSSRHSNCYDQYRKASKDSRTECSECQQQVQLSCPLCRGPVSDCIKDYSARRFMNTKVRSCTTESCEFRGAYQELRKHARVEHPTGRPMEVDPERQRDWRRMEQQRDLGDLMSMLRSGFNSNIEDDSGGLGDTEEGGEEAEMTPASITMVFIMPSRGSIMQYLSERSRTIILVSRRRASSSSGGDAEATAPDSEEGDDPMPSAEASAGSQHSSEQEEADGDPAQ

SEQ ID NO: 9156 - protein, 249 aa, Zea mays subsp. mays
  peptide (1)..(249): Ceres Seq. ID no. 12360016
  misc_feature (1)..(248): Homolog of NCBI NO: 34912600 NR Description: P0046B10.17 [Oryza sativa (japonica
  misc_feature (47)..(246): Homolog of NCBI NO: 18404727 NR Description: expressed protein; protein id: At3g25910.1, by cDNA: gi_15983782 [Arabidopsis thaliana] gb|AAF16548.1~gene_id:MPE11.8~similar to unknown protein
  misc_feature (1)..(43): Homolog of NCBI NO: 18404727 NR Description: expressed protein; protein id: At3g25910.1, by cDNA: gi_15983782 [Arabidopsis thaliana] gb|AAF16548.1~gene_id:MPE11.8~similar to unknown protein
  misc_feature (36)..(177): Homolog of NCBI NO: 38346521 NR Description: OSJNBa0027H09.16 [Oryza sativa (japonica
  misc_feature (1)..(50): Homolog of NCBI NO: 38346521 NR Description: OSJNBa0027H09.16 [Oryza sativa (japonica
  misc_feature (1)..(178): Homolog of NCBI NO: 15221290 NR Description: unknown protein; protein id: At1g68140.1, by cDNA: gi_17064999 [Arabidopsis thaliana]
  misc_feature (50)..(183): Homolog of NCBI NO: 15230170 NR Description: unknown protein; protein id: At3g24740.1, by cDNA: gi_19715578 [Arabidopsis thaliana] gb|AAF16548.1~gene_id:K7P8.3~similar to unknown protein
  misc_feature (1)..(47): Homolog of NCBI NO: 15230170 NR Description: unknown protein; protein id: At3g24740.1, by cDNA: gi_19715578 [Arabidopsis thaliana] gb|AAF16548.1~gene_id:K7P8.3~similar to unknown protein
  misc_feature (1)..(138): Homolog of NCBI NO: 18394245 NR Description: expressed protein; protein id: At1g15430.1, by cDNA: gi_13430773, supported by cDNA: gi_15293248 [Arabidopsis >gi|13430774|gb|AAK26009.1|AF360299_1 unknown protein
  misc_feature (1)..(138): Homolog of NCBI NO: 5103842 NR Description: F9L1.39 [Arabidopsis thaliana]
MDHPHNAVLLVCSSHEKGCRPFMCDTSSRHSNCYDQYRKASKDSRTECSECQQQVQLSCPLCRGPVSDCIKDYSARRFMNTKVRSCTTESCEFRGAYQELRKHARVEHPTGRPMEVDPERQRDWRRMEQQRDLGDLMSMLRSGFNSNIEDDSGGLGDTEEGGEEAEMTPASITMVFIMPSRGSIMQYLSERSRTIILVSRRRASSSSGGDAEATAPDSEEGDDPMPSAEASAGSQHSSEQEEADGDPAQ

SEQ ID NO: 9157 - protein, 227 aa, Zea mays subsp. mays
  peptide (1)..(227): Ceres Seq. ID no. 12360017
  misc_feature (1)..(226): Homolog of NCBI NO: 34912600 NR Description: P0046B10.17 [Oryza sativa (japonica
  misc_feature (25)..(224): Homolog of NCBI NO: 18404727 NR Description: expressed protein; protein id: At3g25910.1, by cDNA: gi_15983782 [Arabidopsis thaliana] gb|AAF16548.1~gene_id:MPE11.8~similar to unknown protein
  misc_feature (1)..(21): Homolog of NCBI NO: 18404727 NR Description: expressed protein; protein id: At3g25910.1, by cDNA: gi_15983782 [Arabidopsis thaliana] gb|AAF16548.1~gene_id:MPE11.8~similar to unknown protein
  misc_feature (14)..(155): Homolog of NCBI NO: 38346521 NR Description: OSJNBa0027H09.16 [Oryza sativa (japonica
  misc_feature (1)..(28): Homolog of NCBI NO: 38346521 NR Description: OSJNBa0027H09.16 [Oryza sativa (japonica
  misc_feature (1)..(156): Homolog of NCBI NO: 15221290 NR Description: unknown protein; protein id: At1g68140.1, by cDNA: gi_17064999 [Arabidopsis thaliana]
  misc_feature (28)..(161): Homolog of NCBI NO: 15230170 NR Description: unknown protein; protein id: At3g24740.1, by cDNA: gi_19715578 [Arabidopsis thaliana] gb|AAF16548.1~gene_id:K7P8.3~similar to unknown protein
  misc_feature (1)..(25): Homolog of NCBI NO: 15230170 NR Description: unknown protein; protein id: At3g24740.1, by cDNA: gi_19715578 [Arabidopsis thaliana] gb|AAF16548.1~gene_id:K7P8.3~similar to unknown protein
  misc_feature (1)..(116): Homolog of NCBI NO: 18394245 NR Description: expressed protein; protein id: At1g15430.1, by cDNA: gi_13430773, supported by cDNA: gi_15293248 [Arabidopsis >gi|13430774|gb|AAK26009.1|AF360299_1 unknown protein
  misc_feature (1)..(116): Homolog of NCBI NO: 5103842 NR Description: F9L1.39 [Arabidopsis thaliana]
MCDTSSRHSNCYDQYRKASKDSRTECSECQQQVQLSCPLCRGPVSDCIKDYSARRFMNTKVRSCTTESCEFRGAYQELRKHARVEHPTGRPMEVDPERQRDWRRMEQQRDLGDLMSMLRSGFNSNIEDDSGGLGDTEEGGEEAEMTPASITMVFIMPSRGSIMQYLSERSRTIILVSRRRASSSSGGDAEATAPDSEEGDDPMPSAEASAGSQHSSEQEEADGDPAQ

SEQ ID NO: 9158 - DNA, 500 bp, Zea mays subsp. mays
  misc_feature (1)..(500): Ceres Seq. ID no. 1548123
  misc_feature: MA Experiment ID: 108527 Result: Up-regulated in Transcription
  misc_feature: MA Experiment 108527 PARAMETER Experiment Name: Zm_5mM_NO_P Parameter: Age (day) Value: 8
  misc_feature: MA Experiment 108527 PARAMETER Experiment Name: Zm_5mM_NO_P Parameter: Organism Value: Zea mays
  misc_feature: MA Experiment 108527 PARAMETER Experiment Name: Zm_5mM_NO_P Parameter: Plant Line Value: 35A19
  misc_feature: MA Experiment 108527 PARAMETER Experiment Name: Zm_5mM_NO_P Parameter: Timepoint (hr) Value: 6
  misc_feature: MA Experiment 108527 PARAMETER Experiment Name: Zm_5mM_NO_P Parameter: Tissue Value: Aerial
  misc_feature: MA Experiment 108527 PARAMETER Experiment Name: Zm_5mM_NO_P Parameter: Treatment Value: 5mM NO vs. No Treatment
  misc_feature: MA Experiment ID: 20000108 Result: Up-regulated in Transcription
  misc_feature: MA Experiment 20000108 PARAMETER Experiment Name: Zm_Root-Tips_P Parameter: Age (day) Value: 12
  misc_feature: MA Experiment 20000108 PARAMETER Experiment Name: Zm_Root-Tips_P Parameter: Organism Value: Zea mays
  misc_feature: MA Experiment 20000108 PARAMETER Experiment Name: Zm_Root-Tips_P Parameter: Tissue Value: Root tips vs. Root mid region    35
  misc_feature: MA Experiment 20000108 PARAMETER Experiment Name: Zm_Root-Tips_P Parameter: Tissue Value: Root tips vs. Root mid region   Sequence Listing-Misc Features (4)
gagtcaggcccaggcctaacctcagttcatccgagcagccgaacacgcccgccgccattctacgccctgctgcccaggtcggacggaccctttgccggagacgagcacacgccacagcagagcagcgcgaagcgagagatccaatggcggcggcggaggggcagtgggtgctcatggcaacggggcggacgccgactaacattgcggtgatcaagtactgggggaagcgggacgaggcgctcatcctccccatcaacgacagcatcagcgtaacgctcgaccctgaccatctctccgccaccaccactgtcgccgtcagcccctcattcccttccgaccgcatgtggctcaatggcaaggagatctcgctattaggaggaaggtttcagagctgcctcagagaaatcagaaagcgtgctcgtgactttgaggacaaggagaagggcgtcaagatcaagaaagaggactgggacaagttgcatgttcacatagcctcgtac

SEQ ID NO: 9159 - protein, 166 aa, Zea mays subsp. mays
  peptide (1)..(166): Ceres Seq. ID no. 1548124
  misc_feature (51)..(165): Homolog of NCBI NO: 15224931 NR Description: mevalonate diphosphate decarboxylase; protein id: supported by cDNA: 35493. [Arabidopsis thaliana]
  misc_feature (55)..(165): Homolog of NCBI NO: 16417950 NR Description: mevalonate disphosphate decarboxylase [Hevea
  misc_feature (51)..(165): Homolog of NCBI NO: 11281655 NR Description: diphosphomevalonate decarboxylase (EC 4.1.1.33)
  misc_feature (51)..(165): Homolog of NCBI NO: 18410026 NR Description: DIPHOSPHOMEVALONATE DECARBOXYLASE - like protein;
  misc_feature (58)..(165): Homolog of NCBI NO: 21593039 NR Description: mevalonate diphosphate decarboxylase [Arabidopsis
  misc_feature (51)..(165): Homolog of NCBI NO: 21593243 NR Description: diphosphomevalonate decarboxylase-like protein
  misc_feature (50)..(161): Homolog of NCBI NO: 20149736 NR Description: mevalonate (diphospho) decarboxylase; decarboxylase [Mus musculus] >gi|14250208|gb|AAH08526.1| Unknown
  misc_feature (50)..(161): Homolog of NCBI NO: 23814095 NR Description: Diphosphomevalonate decarboxylase (Mevalonate decarboxylase) (Mevalonate (diphospho)decarboxylase)
  misc_feature (50)..(161): Homolog of NCBI NO: 26354448 NR Description: unnamed protein product [Mus musculus]
  misc_feature (50)..(161): Homolog of NCBI NO: 13592005 NR Description: mevalonate pyrophosphate decarboxylase [Rattus >gi|2498339|sp|Q62967|ER19_RAT Diphosphomevalonate decarboxylase pyrophosphate decarboxylase) (Mevalonate
VRPRPNLSSSEQPNTPAAILRPAAQVGRTLCRRRAHATAEQREARDPMAAAEGQWVLMATGRTPTNIAVIKYWGKRDEALILPINDSISVTLDPDHLSATTTVAVSPSFPSDRMWLNGKEISLLGGRFQSCLREIRKRARDFEDKEKGVKIKKEDWDKLHVHIASY

SEQ ID NO: 9160 - protein, 119 aa, Zea mays subsp. mays
  peptide (1)..(119): Ceres Seq. ID no. 1548125
  misc_feature (4)..(118): Homolog of NCBI NO: 15224931 NR Description: mevalonate diphosphate decarboxylase; protein id: supported by cDNA: 35493. [Arabidopsis thaliana]
  misc_feature (8)..(118): Homolog of NCBI NO: 16417950 NR Description: mevalonate disphosphate decarboxylase [Hevea
  misc_feature (4)..(118): Homolog of NCBI NO: 11281655 NR Description: diphosphomevalonate decarboxylase (EC 4.1.1.33)
  misc_feature (4)..(118): Homolog of NCBI NO: 18410026 NR Description: DIPHOSPHOMEVALONATE DECARBOXYLASE - like protein;
  misc_feature (11)..(118): Homolog of NCBI NO: 21593039 NR Description: mevalonate diphosphate decarboxylase [Arabidopsis
  misc_feature (4)..(118): Homolog of NCBI NO: 21593243 NR Description: diphosphomevalonate decarboxylase-like protein
  misc_feature (3)..(114): Homolog of NCBI NO: 20149736 NR Description: mevalonate (diphospho) decarboxylase; decarboxylase [Mus musculus] >gi|14250208|gb|AAH08526.1| Unknown
  misc_feature (3)..(114): Homolog of NCBI NO: 26354448 NR Description: unnamed protein product [Mus musculus]
  misc_feature (3)..(114): Homolog of NCBI NO: 23814095 NR Description: Diphosphomevalonate decarboxylase (Mevalonate decarboxylase) (Mevalonate (diphospho)decarboxylase)
  misc_feature (3)..(114): Homolog of NCBI NO: 13592005 NR Description: mevalonate pyrophosphate decarboxylase [Rattus >gi|2498339|sp|Q62967|ER19_RAT Diphosphomevalonate decarboxylase pyrophosphate decarboxylase) (Mevalonate
MAAAEGQWVLMATGRTPTNIAVIKYWGKRDEALILPINDSISVTLDPDHLSATTTVAVSPSFPSDRMWLNGKEISLLGGRFQSCLREIRKRARDFEDKEKGVKIKKEDWDKLHVHIASY

SEQ ID NO: 9161 - protein, 109 aa, Zea mays subsp. mays
  peptide (1)..(109): Ceres Seq. ID no. 1548126
  misc_feature (1)..(108): Homolog of NCBI NO: 15224931 NR Description: mevalonate diphosphate decarboxylase; protein id: supported by cDNA: 35493. [Arabidopsis thaliana]
  misc_feature (1)..(108): Homolog of NCBI NO: 16417950 NR Description: mevalonate disphosphate decarboxylase [Hevea
  misc_feature (1)..(108): Homolog of NCBI NO: 11281655 NR Description: diphosphomevalonate decarboxylase (EC 4.1.1.33)
  misc_feature (1)..(108): Homolog of NCBI NO: 18410026 NR Description: DIPHOSPHOMEVALONATE DECARBOXYLASE - like protein;
  misc_feature (1)..(108): Homolog of NCBI NO: 21593039 NR Description: mevalonate diphosphate decarboxylase [Arabidopsis
  misc_feature (1)..(108): Homolog of NCBI NO: 21593243 NR Description: diphosphomevalonate decarboxylase-like protein
  misc_feature (1)..(104): Homolog of NCBI NO: 20149736 NR Description: mevalonate (diphospho) decarboxylase; decarboxylase [Mus musculus] >gi|14250208|gb|AAH08526.1| Unknown
  misc_feature (1)..(104): Homolog of NCBI NO: 23814095 NR Description: Diphosphomevalonate decarboxylase (Mevalonate decarboxylase) (Mevalonate (diphospho)decarboxylase)
  misc_feature (1)..(104): Homolog of NCBI NO: 26354448 NR Description: unnamed protein product [Mus musculus]
  misc_feature (1)..(104): Homolog of NCBI NO: 13592005 NR Description: mevalonate pyrophosphate decarboxylase [Rattus >gi|2498339|sp|Q62967|ER19_RAT Diphosphomevalonate decarboxylase pyrophosphate decarboxylase) (Mevalonate
MATGRTPTNIAVIKYWGKRDEALILPINDSISVTLDPDHLSATTTVAVSPSFPSDRMWLNGKEISLLGGRFQSCLREIRKRARDFEDKEKGVKIKKEDWDKLHVHIASY

SEQ ID NO: 9162 - DNA, 1149 bp, Zea mays subsp. mays; identical to SEQ ID NO: 2130
  misc_feature (1)..(1149): Ceres Seq. ID no. 12406482
  misc_feature: MA Experiment ID: 108535 Result: Up-regulated in Transcription
  misc_feature: MA Experiment 108535 PARAMETER Experiment Name: Zm_Meristem_P Parameter: Age (day) Value: 8
  misc_feature: MA Experiment 108535 PARAMETER Experiment Name: Zm_Meristem_P Parameter: Organism Value: Zea mays
  misc_feature: MA Experiment 108535 PARAMETER Experiment Name: Zm_Meristem_P Parameter: Plant Line Value: 35A19
  misc_feature: MA Experiment 108535 PARAMETER Experiment Name: Zm_Meristem_P Parameter: Tissue Value: Root Meristem vs. Above Root Meristem
  misc_feature: MA Experiment ID: 108544 Result: Down-regulated in Transcription
  misc_feature: MA Experiment ID: 20000488 Result: Up-regulated in Transcription
  misc_feature: MA Experiment 20000488 PARAMETER Experiment Name: Zm_50mM_NH4NO3_L_to_H_P Parameter: Organism Value: Zea mays
  misc_feature: MA Experiment 20000488 PARAMETER Experiment Name: Zm_50mM_NH4NO3_L_to_H_P Parameter: Timepoint (hr) Value: 8
  misc_feature: MA Experiment 20000488 PARAMETER Experiment Name: Zm_50mM_NH4NO3_L_to_H_P Parameter: Tissue Value: Leaves
  misc_feature: MA Experiment 20000488 PARAMETER Experiment Name: Zm_50mM_NH4NO3_L_to_H_P Parameter: Treatment Value: 50mM NH4NO3 vs. 100mM Mannitol

SEQ ID NO: 9163 - protein, 226 aa, Zea mays subsp. mays; identical to SEQ ID NO: 2131
  peptide (1)..(226): Ceres Seq. ID no. 12406483
  misc_feature (1)..(225): Pfam Name: Eukaryotic translation initiation factor 3 Pfam Description: Eukaryotic translation initiation factor 3
  misc_feature (1)..(225): Homolog of NCBI NO: 23396617 NR Description: Eukaryotic translation initiation factor 3
  misc_feature (5)..(226): Homolog of NCBI NO: 15234123 NR Description: putative protein; protein id: At4g33250.1, by cDNA: gi_12407752, supported by cDNA: gi_14335023, supported cDNA: gi_15292988, supported by cDNA: gi_20147104, supported by
  misc_feature (15)..(221): Homolog of NCBI NO: 21312044 NR Description: RIKEN cDNA 1200009C21 [Mus musculus]
  misc_feature (15)..(221): Homolog of NCBI NO: 27730981 NR Description: similar to RIKEN cDNA 1200009C21 [Mus musculus]
  misc_feature (15)..(221): Homolog of NCBI NO: 10801345 NR Description: muscle specific gene [Homo sapiens]
  misc_feature (15)..(221): Homolog of NCBI NO: 5114051 NR Description: HSPC029 [Homo sapiens]
  misc_feature (8)..(218): Homolog of NCBI NO: 19922704 NR Description: CG10306-PA [Drosophila melanogaster]
  misc_feature (8)..(182): Homolog of NCBI NO: 38047673 NR Description: similar to Drosophila melanogaster CG10306
  misc_feature (54)..(221): Homolog of NCBI NO: 20380678 NR Description: Similar to RIKEN cDNA 1200009C21 gene [Mus
  misc_feature (164)..(226): Homolog of NCBI NO: 20453126 NR Description: AT4g33250/F17M5_10 [Arabidopsis thaliana]

SEQ ID NO: 9164 - protein, 166 aa, Zea mays subsp. mays; identical to SEQ ID NO: 2132
  peptide (1)..(166): Ceres Seq. ID no. 12406484
  misc_feature (1)..(165): Pfam Name: Eukaryotic translation initiation factor 3 Pfam Description: Eukaryotic translation initiation factor 3
  misc_feature (1)..(161): Homolog of NCBI NO: 10801345 NR Description: muscle specific gene [Homo sapiens]
  misc_feature (1)..(161): Homolog of NCBI NO: 5114051 NR Description: HSPC029 [Homo sapiens]
  misc_feature (1)..(158): Homolog of NCBI NO: 19922704 NR Description: CG10306-PA [Drosophila melanogaster]
  misc_feature (1)..(165): Homolog of NCBI NO: 23396617 NR Description: Eukaryotic translation initiation factor 3
  misc_feature (1)..(161): Homolog of NCBI NO: 21312044 NR Description: RIKEN cDNA 1200009C21 [Mus musculus]
  misc_feature (1)..(161): Homolog of NCBI NO: 27730981 NR Description: similar to RIKEN cDNA 1200009C21 [Mus musculus]
  misc_feature (1)..(166): Homolog of NCBI NO: 15234123 NR Description: putative protein; protein id: At4g33250.1, by cDNA: gi_12407752, supported by cDNA: gi_14335023, supported cDNA: gi_15292988, supported by cDNA: gi_20147104, supported by
  misc_feature (1)..(122): Homolog of NCBI NO: 38047673 NR Description: similar to Drosophila melanogaster CG10306
  misc_feature (1)..(161): Homolog of NCBI NO: 20380678 NR Description: Similar to RIKEN cDNA 1200009C21 gene [Mus
  misc_feature (104)..(166): Homolog of NCBI NO: 20453126 NR Description: AT4g33250/F17M5_10 [Arabidopsis thaliana]

SEQ ID NO: 9165 - protein, 152 aa, Zea mays subsp. mays; identical to SEQ ID NO: 2133
  peptide (1)..(152): Ceres Seq. ID no. 12406485
  misc_feature (1)..(151): Pfam Name: Eukaryotic translation initiation factor 3 Pfam Description: Eukaryotic translation initiation factor 3
  misc_feature (1)..(151): Homolog of NCBI NO: 23396617 NR Description: Eukaryotic translation initiation factor 3
  misc_feature (1)..(152): Homolog of NCBI NO: 15234123 NR Description: putative protein; protein id: At4g33250.1, by cDNA: gi_12407752, supported by cDNA: gi_14335023, supported cDNA: gi_15292988, supported by cDNA: gi_20147104, supported by
  misc_feature (1)..(147): Homolog of NCBI NO: 21312044 NR Description: RIKEN cDNA 1200009C21 [Mus musculus]
  misc_feature (1)..(147): Homolog of NCBI NO: 27730981 NR Description: similar to RIKEN cDNA 1200009C21 [Mus musculus]
  misc_feature (1)..(147): Homolog of NCBI NO: 10801345 NR Description: muscle specific gene [Homo sapiens]
  misc_feature (1)..(147): Homolog of NCBI NO: 5114051 NR Description: HSPC029 [Homo sapiens]
  misc_feature (1)..(144): Homolog of NCBI NO: 19922704 NR Description: CG10306-PA [Drosophila melanogaster]
  misc_feature (1)..(108): Homolog of NCBI NO: 38047673 NR Description: similar to Drosophila melanogaster CG10306
  misc_feature (1)..(147): Homolog of NCBI NO: 20380678 NR Description: Similar to RIKEN cDNA 1200009C21 gene [Mus
  misc_feature (90)..(152): Homolog of NCBI NO: 20453126 NR Description: AT4g33250/F17M5_10 [Arabidopsis thaliana]

SEQ ID NO: 9166 - DNA, 1706 bp, Zea mays subsp. mays
  misc_feature (1)..(1706): Ceres Seq. ID no. 12372627
  misc_feature: MA Experiment ID: 108535 Result: Up-regulated in Transcription
  misc_feature: MA Experiment 108535 PARAMETER Experiment Name: Zm_Meristem_P Parameter: Age (day) Value: 8
  misc_feature: MA Experiment 108535 PARAMETER Experiment Name: Zm_Meristem_P Parameter: Organism Value: Zea mays
  misc_feature: MA Experiment 108535 PARAMETER Experiment Name: Zm_Meristem_P Parameter: Plant Line Value: 35A19
  misc_feature: MA Experiment 108535 PARAMETER Experiment Name: Zm_Meristem_P Parameter: Tissue Value: Root Meristem vs. Above Root Meristem
  misc_feature: MA Experiment ID: 20000108 Result: Up-regulated in Transcription
  misc_feature: MA Experiment 20000108 PARAMETER Experiment Name: Zm_Root-Tips_P Parameter: Age (day) Value: 12
  misc_feature: MA Experiment 20000108 PARAMETER Experiment Name: Zm_Root-Tips_P Parameter: Organism Value: Zea mays
  misc_feature: MA Experiment 20000108 PARAMETER Experiment Name: Zm_Root-Tips_P Parameter: Tissue Value: Root tips vs. Root mid region    35
  misc_feature: MA Experiment 20000108 PARAMETER Experiment Name: Zm_Root-Tips_P Parameter: Tissue Value: Root tips vs. Root mid region   Sequence Listing-Misc Features (4)
  misc_feature: MA Experiment ID: 20000487 Result: Up-regulated in Transcription
  misc_feature: MA Experiment 20000487 PARAMETER Experiment Name: Zm_50mM_NH4NO3_L_to_H_P Parameter: Organism Value: Zea mays
  misc_feature: MA Experiment 20000487 PARAMETER Experiment Name: Zm_50mM_NH4NO3_L_to_H_P Parameter: Timepoint (hr) Value: 4
  misc_feature: MA Experiment 20000487 PARAMETER Experiment Name: Zm_50mM_NH4NO3_L_to_H_P Parameter: Tissue Value: Leaves
  misc_feature: MA Experiment 20000487 PARAMETER Experiment Name: Zm_50mM_NH4NO3_L_to_H_P Parameter: Treatment Value: 50mM NH4NO3 vs. 100mM Mannitol
  misc_feature: MA Experiment ID: 20000534 Result: Down-regulated in Transcription
  misc_feature: MA Experiment 20000534 PARAMETER Experiment Name: Zm_Hybrid_Pollen_P Parameter: Age (day) Value: 8
  misc_feature: MA Experiment 20000534 PARAMETER Experiment Name: Zm_Hybrid_Pollen_P Parameter: Organism Value: Zea mays
  misc_feature: MA Experiment 20000534 PARAMETER Experiment Name: Zm_Hybrid_Pollen_P Parameter: Plant Line Value: 35A19
  misc_feature: MA Experiment 20000534 PARAMETER Experiment Name: Zm_Hybrid_Pollen_P Parameter: Tissue Value: Pollen vs. Aerial
  misc_feature: MA Experiment ID: 20001606 Result: Up-regulated in Transcription
  misc_feature: MA Experiment 20001606 PARAMETER Experiment Name: Zm_50ppm_KNO3_L-to-H_P Parameter: Age (day) Value: 19
  misc_feature: MA Experiment 20001606 PARAMETER Experiment Name: Zm_50ppm_KNO3_L-to-H_P Parameter: Organism Value: Zea mays
  misc_feature: MA Experiment 20001606 PARAMETER Experiment Name: Zm_50ppm_KNO3_L-to-H_P Parameter: Plant Line Value: 35A19
  misc_feature: MA Experiment 20001606 PARAMETER Experiment Name: Zm_50ppm_KNO3_L-to-H_P Parameter: Timepoint (hr) Value: 8
  misc_feature: MA Experiment 20001606 PARAMETER Experiment Name: Zm_50ppm_KNO3_L-to-H_P Parameter: Tissue Value: Shoots
  misc_feature: MA Experiment 20001606 PARAMETER Experiment Name: Zm_50ppm_KNO3_L-to-H_P Parameter: Treatment Value: 50ppm KNO3 vs. 50ppm KCl
gcacgagaccattacctagaacatcctaatcgaaaatcgactaacgtctacttctgtgatttcccccggcggcgttgggcgctggtttaggagacgaaaaggcggcgcgcggcggaaaaccctagcttagctcctctccggcgtcaagtgctctccggtttgagggcgcgatgagggtgaaggtgatttcgcgttccaccgacgactacacgcgcgagcgcagccaggacctgcagaaagtattccgcaactatgatccagcgcttcgtagtcaagagaaagctgttgagtatactcgggcactcaatgctgccaagttagagaagatatttgctaagccatttatcggagctatggatgggcatattgacgcggtatcgtgcatggccaaaaaccccaatcatttgaaagcaatattttctggttcaatggatggagatgttcgcctttgggatattgctgcgaggaagacagtttgtcagttccccgggcaccagggtgctgtaagaggtttaacaacatccacagatggtgatcttcttgtatcatgtggcgttgactgcactgttcgactccggaaagttccgatgcttaaaatggtggatactagtgagcgtgctggagataattcccagccatcagcagtttacacctggaagcatgcattctggggtgctgatcaccagtgggacggcaatcttttcgcaactgttggtgctcaagttgatatatgggatcctgacaggtcagagccaataaatagcttcgaatggggtaaagatacggttctttctgtgcgatttgatcctggagactctaatattttgattacgtcgggcagtgatcggagtctgacactctatgacttgcgtatgtcatctccagctagaaagctgataatgaagacaaggtgcaattcagtatgctggaaccctagagagcctatgaacttcactgctgcaaatgaagacacaaactgttactcctttgatgctagaaaattagatgaagcaaaaattgttcacaaaggccatgtttcagcagtgatggatattgactactcaccaacagggcgtgaatttgtcactggttcatatgatagaacagtaaggatttttaattatcttggagaccacagcagagagatttaccacaccaagaggatgcaaagggtgttttgtgtgaagtacaccctatgatgggacctatttagtctctggcagtgatgatacaaatcttcgtctgtggaagtccaaagcttcagaacaacttggagttcttcttccacgggagcgcaaaaagcaagagtaccaggatgctttgaaggagcggtacaagcatctcccagaagtcaagcggattgtaaggcatagacatctaccgaagccaatctacaaggcagccaacctacggcgtacgatgatcgaagctgaaagccgtaaagaggaaaggaggcgaaagcacagtgctcccgggagcatgcctgtgcagcccttcaggaagcggagaatcatcagagaagttgagtagacatgcggtttgcattgcatggtcgtggtacacgtttgtgtttctgaggcgatggagttgagagaatacatgatgtttcctttgggagttgagctccagttttgcctttcgtactacatatatgtgttccatcaatcagtttgtttgactagttattattgtgtatttgaaatacc

SEQ ID NO: 9167 - protein, 342 aa, Zea mays subsp. mays
  peptide (1)..(342): Ceres Seq. ID no. 12372628
  misc_feature (1)..(341): Homolog of NCBI NO: 34904476 NR Description: putative DKFZP564O0463 protein [Oryza sativa
  misc_feature (1)..(341): Homolog of NCBI NO: 13937179 NR Description: AT4g28450/F20O9_130 [Arabidopsis thaliana] AT4g28450/F20O9_130 [Arabidopsis thaliana]
  misc_feature (1)..(341): Homolog of NCBI NO: 17065094 NR Description: SOF1 protein-like protein [Arabidopsis thaliana]
  misc_feature (24)..(341): Homolog of NCBI NO: 30687972 NR Description: transducin / WD-40 repeat protein family
  misc_feature (1)..(341): Homolog of NCBI NO: 38348458 NR Description: Unknown (protein for MGC:65348) [Mus musculus]
  misc_feature (1)..(341): Homolog of NCBI NO: 22760354 NR Description: unnamed protein product [Homo sapiens]
  misc_feature (1)..(341): Homolog of NCBI NO: 19913460 NR Description: DKFZP564O0463 protein [Homo sapiens]
  misc_feature (1)..(341): Homolog of NCBI NO: 27769416 NR Description: Similar to DKFZP564O0463 protein [Xenopus laevis]
  misc_feature (2)..(341): Homolog of NCBI NO: 40740135 NR Description: hypothetical protein AN4226.2 [Aspergillus
  misc_feature (1)..(341): Homolog of NCBI NO: 39595100 NR Description: Hypothetical protein CBG03683 [Caenorhabditis
MRVKVISRSTDDYTRERSQDLQKVFRNYDPALRSQEKAVEYTRALNAAKLEKIFAKPFIGAMDGHIDAVSCMAKNPNHLKAIFSGSMDGDVRLWDIAARKTVCQFPGHQGAVRGLTTSTDGDLLVSCGVDCTVRLRKVPMLKMVDTSERAGDNSQPSAVYTWKHAFWGADHQWDGNLFATVGAQVDIWDPDRSEPINSFEWGKDTVLSVRFDPGDSNILITSGSDRSLTLYDLRMSSPARKLIMKTRCNSVCWNPREPMNFTAANEDTNCYSFDARKLDEAKIVHKGHVSAVMDIDYSPTGREFVTGSYDRTVRIFNYLGDHSREIYHTKRMQRVFCVKYTL

SEQ ID NO: 9168 - protein, 281 aa, Zea mays subsp. mays
  peptide (1)..(281): Ceres Seq. ID no. 12372629
  misc_feature (1)..(280): Homolog of NCBI NO: 34904476 NR Description: putative DKFZP564O0463 protein [Oryza sativa
  misc_feature (1)..(280): Homolog of NCBI NO: 13937179 NR Description: AT4g28450/F20O9_130 [Arabidopsis thaliana] AT4g28450/F20O9_130 [Arabidopsis thaliana]
  misc_feature (1)..(280): Homolog of NCBI NO: 17065094 NR Description: SOF1 protein-like protein [Arabidopsis thaliana]
  misc_feature (1)..(280): Homolog of NCBI NO: 30687972 NR Description: transducin / WD-40 repeat protein family
  misc_feature (1)..(280): Homolog of NCBI NO: 38348458 NR Description: Unknown (protein for MGC:65348) [Mus musculus]
  misc_feature (1)..(280): Homolog of NCBI NO: 22760354 NR Description: unnamed protein product [Homo sapiens]
  misc_feature (1)..(280): Homolog of NCBI NO: 19913460 NR Description: DKFZP564O0463 protein [Homo sapiens]
  misc_feature (1)..(280): Homolog of NCBI NO: 27769416 NR Description: Similar to DKFZP564O0463 protein [Xenopus laevis]
  misc_feature (1)..(280): Homolog of NCBI NO: 40740135 NR Description: hypothetical protein AN4226.2 [Aspergillus
  misc_feature (1)..(280): Homolog of NCBI NO: 39595100 NR Description: Hypothetical protein CBG03683 [Caenorhabditis
MDGHIDAVSCMAKNPNHLKAIFSGSMDGDVRLWDIAARKTVCQFPGHQGAVRGLTTSTDGDLLVSCGVDCTVRLRKVPMLKMVDTSERAGDNSQPSAVYTWKHAFWGADHQWDGNLFATVGAQVDIWDPDRSEPINSFEWGKDTVLSVRFDPGDSNILITSGSDRSLTLYDLRMSSPARKLIMKTRCNSVCWNPREPMNFTAANEDTNCYSFDARKLDEAKIVHKGHVSAVMDIDYSPTGREFVTGSYDRTVRIFNYLGDHSREIYHTKRMQRVFCVKYTL

SEQ ID NO: 9169 - protein, 271 aa, Zea mays subsp. mays
  peptide (1)..(271): Ceres Seq. ID no. 12372630
  misc_feature (1)..(270): Homolog of NCBI NO: 34904476 NR Description: putative DKFZP564O0463 protein [Oryza sativa
  misc_feature (1)..(270): Homolog of NCBI NO: 13937179 NR Description: AT4g28450/F20O9_130 [Arabidopsis thaliana] AT4g28450/F20O9_130 [Arabidopsis thaliana]
  misc_feature (1)..(270): Homolog of NCBI NO: 17065094 NR Description: SOF1 protein-like protein [Arabidopsis thaliana]
  misc_feature (1)..(270): Homolog of NCBI NO: 30687972 NR Description: transducin / WD-40 repeat protein family
  misc_feature (1)..(270): Homolog of NCBI NO: 38348458 NR Description: Unknown (protein for MGC:65348) [Mus musculus]
  misc_feature (1)..(270): Homolog of NCBI NO: 22760354 NR Description: unnamed protein product [Homo sapiens]
  misc_feature (1)..(270): Homolog of NCBI NO: 19913460 NR Description: DKFZP564O0463 protein [Homo sapiens]
  misc_feature (1)..(270): Homolog of NCBI NO: 27769416 NR Description: Similar to DKFZP564O0463 protein [Xenopus laevis]
  misc_feature (1)..(270): Homolog of NCBI NO: 40740135 NR Description: hypothetical protein AN4226.2 [Aspergillus
  misc_feature (1)..(270): Homolog of NCBI NO: 39595100 NR Description: Hypothetical protein CBG03683 [Caenorhabditis
MAKNPNHLKAIFSGSMDGDVRLWDIAARKTVCQFPGHQGAVRGLTTSTDGDLLVSCGVDCTVRLRKVPMLKMVDTSERAGDNSQPSAVYTWKHAFWGADHQWDGNLFATVGAQVDIWDPDRSEPINSFEWGKDTVLSVRFDPGDSNILITSGSDRSLTLYDLRMSSPARKLIMKTRCNSVCWNPREPMNFTAANEDTNCYSFDARKLDEAKIVHKGHVSAVMDIDYSPTGREFVTGSYDRTVRIFNYLGDHSREIYHTKRMQRVFCVKYTL

SEQ ID NO: 9170 - DNA, 849 bp, Zea mays subsp. mays
  misc_feature (1)..(849): Ceres Seq. ID no. 12346977
  misc_feature: MA Experiment ID: 108535 Result: Down-regulated in Transcription
  misc_feature: MA Experiment 108535 PARAMETER Experiment Name: Zm_Meristem_P Parameter: Age (day) Value: 8
  misc_feature: MA Experiment 108535 PARAMETER Experiment Name: Zm_Meristem_P Parameter: Organism Value: Zea mays
  misc_feature: MA Experiment 108535 PARAMETER Experiment Name: Zm_Meristem_P Parameter: Plant Line Value: 35A19
  misc_feature: MA Experiment 108535 PARAMETER Experiment Name: Zm_Meristem_P Parameter: Tissue Value: Root Meristem vs. Above Root Meristem
  misc_feature: MA Experiment ID: 108543 Result: Up-regulated in Transcription
  misc_feature: MA Experiment ID: 108544 Result: Up-regulated in Transcription
  misc_feature: MA Experiment ID: 108559 Result: Down-regulated in Transcription
  misc_feature: MA Experiment 108559 PARAMETER Experiment Name: Zm_5mM_NO_P Parameter: Age (day) Value: 8
  misc_feature: MA Experiment 108559 PARAMETER Experiment Name: Zm_5mM_NO_P Parameter: Organism Value: Zea mays
  misc_feature: MA Experiment 108559 PARAMETER Experiment Name: Zm_5mM_NO_P Parameter: Plant Line Value: 35A19
  misc_feature: MA Experiment 108559 PARAMETER Experiment Name: Zm_5mM_NO_P Parameter: Timepoint (hr) Value: 12
  misc_feature: MA Experiment 108559 PARAMETER Experiment Name: Zm_5mM_NO_P Parameter: Tissue Value: Aerial
  misc_feature: MA Experiment 108559 PARAMETER Experiment Name: Zm_5mM_NO_P Parameter: Treatment Value: 5mM NO vs. No Treatment
aagcccactttccccagtactctactcacccacccactcacggactcatctactgagcagcgcggtgggcatccgagcgagagggcgagcgcggaaggatcggaattccgaaggttgggcatggaggcgagcggcgagaaggctgcggtggtgcgacggctgatggaggcgaaggaggtgtccgggaagaccttctcgggaatcgccgccgagacgggtctcaccaacgtctacgtggcgcagctgctgcggcgccaggcgcagctcaaggccgacacggtgcccgcgctgagggcggccctgcccacgctcacggacgacctcatcgaactcatgatgcagccgcccttccggtcctaccaccccaacatcgtccacgagcccgccatttacagattgaatgaaggctgttatgcattttggagagagcatcaaggaaatcatcaatgaggagtttggtgatggaatcatgtcagccatagacttctattgttcagttgacaaggttgaaggggccgacggaaaagatcgtgtggtggtcacatttgatgggaagtatctaccttacactgaacagaaatctgaacatatgatgtctaggccaacccgcaagacatcttgatgtggctggtgaggaggagaaacatgatcgtagtggttggtatcgggctcagcaaggatcgagcatgccattttctttgtgtagtccaaatcatcaacacaataaacagacctatattgatgataactgtcaaaaggaacattaaagtcaatgttctacctggcatgattgctggactgtattggatgatgctgagataaaaagagagaaaaagtgaaacaaactgg

SEQ ID NO: 9171 - protein, 149 aa, Zea mays subsp. mays
  peptide (1)..(149): Ceres Seq. ID no. 12346978
  misc_feature (41)..(140): Homolog of NCBI NO: 20137963 NR Description: Cyanate hydratase (Cyanase) (Cyanate lyase)
  misc_feature (12)..(131): Homolog of NCBI NO: 37535282 NR Description: putative cyanase [Oryza sativa (japonica
  misc_feature (41)..(140): Homolog of NCBI NO: 15229458 NR Description: cyanate lyase (CYN); protein id: At3g23490.1, by cDNA: 20782., supported by cDNA: gi_15294213, supported by gi_20147236, supported by cDNA: gi_2285791 [Arabidopsis thaliana]
  misc_feature (41)..(140): Homolog of NCBI NO: 21554171 NR Description: cyanate lyase (CYN) [Arabidopsis thaliana]
  misc_feature (43)..(135): Homolog of NCBI NO: 28869134 NR Description: cyanate lyase [Pseudomonas syringae pv. tomato DC3000] >gi|28852374|gb|AAO55448.1| cyanate lyase [Pseudomonas
KPTFPSTLLTHPLTDSSTEQRGGHPSERASAEGSEFRRLGMEASGEKAAVVRRLMEAKEVSGKTFSGIAAETGLTNVYVAQLLRRQAQLKADTVPALRAALPTLTDDLIELMMQPPFRSYHPNIVHEPAIYRLNEGCYAFWREHQGNHQ

SEQ ID NO: 9172 - protein, 109 aa, Zea mays subsp. mays
  peptide (1)..(109): Ceres Seq. ID no. 12346979
  misc_feature (1)..(100): Homolog of NCBI NO: 20137963 NR Description: Cyanate hydratase (Cyanase) (Cyanate lyase)
  misc_feature (1)..(91): Homolog of NCBI NO: 37535282 NR Description: putative cyanase [Oryza sativa (japonica
  misc_feature (1)..(100): Homolog of NCBI NO: 15229458 NR Description: cyanate lyase (CYN); protein id: At3g23490.1, by cDNA: 20782., supported by cDNA: gi_15294213, supported by gi_20147236, supported by cDNA: gi_2285791 [Arabidopsis thaliana]
  misc_feature (1)..(100): Homolog of NCBI NO: 21554171 NR Description: cyanate lyase (CYN) [Arabidopsis thaliana]
  misc_feature (3)..(95): Homolog of NCBI NO: 28869134 NR Description: cyanate lyase [Pseudomonas syringae pv. tomato DC3000] >gi|28852374|gb|AAO55448.1| cyanate lyase [Pseudomonas
MEASGEKAAVVRRLMEAKEVSGKTFSGIAAETGLTNVYVAQLLRRQAQLKADTVPALRAALPTLTDDLIELMMQPPFRSYHPNIVHEPAIYRLNEGCYAFWREHQGNHQ

SEQ ID NO: 9173 - protein, 95 aa, Zea mays subsp. mays
  peptide (1)..(95): Ceres Seq. ID no. 12346980
  misc_feature (1)..(86): Homolog of NCBI NO: 20137963 NR Description: Cyanate hydratase (Cyanase) (Cyanate lyase)
  misc_feature (1)..(77): Homolog of NCBI NO: 37535282 NR Description: putative cyanase [Oryza sativa (japonica
  misc_feature (1)..(86): Homolog of NCBI NO: 15229458 NR Description: cyanate lyase (CYN); protein id: At3g23490.1, by cDNA: 20782., supported by cDNA: gi_15294213, supported by gi_20147236, supported by cDNA: gi_2285791 [Arabidopsis thaliana]
  misc_feature (1)..(86): Homolog of NCBI NO: 21554171 NR Description: cyanate lyase (CYN) [Arabidopsis thaliana]
  misc_feature (1)..(81): Homolog of NCBI NO: 28869134 NR Description: cyanate lyase [Pseudomonas syringae pv. tomato DC3000] >gi|28852374|gb|AAO55448.1| cyanate lyase [Pseudomonas
MEAKEVSGKTFSGIAAETGLTNVYVAQLLRRQAQLKADTVPALRAALPTLTDDLIELMMQPPFRSYHPNIVHEPAIYRLNEGCYAFWREHQGNHQ

SEQ ID NO: 9174 - DNA, 1583 bp, Zea mays subsp. mays
  misc_feature (1)..(1583): Ceres Seq. ID no. 12369718
  misc_feature: MA Experiment ID: 108504 Result: Up-regulated in Transcription
  misc_feature: MA Experiment 108504 PARAMETER Experiment Name: Zm_Drought_P Parameter: Age (day) Value: 8
  misc_feature: MA Experiment 108504 PARAMETER Experiment Name: Zm_Drought_P Parameter: Organism Value: Zea mays
  misc_feature: MA Experiment 108504 PARAMETER Experiment Name: Zm_Drought_P Parameter: Plant Line Value: 35A19
  misc_feature: MA Experiment 108504 PARAMETER Experiment Name: Zm_Drought_P Parameter: Timepoint (hr) Value: 12
  misc_feature: MA Experiment 108504 PARAMETER Experiment Name: Zm_Drought_P Parameter: Tissue Value: Aerial
  misc_feature: MA Experiment 108504 PARAMETER Experiment Name: Zm_Drought_P Parameter: Treatment Value: Drought vs. No Drought
  misc_feature: MA Experiment ID: 108513 Result: Up-regulated in Transcription
  misc_feature: MA Experiment 108513 PARAMETER Experiment Name: Zm_100uM_ABA_P Parameter: Age (day) Value: 8
  misc_feature: MA Experiment 108513 PARAMETER Experiment Name: Zm_100uM_ABA_P Parameter: Organism Value: Zea mays
  misc_feature: MA Experiment 108513 PARAMETER Experiment Name: Zm_100uM_ABA_P Parameter: Plant Line Value: 35A19
  misc_feature: MA Experiment 108513 PARAMETER Experiment Name: Zm_100uM_ABA_P Parameter: Timepoint (hr) Value: 6
  misc_feature: MA Experiment 108513 PARAMETER Experiment Name: Zm_100uM_ABA_P Parameter: Tissue Value: Aerial
  misc_feature: MA Experiment 108513 PARAMETER Experiment Name: Zm_100uM_ABA_P Parameter: Treatment Value: 100uM ABA vs. No Treatment
  misc_feature: MA Experiment ID: 108529 Result: Up-regulated in Transcription
  misc_feature: MA Experiment 108529 PARAMETER Experiment Name: Zm_Imbibed_Seeds_P Parameter: Age (day) Value: 5 vs. 2
  misc_feature: MA Experiment 108529 PARAMETER Experiment Name: Zm_Imbibed_Seeds_P Parameter: Organism Value: Zea mays
  misc_feature: MA Experiment 108529 PARAMETER Experiment Name: Zm_Imbibed_Seeds_P Parameter: Plant Line Value: 35A19
  misc_feature: MA Experiment 108529 PARAMETER Experiment Name: Zm_Imbibed_Seeds_P Parameter: Tissue Value: Roots vs. Embryo
  misc_feature: MA Experiment ID: 108533 Result: Up-regulated in Transcription
  misc_feature: MA Experiment 108533 PARAMETER Experiment Name: Zm_4deg_Cold_P Parameter: Age (hr) Value: 8
  misc_feature: MA Experiment 108533 PARAMETER Experiment Name: Zm_4deg_Cold_P Parameter: Organism Value: Zea mays
  misc_feature: MA Experiment 108533 PARAMETER Experiment Name: Zm_4deg_Cold_P Parameter: Plant Line Value: 35A19
  misc_feature: MA Experiment 108533 PARAMETER Experiment Name: Zm_4deg_Cold_P Parameter: Temperature (deg C) Value: 4 vs. 22
  misc_feature: MA Experiment 108533 PARAMETER Experiment Name: Zm_4deg_Cold_P Parameter: Timepoint (hr) Value: 1
  misc_feature: MA Experiment 108533 PARAMETER Experiment Name: Zm_4deg_Cold_P Parameter: Tissue Value: Aerial
  misc_feature: MA Experiment ID: 108534 Result: Up-regulated in Transcription
  misc_feature: MA Experiment 108534 PARAMETER Experiment Name: Zm_4deg_Cold_P Parameter: Age (hr) Value: 8
  misc_feature: MA Experiment 108534 PARAMETER Experiment Name: Zm_4deg_Cold_P Parameter: Organism Value: Zea mays
  misc_feature: MA Experiment 108534 PARAMETER Experiment Name: Zm_4deg_Cold_P Parameter: Plant Line Value: 35A19
  misc_feature: MA Experiment 108534 PARAMETER Experiment Name: Zm_4deg_Cold_P Parameter: Temperature (deg C) Value: 4 vs. 22
  misc_feature: MA Experiment 108534 PARAMETER Experiment Name: Zm_4deg_Cold_P Parameter: Timepoint (hr) Value: 6
  misc_feature: MA Experiment 108534 PARAMETER Experiment Name: Zm_4deg_Cold_P Parameter: Tissue Value: Aerial
  misc_feature: MA Experiment ID: 108535 Result: Down-regulated in Transcription
  misc_feature: MA Experiment 108535 PARAMETER Experiment Name: Zm_Meristem_P Parameter: Age (day) Value: 8
  misc_feature: MA Experiment 108535 PARAMETER Experiment Name: Zm_Meristem_P Parameter: Organism Value: Zea mays
  misc_feature: MA Experiment 108535 PARAMETER Experiment Name: Zm_Meristem_P Parameter: Plant Line Value: 35A19
  misc_feature: MA Experiment 108535 PARAMETER Experiment Name: Zm_Meristem_P Parameter: Tissue Value: Root Meristem vs. Above Root Meristem
  misc_feature: MA Experiment ID: 108536 Result: Up-regulated in Transcription
  misc_feature: MA Experiment 108536 PARAMETER Experiment Name: Zm_Meristem_P Parameter: Age (day) Value: 8
  misc_feature: MA Experiment 108536 PARAMETER Experiment Name: Zm_Meristem_P Parameter: Organism Value: Zea mays
  misc_feature: MA Experiment 108536 PARAMETER Experiment Name: Zm_Meristem_P Parameter: Plant Line Value: 35A19
  misc_feature: MA Experiment 108536 PARAMETER Experiment Name: Zm_Meristem_P Parameter: Tissue Value: Shoot Meristem vs. Above Shoot Meristem
  misc_feature: MA Experiment ID: 108539 Result: Up-regulated in Transcription
  misc_feature: MA Experiment 108539 PARAMETER Experiment Name: Zm_20percent_PEG_P Parameter: Age (day) Value: 8
  misc_feature: MA Experiment 108539 PARAMETER Experiment Name: Zm_20percent_PEG_P Parameter: Organism Value: Zea mays
  misc_feature: MA Experiment 108539 PARAMETER Experiment Name: Zm_20percent_PEG_P Parameter: Plant Line Value: 35A19
  misc_feature: MA Experiment 108539 PARAMETER Experiment Name: Zm_20percent_PEG_P Parameter: Timepoint (hr) Value: 1
  misc_feature: MA Experiment 108539 PARAMETER Experiment Name: Zm_20percent_PEG_P Parameter: Tissue Value: Aerial
  misc_feature: MA Experiment 108539 PARAMETER Experiment Name: Zm_20percent_PEG_P Parameter: Treatment Value: 20percent PEG vs. No Treatment
  misc_feature: MA Experiment ID: 108542 Result: Up-regulated in Transcription
  misc_feature: MA Experiment 108542 PARAMETER Experiment Name: Zm_150mM_NaCl_P Parameter: Age (day) Value: 8
  misc_feature: MA Experiment 108542 PARAMETER Experiment Name: Zm_150mM_NaCl_P Parameter: Organism Value: Zea mays
  misc_feature: MA Experiment 108542 PARAMETER Experiment Name: Zm_150mM_NaCl_P Parameter: Plant Line Value: 35A19
  misc_feature: MA Experiment 108542 PARAMETER Experiment Name: Zm_150mM_NaCl_P Parameter: Timepoint (hr) Value: 6
  misc_feature: MA Experiment 108542 PARAMETER Experiment Name: Zm_150mM_NaCl_P Parameter: Tissue Value: Aerial
  misc_feature: MA Experiment 108542 PARAMETER Experiment Name: Zm_150mM_NaCl_P Parameter: Treatment Value: 150mM NaCl vs. No Treatment
  misc_feature: MA Experiment ID: 108543 Result: Up-regulated in Transcription
  misc_feature: MA Experiment ID: 108545 Result: Down-regulated in Transcription
  misc_feature: MA Experiment 108545 PARAMETER Experiment Name: Zm_Imbibed_Seeds_P Parameter: Age (day) Value: 3 vs. 2
  misc_feature: MA Experiment 108545 PARAMETER Experiment Name: Zm_Imbibed_Seeds_P Parameter: Organism Value: Zea mays
  misc_feature: MA Experiment 108545 PARAMETER Experiment Name: Zm_Imbibed_Seeds_P Parameter: Plant Line Value: 35A19
  misc_feature: MA Experiment 108545 PARAMETER Experiment Name: Zm_Imbibed_Seeds_P Parameter: Tissue Value: Aerial vs. Embryo
  misc_feature: MA Experiment ID: 108556 Result: Up-regulated in Transcription
  misc_feature: MA Experiment 108556 PARAMETER Experiment Name: Zm_Drought_P Parameter: Age (day) Value: 9
  misc_feature: MA Experiment 108556 PARAMETER Experiment Name: Zm_Drought_P Parameter: Organism Value: Zea mays
  misc_feature: MA Experiment 108556 PARAMETER Experiment Name: Zm_Drought_P Parameter: Plant Line Value: 35A19
  misc_feature: MA Experiment 108556 PARAMETER Experiment Name: Zm_Drought_P Parameter: Timepoint (hr) Value: 24
  misc_feature: MA Experiment 108556 PARAMETER Experiment Name: Zm_Drought_P Parameter: Tissue Value: Aerial
  misc_feature: MA Experiment 108556 PARAMETER Experiment Name: Zm_Drought_P Parameter: Treatment Value: Drought vs. No Drought
  misc_feature: MA Experiment ID: 108597 Result: Up-regulated in Transcription
  misc_feature: MA Experiment 108597 PARAMETER Experiment Name: Zm_100uM_ABA_P Parameter: Age (day) Value: 9
  misc_feature: MA Experiment 108597 PARAMETER Experiment Name: Zm_100uM_ABA_P Parameter: Organism Value: Zea mays
  misc_feature: MA Experiment 108597 PARAMETER Experiment Name: Zm_100uM_ABA_P Parameter: Plant Line Value: 35A19
  misc_feature: MA Experiment 108597 PARAMETER Experiment Name: Zm_100uM_ABA_P Parameter: Timepoint (hr) Value: 24
  misc_feature: MA Experiment 108597 PARAMETER Experiment Name: Zm_100uM_ABA_P Parameter: Tissue Value: Aerial
  misc_feature: MA Experiment 108597 PARAMETER Experiment Name: Zm_100uM_ABA_P Parameter: Treatment Value: 100uM ABA vs. No Treatment
  misc_feature: MA Experiment ID: 20000108 Result: Down-regulated in Transcription
  misc_feature: MA Experiment 20000108 PARAMETER Experiment Name: Zm_Root-Tips_P Parameter: Age (day) Value: 12
  misc_feature: MA Experiment 20000108 PARAMETER Experiment Name: Zm_Root-Tips_P Parameter: Organism Value: Zea mays
  misc_feature: MA Experiment 20000108 PARAMETER Experiment Name: Zm_Root-Tips_P Parameter: Tissue Value: Root tips vs. Root mid region    35
  misc_feature: MA Experiment 20000108 PARAMETER Experiment Name: Zm_Root-Tips_P Parameter: Tissue Value: Root tips vs. Root mid region   Sequence Listing-Misc Features (4)
  misc_feature: MA Experiment ID: 20000477 Result: Up-regulated in Transcription
  misc_feature: MA Experiment 20000477 PARAMETER Experiment Name: Zm_5mM_SA_P Parameter: Age (day) Value: 10
  misc_feature: MA Experiment 20000477 PARAMETER Experiment Name: Zm_5mM_SA_P Parameter: Organism Value: Zea mays
  misc_feature: MA Experiment 20000477 PARAMETER Experiment Name: Zm_5mM_SA_P Parameter: Plant Line Value: 35A19
  misc_feature: MA Experiment 20000477 PARAMETER Experiment Name: Zm_5mM_SA_P Parameter: Timepoint (hr) Value: 48
  misc_feature: MA Experiment 20000477 PARAMETER Experiment Name: Zm_5mM_SA_P Parameter: Tissue Value: Aerial
  misc_feature: MA Experiment 20000477 PARAMETER Experiment Name: Zm_5mM_SA_P Parameter: Treatment Value: 5mM SA vs. No Treatment
  misc_feature: MA Experiment ID: 20000479 Result: Up-regulated in Transcription
  misc_feature: MA Experiment 20000479 PARAMETER Experiment Name: Zm_Drought_P Parameter: Age (day) Value: 10
  misc_feature: MA Experiment 20000479 PARAMETER Experiment Name: Zm_Drought_P Parameter: Organism Value: Zea mays
  misc_feature: MA Experiment 20000479 PARAMETER Experiment Name: Zm_Drought_P Parameter: Plant Line Value: 35A19
  misc_feature: MA Experiment 20000479 PARAMETER Experiment Name: Zm_Drought_P Parameter: Timepoint (hr) Value: 48
  misc_feature: MA Experiment 20000479 PARAMETER Experiment Name: Zm_Drought_P Parameter: Tissue Value: Aerial
  misc_feature: MA Experiment 20000479 PARAMETER Experiment Name: Zm_Drought_P Parameter: Treatment Value: Drought vs. No Drought
  misc_feature: MA Experiment ID: 20000480 Result: Up-regulated in Transcription
  misc_feature: MA Experiment 20000480 PARAMETER Experiment Name: Zm_Drought_P Parameter: Age (day) Value: 11
  misc_feature: MA Experiment 20000480 PARAMETER Experiment Name: Zm_Drought_P Parameter: Organism Value: Zea mays
  misc_feature: MA Experiment 20000480 PARAMETER Experiment Name: Zm_Drought_P Parameter: Plant Line Value: 35A19
  misc_feature: MA Experiment 20000480 PARAMETER Experiment Name: Zm_Drought_P Parameter: Timepoint (hr) Value: 72
  misc_feature: MA Experiment 20000480 PARAMETER Experiment Name: Zm_Drought_P Parameter: Tissue Value: Aerial
  misc_feature: MA Experiment 20000480 PARAMETER Experiment Name: Zm_Drought_P Parameter: Treatment Value: Drought vs. No Drought
  misc_feature: MA Experiment ID: 20000532 Result: Up-regulated in Transcription
  misc_feature: MA Experiment 20000532 PARAMETER Experiment Name: Zm_0.001percent_MeJA_P Parameter: Age (day) Value: 10
  misc_feature: MA Experiment 20000532 PARAMETER Experiment Name: Zm_0.001percent_MeJA_P Parameter: Organism Value: Zea mays
  misc_feature: MA Experiment 20000532 PARAMETER Experiment Name: Zm_0.001percent_MeJA_P Parameter: Plant Line Value: 35A19
  misc_feature: MA Experiment 20000532 PARAMETER Experiment Name: Zm_0.001percent_MeJA_P Parameter: Timepoint (hr) Value: 48
  misc_feature: MA Experiment 20000532 PARAMETER Experiment Name: Zm_0.001percent_MeJA_P Parameter: Tissue Value: Aerial
  misc_feature: MA Experiment 20000532 PARAMETER Experiment Name: Zm_0.001percent_MeJA_P Parameter: Treatment Value: 0.001percent MeJA vs. No Treatment
  misc_feature: MA Experiment ID: 20000629 Result: Up-regulated in Transcription
  misc_feature: MA Experiment 20000629 PARAMETER Experiment Name: Zm_Herbicide-Treatments_P Parameter: Timepoint (hr) Value: 12
  misc_feature: MA Experiment 20000629 PARAMETER Experiment Name: Zm_Herbicide-Treatments_P Parameter: Tissue Value: Aerial
  misc_feature: MA Experiment 20000629 PARAMETER Experiment Name: Zm_Herbicide-Treatments_P Parameter: Treatment Value: Trimec vs. No Treatment
  misc_feature: MA Experiment ID: 20000630 Result: Up-regulated in Transcription
  misc_feature: MA Experiment 20000630 PARAMETER Experiment Name: Zm_Herbicide-Treatments_P Parameter: Timepoint (hr) Value: 4
  misc_feature: MA Experiment 20000630 PARAMETER Experiment Name: Zm_Herbicide-Treatments_P Parameter: Tissue Value: Aerial
  misc_feature: MA Experiment 20000630 PARAMETER Experiment Name: Zm_Herbicide-Treatments_P Parameter: Treatment Value: Roundup vs. No Treatment
aaatcggcattcacgactcacgagcttcaatcagttaccagtctctagctctcctcgtgctgcttgcttctggaccatcgatggaggcctacgcggcaacggcatcgccacccacgacgacagccatgtgtgtggacaagctcagccaccagctcttctccctgctcgagagcaggctcctcggcgggtggtgcccgtccgtccccgggacgccggcgcgggcgctcctcgacggcggccgcgtgcgggtgctcgccatcgacggctgcggcgcgggcgcagaggacgcgctcctggccgccgcggcgctcgcgaggctcgaggccaagctgcgcgaccgcacgggggaccccgacgcgcgcgtcgcggacttcttcgacgtggccgccggcgccggcgcgggaggcgtcctcgccgcgatgctgctcctgaggggcgccgacggccggccgcggtactccggcgcaggaggcgctggcgttcttcgccgggagcgtcgggaccaaaggttggtgcggccggcgcgggcggtgggcgaagctcttccgccgcggttcccgaggcggcgaccgcacgctccgccgcgtgttcggggacgccacgctcagggacaccgtcgcgccgctgctcgtgccgtgctacgacctcgccacggccgcgcccttcgtgttctcgcgcgccgacgccgtcgagagcgacaccttcgacttccgcctgcgcgacgtctgcgccgccgcctgcgccgcgggcggcgcggtcgcgccagtcaggtcggtggacggcctcacggccgtcgccgcggcgtccgggggcgtggcggccatgtgcaacccggccggggccgccatcacgcacgcgctccacaacaagcaggagttccccctcgccaccggcgtcgacgacctcctcgtgctctccatcggcgccggcgcctccgtcgccaacggttcgagcacgccgatgcccgcacgctctccgtcgccgcgggagctggcgcgcgtaaccgccgagggcgtcgcggacatggtggacgaatcattgggcatggcgttcgggcgcgcgcgcggaagcaactacgtgcgcatccaggccggtaaggcgctggtcccgatccgcgccgacgaagcggccgtggccgccgaagcgatgctagcgcagcggaacgtggagtcggtgctgttccgcgagcggaggctgtcggagtggacgaacgccgagaaggtggacgcgctggccgcggagctggtcaaggagcaggagcggcggaggcgcagcccgcttccgaacgtggctatcaaacaggtcggcacaccgccgcggctgtcgtccgcgaccactgcttcgtcgggcactgggacggccaggacggcgtcgacgatgccgtcgccggcgtcatgggagtcacgcaggtagtagttgtgttgattttaggcggtaattgacgtgtgtacatgcatatatgaaatgcaaagctaggagtggggtgtgttgtttttcttctttgaacggacgctcaatcctgcgtgcaactcttcacgtttctagcaaaacgcataaaaaagcgctggctgtcatcctacctt

SEQ ID NO: 9175 - protein, 364 aa, Zea mays subsp. mays
  peptide (1)..(364): Ceres Seq. ID no. 12369719
  misc_feature (84)..(166): Pfam Name: Patatin-like phospholipase Pfam Description: Patatin-like phospholipase
  misc_feature (27)..(166): Homolog of NCBI NO: 34897124 NR Description: putative lipid acyl hydrolase [Oryza sativa]
  misc_feature (45)..(166): Homolog of NCBI NO: 34899642 NR Description: contains ESTs
  misc_feature (45)..(150): Homolog of NCBI NO: 15233136 NR Description: patatin-related; protein id: At3g54950.1
  misc_feature (67)..(150): Homolog of NCBI NO: 30688454 NR Description: patatin-related [Arabidopsis thaliana]
  misc_feature (67)..(150): Homolog of NCBI NO: 15225054 NR Description: patatin family; protein id: At2g39220.1, by cDNA: gi_17065143 [Arabidopsis thaliana]
  misc_feature (67)..(150): Homolog of NCBI NO: 7486230 NR Description: hypothetical protein F27B13.40 - Arabidopsis >gi|4914404|emb|CAB43655.1| putative protein [Arabidopsis >gi|7269879|emb|CAB79738.1| putative protein [Arabidopsis
  misc_feature (80)..(153): Homolog of NCBI NO: 11357489 NR Description: hypothetical protein F16M2.50 - Arabidopsis >gi|7523402|emb|CAB86421.1| putative protein [Arabidopsis
  misc_feature (80)..(153): Homolog of NCBI NO: 18412659 NR Description: putative protein; protein id: At3g63200.1, by cDNA: gi_15912226 [Arabidopsis thaliana] AT3g63200/F16M2_50 [Arabidopsis thaliana]
  misc_feature (68)..(153): Homolog of NCBI NO: 27260979 NR Description: putative patatin-like protein 1 [Oryza sativa
  misc_feature (70)..(152): Homolog of NCBI NO: 7442023 NR Description: patatin-like latex allergen 2 - Para rubber tree
IGIHDSRASISYQSLALLVLLASGPSMEAYAATASPPTTTAMCVDKLSHQLFSLLESRLLGGWCPSVPGTPARALLDGGRVRVLAIDGCGAGAEDALLAAAALARLEAKLRDRTGDPDARVADFFDVAAGAGAGGVLAAMLLLRGADGRPRYSGAGGAGVLRRERRDQRLVRPARAVGEALPPRFPRRRPHAPPRVRGRHAQGHRRAAARAVLRPRHGRALRVLARRRRRERHLRLPPARRLRRRLRRGRRGRASQVGGRPHGRRRGVRGRGGHVQPGRGRHHARAPQQAGVPPRHRRRRPPRALHRRRRLRRQRFEHADARTLSVAAGAGARNRRGRRGHGGRIIGHGVRARARKQLRAHPGR

SEQ ID NO: 9176 - protein, 338 aa, Zea mays subsp. mays
  peptide (1)..(338): Ceres Seq. ID no. 12369720
  misc_feature (58)..(140): Pfam Name: Patatin-like phospholipase Pfam Description: Patatin-like phospholipase
  misc_feature (1)..(140): Homolog of NCBI NO: 34897124 NR Description: putative lipid acyl hydrolase [Oryza sativa]
  misc_feature (19)..(140): Homolog of NCBI NO: 34899642 NR Description: contains ESTs
  misc_feature (19)..(124): Homolog of NCBI NO: 15233136 NR Description: patatin-related; protein id: At3g54950.1
  misc_feature (41)..(124): Homolog of NCBI NO: 30688454 NR Description: patatin-related [Arabidopsis thaliana]
  misc_feature (41)..(124): Homolog of NCBI NO: 15225054 NR Description: patatin family; protein id: At2g39220.1, by cDNA: gi_17065143 [Arabidopsis thaliana]
  misc_feature (41)..(124): Homolog of NCBI NO: 7486230 NR Description: hypothetical protein F27B13.40 - Arabidopsis >gi|4914404|emb|CAB43655.1| putative protein [Arabidopsis >gi|7269879|emb|CAB79738.1| putative protein [Arabidopsis
  misc_feature (54)..(127): Homolog of NCBI NO: 11357489 NR Description: hypothetical protein F16M2.50 - Arabidopsis >gi|7523402|emb|CAB86421.1| putative protein [Arabidopsis
  misc_feature (54)..(127): Homolog of NCBI NO: 18412659 NR Description: putative protein; protein id: At3g63200.1, by cDNA: gi_15912226 [Arabidopsis thaliana] AT3g63200/F16M2_50 [Arabidopsis thaliana]
  misc_feature (42)..(127): Homolog of NCBI NO: 27260979 NR Description: putative patatin-like protein 1 [Oryza sativa
  misc_feature (44)..(126): Homolog of NCBI NO: 7442023 NR Description: patatin-like latex allergen 2 - Para rubber tree
MEAYAATASPPTTTAMCVDKLSHQLFSLLESRLLGGWCPSVPGTPARALLDGGRVRVLAIDGCGAGAEDALLAAAALARLEAKLRDRTGDPDARVADFFDVAAGAGAGGVLAAMLLLRGADGRPRYSGAGGAGVLRRERRDQRLVRPARAVGEALPPRFPRRRPHAPPRVRGRHAQGHRRAAARAVLRPRHGRALRVLARRRRRERHLRLPPARRLRRRLRRGRRGRASQVGGRPHGRRRGVRGRGGHVQPGRGRHHARAPQQAGVPPRHRRRRPPRALHRRRRLRRQRFEHADARTLSVAAGAGARNRRGRRGHGGRIIGHGVRARARKQLRAHPGR

SEQ ID NO: 9177 - protein, 333 aa, Zea mays subsp. mays
  peptide (1)..(333): Ceres Seq. ID no. 12369721
  misc_feature (199)..(314): Pfam Name: Extensin-like region Pfam Description: Extensin-like region
  misc_feature (33)..(333): Homolog of NCBI NO: 25143299 NR Description: pre-mRNA splicing SR protein related RSR-1 (68.2
  misc_feature (129)..(333): Homolog of NCBI NO: 6649242 NR Description: splicing coactivator subunit SRm300 [Homo sapiens]
  misc_feature (129)..(333): Homolog of NCBI NO: 19923466 NR Description: splicing coactivator subunit SRm300; RNA binding
  misc_feature (95)..(333): Homolog of NCBI NO: 23103422 NR Description: hypothetical protein [Azotobacter vinelandii]
  misc_feature (45)..(333): Homolog of NCBI NO: 29247944 NR Description: GLP_26_54603_52153 [Giardia lamblia ATCC 50803]
  misc_feature (162)..(333): Homolog of NCBI NO: 13592175 NR Description: ppg3 [Leishmania major]
  misc_feature (28)..(333): Homolog of NCBI NO: 23018055 NR Description: hypothetical protein [Thermobifida fusca]
  misc_feature (161)..(318): Homolog of NCBI NO: 13592175 NR Description: ppg3 [Leishmania major]
  misc_feature (161)..(324): Homolog of NCBI NO: 13592175 NR Description: ppg3 [Leishmania major]
  misc_feature (161)..(318): Homolog of NCBI NO: 13592175 NR Description: ppg3 [Leishmania major]
NRHSRLTSFNQLPVSSSPRAACFWTIDGGLRGNGIATHDDSHVCGQAQPPALLPAREQAPRRVVPVRPRDAGAGAPRRRPRAGARHRRLRRGRRGRAPGRRGAREARGQAARPHGGPRRARRGLLRRGRRRRRGRRPRRDAAPEGRRRPAAVLRRRRRWRSSPGASGPKVGAAGAGGGRSSSAAVPEAATARSAACSGTPRSGTPSRRCSCRATTSPRPRPSCSRAPTPSRATPSTSACATSAPPPAPRAARSRQSGRWTASRPSPRRPGAWRPCATRPGPPSRTRSTTSRSSPSPPASTTSSCSPSAPAPPSPTVRARRCPHALRRRGSWRA

SEQ ID NO: 9178 - DNA, 1115 bp, Zea mays subsp. mays
  misc_feature (1)..(1115): Ceres Seq. ID no. 12353071
  misc_feature: MA Experiment ID: 108535 Result: Up-regulated in Transcription
  misc_feature: MA Experiment 108535 PARAMETER Experiment Name: Zm_Meristem_P Parameter: Age (day) Value: 8
  misc_feature: MA Experiment 108535 PARAMETER Experiment Name: Zm_Meristem_P Parameter: Organism Value: Zea mays
  misc_feature: MA Experiment 108535 PARAMETER Experiment Name: Zm_Meristem_P Parameter: Plant Line Value: 35A19
  misc_feature: MA Experiment 108535 PARAMETER Experiment Name: Zm_Meristem_P Parameter: Tissue Value: Root Meristem vs. Above Root Meristem
  misc_feature: MA Experiment ID: 108536 Result: Up-regulated in Transcription
  misc_feature: MA Experiment 108536 PARAMETER Experiment Name: Zm_Meristem_P Parameter: Age (day) Value: 8
  misc_feature: MA Experiment 108536 PARAMETER Experiment Name: Zm_Meristem_P Parameter: Organism Value: Zea mays
  misc_feature: MA Experiment 108536 PARAMETER Experiment Name: Zm_Meristem_P Parameter: Plant Line Value: 35A19
  misc_feature: MA Experiment 108536 PARAMETER Experiment Name: Zm_Meristem_P Parameter: Tissue Value: Shoot Meristem vs. Above Shoot Meristem
  misc_feature: MA Experiment ID: 20000479 Result: Up-regulated in Transcription
  misc_feature: MA Experiment 20000479 PARAMETER Experiment Name: Zm_Drought_P Parameter: Age (day) Value: 10
  misc_feature: MA Experiment 20000479 PARAMETER Experiment Name: Zm_Drought_P Parameter: Organism Value: Zea mays
  misc_feature: MA Experiment 20000479 PARAMETER Experiment Name: Zm_Drought_P Parameter: Plant Line Value: 35A19
  misc_feature: MA Experiment 20000479 PARAMETER Experiment Name: Zm_Drought_P Parameter: Timepoint (hr) Value: 48
  misc_feature: MA Experiment 20000479 PARAMETER Experiment Name: Zm_Drought_P Parameter: Tissue Value: Aerial
  misc_feature: MA Experiment 20000479 PARAMETER Experiment Name: Zm_Drought_P Parameter: Treatment Value: Drought vs. No Drought
  misc_feature: MA Experiment ID: 20000534 Result: Up-regulated in Transcription
  misc_feature: MA Experiment 20000534 PARAMETER Experiment Name: Zm_Hybrid_Pollen_P Parameter: Age (day) Value: 8
  misc_feature: MA Experiment 20000534 PARAMETER Experiment Name: Zm_Hybrid_Pollen_P Parameter: Organism Value: Zea mays
  misc_feature: MA Experiment 20000534 PARAMETER Experiment Name: Zm_Hybrid_Pollen_P Parameter: Plant Line Value: 35A19
  misc_feature: MA Experiment 20000534 PARAMETER Experiment Name: Zm_Hybrid_Pollen_P Parameter: Tissue Value: Pollen vs. Aerial
acacacgcgcaccaaagccaagcgcccaagcccagcactcgacaccaccacagcgcgcagccacgctcacgcacaccgagctgcgggagtggagtagtggaccgatggggagcagcgggggcagcagcgagcacttcctgcggcagctgagttcgagcgacggcggcagcgcgccgcaccatctgctgcagcgagagtgggagtgcggcggcgtcaccggcagcggcagcaggcgcgggtcgcggaagaagaccggggcgcggggacaccgccgccgcggcggcgggttctgcagggcggaggaggctgcgccggggcggaagcgggtaatggtggtggtggaccagagctccggcgccaagcacgccatgttgtgggcgctcacccacgtggccaacaagggcgacttcctcaccctgctccacgtcctgccgccggagagcggccacagcagccgcggtgctgcggaggacgcctccgcgctcgccaactccctcggcgcgctttgcaaggcctgcaagcctgaggtcgaggtggaggcgcctgtgatccaggggcccaagctgccgaccatcctcagccaggtgaagaagctggaggcgtccgtgctggtgctgagccaacgcagcccctcgcctttctgctgcttcccgcggagcagcagcgaggagctcgtggaggagtgcatcgaccgggcggagtgcctgacgctggcagtgcggcgggcaaagcaagggcgtcggcggctacctcgtcagcacccggtggcagaagaacttctggctcctcgcgtgatccacaaccatattcccccccttctttggaaggcgtttggtttgagtctgaaagcatgggatggaacggaacgggctgggaaatggcgtttggttcagggacaagagggttgggaattgggatcgcctacaggtcggagggacgggatagtcctctatatatgaaagtcgtttcttccgtcatcagtcttcttcctcgcgtccgtgtgtcctgttcttcttcctcgccagttgtctctcatcctgtttctctcaacgttgcctgatgcccctaatatgctctccagaacgctggaagcaaacgaacttgatttgatgtcg

SEQ ID NO: 9179 - protein, 318 aa, Zea mays subsp. mays
  peptide (1)..(318): Ceres Seq. ID no. 12353072
  misc_feature (105)..(240): Pfam Name: Universal stress protein family Pfam Description: Universal stress protein family
  misc_feature (35)..(245): Homolog of NCBI NO: 34907308 NR Description: hypothetical protein~similar to Arabidopsis
  misc_feature (41)..(245): Homolog of NCBI NO: 15219439 NR Description: hypothetical protein; protein id: At1g44760.1, by cDNA: gi_17380775 [Arabidopsis thaliana]
  misc_feature (85)..(240): Homolog of NCBI NO: 15237955 NR Description: putative protein; protein id: At5g17390.1
  misc_feature (21)..(240): Homolog of NCBI NO: 15228516 NR Description: hypothetical protein; protein id: At3g03290.1 thaliana] >gi|6714411|gb|AAF26099.1|AC012328_2 hypothetical
  misc_feature (110)..(241): Homolog of NCBI NO: 15227695 NR Description: unknown protein; protein id: At2g03720.1
  misc_feature (107)..(208): Homolog of NCBI NO: 18409190 NR Description: expressed protein; protein id: At1g69080.1, by cDNA: 22327. [Arabidopsis thaliana]
  misc_feature (107)..(208): Homolog of NCBI NO: 21592322 NR Description: unknown [Arabidopsis thaliana]
  misc_feature (107)..(292): Homolog of NCBI NO: 34894192 NR Description: P0439B06.17 [Oryza sativa (japonica
TRAPKPSAQAQHSTPPQRAATLTHTELREWSSGPMGSSGGSSEHFLRQLSSSDGGSAPHHLLQREWECGGVTGSGSRRGSRKKTGARGHRRRGGGFCRAEEAAPGRKRVMVVVDQSSGAKHAMLWALTHVANKGDFLTLLHVLPPESGHSSRGAAEDASALANSLGALCKACKPEVEVEAPVIQGPKLPTILSQVKKLEASVLVLSQRSPSPFCCFPRSSSEELVEECIDRAECLTLAVRRAKQGRRRLPRQHPVAEELLAPRVIHNHIPPLLWKAFGLSLKAWDGTERAGKWRLVQGQEGWELGSPTGRRDGIVLYI

SEQ ID NO: 9180 - protein, 284 aa, Zea mays subsp. mays
  peptide (1)..(284): Ceres Seq. ID no. 12353073
  misc_feature (71)..(206): Pfam Name: Universal stress protein family Pfam Description: Universal stress protein family
  misc_feature (1)..(211): Homolog of NCBI NO: 34907308 NR Description: hypothetical protein~similar to Arabidopsis
  misc_feature (7)..(211): Homolog of NCBI NO: 15219439 NR Description: hypothetical protein; protein id: At1g44760.1, by cDNA: gi_17380775 [Arabidopsis thaliana]
  misc_feature (51)..(206): Homolog of NCBI NO: 15237955 NR Description: putative protein; protein id: At5g17390.1
  misc_feature (1)..(206): Homolog of NCBI NO: 15228516 NR Description: hypothetical protein; protein id: At3g03290.1 thaliana] >gi|6714411|gb|AAF26099.1|AC012328_2 hypothetical
  misc_feature (76)..(207): Homolog of NCBI NO: 15227695 NR Description: unknown protein; protein id: At2g03720.1
  misc_feature (73)..(174): Homolog of NCBI NO: 18409190 NR Description: expressed protein; protein id: At1g69080.1, by cDNA: 22327. [Arabidopsis thaliana]
  misc_feature (73)..(174): Homolog of NCBI NO: 21592322 NR Description: unknown [Arabidopsis thaliana]
  misc_feature (73)..(258): Homolog of NCBI NO: 34894192 NR Description: P0439B06.17 [Oryza sativa (japonica
MGSSGGSSEHFLRQLSSSDGGSAPHHLLQREWECGGVTGSGSRRGSRKKTGARGHRRRGGGFCRAEEAAPGRKRVMVVVDQSSGAKHAMLWALTHVANKGDFLTLLHVLPPESGHSSRGAAEDASALANSLGALCKACKPEVEVEAPVIQGPKLPTILSQVKKLEASVLVLSQRSPSPFCCFPRSSSEELVEECIDRAECLTLAVRRAKQGRRRLPRQHPVAEELLAPRVIHNHIPPLLWKAFGLSLKAWDGTERAGKWRLVQGQEGWELGSPTGRRDGIVLYI

SEQ ID NO: 9181 - protein, 209 aa, Zea mays subsp. mays
  peptide (1)..(209): Ceres Seq. ID no. 12353074
  misc_feature (1)..(131): Pfam Name: Universal stress protein family Pfam Description: Universal stress protein family
  misc_feature (1)..(131): Homolog of NCBI NO: 15228516 NR Description: hypothetical protein; protein id: At3g03290.1 thaliana] >gi|6714411|gb|AAF26099.1|AC012328_2 hypothetical
  misc_feature (1)..(132): Homolog of NCBI NO: 15227695 NR Description: unknown protein; protein id: At2g03720.1
  misc_feature (1)..(99): Homolog of NCBI NO: 18409190 NR Description: expressed protein; protein id: At1g69080.1, by cDNA: 22327. [Arabidopsis thaliana]
  misc_feature (1)..(136): Homolog of NCBI NO: 15219439 NR Description: hypothetical protein; protein id: At1g44760.1, by cDNA: gi_17380775 [Arabidopsis thaliana]
  misc_feature (1)..(131): Homolog of NCBI NO: 15237955 NR Description: putative protein; protein id: At5g17390.1
  misc_feature (1)..(136): Homolog of NCBI NO: 34907308 NR Description: hypothetical protein~similar to Arabidopsis
  misc_feature (1)..(99): Homolog of NCBI NO: 21592322 NR Description: unknown [Arabidopsis thaliana]
  misc_feature (1)..(183): Homolog of NCBI NO: 34894192 NR Description: P0439B06.17 [Oryza sativa (japonica
MVVVDQSSGAKHAMLWALTHVANKGDFLTLLHVLPPESGHSSRGAAEDASALANSLGALCKACKPEVEVEAPVIQGPKLPTILSQVKKLEASVLVLSQRSPSPFCCFPRSSSEELVEECIDRAECLTLAVRRAKQGRRRLPRQHPVAEELLAPRVIHNHIPPLLWKAFGLSLKAWDGTERAGKWRLVQGQEGWELGSPTGRRDGIVLYI

SEQ ID NO: 9182 - DNA, 1876 bp, Zea mays subsp. mays
  misc_feature (1)..(1876): Ceres Seq. ID no. 12407639
  misc_feature: MA Experiment ID: 108504 Result: Up-regulated in Transcription
  misc_feature: MA Experiment 108504 PARAMETER Experiment Name: Zm_Drought_P Parameter: Age (day) Value: 8
  misc_feature: MA Experiment 108504 PARAMETER Experiment Name: Zm_Drought_P Parameter: Organism Value: Zea mays
  misc_feature: MA Experiment 108504 PARAMETER Experiment Name: Zm_Drought_P Parameter: Plant Line Value: 35A19
  misc_feature: MA Experiment 108504 PARAMETER Experiment Name: Zm_Drought_P Parameter: Timepoint (hr) Value: 12
  misc_feature: MA Experiment 108504 PARAMETER Experiment Name: Zm_Drought_P Parameter: Tissue Value: Aerial
  misc_feature: MA Experiment 108504 PARAMETER Experiment Name: Zm_Drought_P Parameter: Treatment Value: Drought vs. No Drought
  misc_feature: MA Experiment ID: 108534 Result: Up-regulated in Transcription
  misc_feature: MA Experiment 108534 PARAMETER Experiment Name: Zm_4deg_Cold_P Parameter: Age (hr) Value: 8
  misc_feature: MA Experiment 108534 PARAMETER Experiment Name: Zm_4deg_Cold_P Parameter: Organism Value: Zea mays
  misc_feature: MA Experiment 108534 PARAMETER Experiment Name: Zm_4deg_Cold_P Parameter: Plant Line Value: 35A19
  misc_feature: MA Experiment 108534 PARAMETER Experiment Name: Zm_4deg_Cold_P Parameter: Temperature (deg C) Value: 4 vs. 22
  misc_feature: MA Experiment 108534 PARAMETER Experiment Name: Zm_4deg_Cold_P Parameter: Timepoint (hr) Value: 6
  misc_feature: MA Experiment 108534 PARAMETER Experiment Name: Zm_4deg_Cold_P Parameter: Tissue Value: Aerial
  misc_feature: MA Experiment ID: 108544 Result: Up-regulated in Transcription
  misc_feature: MA Experiment ID: 108559 Result: Down-regulated in Transcription
  misc_feature: MA Experiment 108559 PARAMETER Experiment Name: Zm_5mM_NO_P Parameter: Age (day) Value: 8
  misc_feature: MA Experiment 108559 PARAMETER Experiment Name: Zm_5mM_NO_P Parameter: Organism Value: Zea mays
  misc_feature: MA Experiment 108559 PARAMETER Experiment Name: Zm_5mM_NO_P Parameter: Plant Line Value: 35A19
  misc_feature: MA Experiment 108559 PARAMETER Experiment Name: Zm_5mM_NO_P Parameter: Timepoint (hr) Value: 12
  misc_feature: MA Experiment 108559 PARAMETER Experiment Name: Zm_5mM_NO_P Parameter: Tissue Value: Aerial
  misc_feature: MA Experiment 108559 PARAMETER Experiment Name: Zm_5mM_NO_P Parameter: Treatment Value: 5mM NO vs. No Treatment
  misc_feature: MA Experiment ID: 20000479 Result: Up-regulated in Transcription
  misc_feature: MA Experiment 20000479 PARAMETER Experiment Name: Zm_Drought_P Parameter: Age (day) Value: 10
  misc_feature: MA Experiment 20000479 PARAMETER Experiment Name: Zm_Drought_P Parameter: Organism Value: Zea mays
  misc_feature: MA Experiment 20000479 PARAMETER Experiment Name: Zm_Drought_P Parameter: Plant Line Value: 35A19
  misc_feature: MA Experiment 20000479 PARAMETER Experiment Name: Zm_Drought_P Parameter: Timepoint (hr) Value: 48
  misc_feature: MA Experiment 20000479 PARAMETER Experiment Name: Zm_Drought_P Parameter: Tissue Value: Aerial
  misc_feature: MA Experiment 20000479 PARAMETER Experiment Name: Zm_Drought_P Parameter: Treatment Value: Drought vs. No Drought
  misc_feature: MA Experiment ID: 20000480 Result: Up-regulated in Transcription
  misc_feature: MA Experiment 20000480 PARAMETER Experiment Name: Zm_Drought_P Parameter: Age (day) Value: 11
  misc_feature: MA Experiment 20000480 PARAMETER Experiment Name: Zm_Drought_P Parameter: Organism Value: Zea mays
  misc_feature: MA Experiment 20000480 PARAMETER Experiment Name: Zm_Drought_P Parameter: Plant Line Value: 35A19
  misc_feature: MA Experiment 20000480 PARAMETER Experiment Name: Zm_Drought_P Parameter: Timepoint (hr) Value: 72
  misc_feature: MA Experiment 20000480 PARAMETER Experiment Name: Zm_Drought_P Parameter: Tissue Value: Aerial
  misc_feature: MA Experiment 20000480 PARAMETER Experiment Name: Zm_Drought_P Parameter: Treatment Value: Drought vs. No Drought
  misc_feature: MA Experiment ID: 20000492 Result: Down-regulated in Transcription
  misc_feature: MA Experiment 20000492 PARAMETER Experiment Name: Zm_Hybrid_Seed_Dev_P Parameter: DAP Value: 12
  misc_feature: MA Experiment 20000492 PARAMETER Experiment Name: Zm_Hybrid_Seed_Dev_P Parameter: Organism Value: Zea mays
  misc_feature: MA Experiment 20000492 PARAMETER Experiment Name: Zm_Hybrid_Seed_Dev_P Parameter: Plant Line Value: 35A19
  misc_feature: MA Experiment 20000492 PARAMETER Experiment Name: Zm_Hybrid_Seed_Dev_P Parameter: Tissue Value: Fert Kernel vs. Unfert Floret
  misc_feature: MA Experiment ID: 20000535 Result: Down-regulated in Transcription
  misc_feature: MA Experiment 20000535 PARAMETER Experiment Name: Zm_Hybrid_Seed_Dev_P Parameter: DAP Value: 30 vs. 12
  misc_feature: MA Experiment 20000535 PARAMETER Experiment Name: Zm_Hybrid_Seed_Dev_P Parameter: Organism Value: Zea mays
  misc_feature: MA Experiment 20000535 PARAMETER Experiment Name: Zm_Hybrid_Seed_Dev_P Parameter: Plant Line Value: 35A19
  misc_feature: MA Experiment 20000535 PARAMETER Experiment Name: Zm_Hybrid_Seed_Dev_P Parameter: Tissue Value: Embryo vs. Unfert Floret
agcaaatcccgtgtgccgcactggccgagcccacattcgaaccaaagtccccccgggcccccccaaggaaaaccatgtgccgcgcccgccacgttcccacgcgccactaaatcagcagcgcccggccgcccggagctgccagtagcggcaacagcaaaacaagaagcagccagctaccggagcactagtaaacagtaagcagcagagagcatggcgagatcagggcgggaagcggagcccggagaggaggaacggaagctggtgctgggcaagtacgagctgggccgcctgctggggcagggcaccttcgccaaggtttactacgcgagggacctgagcgccggcgccggcacgggccacagctgcagcgtagccatcaaggtgatcgacaaggcgcggctgcggcgcacggaggggatggtggagcagctgcgccgggagatctccatcatgcggatggtgcggcaccccaacgtggtgggcatccgggaggtgctcgccagccgctcccgcgtcttcgtcgtcatggagtacgcgcgcggcggggagctcttcgccaaggtggcccggggccgcctcgacgaggaccacgcgcgccgctacttccagcagctggtcgccgccgtcggcttctgccaccgccgcggcgtcgcgcaccgggacctcaagcccgagaacctgctgctggacgaggcggggcggctcaaggtcaccgacttcgggctggccgcgctgcccgagcagctgcgccacgacggcctgctccacacgcagtgcggcacccccgcgtacgtcgcgcccgaggtgctcaggaagcgcggctacgacggcgcccgcgccgacctctggtcctgcggcgtcgtgctctacgtcctcctctgcggcttcctcccgttccagcacgacaactacgtcaagttgtaccagaagatcttcaaggccgactaccaggtgccgccctgggtctccggcgacgcgcgccgcctcatcgcgcgcctgctcgtcgtcgaccccgccaagcgcgcctccatcgccgagatcatgtgcacgccgtggttcaggaagggcttcgtgccgcccgtcctttcgcccccggtgacgcccaagaaacagcagctggacgaaggcgctgccctcttcgacaacgacgacgacgacaacagcaacagcaaccactctggcgccacctcccctcggtcgtgcaacgcgttccagctcatctcgtccatgtcctccgggttcgacctgtcggggctgttcgagagcgagcagaagaccgcgaccgtgttcacggcccgcgcgccggcggccaccgtggtggagaagctggagtccgtggcgcgcgccctaggattcgaggtcaccagggggaaaggctggaaggtgaggatggaggccaaggccgagggcacgaacggacggctcgcggccaccgccgaggtgctcgaggtggccgtggacgtgaccgtggtcgagttcgtgcacgacgccggggacgcgctggactttaacaagttctgcgccgtcgacgtccgcccggggctcacggagatcgtctgggcgtggcagggcgacagccccgccgccgccgtcggcaccgcgtgaacaagcgtccccgtctgtcacgtggaagttgtagcaactttgcgtaggagttaaacacggctgcactggcaccagctttttatagcatgtaaagtttcaagttctcgtcgttgcttcgagactgccatggtggctagttcgttgtgtgccatatgctgtacaggaaggaaagagtcgaatcgagccggggagttttcgatcgacttgccaatttttgtacgatcataacctgtattttctggagatgtgtgcatacaaaattttgcccgtg

SEQ ID NO: 9183 - protein, 464 aa, Zea mays subsp. mays
  peptide (1)..(464): Ceres Seq. ID no. 12407640
  misc_feature (22)..(283): Pfam Name: Protein kinase domain Pfam Description: Protein kinase domain
  misc_feature (12)..(456): Homolog of NCBI NO: 30683398 NR Description: CBL-interacting protein kinase 5 [Arabidopsis
  misc_feature (12)..(451): Homolog of NCBI NO: 24899813 NR Description: serine/threonine protein kinase-like protein
  misc_feature (1)..(456): Homolog of NCBI NO: 15215664 NR Description: AT5g25110/T11H3_120 [Arabidopsis thaliana]
  misc_feature (1)..(456): Homolog of NCBI NO: 18420882 NR Description: serine/threonine protein kinase-like protein; id: At5g25110.1, supported by cDNA: gi_15215663, supported by
  misc_feature (9)..(463): Homolog of NCBI NO: 15224679 NR Description: putative protein kinase; protein id: At2g25090.1, by cDNA: gi_14009297 [Arabidopsis thaliana]
  misc_feature (12)..(460): Homolog of NCBI NO: 34903780 NR Description: unnamed protein product [Oryza sativa (japonica group)] >gi|7340882|dbj|BAA92972.1| unnamed protein product
MARSGREAEPGEEERKLVLGKYELGRLLGQGTFAKVYYARDLSAGAGTGHSCSVAIKVIDKARLRRTEGMVEQLRREISIMRMVRHPNVVGIREVLASRSRVFVVMEYARGGELFAKVARGRLDEDHARRYFQQLVAAVGFCHRRGVAHRDLKPENLLLDEAGRLKVTDFGLAALPEQLRHDGLLHTQCGTPAYVAPEVLRKRGYDGARADLWSCGVVLYVLLCGFLPFQHDNYVKLYQKIFKADYQVPPWVSGDARRLIARLLVVDPAKRASIAEIMCTPWFRKGFVPPVLSPPVTPKKQQLDEGAALFDNDDDDNSNSNHSGATSPRSCNAFQLISSMSSGFDLSGLFESEQKTATVFTARAPAATVVEKLESVARALGFEVTRGKGWKVRMEAKAEGTNGRLAATAEVLEVAVDVTVVEFVHDAGDALDFNKFCAVDVRPGLTEIVWAWQGDSPAAAVGTA

SEQ ID NO: 9184 - protein, 395 aa, Zea mays subsp. mays
  peptide (1)..(395): Ceres Seq. ID no. 12407641
  misc_feature (1)..(214): Pfam Name: Protein kinase domain Pfam Description: Protein kinase domain
  misc_feature (1)..(387): Homolog of NCBI NO: 30683398 NR Description: CBL-interacting protein kinase 5 [Arabidopsis
  misc_feature (1)..(382): Homolog of NCBI NO: 24899813 NR Description: serine/threonine protein kinase-like protein
  misc_feature (1)..(387): Homolog of NCBI NO: 15215664 NR Description: AT5g25110/T11H3_120 [Arabidopsis thaliana]
  misc_feature (1)..(387): Homolog of NCBI NO: 18420882 NR Description: serine/threonine protein kinase-like protein; id: At5g25110.1, supported by cDNA: gi_15215663, supported by
  misc_feature (1)..(394): Homolog of NCBI NO: 15224679 NR Description: putative protein kinase; protein id: At2g25090.1, by cDNA: gi_14009297 [Arabidopsis thaliana]
  misc_feature (1)..(391): Homolog of NCBI NO: 34903780 NR Description: unnamed protein product [Oryza sativa (japonica group)] >gi|7340882|dbj|BAA92972.1| unnamed protein product
MVEQLRREISIMRMVRHPNVVGIREVLASRSRVFVVMEYARGGELFAKVARGRLDEDHARRYFQQLVAAVGFCHRRGVAHRDLKPENLLLDEAGRLKVTDFGLAALPEQLRHDGLLHTQCGTPAYVAPEVLRKRGYDGARADLWSCGVVLYVLLCGFLPFQHDNYVKLYQKIFKADYQVPPWVSGDARRLIARLLVVDPAKRASIAEIMCTPWFRKGFVPPVLSPPVTPKKQQLDEGAALFDNDDDDNSNSNHSGATSPRSCNAFQLISSMSSGFDLSGLFESEQKTATVFTARAPAATVVEKLESVARALGFEVTRGKGWKVRMEAKAEGTNGRLAATAEVLEVAVDVTVVEFVHDAGDALDFNKFCAVDVRPGLTEIVWAWQGDSPAAAVGTA

SEQ ID NO: 9185 - protein, 384 aa, Zea mays subsp. mays
  peptide (1)..(384): Ceres Seq. ID no. 12407642
  misc_feature (1)..(203): Pfam Name: Protein kinase domain Pfam Description: Protein kinase domain
  misc_feature (1)..(376): Homolog of NCBI NO: 30683398 NR Description: CBL-interacting protein kinase 5 [Arabidopsis
  misc_feature (1)..(371): Homolog of NCBI NO: 24899813 NR Description: serine/threonine protein kinase-like protein
  misc_feature (1)..(376): Homolog of NCBI NO: 15215664 NR Description: AT5g25110/T11H3_120 [Arabidopsis thaliana]
  misc_feature (1)..(376): Homolog of NCBI NO: 18420882 NR Description: serine/threonine protein kinase-like protein; id: At5g25110.1, supported by cDNA: gi_15215663, supported by
  misc_feature (1)..(383): Homolog of NCBI NO: 15224679 NR Description: putative protein kinase; protein id: At2g25090.1, by cDNA: gi_14009297 [Arabidopsis thaliana]
  misc_feature (1)..(380): Homolog of NCBI NO: 34903780 NR Description: unnamed protein product [Oryza sativa (japonica group)] >gi|7340882|dbj|BAA92972.1| unnamed protein product
MRMVRHPNVVGIREVLASRSRVFVVMEYARGGELFAKVARGRLDEDHARRYFQQLVAAVGFCHRRGVAHRDLKPENLLLDEAGRLKVTDFGLAALPEQLRHDGLLHTQCGTPAYVAPEVLRKRGYDGARADLWSCGVVLYVLLCGFLPFQHDNYVKLYQKIFKADYQVPPWVSGDARRLIARLLVVDPAKRASIAEIMCTPWFRKGFVPPVLSPPVTPKKQQLDEGAALFDNDDDDNSNSNHSGATSPRSCNAFQLISSMSSGFDLSGLFESEQKTATVFTARAPAATVVEKLESVARALGFEVTRGKGWKVRMEAKAEGTNGRLAATAEVLEVAVDVTVVEFVHDAGDALDFNKFCAVDVRPGLTEIVWAWQGDSPAAAVGTA

SEQ ID NO: 9186 - DNA, 1234 bp, Zea mays subsp. mays
  misc_feature (1)..(1234): Ceres Seq. ID no. 12356857
  misc_feature: MA Experiment ID: 20001614 Result: Up-regulated in Transcription
  misc_feature: MA Experiment 20001614 PARAMETER Experiment Name: Zm_50ppm_KNO3_L-to-H_P Parameter: Age (day) Value: 21
  misc_feature: MA Experiment 20001614 PARAMETER Experiment Name: Zm_50ppm_KNO3_L-to-H_P Parameter: Organism Value: Zea mays
  misc_feature: MA Experiment 20001614 PARAMETER Experiment Name: Zm_50ppm_KNO3_L-to-H_P Parameter: Plant Line Value: 35A19
  misc_feature: MA Experiment 20001614 PARAMETER Experiment Name: Zm_50ppm_KNO3_L-to-H_P Parameter: Timepoint (hr) Value: 48
  misc_feature: MA Experiment 20001614 PARAMETER Experiment Name: Zm_50ppm_KNO3_L-to-H_P Parameter: Tissue Value: Roots
  misc_feature: MA Experiment 20001614 PARAMETER Experiment Name: Zm_50ppm_KNO3_L-to-H_P Parameter: Treatment Value: 50ppm KNO3 vs. 50ppm KCl
aaagtgttgtagagcagacgaagctagctaacaattaagcagctcgatcgagcacacacacacttgatcactactagacagtaaacacattgcgcaaaggccgccatggcttaccgcgcctttgctacgctgcttgcagtgctagcatttgtgggcttcgcttcagttccccgtggtctggcaactgacccgacccagctccaggacttctgcgttgctgataacaagaaccctgtgctggtgaacggggtggtgtgcaagaacccgaacatggtgaaggcaaccgacttcttctccacgatagtgccggtggcgccaaacgggcagggctccgctgtgacgccggtggcggtgaacgagatcccggggctgaacacgctgggcatctcgctggcgcgcatcgacttcgtccccggcgggcagaacccgccgcacacgcacccgcgcgggtccgagatcctgacggtcatccagggcacgctcctcgtcggcttcgtcacctccaaccagctgctcaacaacactctcttcaccatgcagctgaacatgggcgacgtcttcgtgttcccgcaggggctcatccacttccagctcaacaacggcaagacccccgccgtggccatcgccgcgctcagcagccagaaccccggcaccgtcaccatcgccaacgccgtgttcggggccaagccgcccatcctggacgacatcctcgccagggcgttcatgctcgagaaggccaccgtcgactgggtccagcaggcgttcggcgcggcaccagtggccggcggcggcggtggcctgcccggaggaggtggctatcccggcagcggtggtggcctgcccggaggaggtggctatcccggcagcggctttccgggctaccccggccgtagctgatcggtacggtggtggctccacggcggcgccgcctagctagcatgctgcacaagtgcagccgcgcgcgcggatcaggccgtcatacacaaagtatacttatatatagtacctcaaagtcctcaagcattaagccacgtgaagtgaaggctatacgtattaagttcggttgtaatggtcaggtgtaccaaacacccaccaacacctagctagtgagcaggcgcaatgcggcgtctgtgttgatcgagccgtagctctagctctagctcgatcgggttgaataatttgcggcaaaacttatagatatatatggaataaaatcgaaaagtttcatcgtttc

SEQ ID NO: 9187 - protein, 263 aa, Zea mays subsp. mays
  peptide (1)..(263): Ceres Seq. ID no. 12356858
  misc_feature (72)..(214): Pfam Name: Cupin Pfam Description: Cupin
  misc_feature (1)..(249): Homolog of NCBI NO: 21741995 NR Description: OSJNBa0058K23.2 [Oryza sativa (japonica
  misc_feature (1)..(249): Homolog of NCBI NO: 5852087 NR Description: zwh0010.1 [Oryza sativa (indica cultivar-group)]
  misc_feature (1)..(220): Homolog of NCBI NO: 40253800 NR Description: putative germin A [Oryza sativa (japonica
  misc_feature (5)..(220): Homolog of NCBI NO: 7447336 NR Description: germin-like protein 6 - rice
  misc_feature (1)..(220): Homolog of NCBI NO: 40253804 NR Description: putative germin A [Oryza sativa (japonica
  misc_feature (1)..(220): Homolog of NCBI NO: 5499730 NR Description: germin-like protein 1 precursor [Oryza sativa]
  misc_feature (1)..(220): Homolog of NCBI NO: 5499732 NR Description: germin-like protein 2 precursor [Oryza sativa]
  misc_feature (1)..(220): Homolog of NCBI NO: 40253802 NR Description: putative germin A [Oryza sativa (japonica
  misc_feature (9)..(220): Homolog of NCBI NO: 40253797 NR Description: putative germin A [Oryza sativa (japonica
  misc_feature (5)..(220): Homolog of NCBI NO: 5869975 NR Description: germin-like protein [Triticum aestivum]
MAYRAFATLLAVLAFVGFASVPRGLATDPTQLQDFCVADNKNPVLVNGVVCKNPNMVKATDFFSTIVPVAPNGQGSAVTPVAVNEIPGLNTLGISLARIDFVPGGQNPPHTHPRGSEILTVIQGTLLVGFVTSNQLLNNTLFTMQLNMGDVFVFPQGLIHFQLNNGKTPAVAIAALSSQNPGTVTIANAVFGAKPPILDDILARAFMLEKATVDWVQQAFGAAPVAGGGGGLPGGGGYPGSGGGLPGGGGYPGSGFPGYPGRS

SEQ ID NO: 9188 - protein, 208 aa, Zea mays subsp. mays
  peptide (1)..(208): Ceres Seq. ID no. 12356859
  misc_feature (17)..(159): Pfam Name: Cupin Pfam Description: Cupin
  misc_feature (1)..(194): Homolog of NCBI NO: 21741995 NR Description: OSJNBa0058K23.2 [Oryza sativa (japonica
  misc_feature (1)..(194): Homolog of NCBI NO: 5852087 NR Description: zwh0010.1 [Oryza sativa (indica cultivar-group)]
  misc_feature (1)..(165): Homolog of NCBI NO: 40253800 NR Description: putative germin A [Oryza sativa (japonica
  misc_feature (1)..(165): Homolog of NCBI NO: 7447336 NR Description: germin-like protein 6 - rice
  misc_feature (1)..(165): Homolog of NCBI NO: 40253804 NR Description: putative germin A [Oryza sativa (japonica
  misc_feature (1)..(165): Homolog of NCBI NO: 5499730 NR Description: germin-like protein 1 precursor [Oryza sativa]
  misc_feature (1)..(165): Homolog of NCBI NO: 5499732 NR Description: germin-like protein 2 precursor [Oryza sativa]
  misc_feature (1)..(165): Homolog of NCBI NO: 40253802 NR Description: putative germin A [Oryza sativa (japonica
  misc_feature (1)..(165): Homolog of NCBI NO: 40253797 NR Description: putative germin A [Oryza sativa (japonica
  misc_feature (1)..(165): Homolog of NCBI NO: 5869975 NR Description: germin-like protein [Triticum aestivum]
MVKATDFFSTIVPVAPNGQGSAVTPVAVNEIPGLNTLGISLARIDFVPGGQNPPHTHPRGSEILTVIQGTLLVGFVTSNQLLNNTLFTMQLNMGDVFVFPQGLIHFQLNNGKTPAVAIAALSSQNPGTVTIANAVFGAKPPILDDILARAFMLEKATVDWVQQAFGAAPVAGGGGGLPGGGGYPGSGGGLPGGGGYPGSGFPGYPGRS

SEQ ID NO: 9189 - DNA, 1793 bp, Zea mays subsp. mays
  misc_feature (1)..(1793): Ceres Seq. ID no. 13492648
  misc_feature: MA Experiment ID: 108527 Result: Up-regulated in Transcription
  misc_feature: MA Experiment 108527 PARAMETER Experiment Name: Zm_5mM_NO_P Parameter: Age (day) Value: 8
  misc_feature: MA Experiment 108527 PARAMETER Experiment Name: Zm_5mM_NO_P Parameter: Organism Value: Zea mays
  misc_feature: MA Experiment 108527 PARAMETER Experiment Name: Zm_5mM_NO_P Parameter: Plant Line Value: 35A19
  misc_feature: MA Experiment 108527 PARAMETER Experiment Name: Zm_5mM_NO_P Parameter: Timepoint (hr) Value: 6
  misc_feature: MA Experiment 108527 PARAMETER Experiment Name: Zm_5mM_NO_P Parameter: Tissue Value: Aerial
  misc_feature: MA Experiment 108527 PARAMETER Experiment Name: Zm_5mM_NO_P Parameter: Treatment Value: 5mM NO vs. No Treatment
  misc_feature: MA Experiment ID: 108528 Result: Up-regulated in Transcription
  misc_feature: MA Experiment 108528 PARAMETER Experiment Name: Zm_Imbibed_Seeds_P Parameter: Age (day) Value: 5 vs. 2
  misc_feature: MA Experiment 108528 PARAMETER Experiment Name: Zm_Imbibed_Seeds_P Parameter: Organism Value: Zea mays
  misc_feature: MA Experiment 108528 PARAMETER Experiment Name: Zm_Imbibed_Seeds_P Parameter: Plant Line Value: 35A19
  misc_feature: MA Experiment 108528 PARAMETER Experiment Name: Zm_Imbibed_Seeds_P Parameter: Tissue Value: Aerial vs. Embryo
  misc_feature: MA Experiment ID: 108559 Result: Up-regulated in Transcription
  misc_feature: MA Experiment 108559 PARAMETER Experiment Name: Zm_5mM_NO_P Parameter: Age (day) Value: 8
  misc_feature: MA Experiment 108559 PARAMETER Experiment Name: Zm_5mM_NO_P Parameter: Organism Value: Zea mays
  misc_feature: MA Experiment 108559 PARAMETER Experiment Name: Zm_5mM_NO_P Parameter: Plant Line Value: 35A19
  misc_feature: MA Experiment 108559 PARAMETER Experiment Name: Zm_5mM_NO_P Parameter: Timepoint (hr) Value: 12
  misc_feature: MA Experiment 108559 PARAMETER Experiment Name: Zm_5mM_NO_P Parameter: Tissue Value: Aerial
  misc_feature: MA Experiment 108559 PARAMETER Experiment Name: Zm_5mM_NO_P Parameter: Treatment Value: 5mM NO vs. No Treatment
tttccttcgacagatcgaatcgtgcttaccgagctttataccatcgtcatctcccgccagctgccgtgccgtctgctcgtccgattgttcgtgttcctcgcgtgcgcggatcggatcggttcctctggattggcgcgcacgctcagcaagtagtagcaggtctttcgccgtcgcatgttactgcagcaggccaccggaagagcgcgccgtcatcagctagctgcctcctcctcctcgtcgtctcgaccaccggcggtggatgggcggcgtgctcggcgcgctgctgcaccggcggtccgggggcaggccgccaccggcgcgggccacgaggcgccgggcgctcacccgccagccgtcggcctatgacgccggcggcgggcaccggagggcgatgctgtccaagaagtactcgtacataccggacacctacacgtcgcttgacgaggtggcggcggcgctgcgcgagcaggggctggagtcgtcgaacctcatcctgggcatagacttcaccaagagcaacgagtggacagggaggcagtcgttcggcgggcagagcctgcacagggtcggcgacacgcccaacccctacgagcaggccatcagcatcatcggcaagacgctggctcccttcgacgaggacaacctcatcccctgcttcggcttcggagacggtgactgacgactgacgacggccttcctccgatcctgctgttgatgcatccatccatcttctcgcgtgtcgatcgcttgtccttctccttaatctatctaacctctcttcttgcattatattggttgcgtcgggactcgcgcctgcactgngcagccaccacccatgactacaacgtgtttcagcttccacccggacaactcgccgtgccacggcttcgaggaggtcctcgcctgctaccgcaagatcgtgccgcacctcaagctttccgggcngacgtcgttcgcgcccatcgtggaggcggccgtngacatcgtggaccggagcggggggcagtaccacgtgctcgtcgtggtcgcggacgggcaggtgaccaggagcgtcgacaccggtgacggcgacctcagcccgcaggagaagagaacggtagagtccattgtcacggcaagctcctacccgctgtccatcgttctggttggggtcggggacggcccctgggacgacatgcgcagattcgacgacaagctccccgcgcgcgacttcgacaacttccagttcgtcaacttcaccgccatcatggcccgcgccgcgacggcacagcagaaggagtcggcgttcgcgctcgccgcgctcatggaggtccccatccagtacaaggccaccatggagctcggcatcctgggacggtccacggggaacgccaagcgagtcgcccccgcgccgccgccactgccgcacgcgcagcggcaggcgtcgtcgctgaggaggggcgccagcaacgtcggcggcgccgccgcggcgccgagagatgaccaggtgtgcccgatctgcctgaccaatgccaaggatctggcgttcggctgtgggcatatgtgctgcagggagtgcggggaaagcctcaccagatgcccgatatgccggcagccgatacggtcgaagctgaggctatattcaggatgaagtggctatgctacaacagaggccacgaagaggaaaaaggatatatagcttactcgccgttaaaatgtacatgtgaatctgtcaaaacgtgtaagaaggaaccaccggtcgaggtcagtcctgttcgtctccaaatttggatgaaccgatgttccattttgtc

SEQ ID NO: 9190 - protein, 264 aa, Zea mays subsp. mays
  peptide (1)..(264): Ceres Seq. ID no. 13492649
  misc_feature (6)..(236): Homolog of NCBI NO: 18481708 NR Description: hypothetical protein [Sorghum bicolor]
  misc_feature (6)..(263): Homolog of NCBI NO: 18412353 NR Description: copine-related [Arabidopsis thaliana]
  misc_feature (6)..(189): Homolog of NCBI NO: 15241400 NR Description: copine-related [Arabidopsis thaliana]
  misc_feature (173)..(262): Homolog of NCBI NO: 15241400 NR Description: copine-related [Arabidopsis thaliana]
  misc_feature (6)..(262): Homolog of NCBI NO: 18408863 NR Description: copine-related [Arabidopsis thaliana]
  misc_feature (6)..(262): Homolog of NCBI NO: 30697566 NR Description: copine-related [Arabidopsis thaliana]
  misc_feature (6)..(223): Homolog of NCBI NO: 34905794 NR Description: P0401G10.23 [Oryza sativa (japonica
  misc_feature (217)..(263): Homolog of NCBI NO: 34905794 NR Description: P0401G10.23 [Oryza sativa (japonica
  misc_feature (6)..(262): Homolog of NCBI NO: 15232157 NR Description: copine-related [Arabidopsis thaliana]
  misc_feature (6)..(263): Homolog of NCBI NO: 22328041 NR Description: copine-related [Arabidopsis thaliana] unknown protein [Arabidopsis thaliana]
  misc_feature (37)..(37): Xaa is any aa, unknown or other
  misc_feature (48)..(48): Xaa is any aa, unknown or other
MTTTCFSFHPDNSPCHGFEEVLACYRKIVPHLKLSGXTSFAPIVEAAXDIVDRSGGQYHVLVVVADGQVTRSVDTGDGDLSPQEKRTVESIVTASSYPLSIVLVGVGDGPWDDMRRFDDKLPARDFDNFQFVNFTAIMARAATAQQKESAFALAALMEVPIQYKATMELGILGRSTGNAKRVAPAPPPLPHAQRQASSLRRGASNVGGAAAAPRDDQVCPICLTNAKDLAFGCGHMCCRECGESLTRCPICRQPIRSKLRLYSG

SEQ ID NO: 9191 - protein, 166 aa, Zea mays subsp. mays
  peptide (1)..(166): Ceres Seq. ID no. 13492650
  misc_feature (114)..(166): Pfam Name: Equine herpesvirus glycoprotein gp2 Pfam Description: Equine herpesvirus glycoprotein gp2
  misc_feature (55)..(166): Homolog of NCBI NO: 13592175 NR Description: ppg3 [Leishmania major]
  misc_feature (131)..(166): Homolog of NCBI NO: 17384256 NR Description: mucin 5 [Homo sapiens]
  misc_feature (55)..(166): Homolog of NCBI NO: 13592175 NR Description: ppg3 [Leishmania major]
  misc_feature (52)..(166): Homolog of NCBI NO: 15901602 NR Description: cell wall surface anchor family protein pneumoniae TIGR4] >gi|25389341|pir||E95206 cell wall surface
  misc_feature (52)..(166): Homolog of NCBI NO: 15901602 NR Description: cell wall surface anchor family protein pneumoniae TIGR4] >gi|25389341|pir||E95206 cell wall surface
  misc_feature (52)..(166): Homolog of NCBI NO: 15901602 NR Description: cell wall surface anchor family protein pneumoniae TIGR4] >gi|25389341|pir||E95206 cell wall surface
  misc_feature (55)..(166): Homolog of NCBI NO: 15901602 NR Description: cell wall surface anchor family protein pneumoniae TIGR4] >gi|25389341|pir||E95206 cell wall surface
  misc_feature (52)..(166): Homolog of NCBI NO: 15901602 NR Description: cell wall surface anchor family protein pneumoniae TIGR4] >gi|25389341|pir||E95206 cell wall surface
  misc_feature (52)..(166): Homolog of NCBI NO: 15901602 NR Description: cell wall surface anchor family protein pneumoniae TIGR4] >gi|25389341|pir||E95206 cell wall surface
  misc_feature (52)..(166): Homolog of NCBI NO: 15901602 NR Description: cell wall surface anchor family protein pneumoniae TIGR4] >gi|25389341|pir||E95206 cell wall surface
SFDRSNRAYRALYHRHLPPAAVPSARPIVRVPRVRGSDRFLWIGAHAQQVVAGLSPSHVTAAGHRKSAPSSASCLLLLVVSTTGGGWAACSARCCTGGPGAGRHRRGPRGAGRSPASRRPMTPAAGTGGRCCPRSTRTYRTPTRRLTRWRRRCASRGWSRRTSSWA

SEQ ID NO: 9192 - protein, 151 aa, Zea mays subsp. mays
  peptide (1)..(151): Ceres Seq. ID no. 13492651
  misc_feature (1)..(123): Homolog of NCBI NO: 18481708 NR Description: hypothetical protein [Sorghum bicolor]
  misc_feature (1)..(150): Homolog of NCBI NO: 18412353 NR Description: copine-related [Arabidopsis thaliana]
  misc_feature (1)..(76): Homolog of NCBI NO: 15241400 NR Description: copine-related [Arabidopsis thaliana]
  misc_feature (60)..(149): Homolog of NCBI NO: 15241400 NR Description: copine-related [Arabidopsis thaliana]
  misc_feature (1)..(149): Homolog of NCBI NO: 18408863 NR Description: copine-related [Arabidopsis thaliana]
  misc_feature (1)..(149): Homolog of NCBI NO: 30697566 NR Description: copine-related [Arabidopsis thaliana]
  misc_feature (1)..(110): Homolog of NCBI NO: 34905794 NR Description: P0401G10.23 [Oryza sativa (japonica
  misc_feature (104)..(150): Homolog of NCBI NO: 34905794 NR Description: P0401G10.23 [Oryza sativa (japonica
  misc_feature (1)..(149): Homolog of NCBI NO: 15232157 NR Description: copine-related [Arabidopsis thaliana]
  misc_feature (1)..(150): Homolog of NCBI NO: 22328041 NR Description: copine-related [Arabidopsis thaliana] unknown protein [Arabidopsis thaliana]
MRRFDDKLPARDFDNFQFVNFTAIMARAATAQQKESAFALAALMEVPIQYKATMELGILGRSTGNAKRVAPAPPPLPHAQRQASSLRRGASNVGGAAAAPRDDQVCPICLTNAKDLAFGCGHMCCRECGESLTRCPICRQPIRSKLRLYSG

SEQ ID NO: 9193 - DNA, 1235 bp, Zea mays subsp. mays
  misc_feature (1)..(1235): Ceres Seq. ID no. 12407635
  misc_feature: MA Experiment ID: 108556 Result: Down-regulated in Transcription
  misc_feature: MA Experiment 108556 PARAMETER Experiment Name: Zm_Drought_P Parameter: Age (day) Value: 9
  misc_feature: MA Experiment 108556 PARAMETER Experiment Name: Zm_Drought_P Parameter: Organism Value: Zea mays
  misc_feature: MA Experiment 108556 PARAMETER Experiment Name: Zm_Drought_P Parameter: Plant Line Value: 35A19
  misc_feature: MA Experiment 108556 PARAMETER Experiment Name: Zm_Drought_P Parameter: Timepoint (hr) Value: 24
  misc_feature: MA Experiment 108556 PARAMETER Experiment Name: Zm_Drought_P Parameter: Tissue Value: Aerial
  misc_feature: MA Experiment 108556 PARAMETER Experiment Name: Zm_Drought_P Parameter: Treatment Value: Drought vs. No Drought
  misc_feature: MA Experiment ID: 108689 Result: Down-regulated in Transcription
  misc_feature: MA Experiment 108689 PARAMETER Experiment Name: Zm_Drought_Roots_P Parameter: Age (day) Value: 9
  misc_feature: MA Experiment 108689 PARAMETER Experiment Name: Zm_Drought_Roots_P Parameter: Organism Value: Zea mays
  misc_feature: MA Experiment 108689 PARAMETER Experiment Name: Zm_Drought_Roots_P Parameter: Plant Line Value: 35A19
  misc_feature: MA Experiment 108689 PARAMETER Experiment Name: Zm_Drought_Roots_P Parameter: Timepoint (hr) Value: 24
  misc_feature: MA Experiment 108689 PARAMETER Experiment Name: Zm_Drought_Roots_P Parameter: Tissue Value: Roots
  misc_feature: MA Experiment 108689 PARAMETER Experiment Name: Zm_Drought_Roots_P Parameter: Treatment Value: Drought vs. No Drought
  misc_feature: MA Experiment ID: 20000479 Result: Down-regulated in Transcription
  misc_feature: MA Experiment 20000479 PARAMETER Experiment Name: Zm_Drought_P Parameter: Age (day) Value: 10
  misc_feature: MA Experiment 20000479 PARAMETER Experiment Name: Zm_Drought_P Parameter: Organism Value: Zea mays
  misc_feature: MA Experiment 20000479 PARAMETER Experiment Name: Zm_Drought_P Parameter: Plant Line Value: 35A19
  misc_feature: MA Experiment 20000479 PARAMETER Experiment Name: Zm_Drought_P Parameter: Timepoint (hr) Value: 48
  misc_feature: MA Experiment 20000479 PARAMETER Experiment Name: Zm_Drought_P Parameter: Tissue Value: Aerial
  misc_feature: MA Experiment 20000479 PARAMETER Experiment Name: Zm_Drought_P Parameter: Treatment Value: Drought vs. No Drought
  misc_feature: MA Experiment ID: 20000480 Result: Down-regulated in Transcription
  misc_feature: MA Experiment 20000480 PARAMETER Experiment Name: Zm_Drought_P Parameter: Age (day) Value: 11
  misc_feature: MA Experiment 20000480 PARAMETER Experiment Name: Zm_Drought_P Parameter: Organism Value: Zea mays
  misc_feature: MA Experiment 20000480 PARAMETER Experiment Name: Zm_Drought_P Parameter: Plant Line Value: 35A19
  misc_feature: MA Experiment 20000480 PARAMETER Experiment Name: Zm_Drought_P Parameter: Timepoint (hr) Value: 72
  misc_feature: MA Experiment 20000480 PARAMETER Experiment Name: Zm_Drought_P Parameter: Tissue Value: Aerial
  misc_feature: MA Experiment 20000480 PARAMETER Experiment Name: Zm_Drought_P Parameter: Treatment Value: Drought vs. No Drought
gctcccaccccacctcaccatctccactccaaacaaggggaaggcgagcgacagacaaacccaccccatcgcccctcctctgtctcctctcttgcccacgcccgccccaatgtcgccgcccctcgagccccacgactacatcggcctctccgccgcggccgcggccgcgccgccgaccccgacctcctcctcctcttcctcctcctcgccggccccccgcctcacccttcgcctcggcctgccgggctccgagtcccccgaccgcgaccgggactgctgcgaggacttcgccgccacgctctccctcggcccgctgccggcggcagccgccgtctccgccaagcgcgccttcccggaccccgcccagcgccccggcgcttccaaggctagcgacgccaagcagcaggcttcccccgccgcgccgccggccgccaaagcgcaggtggttggatggccgcccgtgcgcaactaccggaagaataccctcgccgccgcgaccgcctccaggagcaaggcgccggcggaggaggccgcgtccggagctgggcccatgtacgtaaaggtgagcatggatggcgcgccctacctcaggaaggtggacatcaagatgtactccagctacgaggacctctccctggcgctcgagaagatgttcagctgcttcatcgctggtcaaagtggtctgcataaatcatcgagcaaagacaggctgaccaatggctcaaaggtggatgccctcaaagatcaggagtatgtccttacatatgaggataaggatgcagactggatgcttgtcggtgatcttccctgggattattttacctctatctgccggaagctcaaaatcatgaggggctctgatgctgttggaatagctccacgaaccgtcgagcagacaggtcagaacaaataagctttggcctttgcctgcatccaaggaagacatctgagctagctgggagactatgttgaaggctgaagcctgaaatagttgccgggaatcgtcaaaacccgtcaaatgtttagtgtagttttcacgtgtccttgagacatgtgcatttgtatgtctgtgacgtgatccgttagatcgtgcaatcgtaggttgctgttcttgtgccctttaaaggccagacagatcagggagctctctgcttccttagtgcacttgctttgcagcattccttgttattctactctgaaatcatacatcatgccacaagaaccgatggttcgcg

SEQ ID NO: 9194 - protein, 303 aa, Zea mays subsp. mays
  peptide (1)..(303): Ceres Seq. ID no. 12407636
  misc_feature (76)..(295): Pfam Name: AUX/IAA family Pfam Description: AUX/IAA family
  misc_feature (37)..(303): Homolog of NCBI NO: 34911088 NR Description: OJ1117_G01.11 [Oryza sativa (japonica
  misc_feature (29)..(299): Homolog of NCBI NO: 34904314 NR Description: unnamed protein product [Oryza sativa (japonica group)] >gi|7340910|dbj|BAA92982.1| unnamed protein product
  misc_feature (142)..(303): Homolog of NCBI NO: 15227275 NR Description: auxin-regulated protein (IAA8); protein id: supported by cDNA: 37274., supported by cDNA: gi_12248000, by cDNA: gi_16649070, supported by cDNA: gi_17979338, supported
  misc_feature (38)..(91): Homolog of NCBI NO: 15227275 NR Description: auxin-regulated protein (IAA8); protein id: supported by cDNA: 37274., supported by cDNA: gi_12248000, by cDNA: gi_16649070, supported by cDNA: gi_17979338, supported
  misc_feature (142)..(303): Homolog of NCBI NO: 30681782 NR Description: auxin-responsive protein IAA8 (Indoleacetic
  misc_feature (38)..(91): Homolog of NCBI NO: 30681782 NR Description: auxin-responsive protein IAA8 (Indoleacetic
LPPHLTISTPNKGKASDRQTHPIAPPLSPLLPTPAPMSPPLEPHDYIGLSAAAAAAPPTPTSSSSSSSSPAPRLTLRLGLPGSESPDRDRDCCEDFAATLSLGPLPAAAAVSAKRAFPDPAQRPGASKASDAKQQASPAAPPAAKAQVVGWPPVRNYRKNTLAAATASRSKAPAEEAASGAGPMYVKVSMDGAPYLRKVDIKMYSSYEDLSLALEKMFSCFIAGQSGLHKSSSKDRLTNGSKVDALKDQEYVLTYEDKDADWMLVGDLPWDYFTSICRKLKIMRGSDAVGIAPRTVEQTGQNK

SEQ ID NO: 9195 - protein, 267 aa, Zea mays subsp. mays
  peptide (1)..(267): Ceres Seq. ID no. 12407637
  misc_feature (40)..(259): Pfam Name: AUX/IAA family Pfam Description: AUX/IAA family
  misc_feature (1)..(267): Homolog of NCBI NO: 34911088 NR Description: OJ1117_G01.11 [Oryza sativa (japonica
  misc_feature (1)..(263): Homolog of NCBI NO: 34904314 NR Description: unnamed protein product [Oryza sativa (japonica group)] >gi|7340910|dbj|BAA92982.1| unnamed protein product
  misc_feature (106)..(267): Homolog of NCBI NO: 15227275 NR Description: auxin-regulated protein (IAA8); protein id: supported by cDNA: 37274., supported by cDNA: gi_12248000, by cDNA: gi_16649070, supported by cDNA: gi_17979338, supported
  misc_feature (2)..(55): Homolog of NCBI NO: 15227275 NR Description: auxin-regulated protein (IAA8); protein id: supported by cDNA: 37274., supported by cDNA: gi_12248000, by cDNA: gi_16649070, supported by cDNA: gi_17979338, supported
  misc_feature (106)..(267): Homolog of NCBI NO: 30681782 NR Description: auxin-responsive protein IAA8 (Indoleacetic
  misc_feature (2)..(55): Homolog of NCBI NO: 30681782 NR Description: auxin-responsive protein IAA8 (Indoleacetic
MSPPLEPHDYIGLSAAAAAAPPTPTSSSSSSSSPAPRLTLRLGLPGSESPDRDRDCCEDFAATLSLGPLPAAAAVSAKRAFPDPAQRPGASKASDAKQQASPAAPPAAKAQVVGWPPVRNYRKNTLAAATASRSKAPAEEAASGAGPMYVKVSMDGAPYLRKVDIKMYSSYEDLSLALEKMFSCFIAGQSGLHKSSSKDRLTNGSKVDALKDQEYVLTYEDKDADWMLVGDLPWDYFTSICRKLKIMRGSDAVGIAPRTVEQTGQNK

SEQ ID NO: 9196 - protein, 185 aa, Zea mays subsp. mays
  peptide (1)..(185): Ceres Seq. ID no. 12407638
  misc_feature (3)..(182): Pfam Name: Formin Homology 2 Domain Pfam Description: Formin Homology 2 Domain
  misc_feature (1)..(183): Homolog of NCBI NO: 6523547 NR Description: hydroxyproline-rich glycoprotein DZ-HRGP [Volvox
  misc_feature (1)..(185): Homolog of NCBI NO: 6523547 NR Description: hydroxyproline-rich glycoprotein DZ-HRGP [Volvox
  misc_feature (3)..(183): Homolog of NCBI NO: 6523547 NR Description: hydroxyproline-rich glycoprotein DZ-HRGP [Volvox
  misc_feature (3)..(183): Homolog of NCBI NO: 6523547 NR Description: hydroxyproline-rich glycoprotein DZ-HRGP [Volvox
  misc_feature (3)..(170): Homolog of NCBI NO: 6523547 NR Description: hydroxyproline-rich glycoprotein DZ-HRGP [Volvox
  misc_feature (3)..(183): Homolog of NCBI NO: 14253159 NR Description: VMP3 protein [Volvox carteri f. nagariensis]
  misc_feature (20)..(183): Homolog of NCBI NO: 6523547 NR Description: hydroxyproline-rich glycoprotein DZ-HRGP [Volvox
  misc_feature (3)..(179): Homolog of NCBI NO: 15222649 NR Description: Pto kinase interactor, putative; protein id: [Arabidopsis thaliana] >gi|25403034|pir||F86387 probable Pto
  misc_feature (1)..(183): Homolog of NCBI NO: 6523547 NR Description: hydroxyproline-rich glycoprotein DZ-HRGP [Volvox
  misc_feature (2)..(183): Homolog of NCBI NO: 6523547 NR Description: hydroxyproline-rich glycoprotein DZ-HRGP [Volvox
SHPTSPSPLQTRGRRATDKPTPSPLLCLLSCPRPPQCRRPSSPTTTSASPPRPRPRRRPRPPPPLPPPRRPPASPFASACRAPSPPTATGTAARTSPPRSPSARCRRQPPSPPSAPSRTPPSAPALPRLATPSSRLPPPRRRPPKRRWLDGRPCATTGRIPSPPRPPPGARRRRRRPRPELGPCT

SEQ ID NO: 9197 - DNA, 1648 bp, Zea mays subsp. mays
  misc_feature (1)..(1648): Ceres Seq. ID no. 12362215
  misc_feature: MA Experiment ID: 108530 Result: Up-regulated in Transcription
  misc_feature: MA Experiment 108530 PARAMETER Experiment Name: Zm_Imbibed_Seeds_P Parameter: Age (day) Value: 6 vs. 2
  misc_feature: MA Experiment 108530 PARAMETER Experiment Name: Zm_Imbibed_Seeds_P Parameter: Organism Value: Zea mays
  misc_feature: MA Experiment 108530 PARAMETER Experiment Name: Zm_Imbibed_Seeds_P Parameter: Plant Line Value: 35A19
  misc_feature: MA Experiment 108530 PARAMETER Experiment Name: Zm_Imbibed_Seeds_P Parameter: Tissue Value: Aerial vs. Embryo
  misc_feature: MA Experiment ID: 108547 Result: Up-regulated in Transcription
  misc_feature: MA Experiment 108547 PARAMETER Experiment Name: Zm_Imbibed_Seeds_P Parameter: Age (day) Value: 4 vs. 2
  misc_feature: MA Experiment 108547 PARAMETER Experiment Name: Zm_Imbibed_Seeds_P Parameter: Organism Value: Zea mays
  misc_feature: MA Experiment 108547 PARAMETER Experiment Name: Zm_Imbibed_Seeds_P Parameter: Plant Line Value: 35A19
  misc_feature: MA Experiment 108547 PARAMETER Experiment Name: Zm_Imbibed_Seeds_P Parameter: Tissue Value: Aerial vs. Embryo
aagaagcgaagcaaccaacccccgaaatcttcaacggcgccatcgccactgcgtcatgcccgtcccgcacctcctctcgccactccccctgccctcgccgccgccgcccctccaccgcaatggagcgccatggcggcgcccgacgcaactacgtgccgcactacgggtcccgcctccgcttcacctggggctcgccgcggcccgtggcgatggcgtgaggcggttcgtcgggacgctgggctcgaagagagcgcgagcggtcggtgcaattagggtttctgcgatctctggagacggcggtggcggtgctggtggtacgggaattgcggcggcagcggccgccactgtggtctttgctgtgatgaaccgggtgctctacaagctggcgctcgtgccaatgaagaattaccctttcttcctcgcccagttcgccacatttgggtatgtcctagtgtatttctcaattctcttcataagatttcgcgctgggattgtcactagagaaatgttagcgcttccgaagccacagttcatgctaattggtttactggaagcgctaggtgctgcttcaggcatggctgctgctgctatgttgcccgggccatctattccagtgttgtcacagtcctttctggtttggcaacttatcttatctgccctcatcttgggaaggaaatatagagcaaatcagatccttggctgcttgcttgttacagctggagtaattctagcagtggccggtggagccagtaatggtccgattctctttgaagtcaaattcttttggccagcagtaatgatgatttcagctgcatttcaagctgctgcttccattatcaaggagtttgttttcattgatggtgcaaaacgccttgagggaaagaagcctgatatatttgtagtcaactcttttggttctggtttccaggcactttttattttcctactccttccatttctctctaacttgaaagggattccttttgctgaactccctgcatacctaacccgtggtgctgcatgctttctgaatgtgggagggaatctgaaggattgccatggagctcctttgctaccacttctctacataactctgaacatggccttcaacatttctgtccttaatcttgtgaagatgtctacagcagtggttgcttcgctgacatcaactttagcagtacctctttccatctatatactgtcactgcctctaccatatctacccgaaggaacaaatttgagcgcatcttttttgattggtgttgctaccttagtgctcggattgcttctatacaatcttcctcaagaatcaaccaatcaagtaaaggaagattaatctaaacccatatcagatataaggttaacaggaagctattggtgctccactaagaaaatagccgcattttgttgacagtggcttcacagtttggtacataactcatgaagagcagtgttcttctgccacaaacatttgcggtgcaaacatttgaggcaccagctgacttcaaagtttagaaacagcaagttcttgtttcatctgttaacaaaatcctaatggattatgcagctatatataagctctacctgagcggatgtaactactaactactttcagatgagtaagggctttacaaattcattggttgtg

SEQ ID NO: 9198 - protein, 444 aa, Zea mays subsp. mays
  peptide (1)..(444): Ceres Seq. ID no. 12362216
  misc_feature (108)..(440): Homolog of NCBI NO: 30686536 NR Description: expressed protein [Arabidopsis thaliana]
  misc_feature (94)..(439): Homolog of NCBI NO: 18419900 NR Description: putative protein; protein id: At5g19380.1,
  misc_feature (94)..(439): Homolog of NCBI NO: 21553716 NR Description: unknown [Arabidopsis thaliana]
  misc_feature (112)..(444): Homolog of NCBI NO: 20260240 NR Description: unknown protein [Arabidopsis thaliana]
  misc_feature (112)..(444): Homolog of NCBI NO: 21536591 NR Description: unknown [Arabidopsis thaliana]
  misc_feature (223)..(394): Homolog of NCBI NO: 7487326 NR Description: hypothetical protein T22A6.290 - Arabidopsis >gi|5051788|emb|CAB45081.1| hypothetical protein [Arabidopsis >gi|7269296|emb|CAB79356.1| hypothetical protein [Arabidopsis
  misc_feature (108)..(195): Homolog of NCBI NO: 7487326 NR Description: hypothetical protein T22A6.290 - Arabidopsis >gi|5051788|emb|CAB45081.1| hypothetical protein [Arabidopsis >gi|7269296|emb|CAB79356.1| hypothetical protein [Arabidopsis
  misc_feature (169)..(444): Homolog of NCBI NO: 15239887 NR Description: putative protein; protein id: At5g12170.1 thaliana] >gi|9759384|dbj|BAB10035.1|
  misc_feature (108)..(246): Homolog of NCBI NO: 28973717 NR Description: unknown protein [Arabidopsis thaliana]
  misc_feature (52)..(196): Homolog of NCBI NO: 20161872 NR Description: B1139B11.13 [Oryza sativa (japonica
RSEATNPRNLQRRHRHCVMPVPHLLSPLPLPSPPPPLHRNGAPWRRPTQLRAALRVPPPLHLGLAAARGDGVRRFVGTLGSKRARAVGAIRVSAISGDGGGGAGGTGIAAAAAATVVFAVMNRVLYKLALVPMKNYPFFLAQFATFGYVLVYFSILFIRFRAGIVTREMLALPKPQFMLIGLLEALGAASGMAAAAMLPGPSIPVLSQSFLVWQLILSALILGRKYRANQILGCLLVTAGVILAVAGGASNGPILFEVKFFWPAVMMISAAFQAAASIIKEFVFIDGAKRLEGKKPDIFVVNSFGSGFQALFIFLLLPFLSNLKGIPFAELPAYLTRGAACFLNVGGNLKDCHGAPLLPLLYITLNMAFNISVLNLVKMSTAVVASLTSTLAVPLSIYILSLPLPYLPEGTNLSASFLIGVATLVLGLLLYNLPQESTNQVKED

SEQ ID NO: 9199 - protein, 426 aa, Zea mays subsp. mays
  peptide (1)..(426): Ceres Seq. ID no. 12362217
  misc_feature (90)..(177): Homolog of NCBI NO: 7487326 NR Description: hypothetical protein T22A6.290 - Arabidopsis >gi|5051788|emb|CAB45081.1| hypothetical protein [Arabidopsis >gi|7269296|emb|CAB79356.1| hypothetical protein [Arabidopsis
  misc_feature (151)..(426): Homolog of NCBI NO: 15239887 NR Description: putative protein; protein id: At5g12170.1 thaliana] >gi|9759384|dbj|BAB10035.1|
  misc_feature (90)..(228): Homolog of NCBI NO: 28973717 NR Description: unknown protein [Arabidopsis thaliana]
  misc_feature (34)..(178): Homolog of NCBI NO: 20161872 NR Description: B1139B11.13 [Oryza sativa (japonica
  misc_feature (90)..(422): Homolog of NCBI NO: 30686536 NR Description: expressed protein [Arabidopsis thaliana]
  misc_feature (76)..(421): Homolog of NCBI NO: 18419900 NR Description: putative protein; protein id: At5g19380.1,
  misc_feature (76)..(421): Homolog of NCBI NO: 21553716 NR Description: unknown [Arabidopsis thaliana]
  misc_feature (94)..(426): Homolog of NCBI NO: 20260240 NR Description: unknown protein [Arabidopsis thaliana]
  misc_feature (94)..(426): Homolog of NCBI NO: 21536591 NR Description: unknown [Arabidopsis thaliana]
  misc_feature (205)..(376): Homolog of NCBI NO: 7487326 NR Description: hypothetical protein T22A6.290 - Arabidopsis >gi|5051788|emb|CAB45081.1| hypothetical protein [Arabidopsis >gi|7269296|emb|CAB79356.1| hypothetical protein [Arabidopsis
MPVPHLLSPLPLPSPPPPLHRNGAPWRRPTQLRAALRVPPPLHLGLAAARGDGVRRFVGTLGSKRARAVGAIRVSAISGDGGGGAGGTGIAAAAAATVVFAVMNRVLYKLALVPMKNYPFFLAQFATFGYVLVYFSILFIRFRAGIVTREMLALPKPQFMLIGLLEALGAASGMAAAAMLPGPSIPVLSQSFLVWQLILSALILGRKYRANQILGCLLVTAGVILAVAGGASNGPILFEVKFFWPAVMMISAAFQAAASIIKEFVFIDGAKRLEGKKPDIFVVNSFGSGFQALFIFLLLPFLSNLKGIPFAELPAYLTRGAACFLNVGGNLKDCHGAPLLPLLYITLNMAFNISVLNLVKMSTAVVASLTSTLAVPLSIYILSLPLPYLPEGTNLSASFLIGVATLVLGLLLYNLPQESTNQVKED

SEQ ID NO: 9200 - protein, 324 aa, Zea mays subsp. mays
  peptide (1)..(324): Ceres Seq. ID no. 12362218
  misc_feature (1)..(320): Homolog of NCBI NO: 30686536 NR Description: expressed protein [Arabidopsis thaliana]
  misc_feature (1)..(319): Homolog of NCBI NO: 18419900 NR Description: putative protein; protein id: At5g19380.1,
  misc_feature (1)..(319): Homolog of NCBI NO: 21553716 NR Description: unknown [Arabidopsis thaliana]
  misc_feature (1)..(324): Homolog of NCBI NO: 20260240 NR Description: unknown protein [Arabidopsis thaliana]
  misc_feature (1)..(324): Homolog of NCBI NO: 21536591 NR Description: unknown [Arabidopsis thaliana]
  misc_feature (103)..(274): Homolog of NCBI NO: 7487326 NR Description: hypothetical protein T22A6.290 - Arabidopsis >gi|5051788|emb|CAB45081.1| hypothetical protein [Arabidopsis >gi|7269296|emb|CAB79356.1| hypothetical protein [Arabidopsis
  misc_feature (1)..(75): Homolog of NCBI NO: 7487326 NR Description: hypothetical protein T22A6.290 - Arabidopsis >gi|5051788|emb|CAB45081.1| hypothetical protein [Arabidopsis >gi|7269296|emb|CAB79356.1| hypothetical protein [Arabidopsis
  misc_feature (49)..(324): Homolog of NCBI NO: 15239887 NR Description: putative protein; protein id: At5g12170.1 thaliana] >gi|9759384|dbj|BAB10035.1|
  misc_feature (1)..(126): Homolog of NCBI NO: 28973717 NR Description: unknown protein [Arabidopsis thaliana]
  misc_feature (1)..(76): Homolog of NCBI NO: 20161872 NR Description: B1139B11.13 [Oryza sativa (japonica
MNRVLYKLALVPMKNYPFFLAQFATFGYVLVYFSILFIRFRAGIVTREMLALPKPQFMLIGLLEALGAASGMAAAAMLPGPSIPVLSQSFLVWQLILSALILGRKYRANQILGCLLVTAGVILAVAGGASNGPILFEVKFFWPAVMMISAAFQAAASIIKEFVFIDGAKRLEGKKPDIFVVNSFGSGFQALFIFLLLPFLSNLKGIPFAELPAYLTRGAACFLNVGGNLKDCHGAPLLPLLYITLNMAFNISVLNLVKMSTAVVASLTSTLAVPLSIYILSLPLPYLPEGTNLSASFLIGVATLVLGLLLYNLPQESTNQVKED

SEQ ID NO: 9201 - DNA, 1319 bp, Zea mays subsp. mays
  misc_feature (1)..(1319): Ceres Seq. ID no. 12366624
  misc_feature: MA Experiment ID: 20000478 Result: Up-regulated in Transcription
  misc_feature: MA Experiment 20000478 PARAMETER Experiment Name: Zm_5mM_SA_P Parameter: Age (day) Value: 11
  misc_feature: MA Experiment 20000478 PARAMETER Experiment Name: Zm_5mM_SA_P Parameter: Organism Value: Zea mays
  misc_feature: MA Experiment 20000478 PARAMETER Experiment Name: Zm_5mM_SA_P Parameter: Plant Line Value: 35A19
  misc_feature: MA Experiment 20000478 PARAMETER Experiment Name: Zm_5mM_SA_P Parameter: Timepoint (hr) Value: 72
  misc_feature: MA Experiment 20000478 PARAMETER Experiment Name: Zm_5mM_SA_P Parameter: Tissue Value: Aerial
  misc_feature: MA Experiment 20000478 PARAMETER Experiment Name: Zm_5mM_SA_P Parameter: Treatment Value: 5mM SA vs. No Treatment
  misc_feature: MA Experiment ID: 20000626 Result: Up-regulated in Transcription
  misc_feature: MA Experiment 20000626 PARAMETER Experiment Name: Zm_Herbicide-Treatments_P Parameter: Timepoint (hr) Value: 12
  misc_feature: MA Experiment 20000626 PARAMETER Experiment Name: Zm_Herbicide-Treatments_P Parameter: Tissue Value: Aerial
  misc_feature: MA Experiment 20000626 PARAMETER Experiment Name: Zm_Herbicide-Treatments_P Parameter: Treatment Value: Roundup vs. No Treatment
ctcaaagctagctcagaccaataatcagctcttctcctcctagcttgatctctccaatcaagctctctctctctctctctctctcaacacataccaaacttccactcctcctagatagctagctactagctagacagaaatcccccatgtaattggagagagaacttatgtgttctatgatagattagatatgatgcttctctagctcatcagatcaaattagtactcgaccgataccaagttaattaagaagaagttctctcagcgaagaggcgcgtcaagctggcgaaccggtggtggagcgtgcccggtcacttgggcctgccggagcagccgtccggcggccccaaccccaagacggagcccccggccatgaaggatccggagcccagcagcccggcagtcggcgcgccgggcgaccacggagccgatgagaccaacgagtccggtggcgccgtggtggcggcgcccagccggcggcctcgcggacgcccgccggggtccaagaacaagcccaagccgcccatcttcgtcacgcgcgacagccccaacgcgctgcgcagccacgtcatggaggtggcgggcggcgccgatgtggcggacgccatcgcgcagttctcgcgccgccgccagcgcggtgtctgcgtgctcagcggcgccgggaccgtcgccaacgtggcgctgcggcaaccgtccgcgcccacggccgtggtcgcgctccgcggccgcttcgagatcctctcgcttaccggcaccttcctgcccggccccgcgccgccggggtccacggggctcaccgtgtacctggccgggggccaggggcaggtggttggcggcagcgttgtaggcaccctcatcgccgccggcccggtcatggtgatcgcgtccacgttcgccaacgcaacctacgagcgccttccgctcgaagaggaggatgaagggccagctccaccgatggcgtccggcggcggcgccgatccgctcatgggtggaggcctcggcatcgccgacccgtcagcgctgcccatgttcaacttgccgccgagcaacgggcagcttggaggcggcgacggcttcccgtcatgggcgcacccgcggccaccgtactgatgatcctgatgcgcccaaggtcgagcacagttgctagaatgcaatggcgaatgctgtgcgtgcactgcatggtcgttactgttccattggagacgacgacggccggatcggagtggcgcgccattagtaggttagtacatatgatgaagtgtggccgtcgtccctagtgctactttgttgccgtgcaataatcagatgtcgttggtctc

SEQ ID NO: 9202 - protein, 245 aa, Zea mays subsp. mays
  peptide (1)..(245): Ceres Seq. ID no. 12366625
  misc_feature (1)..(245): Homolog of NCBI NO: 18414224 NR Description: Expressed protein; protein id: At4g14465.1, by cDNA: 36844. [Arabidopsis thaliana]
  misc_feature (1)..(245): Homolog of NCBI NO: 21593180 NR Description: putative DNA-binding protein [Arabidopsis
  misc_feature (16)..(232): Homolog of NCBI NO: 18396925 NR Description: expressed protein; protein id: At3g04570.1, by cDNA: 15781. [Arabidopsis thaliana] hypothetical protein [Arabidopsis thaliana]
  misc_feature (1)..(245): Homolog of NCBI NO: 38346718 NR Description: OSJNBa0086O06.16 [Oryza sativa (japonica
  misc_feature (12)..(244): Homolog of NCBI NO: 34902080 NR Description: unknown protein [Oryza sativa (japonica >gi|34902088|ref|NP_912390.1| hypothetical protein [Oryza sativa
  misc_feature (12)..(245): Homolog of NCBI NO: 15236657 NR Description: hypothetical protein; protein id: At4g17800.1, by cDNA: gi_17933298, supported by cDNA: gi_20453386 [Arabidopsis
  misc_feature (3)..(245): Homolog of NCBI NO: 34905212 NR Description: P0672D01.8 [Oryza sativa (japonica
  misc_feature (17)..(236): Homolog of NCBI NO: 15234404 NR Description: putative DNA-binding protein; protein id:
  misc_feature (17)..(245): Homolog of NCBI NO: 15235815 NR Description: putative DNA binding protein; protein id:
  misc_feature (26)..(230): Homolog of NCBI NO: 15226945 NR Description: putative AT-hook DNA-binding protein; protein id:
MKDPEPSSPAVGAPGDHGADETNESGGAVVAAPSRRPRGRPPGSKNKPKPPIFVTRDSPNALRSHVMEVAGGADVADAIAQFSRRRQRGVCVLSGAGTVANVALRQPSAPTAVVALRGRFEILSLTGTFLPGPAPPGSTGLTVYLAGGQGQVVGGSVVGTLIAAGPVMVIASTFANATYERLPLEEEDEGPAPPMASGGGADPLMGGGLGIADPSALPMFNLPPSNGQLGGGDGFPSWAHPRPPY

SEQ ID NO: 9203 - protein, 179 aa, Zea mays subsp. mays
  peptide (1)..(179): Ceres Seq. ID no. 12366626
  misc_feature (1)..(179): Homolog of NCBI NO: 18414224 NR Description: Expressed protein; protein id: At4g14465.1, by cDNA: 36844. [Arabidopsis thaliana]
  misc_feature (1)..(179): Homolog of NCBI NO: 21593180 NR Description: putative DNA-binding protein [Arabidopsis
  misc_feature (1)..(166): Homolog of NCBI NO: 18396925 NR Description: expressed protein; protein id: At3g04570.1, by cDNA: 15781. [Arabidopsis thaliana] hypothetical protein [Arabidopsis thaliana]
  misc_feature (1)..(179): Homolog of NCBI NO: 38346718 NR Description: OSJNBa0086O06.16 [Oryza sativa (japonica
  misc_feature (1)..(178): Homolog of NCBI NO: 34902080 NR Description: unknown protein [Oryza sativa (japonica >gi|34902088|ref|NP_912390.1| hypothetical protein [Oryza sativa
  misc_feature (1)..(179): Homolog of NCBI NO: 15236657 NR Description: hypothetical protein; protein id: At4g17800.1, by cDNA: gi_17933298, supported by cDNA: gi_20453386 [Arabidopsis
  misc_feature (1)..(179): Homolog of NCBI NO: 34905212 NR Description: P0672D01.8 [Oryza sativa (japonica
  misc_feature (1)..(170): Homolog of NCBI NO: 15234404 NR Description: putative DNA-binding protein; protein id:
  misc_feature (1)..(179): Homolog of NCBI NO: 15235815 NR Description: putative DNA binding protein; protein id:
  misc_feature (1)..(164): Homolog of NCBI NO: 15226945 NR Description: putative AT-hook DNA-binding protein; protein id:
MEVAGGADVADAIAQFSRRRQRGVCVLSGAGTVANVALRQPSAPTAVVALRGRFEILSLTGTFLPGPAPPGSTGLTVYLAGGQGQVVGGSVVGTLIAAGPVMVIASTFANATYERLPLEEEDEGPAPPMASGGGADPLMGGGLGIADPSALPMFNLPPSNGQLGGGDGFPSWAHPRPPY

SEQ ID NO: 9204 - protein, 138 aa, Zea mays subsp. mays
  peptide (1)..(138): Ceres Seq. ID no. 12366627
  misc_feature (1)..(133): Homolog of NCBI NO: 15807127 NR Description: conserved hypothetical protein [Deinococcus
  misc_feature (1)..(138): Homolog of NCBI NO: 3044086 NR Description: unknown [Myxococcus xanthus]
  misc_feature (1)..(131): Homolog of NCBI NO: 21222110 NR Description: putative oxidoreductase [Streptomyces coelicolor
MRPTSPVAPWWRRPAGGLADARRGPRTSPSRPSSSRATAPTRCAATSWRWRAAPMWRTPSRSSRAAASAVSACSAAPGPSPTWRCGNRPRPRPWSRSAAASRSSRLPAPSCPAPRRRGPRGSPCTWPGARGRWLAAAL

SEQ ID NO: 9205 - DNA, 949 bp, Zea mays subsp. mays
  misc_feature (1)..(949): Ceres Seq. ID no. 13589371
  misc_feature: MA Experiment ID: 108543 Result: Up-regulated in Transcription
  misc_feature: MA Experiment ID: 108544 Result: Up-regulated in Transcription
aacatcctaatcaaaaaagaaacggaagaagaacggcaggcgaagcatcgccagattggtatatcgatcgattgatcggtggcggagggaggggaggagggcggcagatggcggcgtgccggggcttcttcgagtgcctgctcaggctgctcaacttcatcctcaccgtcgccggcctcgccatggtcggctacgggatctacctgctcgtcgagtggatgaagatatctgaggacggcagcagcggggggttgacggcggaggtgctggtctccggccggccgttgttgggggctgtcgctctcggtgacagcttcctcgacatgctacccaaagcatggtttatttatttgttcattggtgttggtgctactgttttcctcgtgtctctgtttggctgcattggagcagggacaagaaacacctgctgtttgtgtttctatgccttcttggtcatattgttgatccttgctgaagctggagctgctgcattcattttctttgaccatagctggaaagatgtaattccagtggacaagacacataactttgatgttatgtatggctttctgaagaaaaactgggagattgcaagatgggttgctcttggcgttgttgtttttgaggcagtgctctttctattagctctggttgtcagggcaatgaacaaacctgcggagtatgacagtgatgatgaaattattgcaattggccgaagccctaccatgcggcagccattgatccatgcccaaaatgtgccggccaccggtgttcctgtcccaacactcgatcagcgttcaagtagaaatgatgcctggagccaaaggatgcgagagaagtatggtctggacacgagccagttcacgtacaacccctcagacccaagcaggtaccagcagaatggcgctccacaggctgaagaaaggagtcaatgcactataatgtgaag

SEQ ID NO: 9206 - protein, 314 aa, Zea mays subsp. mays
  peptide (1)..(314): Ceres Seq. ID no. 13589372
  misc_feature (44)..(208): Pfam Name: Tetraspanin family Pfam Description: Tetraspanin family
  misc_feature (38)..(314): Homolog of NCBI NO: 18398417 NR Description: senescence-associated protein family [Arabidopsis >gi|12248019|gb|AAG50101.1|AF334723_1 unknown protein thaliana] >gi|14326469|gb|AAK60280.1|AF385687_1
HPNQKRNGRRTAGEASPDWYIDRLIGGGGRGGGRQMAACRGFFECLLRLLNFILTVAGLAMVGYGIYLLVEWMKISEDGSSGGLTAEVLVSGRPLLGAVALGDSFLDMLPKAWFIYLFIGVGATVFLVSLFGCIGAGTRNTCCLCFYAFLVILLILAEAGAAAFIFFDHSWKDVIPVDKTHNFDVMYGFLKKNWEIARWVALGVVVFEAVLFLLALVVRAMNKPAEYDSDDEIIAIGRSPTMRQPLIHAQNVPATGVPVPTLDQRSSRNDAWSQRMREKYGLDTSQFTYNPSDPSRYQQNGAPQAEERSQCTIM

SEQ ID NO: 9207 - protein, 279 aa, Zea mays subsp. mays
  peptide (1)..(279): Ceres Seq. ID no. 13589373
  misc_feature (9)..(173): Pfam Name: Tetraspanin family Pfam Description: Tetraspanin family
  misc_feature (3)..(279): Homolog of NCBI NO: 18398417 NR Description: senescence-associated protein family [Arabidopsis >gi|12248019|gb|AAG50101.1|AF334723_1 unknown protein thaliana] >gi|14326469|gb|AAK60280.1|AF385687_1
MAACRGFFECLLRLLNFILTVAGLAMVGYGIYLLVEWMKISEDGSSGGLTAEVLVSGRPLLGAVALGDSFLDMLPKAWFIYLFIGVGATVFLVSLFGCIGAGTRNTCCLCFYAFLVILLILAEAGAAAFIFFDHSWKDVIPVDKTHNFDVMYGFLKKNWEIARWVALGVVVFEAVLFLLALVVRAMNKPAEYDSDDEIIAIGRSPTMRQPLIHAQNVPATGVPVPTLDQRSSRNDAWSQRMREKYGLDTSQFTYNPSDPSRYQQNGAPQAEERSQCTIM

SEQ ID NO: 9208 - protein, 254 aa, Zea mays subsp. mays
  peptide (1)..(254): Ceres Seq. ID no. 13589374
  misc_feature (1)..(148): Pfam Name: Tetraspanin family Pfam Description: Tetraspanin family
  misc_feature (1)..(254): Homolog of NCBI NO: 18398417 NR Description: senescence-associated protein family [Arabidopsis >gi|12248019|gb|AAG50101.1|AF334723_1 unknown protein thaliana] >gi|14326469|gb|AAK60280.1|AF385687_1
MVGYGIYLLVEWMKISEDGSSGGLTAEVLVSGRPLLGAVALGDSFLDMLPKAWFIYLFIGVGATVFLVSLFGCIGAGTRNTCCLCFYAFLVILLILAEAGAAAFIFFDHSWKDVIPVDKTHNFDVMYGFLKKNWEIARWVALGVVVFEAVLFLLALVVRAMNKPAEYDSDDEIIAIGRSPTMRQPLIHAQNVPATGVPVPTLDQRSSRNDAWSQRMREKYGLDTSQFTYNPSDPSRYQQNGAPQAEERSQCTIM

SEQ ID NO: 9209 - DNA, 401 bp, Zea mays subsp. mays
  misc_feature (1)..(401): Ceres Seq. ID no. 3238333
  misc_feature: MA Experiment ID: 108689 Result: Up-regulated in Transcription
  misc_feature: MA Experiment 108689 PARAMETER Experiment Name: Zm_Drought_Roots_P Parameter: Age (day) Value: 9
  misc_feature: MA Experiment 108689 PARAMETER Experiment Name: Zm_Drought_Roots_P Parameter: Organism Value: Zea mays
  misc_feature: MA Experiment 108689 PARAMETER Experiment Name: Zm_Drought_Roots_P Parameter: Plant Line Value: 35A19
  misc_feature: MA Experiment 108689 PARAMETER Experiment Name: Zm_Drought_Roots_P Parameter: Timepoint (hr) Value: 24
  misc_feature: MA Experiment 108689 PARAMETER Experiment Name: Zm_Drought_Roots_P Parameter: Tissue Value: Roots
  misc_feature: MA Experiment 108689 PARAMETER Experiment Name: Zm_Drought_Roots_P Parameter: Treatment Value: Drought vs. No Drought
  misc_feature: Pfam Name: Glyco_transf_8 Pfam Description: Glycosyl transferase family 8
acagcatgtgctcactcttctcgaattcatcctcccgcaggacttcctgaacatgttcttcagggatcagtacaggccgatccccaacgtgtacaacctcgtgctggccatgctctggaggcaccccgagaacgtgcagctggagaaggtgaaggtcgtgcactactgcgcggcggggtccaagccgtggaggttcacgggcaaggaggcgaacatggacagggaggacatcaacgccctggtgaagaagtggtgggacatctacaacgacgagacgctggacttgaagggcctgccctcgctctcgcccgacgacgacgacnaggtggaggcggtggccaagaagccgcttcgcgcggcctggcggaggcggcacggtcaagtacgtcaccgcgccctcg

SEQ ID NO: 9210 - protein, 133 aa, Zea mays subsp. mays
  peptide (1)..(133): Ceres Seq. ID no. 3238334
  misc_feature: Pfam Name: Glyco_transf_8 Pfam Description: Glycosyl transferase family 8
  misc_feature (13)..(120): Homolog of NCBI NO: 32330230 NR Description: galactinol synthase 3 [Zea mays]
  misc_feature (13)..(120): Homolog of NCBI NO: 34898096 NR Description: WSI76 protein induced by water stress [Oryza
  misc_feature (108)..(108): Xaa is any aa, unknown or other
QHVLTLLEFILPQDFLNMFFRDQYRPIPNVYNLVLAMLWRHPENVQLEKVKVVHYCAAGSKPWRFTGKEANMDREDINALVKKWWDIYNDETLDLKGLPSLSPDDDDXVEAVAKKPLRAAWRRRHGQVRHRAL

SEQ ID NO: 9211 - protein, 133 aa, Zea mays subsp. mays
  peptide (1)..(133): Ceres Seq. ID no. 3238335
  misc_feature: Pfam Name: Glyco_transf_8 Pfam Description: Glycosyl transferase family 8
  misc_feature (108)..(108): Xaa is any aa, unknown or other
TACAHSSRIHPPAGLPEHVLQGSVQADPQRVQPRAGHALEAPRERAAGEGEGRALLRGGVQAVEVHGQGGEHGQGGHQRPGEEVVGHLQRRDAGLEGPALALARRRRXGGGGGQEAASRGLAEAARSSTSPRP

SEQ ID NO: 9212 - protein, 116 aa, Zea mays subsp. mays
  peptide (1)..(116): Ceres Seq. ID no. 3238336
  misc_feature: Pfam Name: Glyco_transf_8 Pfam Description: Glycosyl transferase family 8
  misc_feature (1)..(103): Homolog of NCBI NO: 32330230 NR Description: galactinol synthase 3 [Zea mays]
  misc_feature (1)..(103): Homolog of NCBI NO: 34898096 NR Description: WSI76 protein induced by water stress [Oryza
  misc_feature (91)..(91): Xaa is any aa, unknown or other
MFFRDQYRPIPNVYNLVLAMLWRHPENVQLEKVKVVHYCAAGSKPWRFTGKEANMDREDINALVKKWWDIYNDETLDLKGLPSLSPDDDDXVEAVAKKPLRAAWRRRHGQVRHRAL

SEQ ID NO: 9213 - DNA, 700 bp, Zea mays subsp. mays
  misc_feature (1)..(700): Ceres Seq. ID no. 12406208
  misc_feature: MA Experiment ID: 108535 Result: Down-regulated in Transcription
  misc_feature: MA Experiment 108535 PARAMETER Experiment Name: Zm_Meristem_P Parameter: Age (day) Value: 8
  misc_feature: MA Experiment 108535 PARAMETER Experiment Name: Zm_Meristem_P Parameter: Organism Value: Zea mays
  misc_feature: MA Experiment 108535 PARAMETER Experiment Name: Zm_Meristem_P Parameter: Plant Line Value: 35A19
  misc_feature: MA Experiment 108535 PARAMETER Experiment Name: Zm_Meristem_P Parameter: Tissue Value: Root Meristem vs. Above Root Meristem
  misc_feature: MA Experiment ID: 20000108 Result: Down-regulated in Transcription
  misc_feature: MA Experiment 20000108 PARAMETER Experiment Name: Zm_Root-Tips_P Parameter: Age (day) Value: 12
  misc_feature: MA Experiment 20000108 PARAMETER Experiment Name: Zm_Root-Tips_P Parameter: Organism Value: Zea mays
  misc_feature: MA Experiment 20000108 PARAMETER Experiment Name: Zm_Root-Tips_P Parameter: Tissue Value: Root tips vs. Root mid region    35
  misc_feature: MA Experiment 20000108 PARAMETER Experiment Name: Zm_Root-Tips_P Parameter: Tissue Value: Root tips vs. Root mid region   Sequence Listing-Misc Features (4)
  misc_feature: MA Experiment ID: 20000487 Result: Down-regulated in Transcription
  misc_feature: MA Experiment 20000487 PARAMETER Experiment Name: Zm_50mM_NH4NO3_L_to_H_P Parameter: Organism Value: Zea mays
  misc_feature: MA Experiment 20000487 PARAMETER Experiment Name: Zm_50mM_NH4NO3_L_to_H_P Parameter: Timepoint (hr) Value: 4
  misc_feature: MA Experiment 20000487 PARAMETER Experiment Name: Zm_50mM_NH4NO3_L_to_H_P Parameter: Tissue Value: Leaves
  misc_feature: MA Experiment 20000487 PARAMETER Experiment Name: Zm_50mM_NH4NO3_L_to_H_P Parameter: Treatment Value: 50mM NH4NO3 vs. 100mM Mannitol
  misc_feature: MA Experiment ID: 20000535 Result: Down-regulated in Transcription
  misc_feature: MA Experiment 20000535 PARAMETER Experiment Name: Zm_Hybrid_Seed_Dev_P Parameter: DAP Value: 30 vs. 12
  misc_feature: MA Experiment 20000535 PARAMETER Experiment Name: Zm_Hybrid_Seed_Dev_P Parameter: Organism Value: Zea mays
  misc_feature: MA Experiment 20000535 PARAMETER Experiment Name: Zm_Hybrid_Seed_Dev_P Parameter: Plant Line Value: 35A19
  misc_feature: MA Experiment 20000535 PARAMETER Experiment Name: Zm_Hybrid_Seed_Dev_P Parameter: Tissue Value: Embryo vs. Unfert Floret
atccatccatccatctcgtgagcgccggccaccgtcaatcgattcgatttgatcgttccccttccccgcgcctcctcgttcccctgaccagtcgccccgattttttttctgttccaggtcgcttctctctgttccgcgtgcgatcgagtagatcaaaaggaggaggaggatggcgaggagttcgttcaagttggagcaccccttcgaaaggaggcaagctgaggctaaccgcatcagggagaaataccctgacagaatccctgtcattattgagaaggccgagaggagtgacatcccagacattgacaagaaaaagtaccttgttcctgccgacctcacagtcggacagtttgtgtatgtggtacggaagcggatcaagctcagcgctgagaaggcaatcttcatcttcgtaaagaacaccctcccaccaacagctgctctgatgtccgccatctacgaggagaacaaggacgaggacggcttcctctacatgacgtacagcggcgagaacaccttcgggctgttctgagtgggagccgctatggatccacattgggcaatgcctcctgtaaatactaaacatgcatcacaagaatctgtgtccatagcataatctggtctgtctgtcattacgcaacttgacgtgcaatgctaaacacatttaagtaataatatatactactctgctttgggatgcttc

SEQ ID NO: 9214 - protein, 136 aa, Zea mays subsp. mays
  peptide (1)..(136): Ceres Seq. ID no. 12406209
PSIHLVSAGHRQSIRFDRSPSPRLLVPLTSRPDFFSVPGRFSLFRVRSSRSKGGGGWRGVRSSWSTPSKGGKLRLTASGRNTLTESLSLLRRPRGVTSQTLTRKSTLFLPTSQSDSLCMWYGSGSSSALRRQSSSS

SEQ ID NO: 9215 - protein, 119 aa, Zea mays subsp. mays
  peptide (1)..(119): Ceres Seq. ID no. 12406210
  misc_feature (14)..(117): Pfam Name: Microtubule associated protein 1A/1B, light chain 3 Pfam Description: Microtubule associated protein 1A/1B, light
  misc_feature (1)..(119): Homolog of NCBI NO: 40253647 NR Description: putative microtubial binding protein [Oryza
  misc_feature (1)..(117): Homolog of NCBI NO: 34595981 NR Description: microtubule-associated protein 1 light chain 3
  misc_feature (1)..(118): Homolog of NCBI NO: 38344173 NR Description: OSJNBa0053K19.12 [Oryza sativa (japonica
  misc_feature (1)..(118): Homolog of NCBI NO: 15220686 NR Description: symbiosis-related protein, putative; protein id: supported by cDNA: 19175., supported by cDNA: gi_19912154 thaliana] >gi|19912155|dbj|BAB88389.1| autophagy 8c [Arabidopsis
  misc_feature (1)..(117): Homolog of NCBI NO: 33146967 NR Description: putative microtubule associated protein [Oryza
  misc_feature (1)..(119): Homolog of NCBI NO: 21592920 NR Description: putative microtubule-associated protein
  misc_feature (1)..(119): Homolog of NCBI NO: 15224577 NR Description: putative microtubule-associated protein; protein At2g05630.1, supported by cDNA: 3416., supported by cDNA:
  misc_feature (1)..(119): Homolog of NCBI NO: 7446944 NR Description: hypothetical protein F8K4.23 - Arabidopsis
  misc_feature (1)..(117): Homolog of NCBI NO: 18415813 NR Description: symbiosis-related like protein; protein id: supported by cDNA: 14759., supported by cDNA: gi_19912150 thaliana] >gi|19912151|dbj|BAB88387.1| autophagy 8a [Arabidopsis
  misc_feature (1)..(117): Homolog of NCBI NO: 21553487 NR Description: symbiosis-related like protein [Arabidopsis
MARSSFKLEHPFERRQAEANRIREKYPDRIPVIIEKAERSDIPDIDKKKYLVPADLTVGQFVYVVRKRIKLSAEKAIFIFVKNTLPPTAALMSAIYEENKDEDGFLYMTYSGENTFGLF

SEQ ID NO: 9216 - DNA, 2048 bp, Zea mays subsp. mays
  misc_feature (1)..(2048): Ceres Seq. ID no. 12358846
  misc_feature: MA Experiment ID: 20000477 Result: Down-regulated in Transcription
  misc_feature: MA Experiment 20000477 PARAMETER Experiment Name: Zm_5mM_SA_P Parameter: Age (day) Value: 10
  misc_feature: MA Experiment 20000477 PARAMETER Experiment Name: Zm_5mM_SA_P Parameter: Organism Value: Zea mays
  misc_feature: MA Experiment 20000477 PARAMETER Experiment Name: Zm_5mM_SA_P Parameter: Plant Line Value: 35A19
  misc_feature: MA Experiment 20000477 PARAMETER Experiment Name: Zm_5mM_SA_P Parameter: Timepoint (hr) Value: 48
  misc_feature: MA Experiment 20000477 PARAMETER Experiment Name: Zm_5mM_SA_P Parameter: Tissue Value: Aerial
  misc_feature: MA Experiment 20000477 PARAMETER Experiment Name: Zm_5mM_SA_P Parameter: Treatment Value: 5mM SA vs. No Treatment
tttcaagcaaaagagaagaggagttccattgcaactacagttgcaaatgtagcatctccttcagttacatgttcttcaggacagtctaatgattctgaaactggtatcggaatgatggaatctgctttatttgaaacacggtcaaaattctttcaagcaaaagagaagaggagttccattgcaactacagttgcaaatgtagcatctccttcagttacatgttattcaggacagtctaatgattctgatactggggagaattgtaacatggatgctgaaaaggcaagtcgagttgtccaatctctttttggagcattgtcttcacgatatgaaaatagtaaaggtggcaagctgatgagtaacgcagcaccagaaaaaatgcctactgagaatgagcaaatagtcaatgagatactacatgatatacatggttcttttgctgacatctctgatggtgctggtaccgttgaaggtgacttcaaggtaaaagtcaaggaaacaatggagaaggctttctgggatgtggttgctgattcaatgagaggagacatgccagactactgttatctggtcagcctggtaaaggaaatcagggaagcactggaagagttatctcctacagggtggaaagaagaaatcagtgacaatattaaccttgaaatattgacccagttacttgaatcaggttcccaggacagacaataccttggacaaattttgcagtactctctggataagctgcgaaaactgtcttctcctgtgaaggaacacgagatgaagaagagtcatgatacattgttgggagaattggtcgaagactctaaatccaattataaagatccaaattcatttgttctttgcgttatcaagggtttgcgcttcactatggaggaattacaggctctaaaaacagaagttactagagcacgcatccaactattggaaccattgattaagggatcaggtggagtggagtacctgcagaagtcttttgctggtcgctgtggttccccttctgatgcgttagcttctctcccttcaactgcccggtggattttctctttgaaagatgtcgtggaagaacaatggaatgaacatgtcagctcgttatcaattctgccagaagcagaccatgttcagacacttgttgccaccctccgaactggccatgcagttgcaggtgtacaatctgtgatacctgcagcagacaatacaggattaccagagtgtaggggagaaatacttggcaagctaataaggattgggctattacagctcatcagcagcatggagggtgtagaaagggaatcggttcctgagacctttatgttgaattggttgaggctgcggtctgttcagagtaagtttcaacaagtgattgtgatagcgacaagcatgcttgttttgcatcaggtgttagcgagtgagaacccaaagatcacttcttctgagctggagaatgccacttcggaactgttcaacgtcctcacaaggctgctagacaactttccagatgttggcactgagaaaatcattgaggccatgatgtactcgtcaacctcaaggagcttgtcagatcatgaaaggatgaacgccagaaaagagatattgactagggtcttccttagaagcctccagaccgatgacaccgtcttcaagaaggtctctcagtccgtatactgtgcattccgtgcagtcaccctgggcggcagtggggagaagggccggatgctcgccgatgcatccctgaggcgcgtcggggcaacaaaactcactgcgcggctggtgaaggcagctgaagtgcttatcaaagcagcaatggtgtcagagcaggtccatggcccatggtacacgcagttattgtgaatggctctgctaccgcgatatatatatatatatagctctgctcatgccccgttgttacaactgaatgaatggtttgtgggagtgccgtgatgtctgaattccaataagcataggcgacctgaatgcatgtatatgtaaatatacacgaaacgtaatacgactccgaaatgctcctttctcct

SEQ ID NO: 9217 - protein, 621 aa, Zea mays subsp. mays
  peptide (1)..(621): Ceres Seq. ID no. 12358847
  misc_feature (137)..(621): Pfam Name: T-complex protein 11 Pfam Description: T-complex protein 11
  misc_feature (28)..(620): Homolog of NCBI NO: 39545651 NR Description: OJ000114_01.6 [Oryza sativa (japonica
  misc_feature (95)..(620): Homolog of NCBI NO: 39545653 NR Description: OJ000114_01.8 [Oryza sativa (japonica
  misc_feature (33)..(79): Homolog of NCBI NO: 39545653 NR Description: OJ000114_01.8 [Oryza sativa (japonica
  misc_feature (101)..(621): Homolog of NCBI NO: 15233756 NR Description: putative protein; protein id: At4g09150.1
  misc_feature (35)..(621): Homolog of NCBI NO: 15219971 NR Description: unknown protein; protein id: At1g22930.1
  misc_feature (68)..(315): Homolog of NCBI NO: 38648893 NR Description: Unknown (protein for MGC:73347) [Danio rerio]
FQAKEKRSSIATTVANVASPSVTCSSGQSNDSETGIGMMESALFETRSKFFQAKEKRSSIATTVANVASPSVTCYSGQSNDSDTGENCNMDAEKASRVVQSLFGALSSRYENSKGGKLMSNAAPEKMPTENEQIVNEILHDIHGSFADISDGAGTVEGDFKVKVKETMEKAFWDVVADSMRGDMPDYCYLVSLVKEIREALEELSPTGWKEEISDNINLEILTQLLESGSQDRQYLGQILQYSLDKLRKLSSPVKEHEMKKSHDTLLGELVEDSKSNYKDPNSFVLCVIKGLRFTMEELQALKTEVTRARIQLLEPLIKGSGGVEYLQKSFAGRCGSPSDALASLPSTARWIFSLKDVVEEQWNEHVSSLSILPEADHVQTLVATLRTGHAVAGVQSVIPAADNTGLPECRGEILGKLIRIGLLQLISSMEGVERESVPETFMLNWLRLRSVQSKFQQVIVIATSMLVLHQVLASENPKITSSELENATSELFNVLTRLLDNFPDVGTEKIIEAMMYSSTSRSLSDHERMNARKEILTRVFLRSLQTDDTVFKKVSQSVYCAFRAVTLGGSGEKGRMLADASLRRVGATKLTARLVKAAEVLIKAAMVSEQVHGPWYTQLL

SEQ ID NO: 9218 - protein, 584 aa, Zea mays subsp. mays
  peptide (1)..(584): Ceres Seq. ID no. 12358848
  misc_feature (100)..(584): Pfam Name: T-complex protein 11 Pfam Description: T-complex protein 11
  misc_feature (1)..(583): Homolog of NCBI NO: 39545651 NR Description: OJ000114_01.6 [Oryza sativa (japonica
  misc_feature (58)..(583): Homolog of NCBI NO: 39545653 NR Description: OJ000114_01.8 [Oryza sativa (japonica
  misc_feature (1)..(42): Homolog of NCBI NO: 39545653 NR Description: OJ000114_01.8 [Oryza sativa (japonica
  misc_feature (64)..(584): Homolog of NCBI NO: 15233756 NR Description: putative protein; protein id: At4g09150.1
  misc_feature (1)..(584): Homolog of NCBI NO: 15219971 NR Description: unknown protein; protein id: At1g22930.1
  misc_feature (31)..(278): Homolog of NCBI NO: 38648893 NR Description: Unknown (protein for MGC:73347) [Danio rerio]
MMESALFETRSKFFQAKEKRSSIATTVANVASPSVTCYSGQSNDSDTGENCNMDAEKASRVVQSLFGALSSRYENSKGGKLMSNAAPEKMPTENEQIVNEILHDIHGSFADISDGAGTVEGDFKVKVKETMEKAFWDVVADSMRGDMPDYCYLVSLVKEIREALEELSPTGWKEEISDNINLEILTQLLESGSQDRQYLGQILQYSLDKLRKLSSPVKEHEMKKSHDTLLGELVEDSKSNYKDPNSFVLCVIKGLRFTMEELQALKTEVTRARIQLLEPLIKGSGGVEYLQKSFAGRCGSPSDALASLPSTARWIFSLKDVVEEQWNEHVSSLSILPEADHVQTLVATLRTGHAVAGVQSVIPAADNTGLPECRGEILGKLIRIGLLQLISSMEGVERESVPETFMLNWLRLRSVQSKFQQVIVIATSMLVLHQVLASENPKITSSELENATSELFNVLTRLLDNFPDVGTEKIIEAMMYSSTSRSLSDHERMNARKEILTRVFLRSLQTDDTVFKKVSQSVYCAFRAVTLGGSGEKGRMLADASLRRVGATKLTARLVKAAEVLIKAAMVSEQVHGPWYTQLL

SEQ ID NO: 9219 - protein, 583 aa, Zea mays subsp. mays
  peptide (1)..(583): Ceres Seq. ID no. 12358849
  misc_feature (99)..(583): Pfam Name: T-complex protein 11 Pfam Description: T-complex protein 11
  misc_feature (1)..(582): Homolog of NCBI NO: 39545651 NR Description: OJ000114_01.6 [Oryza sativa (japonica
  misc_feature (57)..(582): Homolog of NCBI NO: 39545653 NR Description: OJ000114_01.8 [Oryza sativa (japonica
  misc_feature (1)..(41): Homolog of NCBI NO: 39545653 NR Description: OJ000114_01.8 [Oryza sativa (japonica
  misc_feature (63)..(583): Homolog of NCBI NO: 15233756 NR Description: putative protein; protein id: At4g09150.1
  misc_feature (1)..(583): Homolog of NCBI NO: 15219971 NR Description: unknown protein; protein id: At1g22930.1
  misc_feature (30)..(277): Homolog of NCBI NO: 38648893 NR Description: Unknown (protein for MGC:73347) [Danio rerio]
MESALFETRSKFFQAKEKRSSIATTVANVASPSVTCYSGQSNDSDTGENCNMDAEKASRVVQSLFGALSSRYENSKGGKLMSNAAPEKMPTENEQIVNEILHDIHGSFADISDGAGTVEGDFKVKVKETMEKAFWDVVADSMRGDMPDYCYLVSLVKEIREALEELSPTGWKEEISDNINLEILTQLLESGSQDRQYLGQILQYSLDKLRKLSSPVKEHEMKKSHDTLLGELVEDSKSNYKDPNSFVLCVIKGLRFTMEELQALKTEVTRARIQLLEPLIKGSGGVEYLQKSFAGRCGSPSDALASLPSTARWIFSLKDVVEEQWNEHVSSLSILPEADHVQTLVATLRTGHAVAGVQSVIPAADNTGLPECRGEILGKLIRIGLLQLISSMEGVERESVPETFMLNWLRLRSVQSKFQQVIVIATSMLVLHQVLASENPKITSSELENATSELFNVLTRLLDNFPDVGTEKIIEAMMYSSTSRSLSDHERMNARKEILTRVFLRSLQTDDTVFKKVSQSVYCAFRAVTLGGSGEKGRMLADASLRRVGATKLTARLVKAAEVLIKAAMVSEQVHGPWYTQLL

SEQ ID NO: 9220 - DNA, 2084 bp, Zea mays subsp. mays
  misc_feature (1)..(2084): Ceres Seq. ID no. 12372847
  misc_feature: MA Experiment ID: 108528 Result: Down-regulated in Transcription
  misc_feature: MA Experiment 108528 PARAMETER Experiment Name: Zm_Imbibed_Seeds_P Parameter: Age (day) Value: 5 vs. 2
  misc_feature: MA Experiment 108528 PARAMETER Experiment Name: Zm_Imbibed_Seeds_P Parameter: Organism Value: Zea mays
  misc_feature: MA Experiment 108528 PARAMETER Experiment Name: Zm_Imbibed_Seeds_P Parameter: Plant Line Value: 35A19
  misc_feature: MA Experiment 108528 PARAMETER Experiment Name: Zm_Imbibed_Seeds_P Parameter: Tissue Value: Aerial vs. Embryo
  misc_feature: MA Experiment ID: 108529 Result: Up-regulated in Transcription
  misc_feature: MA Experiment 108529 PARAMETER Experiment Name: Zm_Imbibed_Seeds_P Parameter: Age (day) Value: 5 vs. 2
  misc_feature: MA Experiment 108529 PARAMETER Experiment Name: Zm_Imbibed_Seeds_P Parameter: Organism Value: Zea mays
  misc_feature: MA Experiment 108529 PARAMETER Experiment Name: Zm_Imbibed_Seeds_P Parameter: Plant Line Value: 35A19
  misc_feature: MA Experiment 108529 PARAMETER Experiment Name: Zm_Imbibed_Seeds_P Parameter: Tissue Value: Roots vs. Embryo
  misc_feature: MA Experiment ID: 108534 Result: Up-regulated in Transcription
  misc_feature: MA Experiment 108534 PARAMETER Experiment Name: Zm_4deg_Cold_P Parameter: Age (hr) Value: 8
  misc_feature: MA Experiment 108534 PARAMETER Experiment Name: Zm_4deg_Cold_P Parameter: Organism Value: Zea mays
  misc_feature: MA Experiment 108534 PARAMETER Experiment Name: Zm_4deg_Cold_P Parameter: Plant Line Value: 35A19
  misc_feature: MA Experiment 108534 PARAMETER Experiment Name: Zm_4deg_Cold_P Parameter: Temperature (deg C) Value: 4 vs. 22
  misc_feature: MA Experiment 108534 PARAMETER Experiment Name: Zm_4deg_Cold_P Parameter: Timepoint (hr) Value: 6
  misc_feature: MA Experiment 108534 PARAMETER Experiment Name: Zm_4deg_Cold_P Parameter: Tissue Value: Aerial
  misc_feature: MA Experiment ID: 108535 Result: Down-regulated in Transcription
  misc_feature: MA Experiment 108535 PARAMETER Experiment Name: Zm_Meristem_P Parameter: Age (day) Value: 8
  misc_feature: MA Experiment 108535 PARAMETER Experiment Name: Zm_Meristem_P Parameter: Organism Value: Zea mays
  misc_feature: MA Experiment 108535 PARAMETER Experiment Name: Zm_Meristem_P Parameter: Plant Line Value: 35A19
  misc_feature: MA Experiment 108535 PARAMETER Experiment Name: Zm_Meristem_P Parameter: Tissue Value: Root Meristem vs. Above Root Meristem
  misc_feature: MA Experiment ID: 108542 Result: Down-regulated in Transcription
  misc_feature: MA Experiment 108542 PARAMETER Experiment Name: Zm_150mM_NaCl_P Parameter: Age (day) Value: 8
  misc_feature: MA Experiment 108542 PARAMETER Experiment Name: Zm_150mM_NaCl_P Parameter: Organism Value: Zea mays
  misc_feature: MA Experiment 108542 PARAMETER Experiment Name: Zm_150mM_NaCl_P Parameter: Plant Line Value: 35A19
  misc_feature: MA Experiment 108542 PARAMETER Experiment Name: Zm_150mM_NaCl_P Parameter: Timepoint (hr) Value: 6
  misc_feature: MA Experiment 108542 PARAMETER Experiment Name: Zm_150mM_NaCl_P Parameter: Tissue Value: Aerial
  misc_feature: MA Experiment 108542 PARAMETER Experiment Name: Zm_150mM_NaCl_P Parameter: Treatment Value: 150mM NaCl vs. No Treatment
  misc_feature: MA Experiment ID: 108543 Result: Up-regulated in Transcription
  misc_feature: MA Experiment ID: 108546 Result: Up-regulated in Transcription
  misc_feature: MA Experiment 108546 PARAMETER Experiment Name: Zm_Imbibed_Seeds_P Parameter: Age (day) Value: 3 vs. 2
  misc_feature: MA Experiment 108546 PARAMETER Experiment Name: Zm_Imbibed_Seeds_P Parameter: Organism Value: Zea mays
  misc_feature: MA Experiment 108546 PARAMETER Experiment Name: Zm_Imbibed_Seeds_P Parameter: Plant Line Value: 35A19
  misc_feature: MA Experiment 108546 PARAMETER Experiment Name: Zm_Imbibed_Seeds_P Parameter: Tissue Value: Roots vs. Embryo
  misc_feature: MA Experiment ID: 108556 Result: Down-regulated in Transcription
  misc_feature: MA Experiment 108556 PARAMETER Experiment Name: Zm_Drought_P Parameter: Age (day) Value: 9
  misc_feature: MA Experiment 108556 PARAMETER Experiment Name: Zm_Drought_P Parameter: Organism Value: Zea mays
  misc_feature: MA Experiment 108556 PARAMETER Experiment Name: Zm_Drought_P Parameter: Plant Line Value: 35A19
  misc_feature: MA Experiment 108556 PARAMETER Experiment Name: Zm_Drought_P Parameter: Timepoint (hr) Value: 24
  misc_feature: MA Experiment 108556 PARAMETER Experiment Name: Zm_Drought_P Parameter: Tissue Value: Aerial
  misc_feature: MA Experiment 108556 PARAMETER Experiment Name: Zm_Drought_P Parameter: Treatment Value: Drought vs. No Drought
  misc_feature: MA Experiment ID: 20000535 Result: Down-regulated in Transcription
  misc_feature: MA Experiment 20000535 PARAMETER Experiment Name: Zm_Hybrid_Seed_Dev_P Parameter: DAP Value: 30 vs. 12
  misc_feature: MA Experiment 20000535 PARAMETER Experiment Name: Zm_Hybrid_Seed_Dev_P Parameter: Organism Value: Zea mays
  misc_feature: MA Experiment 20000535 PARAMETER Experiment Name: Zm_Hybrid_Seed_Dev_P Parameter: Plant Line Value: 35A19
  misc_feature: MA Experiment 20000535 PARAMETER Experiment Name: Zm_Hybrid_Seed_Dev_P Parameter: Tissue Value: Embryo vs. Unfert Floret
  misc_feature: MA Experiment ID: 20000626 Result: Down-regulated in Transcription
  misc_feature: MA Experiment 20000626 PARAMETER Experiment Name: Zm_Herbicide-Treatments_P Parameter: Timepoint (hr) Value: 12
  misc_feature: MA Experiment 20000626 PARAMETER Experiment Name: Zm_Herbicide-Treatments_P Parameter: Tissue Value: Aerial
  misc_feature: MA Experiment 20000626 PARAMETER Experiment Name: Zm_Herbicide-Treatments_P Parameter: Treatment Value: Roundup vs. No Treatment
  misc_feature: MA Experiment ID: 20000629 Result: Down-regulated in Transcription
  misc_feature: MA Experiment 20000629 PARAMETER Experiment Name: Zm_Herbicide-Treatments_P Parameter: Timepoint (hr) Value: 12
  misc_feature: MA Experiment 20000629 PARAMETER Experiment Name: Zm_Herbicide-Treatments_P Parameter: Tissue Value: Aerial
  misc_feature: MA Experiment 20000629 PARAMETER Experiment Name: Zm_Herbicide-Treatments_P Parameter: Treatment Value: Trimec vs. No Treatment
  misc_feature: MA Experiment ID: 20001610 Result: Up-regulated in Transcription
  misc_feature: MA Experiment 20001610 PARAMETER Experiment Name: Zm_50ppm_KNO3_L-to-H_P Parameter: Age (day) Value: 19
  misc_feature: MA Experiment 20001610 PARAMETER Experiment Name: Zm_50ppm_KNO3_L-to-H_P Parameter: Organism Value: Zea mays
  misc_feature: MA Experiment 20001610 PARAMETER Experiment Name: Zm_50ppm_KNO3_L-to-H_P Parameter: Plant Line Value: 35A19
  misc_feature: MA Experiment 20001610 PARAMETER Experiment Name: Zm_50ppm_KNO3_L-to-H_P Parameter: Timepoint (hr) Value: 2
  misc_feature: MA Experiment 20001610 PARAMETER Experiment Name: Zm_50ppm_KNO3_L-to-H_P Parameter: Tissue Value: Roots
  misc_feature: MA Experiment 20001610 PARAMETER Experiment Name: Zm_50ppm_KNO3_L-to-H_P Parameter: Treatment Value: 50ppm KNO3 vs. 50ppm KCl
actcgcacggacgagcgaggcagccccgcaggtcgcagccacaacccaagcgcagcgatctgcctccgctccggctcagctcccgccctgcctccgccttccattccgccgcgcggcgctgccgagtgccgacgtcgtccccgccggagtttctggtttctgggttggatctctcggagtcggagcgagcgaggatgggcggcggcaacggtgaaaccacccagctgggggagccactgctggcgaagaaggcgaaggcgtaccgccctaggtgccccggctgccgggtggaccgcctcaacgcggagcgggagggggtcttccctctcaaggacctcttcctcatctggctcgtcaccatcacctgcaccctgccgatccagtctctgttccccttcttgtatttcatgataagggatctgcatattgctaaacaaacacaagacattggattttatgctggttttgttggcgcttcatatatgtgtgggagggcagtctcctcaacagtatggggaatcgtggctgataagtatggaaggaaaccagttatcgtactgacccttattgcaatagttatcttcaatactatgtttggactaagctcaaactattggatggcattaatcacacgatgcctgcttggaatcatgtgtggttatctcgggccaattaaggcttatgctacagaagtgtgccgaaaagaatacaatcatctggctttggcagttgtttcttcctcacgaggcattggtctcattattggtccagctcttggtggttatcttgcgcagcctgcagataaatatccaagtatattctctcagacgtccatatttgggaggtttccatactttcttccgtgcctgtgtatatcaatccttgcagttattgctctaattgcctgcatctggtttccggaaactttgcataaacacaatggggatgccgttgataattccgttgaaacagtagaagaatctcttgctggcaccgacactgaagaaaatggaggtggcggatgtctaaaattatttacaaactggccgttgatgtcagctattactttatattgtatcttctctcttcaggatgtggcttatgcagagacattctctctttgggctgtcagtgacagatcgtttggtggattaagctttactaccacagatgtgggcaatgtccttgcgatgtcaggtctcttcctttttctatatcaaatgttgatctatccgttccttgccaaaacggtagaccacatcacattagtccgtgcagtggcgttattgactctaccggttcttgctagctacccattctttccttcgttgtccgggttcgggctcatggtggtagtaaattgtgcatcttttctgaagaatacattctcggtaactaccattaccgtgttcaacattttgatgaatgaagctgtgactcaggatgtaagagccgcagccaatgggatagctgtaacactaatgtccatctctaaagcggttgctccagctgttgcaggaatcatattttcgtgggcccagaggcgtcaaacagctgcatttcttccaggcgaccacttggtgttcttcatactgaacatcttcacgttcatcggtttcgtcttcaccttcagaccgtttttcgttcgaggcagtgccaagcactgaaacatggatgaagcggacgacgacccatgggtatcctatccaggggcaatcgaatatagattttcttgtggcgtggccaagggcggtgccgagcctgtaccagtacgacgactcaggccagaacacacggcgtatggtatggtacacagcaaggccgtgttgttgctgtaagttttgtaatttctgtttccttcttctcggcttcgcagcatgcagttgctgtatatgatggaagaacactctgttactgggcatgttgcgcggtttccacgcgtgtaagtaatgtagaagtcgctatggtaggtatttccataccgtcattagtggatcattgaatttttttgtaagaaggttattgcaatgccctttttccgggcatgaataagaaaaaggaaatatgcttatatgcatggtatt

SEQ ID NO: 9221 - protein, 554 aa, Zea mays subsp. mays
  peptide (1)..(554): Ceres Seq. ID no. 12372848
  misc_feature (115)..(547): Pfam Name: Sugar (and other) transporter Pfam Description: Sugar (and other) transporter
  misc_feature (161)..(554): Homolog of NCBI NO: 34903136 NR Description: unnamed protein product [Oryza sativa (japonica group)] >gi|6630695|dbj|BAA88541.1| unnamed protein product
  misc_feature (67)..(547): Homolog of NCBI NO: 23452821 NR Description: major facilitator superfamily antiporter [Oryza
  misc_feature (85)..(546): Homolog of NCBI NO: 23452823 NR Description: major facilitator superfamily antiporter [Oryza
  misc_feature (77)..(546): Homolog of NCBI NO: 22326785 NR Description: transporter-like protein; protein id:
  misc_feature (85)..(546): Homolog of NCBI NO: 30684565 NR Description: transporter-related protein [Arabidopsis >gi|14517414|gb|AAK62597.1| AT5g13750/MXE10_2 [Arabidopsis
  misc_feature (91)..(546): Homolog of NCBI NO: 15229781 NR Description: transporter-like protein; protein id: At3g43790.1
  misc_feature (103)..(546): Homolog of NCBI NO: 20260160 NR Description: transporter-like protein [Arabidopsis thaliana]
  misc_feature (103)..(524): Homolog of NCBI NO: 10177340 NR Description: transporter-like protein [Arabidopsis thaliana]
  misc_feature (161)..(546): Homolog of NCBI NO: 23452819 NR Description: major facilitator superfamily antiporter [Zea
  misc_feature (161)..(546): Homolog of NCBI NO: 30684567 NR Description: transporter-related protein [Arabidopsis thaliana]
SHGRARQPRRSQPQPKRSDLPPLRLSSRPASAFHSAARRCRVPTSSPPEFLVSGLDLSESERARMGGGNGETTQLGEPLLAKKAKAYRPRCPGCRVDRLNAEREGVFPLKDLFLIWLVTITCTLPIQSLFPFLYFMIRDLHIAKQTQDIGFYAGFVGASYMCGRAVSSTVWGIVADKYGRKPVIVLTLIAIVIFNTMFGLSSNYWMALITRCLLGIMCGYLGPIKAYATEVCRKEYNHLALAVVSSSRGIGLIIGPALGGYLAQPADKYPSIFSQTSIFGRFPYFLPCLCISILAVIALIACIWFPETLHKHNGDAVDNSVETVEESLAGTDTEENGGGGCLKLFTNWPLMSAITLYCIFSLQDVAYAETFSLWAVSDRSFGGLSFTTTDVGNVLAMSGLFLFLYQMLIYPFLAKTVDHITLVRAVALLTLPVLASYPFFPSLSGFGLMVVVNCASFLKNTFSVTTITVFNILMNEAVTQDVRAAANGIAVTLMSISKAVAPAVAGIIFSWAQRRQTAAFLPGDHLVFFILNIFTFIGFVFTFRPFFVRGSAKH

SEQ ID NO: 9222 - protein, 490 aa, Zea mays subsp. mays
  peptide (1)..(490): Ceres Seq. ID no. 12372849
  misc_feature (51)..(483): Pfam Name: Sugar (and other) transporter Pfam Description: Sugar (and other) transporter
  misc_feature (97)..(490): Homolog of NCBI NO: 34903136 NR Description: unnamed protein product [Oryza sativa (japonica group)] >gi|6630695|dbj|BAA88541.1| unnamed protein product
  misc_feature (3)..(483): Homolog of NCBI NO: 23452821 NR Description: major facilitator superfamily antiporter [Oryza
  misc_feature (21)..(482): Homolog of NCBI NO: 23452823 NR Description: major facilitator superfamily antiporter [Oryza
  misc_feature (13)..(482): Homolog of NCBI NO: 22326785 NR Description: transporter-like protein; protein id:
  misc_feature (21)..(482): Homolog of NCBI NO: 30684565 NR Description: transporter-related protein [Arabidopsis >gi|14517414|gb|AAK62597.1| AT5g13750/MXE10_2 [Arabidopsis
  misc_feature (27)..(482): Homolog of NCBI NO: 15229781 NR Description: transporter-like protein; protein id: At3g43790.1
  misc_feature (39)..(482): Homolog of NCBI NO: 20260160 NR Description: transporter-like protein [Arabidopsis thaliana]
  misc_feature (39)..(460): Homolog of NCBI NO: 10177340 NR Description: transporter-like protein [Arabidopsis thaliana]
  misc_feature (97)..(482): Homolog of NCBI NO: 23452819 NR Description: major facilitator superfamily antiporter [Zea
  misc_feature (97)..(482): Homolog of NCBI NO: 30684567 NR Description: transporter-related protein [Arabidopsis thaliana]
MGGGNGETTQLGEPLLAKKAKAYRPRCPGCRVDRLNAEREGVFPLKDLFLIWLVTITCTLPIQSLFPFLYFMIRDLHIAKQTQDIGFYAGFVGASYMCGRAVSSTVWGIVADKYGRKPVIVLTLIAIVIFNTMFGLSSNYWMALITRCLLGIMCGYLGPIKAYATEVCRKEYNHLALAVVSSSRGIGLIIGPALGGYLAQPADKYPSIFSQTSIFGRFPYFLPCLCISILAVIALIACIWFPETLHKHNGDAVDNSVETVEESLAGTDTEENGGGGCLKLFTNWPLMSAITLYCIFSLQDVAYAETFSLWAVSDRSFGGLSFTTTDVGNVLAMSGLFLFLYQMLIYPFLAKTVDHITLVRAVALLTLPVLASYPFFPSLSGFGLMVVVNCASFLKNTFSVTTITVFNILMNEAVTQDVRAAANGIAVTLMSISKAVAPAVAGIIFSWAQRRQTAAFLPGDHLVFFILNIFTFIGFVFTFRPFFVRGSAKH

SEQ ID NO: 9223 - protein, 419 aa, Zea mays subsp. mays
  peptide (1)..(419): Ceres Seq. ID no. 12372850
  misc_feature (1)..(412): Pfam Name: Sugar (and other) transporter Pfam Description: Sugar (and other) transporter
  misc_feature (26)..(419): Homolog of NCBI NO: 34903136 NR Description: unnamed protein product [Oryza sativa (japonica group)] >gi|6630695|dbj|BAA88541.1| unnamed protein product
  misc_feature (1)..(412): Homolog of NCBI NO: 23452821 NR Description: major facilitator superfamily antiporter [Oryza
  misc_feature (1)..(411): Homolog of NCBI NO: 23452823 NR Description: major facilitator superfamily antiporter [Oryza
  misc_feature (1)..(411): Homolog of NCBI NO: 22326785 NR Description: transporter-like protein; protein id:
  misc_feature (1)..(411): Homolog of NCBI NO: 30684565 NR Description: transporter-related protein [Arabidopsis >gi|14517414|gb|AAK62597.1| AT5g13750/MXE10_2 [Arabidopsis
  misc_feature (1)..(411): Homolog of NCBI NO: 15229781 NR Description: transporter-like protein; protein id: At3g43790.1
  misc_feature (1)..(411): Homolog of NCBI NO: 20260160 NR Description: transporter-like protein [Arabidopsis thaliana]
  misc_feature (1)..(389): Homolog of NCBI NO: 10177340 NR Description: transporter-like protein [Arabidopsis thaliana]
  misc_feature (26)..(411): Homolog of NCBI NO: 23452819 NR Description: major facilitator superfamily antiporter [Zea
  misc_feature (26)..(411): Homolog of NCBI NO: 30684567 NR Description: transporter-related protein [Arabidopsis thaliana]
MIRDLHIAKQTQDIGFYAGFVGASYMCGRAVSSTVWGIVADKYGRKPVIVLTLIAIVIFNTMFGLSSNYWMALITRCLLGIMCGYLGPIKAYATEVCRKEYNHLALAVVSSSRGIGLIIGPALGGYLAQPADKYPSIFSQTSIFGRFPYFLPCLCISILAVIALIACIWFPETLHKHNGDAVDNSVETVEESLAGTDTEENGGGGCLKLFTNWPLMSAITLYCIFSLQDVAYAETFSLWAVSDRSFGGLSFTTTDVGNVLAMSGLFLFLYQMLIYPFLAKTVDHITLVRAVALLTLPVLASYPFFPSLSGFGLMVVVNCASFLKNTFSVTTITVFNILMNEAVTQDVRAAANGIAVTLMSISKAVAPAVAGIIFSWAQRRQTAAFLPGDHLVFFILNIFTFIGFVFTFRPFFVRGSAKH

SEQ ID NO: 9224 - DNA, 1684 bp, Zea mays subsp. mays
  misc_feature (1)..(1684): Ceres Seq. ID no. 12358384
  misc_feature: MA Experiment ID: 108504 Result: Down-regulated in Transcription
  misc_feature: MA Experiment 108504 PARAMETER Experiment Name: Zm_Drought_P Parameter: Age (day) Value: 8
  misc_feature: MA Experiment 108504 PARAMETER Experiment Name: Zm_Drought_P Parameter: Organism Value: Zea mays
  misc_feature: MA Experiment 108504 PARAMETER Experiment Name: Zm_Drought_P Parameter: Plant Line Value: 35A19
  misc_feature: MA Experiment 108504 PARAMETER Experiment Name: Zm_Drought_P Parameter: Timepoint (hr) Value: 12
  misc_feature: MA Experiment 108504 PARAMETER Experiment Name: Zm_Drought_P Parameter: Tissue Value: Aerial
  misc_feature: MA Experiment 108504 PARAMETER Experiment Name: Zm_Drought_P Parameter: Treatment Value: Drought vs. No Drought
  misc_feature: MA Experiment ID: 108556 Result: Down-regulated in Transcription
  misc_feature: MA Experiment 108556 PARAMETER Experiment Name: Zm_Drought_P Parameter: Age (day) Value: 9
  misc_feature: MA Experiment 108556 PARAMETER Experiment Name: Zm_Drought_P Parameter: Organism Value: Zea mays
  misc_feature: MA Experiment 108556 PARAMETER Experiment Name: Zm_Drought_P Parameter: Plant Line Value: 35A19
  misc_feature: MA Experiment 108556 PARAMETER Experiment Name: Zm_Drought_P Parameter: Timepoint (hr) Value: 24
  misc_feature: MA Experiment 108556 PARAMETER Experiment Name: Zm_Drought_P Parameter: Tissue Value: Aerial
  misc_feature: MA Experiment 108556 PARAMETER Experiment Name: Zm_Drought_P Parameter: Treatment Value: Drought vs. No Drought
  misc_feature: MA Experiment ID: 108597 Result: Down-regulated in Transcription
  misc_feature: MA Experiment 108597 PARAMETER Experiment Name: Zm_100uM_ABA_P Parameter: Age (day) Value: 9
  misc_feature: MA Experiment 108597 PARAMETER Experiment Name: Zm_100uM_ABA_P Parameter: Organism Value: Zea mays
  misc_feature: MA Experiment 108597 PARAMETER Experiment Name: Zm_100uM_ABA_P Parameter: Plant Line Value: 35A19
  misc_feature: MA Experiment 108597 PARAMETER Experiment Name: Zm_100uM_ABA_P Parameter: Timepoint (hr) Value: 24
  misc_feature: MA Experiment 108597 PARAMETER Experiment Name: Zm_100uM_ABA_P Parameter: Tissue Value: Aerial
  misc_feature: MA Experiment 108597 PARAMETER Experiment Name: Zm_100uM_ABA_P Parameter: Treatment Value: 100uM ABA vs. No Treatment
  misc_feature: MA Experiment ID: 20000477 Result: Down-regulated in Transcription
  misc_feature: MA Experiment 20000477 PARAMETER Experiment Name: Zm_5mM_SA_P Parameter: Age (day) Value: 10
  misc_feature: MA Experiment 20000477 PARAMETER Experiment Name: Zm_5mM_SA_P Parameter: Organism Value: Zea mays
  misc_feature: MA Experiment 20000477 PARAMETER Experiment Name: Zm_5mM_SA_P Parameter: Plant Line Value: 35A19
  misc_feature: MA Experiment 20000477 PARAMETER Experiment Name: Zm_5mM_SA_P Parameter: Timepoint (hr) Value: 48
  misc_feature: MA Experiment 20000477 PARAMETER Experiment Name: Zm_5mM_SA_P Parameter: Tissue Value: Aerial
  misc_feature: MA Experiment 20000477 PARAMETER Experiment Name: Zm_5mM_SA_P Parameter: Treatment Value: 5mM SA vs. No Treatment
  misc_feature: MA Experiment ID: 20000478 Result: Down-regulated in Transcription
  misc_feature: MA Experiment 20000478 PARAMETER Experiment Name: Zm_5mM_SA_P Parameter: Age (day) Value: 11
  misc_feature: MA Experiment 20000478 PARAMETER Experiment Name: Zm_5mM_SA_P Parameter: Organism Value: Zea mays
  misc_feature: MA Experiment 20000478 PARAMETER Experiment Name: Zm_5mM_SA_P Parameter: Plant Line Value: 35A19
  misc_feature: MA Experiment 20000478 PARAMETER Experiment Name: Zm_5mM_SA_P Parameter: Timepoint (hr) Value: 72
  misc_feature: MA Experiment 20000478 PARAMETER Experiment Name: Zm_5mM_SA_P Parameter: Tissue Value: Aerial
  misc_feature: MA Experiment 20000478 PARAMETER Experiment Name: Zm_5mM_SA_P Parameter: Treatment Value: 5mM SA vs. No Treatment
  misc_feature: MA Experiment ID: 20000479 Result: Down-regulated in Transcription
  misc_feature: MA Experiment 20000479 PARAMETER Experiment Name: Zm_Drought_P Parameter: Age (day) Value: 10
  misc_feature: MA Experiment 20000479 PARAMETER Experiment Name: Zm_Drought_P Parameter: Organism Value: Zea mays
  misc_feature: MA Experiment 20000479 PARAMETER Experiment Name: Zm_Drought_P Parameter: Plant Line Value: 35A19
  misc_feature: MA Experiment 20000479 PARAMETER Experiment Name: Zm_Drought_P Parameter: Timepoint (hr) Value: 48
  misc_feature: MA Experiment 20000479 PARAMETER Experiment Name: Zm_Drought_P Parameter: Tissue Value: Aerial
  misc_feature: MA Experiment 20000479 PARAMETER Experiment Name: Zm_Drought_P Parameter: Treatment Value: Drought vs. No Drought
  misc_feature: MA Experiment ID: 20000480 Result: Down-regulated in Transcription
  misc_feature: MA Experiment 20000480 PARAMETER Experiment Name: Zm_Drought_P Parameter: Age (day) Value: 11
  misc_feature: MA Experiment 20000480 PARAMETER Experiment Name: Zm_Drought_P Parameter: Organism Value: Zea mays
  misc_feature: MA Experiment 20000480 PARAMETER Experiment Name: Zm_Drought_P Parameter: Plant Line Value: 35A19
  misc_feature: MA Experiment 20000480 PARAMETER Experiment Name: Zm_Drought_P Parameter: Timepoint (hr) Value: 72
  misc_feature: MA Experiment 20000480 PARAMETER Experiment Name: Zm_Drought_P Parameter: Tissue Value: Aerial
  misc_feature: MA Experiment 20000480 PARAMETER Experiment Name: Zm_Drought_P Parameter: Treatment Value: Drought vs. No Drought
  misc_feature: MA Experiment ID: 20000492 Result: Down-regulated in Transcription
  misc_feature: MA Experiment 20000492 PARAMETER Experiment Name: Zm_Hybrid_Seed_Dev_P Parameter: DAP Value: 12
  misc_feature: MA Experiment 20000492 PARAMETER Experiment Name: Zm_Hybrid_Seed_Dev_P Parameter: Organism Value: Zea mays
  misc_feature: MA Experiment 20000492 PARAMETER Experiment Name: Zm_Hybrid_Seed_Dev_P Parameter: Plant Line Value: 35A19
  misc_feature: MA Experiment 20000492 PARAMETER Experiment Name: Zm_Hybrid_Seed_Dev_P Parameter: Tissue Value: Fert Kernel vs. Unfert Floret
  misc_feature: MA Experiment ID: 20000535 Result: Down-regulated in Transcription
  misc_feature: MA Experiment 20000535 PARAMETER Experiment Name: Zm_Hybrid_Seed_Dev_P Parameter: DAP Value: 30 vs. 12
  misc_feature: MA Experiment 20000535 PARAMETER Experiment Name: Zm_Hybrid_Seed_Dev_P Parameter: Organism Value: Zea mays
  misc_feature: MA Experiment 20000535 PARAMETER Experiment Name: Zm_Hybrid_Seed_Dev_P Parameter: Plant Line Value: 35A19
  misc_feature: MA Experiment 20000535 PARAMETER Experiment Name: Zm_Hybrid_Seed_Dev_P Parameter: Tissue Value: Embryo vs. Unfert Floret
tcccgtatcctgtgccagctgactcgccttctcaagttctgaaacgcagcggagcgcgccggaggagagcaaagcggacagcggaggatagagagagcagaacaccagatcagatcagatggcgcctccgtctccccagccgccgctagtgcgcgtgctcgaccgcatccgcgtctcgcccgccgccggctgattctgagcaagagcccgcgctccctctcactttcttcgacgttgcctggctcttcaccggccccgtcgagcgcctcttcttcttccgccacccggagccggcctccactctcccgctcctgcgctcctcgctctccctcgcgctccgccgcttctacccactcgccggcaccatcaggccccacgcgcctttcctctgctcctacacccatggtaccgatgccctcaccatggtcgtcgccgagtcgaacagccccgacgatttcgacagcctcgtagccaggtcgcccagcgacctggacgggatccgccccctcgttccgcagttgccgccgccgggggaagacggagcgttcgcgctcgccgccgtgcaggccactgtcttcccaggccgtggcctctgcctcggcgtctccgtccaccacgctgcctgcgacgatgcctccaccatgcatttcgtccgcacctgggccgctacctgccgcctaggactcgagaacgacgacggatccgaggacgccgtgctatcgccacgtccggtgctggaccgctccgtcgtcgccgaccccgacgacctgcgcgggaagacgctcgccgggatggcgcgcctcgcccctcctccttctccgccgccgcagcagcaggaggagaagacgccgatggtgatggcgtcgttcctgctggggcgcgagcagatcgaccggatcaaggagggcgcggcagcaaaggcatcgtctttcgtggcggcgtcggccttggcgtgggtgtgcctcctcaagtgcggttccgttggcgtcgcgggcgcccggcgcagccacatgctcttctccgccgagtgccggtccaggctgacgccaccgctgccggccgaatacttcggcaactgcctgcgcccctgcttcgtggaagccgccacggcggaccttctctctggggaaactgaggacggcgtggctgcggcggcgtcggcgatcgggagcgcgatccaggagatggagcagggcgtgctggaaggcgcggaggggtggttgggcagggtgctgtcggtgcttcccgagcggcccatgtccgtgggcgggtcccccaggcacggcgtgtacgaaaccacggacttcgggtggggccggccggcgagggtggagatggtgtcggtggagaagacgcccgggacggtagcgctggcagacagcccggagggagacggaggcatcgagctcggggtggtgttgccgccggacgccatggatgcatttgcttcgtgctttgcgcatgccgtcggcgccaacgtctgattggcattccgatccgaggtgcagctgctgccttcaacaacacaggaccaaaagattcgattgaagcagcgtattatttgtgcttgattaattggtttactttactgtcttgagagtgagctcgttcttgctgctgatgtgcgaagtcaaggaataaacaaccggattgttccgaaatcaatcaagcgtcactatgattt

SEQ ID NO: 9225 - protein, 353 aa, Zea mays subsp. mays
  peptide (1)..(353): Ceres Seq. ID no. 12358385
  misc_feature (1)..(345): Pfam Name: Transferase family Pfam Description: Transferase family
  misc_feature (1)..(349): Homolog of NCBI NO: 38346544 NR Description: OSJNBa0035M09.5 [Oryza sativa (japonica
  misc_feature (1)..(353): Homolog of NCBI NO: 17980234 NR Description: malonyl CoA:anthocyanin 5-O-glucoside-6'''-O-
  misc_feature (1)..(341): Homolog of NCBI NO: 34394044 NR Description: anthocyanin 5-aromatic acyltransferase-like
  misc_feature (1)..(341): Homolog of NCBI NO: 34903412 NR Description: anthocyanin 5-aromatic acyltransferase-like
  misc_feature (1)..(343): Homolog of NCBI NO: 25406735 NR Description: protein F21B7.12 [imported] - Arabidopsis >gi|9280644|gb|AAF86513.1|AC002560_6 F21B7.12 [Arabidopsis
  misc_feature (1)..(346): Homolog of NCBI NO: 17980232 NR Description: malonyl CoA:anthocyanin 5-O-glucoside-6'''-O-
  misc_feature (1)..(349): Homolog of NCBI NO: 15219594 NR Description: hypothetical protein; protein id: At1g03940.1
  misc_feature (1)..(351): Homolog of NCBI NO: 7415597 NR Description: acyltransferase homolog [Gentiana triflora]
  misc_feature (1)..(345): Homolog of NCBI NO: 38679123 NR Description: putative acyltransferase [Salvia splendens]
  misc_feature (1)..(352): Homolog of NCBI NO: 7415646 NR Description: anthocyanin acyltransferase [Perilla frutescens]
MVVAESNSPDDFDSLVARSPSDLDGIRPLVPQLPPPGEDGAFALAAVQATVFPGRGLCLGVSVHHAACDDASTMHFVRTWAATCRLGLENDDGSEDAVLSPRPVLDRSVVADPDDLRGKTLAGMARLAPPPSPPPQQQEEKTPMVMASFLLGREQIDRIKEGAAAKASSFVAASALAWVCLLKCGSVGVAGARRSHMLFSAECRSRLTPPLPAEYFGNCLRPCFVEAATADLLSGETEDGVAAAASAIGSAIQEMEQGVLEGAEGWLGRVLSVLPERPMSVGGSPRHGVYETTDFGWGRPARVEMVSVEKTPGTVALADSPEGDGGIELGVVLPPDAMDAFASCFAHAVGANV

SEQ ID NO: 9226 - protein, 280 aa, Zea mays subsp. mays
  peptide (1)..(280): Ceres Seq. ID no. 12358386
  misc_feature (1)..(272): Pfam Name: Transferase family Pfam Description: Transferase family
  misc_feature (1)..(268): Homolog of NCBI NO: 34903412 NR Description: anthocyanin 5-aromatic acyltransferase-like
  misc_feature (1)..(270): Homolog of NCBI NO: 25406735 NR Description: protein F21B7.12 [imported] - Arabidopsis >gi|9280644|gb|AAF86513.1|AC002560_6 F21B7.12 [Arabidopsis
  misc_feature (1)..(273): Homolog of NCBI NO: 17980232 NR Description: malonyl CoA:anthocyanin 5-O-glucoside-6'''-O-
  misc_feature (1)..(276): Homolog of NCBI NO: 15219594 NR Description: hypothetical protein; protein id: At1g03940.1
  misc_feature (1)..(280): Homolog of NCBI NO: 17980234 NR Description: malonyl CoA:anthocyanin 5-O-glucoside-6'''-O-
  misc_feature (1)..(268): Homolog of NCBI NO: 34394044 NR Description: anthocyanin 5-aromatic acyltransferase-like
  misc_feature (1)..(276): Homolog of NCBI NO: 38346544 NR Description: OSJNBa0035M09.5 [Oryza sativa (japonica
  misc_feature (1)..(278): Homolog of NCBI NO: 7415597 NR Description: acyltransferase homolog [Gentiana triflora]
  misc_feature (1)..(272): Homolog of NCBI NO: 38679123 NR Description: putative acyltransferase [Salvia splendens]
  misc_feature (1)..(279): Homolog of NCBI NO: 7415646 NR Description: anthocyanin acyltransferase [Perilla frutescens]
MHFVRTWAATCRLGLENDDGSEDAVLSPRPVLDRSVVADPDDLRGKTLAGMARLAPPPSPPPQQQEEKTPMVMASFLLGREQIDRIKEGAAAKASSFVAASALAWVCLLKCGSVGVAGARRSHMLFSAECRSRLTPPLPAEYFGNCLRPCFVEAATADLLSGETEDGVAAAASAIGSAIQEMEQGVLEGAEGWLGRVLSVLPERPMSVGGSPRHGVYETTDFGWGRPARVEMVSVEKTPGTVALADSPEGDGGIELGVVLPPDAMDAFASCFAHAVGANV

SEQ ID NO: 9227 - protein, 230 aa, Zea mays subsp. mays
  peptide (1)..(230): Ceres Seq. ID no. 12358387
  misc_feature (1)..(222): Pfam Name: Transferase family Pfam Description: Transferase family
  misc_feature (1)..(226): Homolog of NCBI NO: 38346544 NR Description: OSJNBa0035M09.5 [Oryza sativa (japonica
  misc_feature (1)..(230): Homolog of NCBI NO: 17980234 NR Description: malonyl CoA:anthocyanin 5-O-glucoside-6'''-O-
  misc_feature (1)..(218): Homolog of NCBI NO: 34394044 NR Description: anthocyanin 5-aromatic acyltransferase-like
  misc_feature (1)..(218): Homolog of NCBI NO: 34903412 NR Description: anthocyanin 5-aromatic acyltransferase-like
  misc_feature (1)..(220): Homolog of NCBI NO: 25406735 NR Description: protein F21B7.12 [imported] - Arabidopsis >gi|9280644|gb|AAF86513.1|AC002560_6 F21B7.12 [Arabidopsis
  misc_feature (1)..(223): Homolog of NCBI NO: 17980232 NR Description: malonyl CoA:anthocyanin 5-O-glucoside-6'''-O-
  misc_feature (1)..(226): Homolog of NCBI NO: 15219594 NR Description: hypothetical protein; protein id: At1g03940.1
  misc_feature (1)..(228): Homolog of NCBI NO: 7415597 NR Description: acyltransferase homolog [Gentiana triflora]
  misc_feature (1)..(222): Homolog of NCBI NO: 38679123 NR Description: putative acyltransferase [Salvia splendens]
  misc_feature (1)..(229): Homolog of NCBI NO: 7415646 NR Description: anthocyanin acyltransferase [Perilla frutescens]
MARLAPPPSPPPQQQEEKTPMVMASFLLGREQIDRIKEGAAAKASSFVAASALAWVCLLKCGSVGVAGARRSHMLFSAECRSRLTPPLPAEYFGNCLRPCFVEAATADLLSGETEDGVAAAASAIGSAIQEMEQGVLEGAEGWLGRVLSVLPERPMSVGGSPRHGVYETTDFGWGRPARVEMVSVEKTPGTVALADSPEGDGGIELGVVLPPDAMDAFASCFAHAVGANV

SEQ ID NO: 9228 - DNA, 1641 bp, Zea mays subsp. mays
  misc_feature (1)..(1641): Ceres Seq. ID no. 12349347
  misc_feature: MA Experiment ID: 108522 Result: Down-regulated in Transcription
  misc_feature: MA Experiment 108522 PARAMETER Experiment Name: Zm_42deg_Heat_P Parameter: Age (day) Value: 8
  misc_feature: MA Experiment 108522 PARAMETER Experiment Name: Zm_42deg_Heat_P Parameter: Organism Value: Zea mays
  misc_feature: MA Experiment 108522 PARAMETER Experiment Name: Zm_42deg_Heat_P Parameter: Plant Line Value: 35A19
  misc_feature: MA Experiment 108522 PARAMETER Experiment Name: Zm_42deg_Heat_P Parameter: Temperature (deg C) Value: 42 vs. 22
  misc_feature: MA Experiment 108522 PARAMETER Experiment Name: Zm_42deg_Heat_P Parameter: Timepoint (hr) Value: 1
  misc_feature: MA Experiment 108522 PARAMETER Experiment Name: Zm_42deg_Heat_P Parameter: Tissue Value: Aerial
  misc_feature: MA Experiment ID: 108543 Result: Down-regulated in Transcription
  misc_feature: MA Experiment ID: 108544 Result: Down-regulated in Transcription
aaaaacccttgagccgtcaccaatggcggacctcgaaaccctagccacgcccgcccctgcctctgcctccaccaagaagaagaagaaacactccaagaagcacaaggccgccagtgacgcccccaccaatgtcaccgtcgacgcatcccttatgggcggttcctcctacgtcgcggccgcccccgtggtcggctacttcccctccgggtacgacccactcactaccgctgccggggcggagtctgcccccggcacccagctcttccggcacgagaagcatcccacctgggtggacctcgtggtccggagccccggcggcggacacgacttcgttggccggagctatgccggtgaggccgccgtgccgcaggtctgcgactacgcgcttggcgtccttgacaaggcctccggcactctcaggatcgtgcccatcgctggcaaaaagattctgaggctagagccacatcttgaagtgcagcatccagcgcattcgcagcactctgaggtggcatcagaagcggcttcagctgcaggaaatgatgaattgaaggttcaggatctgacaatgatgtatggagccaagacggacagggacaaggacaataagtggagatcgttaaaggaacaaaggaatgatccttccgcttatgaggacattgatcttggaatatcagagaccaatgtcaacgccaatgataggcaggaacctgtacttgttcggaacattccaccttatgatcctaccgcagatacatcagaaaatgcatatcttttggacgagattattccaaagagtatgcgggagcattttttggaaattgtccgtcattttgaatcaggagaaatctcctcaaaaggctatgggagttttgtctcaaaacgtgtgcacaagttaaaggagcttcagggtgaagataaaaagaggtttgcttggatactttcctacatccaacatctcctatctctattggcgcgtaatggctccatgtccaatcgcaaatggaaaggcagaaatgaaaaccagataagccatggaccagcaaccccgcaggctgtatatcgcaggctgctgttcatgtttacagaaccggggtccagtgtcatgccaacagagaaaaaagagcttctgaccaactacatattggtcctaacactttttgccgatgacttcagatccaaccccagcgacatatgtgaggaccttaaaatgacccgccaaaatcttaaaccatactatgaccagttgggatgcaaatctgtgacagaaggtgcttttaagtctactttcatgacgctcccagcccctctcaagttcccaaaggaagttacgagaaagcggcgacggcagtagggcttttatccaaaggagacaaggagagaaaccaatggctatttatctcagaaatggcttgcattacttgaatggatggctggattggaaatactccctatcgaaggcaagaagtaaaggcatcgatgctaggggcccgattttaatagtgtactggaaatgaaaagttgtcctgtgtttcatctcgttttgtttttagttgctcatcgacattttcttgttaaggaaacatgtcatctatgtattgataaatgtttgtctatctgtatgagtgaatgtattgaaatgtt

SEQ ID NO: 9229 - protein, 449 aa, Zea mays subsp. mays
  peptide (1)..(449): Ceres Seq. ID no. 12349348
  misc_feature (12)..(447): Homolog of NCBI NO: 15231416 NR Description: unknown protein; protein id: At3g13940.1, by cDNA: gi_13430583 [Arabidopsis thaliana] gene_id:MDC16.6~similar to unknown protein~sp|O14086 [Arabidopsis
KTLEPSPMADLETLATPAPASASTKKKKKHSKKHKAASDAPTNVTVDASLMGGSSYVAAAPVVGYFPSGYDPLTTAAGAESAPGTQLFRHEKHPTWVDLVVRSPGGGHDFVGRSYAGEAAVPQVCDYALGVLDKASGTLRIVPIAGKKILRLEPHLEVQHPAHSQHSEVASEAASAAGNDELKVQDLTMMYGAKTDRDKDNKWRSLKEQRNDPSAYEDIDLGISETNVNANDRQEPVLVRNIPPYDPTADTSENAYLLDEIIPKSMREHFLEIVRHFESGEISSKGYGSFVSKRVHKLKELQGEDKKRFAWILSYIQHLLSLLARNGSMSNRKWKGRNENQISHGPATPQAVYRRLLFMFTEPGSSVMPTEKKELLTNYILVLTLFADDFRSNPSDICEDLKMTRQNLKPYYDQLGCKSVTEGAFKSTFMTLPAPLKFPKEVTRKRRRQ

SEQ ID NO: 9230 - protein, 442 aa, Zea mays subsp. mays
  peptide (1)..(442): Ceres Seq. ID no. 12349349
  misc_feature (5)..(440): Homolog of NCBI NO: 15231416 NR Description: unknown protein; protein id: At3g13940.1, by cDNA: gi_13430583 [Arabidopsis thaliana] gene_id:MDC16.6~similar to unknown protein~sp|O14086 [Arabidopsis
MADLETLATPAPASASTKKKKKHSKKHKAASDAPTNVTVDASLMGGSSYVAAAPVVGYFPSGYDPLTTAAGAESAPGTQLFRHEKHPTWVDLVVRSPGGGHDFVGRSYAGEAAVPQVCDYALGVLDKASGTLRIVPIAGKKILRLEPHLEVQHPAHSQHSEVASEAASAAGNDELKVQDLTMMYGAKTDRDKDNKWRSLKEQRNDPSAYEDIDLGISETNVNANDRQEPVLVRNIPPYDPTADTSENAYLLDEIIPKSMREHFLEIVRHFESGEISSKGYGSFVSKRVHKLKELQGEDKKRFAWILSYIQHLLSLLARNGSMSNRKWKGRNENQISHGPATPQAVYRRLLFMFTEPGSSVMPTEKKELLTNYILVLTLFADDFRSNPSDICEDLKMTRQNLKPYYDQLGCKSVTEGAFKSTFMTLPAPLKFPKEVTRKRRRQ

SEQ ID NO: 9231 - protein, 399 aa, Zea mays subsp. mays
  peptide (1)..(399): Ceres Seq. ID no. 12349350
  misc_feature (1)..(397): Homolog of NCBI NO: 15231416 NR Description: unknown protein; protein id: At3g13940.1, by cDNA: gi_13430583 [Arabidopsis thaliana] gene_id:MDC16.6~similar to unknown protein~sp|O14086 [Arabidopsis
MGGSSYVAAAPVVGYFPSGYDPLTTAAGAESAPGTQLFRHEKHPTWVDLVVRSPGGGHDFVGRSYAGEAAVPQVCDYALGVLDKASGTLRIVPIAGKKILRLEPHLEVQHPAHSQHSEVASEAASAAGNDELKVQDLTMMYGAKTDRDKDNKWRSLKEQRNDPSAYEDIDLGISETNVNANDRQEPVLVRNIPPYDPTADTSENAYLLDEIIPKSMREHFLEIVRHFESGEISSKGYGSFVSKRVHKLKELQGEDKKRFAWILSYIQHLLSLLARNGSMSNRKWKGRNENQISHGPATPQAVYRRLLFMFTEPGSSVMPTEKKELLTNYILVLTLFADDFRSNPSDICEDLKMTRQNLKPYYDQLGCKSVTEGAFKSTFMTLPAPLKFPKEVTRKRRRQ

SEQ ID NO: 9232 - DNA, 1315 bp, Zea mays subsp. mays
  misc_feature (1)..(1315): Ceres Seq. ID no. 15180636
  misc_feature: MA Experiment ID: 108523 Result: Up-regulated in Transcription
  misc_feature: MA Experiment 108523 PARAMETER Experiment Name: Zm_42deg_Heat_P Parameter: Age (day) Value: 8
  misc_feature: MA Experiment 108523 PARAMETER Experiment Name: Zm_42deg_Heat_P Parameter: Organism Value: Zea mays
  misc_feature: MA Experiment 108523 PARAMETER Experiment Name: Zm_42deg_Heat_P Parameter: Plant Line Value: 35A19
  misc_feature: MA Experiment 108523 PARAMETER Experiment Name: Zm_42deg_Heat_P Parameter: Temperature (deg C) Value: 42 vs. 22
  misc_feature: MA Experiment 108523 PARAMETER Experiment Name: Zm_42deg_Heat_P Parameter: Timepoint (hr) Value: 6
  misc_feature: MA Experiment 108523 PARAMETER Experiment Name: Zm_42deg_Heat_P Parameter: Tissue Value: Aerial
  misc_feature: MA Experiment ID: 108527 Result: Up-regulated in Transcription
  misc_feature: MA Experiment 108527 PARAMETER Experiment Name: Zm_5mM_NO_P Parameter: Age (day) Value: 8
  misc_feature: MA Experiment 108527 PARAMETER Experiment Name: Zm_5mM_NO_P Parameter: Organism Value: Zea mays
  misc_feature: MA Experiment 108527 PARAMETER Experiment Name: Zm_5mM_NO_P Parameter: Plant Line Value: 35A19
  misc_feature: MA Experiment 108527 PARAMETER Experiment Name: Zm_5mM_NO_P Parameter: Timepoint (hr) Value: 6
  misc_feature: MA Experiment 108527 PARAMETER Experiment Name: Zm_5mM_NO_P Parameter: Tissue Value: Aerial
  misc_feature: MA Experiment 108527 PARAMETER Experiment Name: Zm_5mM_NO_P Parameter: Treatment Value: 5mM NO vs. No Treatment
  misc_feature: MA Experiment ID: 108528 Result: Up-regulated in Transcription
  misc_feature: MA Experiment 108528 PARAMETER Experiment Name: Zm_Imbibed_Seeds_P Parameter: Age (day) Value: 5 vs. 2
  misc_feature: MA Experiment 108528 PARAMETER Experiment Name: Zm_Imbibed_Seeds_P Parameter: Organism Value: Zea mays
  misc_feature: MA Experiment 108528 PARAMETER Experiment Name: Zm_Imbibed_Seeds_P Parameter: Plant Line Value: 35A19
  misc_feature: MA Experiment 108528 PARAMETER Experiment Name: Zm_Imbibed_Seeds_P Parameter: Tissue Value: Aerial vs. Embryo
  misc_feature: MA Experiment ID: 108529 Result: Up-regulated in Transcription
  misc_feature: MA Experiment 108529 PARAMETER Experiment Name: Zm_Imbibed_Seeds_P Parameter: Age (day) Value: 5 vs. 2
  misc_feature: MA Experiment 108529 PARAMETER Experiment Name: Zm_Imbibed_Seeds_P Parameter: Organism Value: Zea mays
  misc_feature: MA Experiment 108529 PARAMETER Experiment Name: Zm_Imbibed_Seeds_P Parameter: Plant Line Value: 35A19
  misc_feature: MA Experiment 108529 PARAMETER Experiment Name: Zm_Imbibed_Seeds_P Parameter: Tissue Value: Roots vs. Embryo
  misc_feature: MA Experiment ID: 108530 Result: Up-regulated in Transcription
  misc_feature: MA Experiment 108530 PARAMETER Experiment Name: Zm_Imbibed_Seeds_P Parameter: Age (day) Value: 6 vs. 2
  misc_feature: MA Experiment 108530 PARAMETER Experiment Name: Zm_Imbibed_Seeds_P Parameter: Organism Value: Zea mays
  misc_feature: MA Experiment 108530 PARAMETER Experiment Name: Zm_Imbibed_Seeds_P Parameter: Plant Line Value: 35A19
  misc_feature: MA Experiment 108530 PARAMETER Experiment Name: Zm_Imbibed_Seeds_P Parameter: Tissue Value: Aerial vs. Embryo
  misc_feature: MA Experiment ID: 108533 Result: Up-regulated in Transcription
  misc_feature: MA Experiment 108533 PARAMETER Experiment Name: Zm_4deg_Cold_P Parameter: Age (hr) Value: 8
  misc_feature: MA Experiment 108533 PARAMETER Experiment Name: Zm_4deg_Cold_P Parameter: Organism Value: Zea mays
  misc_feature: MA Experiment 108533 PARAMETER Experiment Name: Zm_4deg_Cold_P Parameter: Plant Line Value: 35A19
  misc_feature: MA Experiment 108533 PARAMETER Experiment Name: Zm_4deg_Cold_P Parameter: Temperature (deg C) Value: 4 vs. 22
  misc_feature: MA Experiment 108533 PARAMETER Experiment Name: Zm_4deg_Cold_P Parameter: Timepoint (hr) Value: 1
  misc_feature: MA Experiment 108533 PARAMETER Experiment Name: Zm_4deg_Cold_P Parameter: Tissue Value: Aerial
  misc_feature: MA Experiment ID: 108534 Result: Up-regulated in Transcription
  misc_feature: MA Experiment 108534 PARAMETER Experiment Name: Zm_4deg_Cold_P Parameter: Age (hr) Value: 8
  misc_feature: MA Experiment 108534 PARAMETER Experiment Name: Zm_4deg_Cold_P Parameter: Organism Value: Zea mays
  misc_feature: MA Experiment 108534 PARAMETER Experiment Name: Zm_4deg_Cold_P Parameter: Plant Line Value: 35A19
  misc_feature: MA Experiment 108534 PARAMETER Experiment Name: Zm_4deg_Cold_P Parameter: Temperature (deg C) Value: 4 vs. 22
  misc_feature: MA Experiment 108534 PARAMETER Experiment Name: Zm_4deg_Cold_P Parameter: Timepoint (hr) Value: 6
  misc_feature: MA Experiment 108534 PARAMETER Experiment Name: Zm_4deg_Cold_P Parameter: Tissue Value: Aerial
  misc_feature: MA Experiment ID: 108542 Result: Up-regulated in Transcription
  misc_feature: MA Experiment 108542 PARAMETER Experiment Name: Zm_150mM_NaCl_P Parameter: Age (day) Value: 8
  misc_feature: MA Experiment 108542 PARAMETER Experiment Name: Zm_150mM_NaCl_P Parameter: Organism Value: Zea mays
  misc_feature: MA Experiment 108542 PARAMETER Experiment Name: Zm_150mM_NaCl_P Parameter: Plant Line Value: 35A19
  misc_feature: MA Experiment 108542 PARAMETER Experiment Name: Zm_150mM_NaCl_P Parameter: Timepoint (hr) Value: 6
  misc_feature: MA Experiment 108542 PARAMETER Experiment Name: Zm_150mM_NaCl_P Parameter: Tissue Value: Aerial
  misc_feature: MA Experiment 108542 PARAMETER Experiment Name: Zm_150mM_NaCl_P Parameter: Treatment Value: 150mM NaCl vs. No Treatment
  misc_feature: MA Experiment ID: 108543 Result: Down-regulated in Transcription
  misc_feature: MA Experiment ID: 108547 Result: Up-regulated in Transcription
  misc_feature: MA Experiment 108547 PARAMETER Experiment Name: Zm_Imbibed_Seeds_P Parameter: Age (day) Value: 4 vs. 2
  misc_feature: MA Experiment 108547 PARAMETER Experiment Name: Zm_Imbibed_Seeds_P Parameter: Organism Value: Zea mays
  misc_feature: MA Experiment 108547 PARAMETER Experiment Name: Zm_Imbibed_Seeds_P Parameter: Plant Line Value: 35A19
  misc_feature: MA Experiment 108547 PARAMETER Experiment Name: Zm_Imbibed_Seeds_P Parameter: Tissue Value: Aerial vs. Embryo
  misc_feature: MA Experiment ID: 108548 Result: Down-regulated in Transcription
  misc_feature: MA Experiment 108548 PARAMETER Experiment Name: Zm_20uM_KNO3_H-to-L_P Parameter: Age (day) Value: 11
  misc_feature: MA Experiment 108548 PARAMETER Experiment Name: Zm_20uM_KNO3_H-to-L_P Parameter: Organism Value: Zea mays
  misc_feature: MA Experiment 108548 PARAMETER Experiment Name: Zm_20uM_KNO3_H-to-L_P Parameter: Plant Line Value: 35A19
  misc_feature: MA Experiment 108548 PARAMETER Experiment Name: Zm_20uM_KNO3_H-to-L_P Parameter: Timepoint (hr) Value: 4
  misc_feature: MA Experiment 108548 PARAMETER Experiment Name: Zm_20uM_KNO3_H-to-L_P Parameter: Tissue Value: Roots
  misc_feature: MA Experiment 108548 PARAMETER Experiment Name: Zm_20uM_KNO3_H-to-L_P Parameter: Treatment Value: 20uM KNO3 vs. 60mM KNO3
  misc_feature: MA Experiment ID: 108689 Result: Down-regulated in Transcription
  misc_feature: MA Experiment 108689 PARAMETER Experiment Name: Zm_Drought_Roots_P Parameter: Age (day) Value: 9
  misc_feature: MA Experiment 108689 PARAMETER Experiment Name: Zm_Drought_Roots_P Parameter: Organism Value: Zea mays
  misc_feature: MA Experiment 108689 PARAMETER Experiment Name: Zm_Drought_Roots_P Parameter: Plant Line Value: 35A19
  misc_feature: MA Experiment 108689 PARAMETER Experiment Name: Zm_Drought_Roots_P Parameter: Timepoint (hr) Value: 24
  misc_feature: MA Experiment 108689 PARAMETER Experiment Name: Zm_Drought_Roots_P Parameter: Tissue Value: Roots
  misc_feature: MA Experiment 108689 PARAMETER Experiment Name: Zm_Drought_Roots_P Parameter: Treatment Value: Drought vs. No Drought
  misc_feature: MA Experiment ID: 20000492 Result: Up-regulated in Transcription
  misc_feature: MA Experiment 20000492 PARAMETER Experiment Name: Zm_Hybrid_Seed_Dev_P Parameter: DAP Value: 12
  misc_feature: MA Experiment 20000492 PARAMETER Experiment Name: Zm_Hybrid_Seed_Dev_P Parameter: Organism Value: Zea mays
  misc_feature: MA Experiment 20000492 PARAMETER Experiment Name: Zm_Hybrid_Seed_Dev_P Parameter: Plant Line Value: 35A19
  misc_feature: MA Experiment 20000492 PARAMETER Experiment Name: Zm_Hybrid_Seed_Dev_P Parameter: Tissue Value: Fert Kernel vs. Unfert Floret
  misc_feature: MA Experiment ID: 20000532 Result: Up-regulated in Transcription
  misc_feature: MA Experiment 20000532 PARAMETER Experiment Name: Zm_0.001percent_MeJA_P Parameter: Age (day) Value: 10
  misc_feature: MA Experiment 20000532 PARAMETER Experiment Name: Zm_0.001percent_MeJA_P Parameter: Organism Value: Zea mays
  misc_feature: MA Experiment 20000532 PARAMETER Experiment Name: Zm_0.001percent_MeJA_P Parameter: Plant Line Value: 35A19
  misc_feature: MA Experiment 20000532 PARAMETER Experiment Name: Zm_0.001percent_MeJA_P Parameter: Timepoint (hr) Value: 48
  misc_feature: MA Experiment 20000532 PARAMETER Experiment Name: Zm_0.001percent_MeJA_P Parameter: Tissue Value: Aerial
  misc_feature: MA Experiment 20000532 PARAMETER Experiment Name: Zm_0.001percent_MeJA_P Parameter: Treatment Value: 0.001percent MeJA vs. No Treatment
  misc_feature: MA Experiment ID: 20000533 Result: Up-regulated in Transcription
  misc_feature: MA Experiment 20000533 PARAMETER Experiment Name: Zm_0.001percent_MeJA_P Parameter: Age (day) Value: 11
  misc_feature: MA Experiment 20000533 PARAMETER Experiment Name: Zm_0.001percent_MeJA_P Parameter: Organism Value: Zea mays
  misc_feature: MA Experiment 20000533 PARAMETER Experiment Name: Zm_0.001percent_MeJA_P Parameter: Plant Line Value: 35A19
  misc_feature: MA Experiment 20000533 PARAMETER Experiment Name: Zm_0.001percent_MeJA_P Parameter: Timepoint (hr) Value: 72
  misc_feature: MA Experiment 20000533 PARAMETER Experiment Name: Zm_0.001percent_MeJA_P Parameter: Tissue Value: Aerial
  misc_feature: MA Experiment 20000533 PARAMETER Experiment Name: Zm_0.001percent_MeJA_P Parameter: Treatment Value: 0.001percent MeJA vs. No Treatment
  misc_feature: MA Experiment ID: 20000626 Result: Down-regulated in Transcription
  misc_feature: MA Experiment 20000626 PARAMETER Experiment Name: Zm_Herbicide-Treatments_P Parameter: Timepoint (hr) Value: 12
  misc_feature: MA Experiment 20000626 PARAMETER Experiment Name: Zm_Herbicide-Treatments_P Parameter: Tissue Value: Aerial
  misc_feature: MA Experiment 20000626 PARAMETER Experiment Name: Zm_Herbicide-Treatments_P Parameter: Treatment Value: Roundup vs. No Treatment
catcctcgccgacttcctcggccgcgggatcttcaacgtggacggggacgcctggctgttccagcgcaagctcgcggcggccgagctggtgtcgccggcgctgcgcgccttcgcggtgcgcgtggtggcgtccgagctgcggggccggctcatccccctgctccgctctgctgcctgtgcctccggccgcgagggtggaggaggaggaggaggaggaggcagggtcctggacctgcaggacgtgttccgccgcttcgccttcgactgcatctgcaagatctccttcggcctcgaccctggctgcctgcagctgtcgatgccggtgtcgtcgttcgaggacgccttcgacacggcctccacgctctccgccaggcgcgccaccgcgcccatgcacgtcgtctggaagctgaagcgcctgctcaacttgggggacgagaggaggctccgggacgcggtgcacctcgtggacgcgctcgccgcggaggtgatccggcagcggcgcaagctcgggggcgccgccagctcgggcagcgacctcctgtcgcgcttcatggggtccatcgacgacgactagtacctccgcgacatcggggtcagcttcatgctggacggccgcgacaccgtggcctcggcgctgaccgccttcttcctgctcctctccgaccacccggaggtcgcggccgccatccgggacgaggccgcccgcgtcgccggcgacgacgacgacgacgacgggcggctcacggcctccgccttcggcaagctcaagggcatgcagtacgtgcacgcggcgctgtacgagagcatgcggctgttcccgccggtgcagttcgactccaagttcgcggcgggcgacgacacgctcccggacggcacggcggtggcgaagggcacgcgggtgacctaccacgcctacgccatggggcggatggagtccgtgtggggccccgactgcggcgagttccggcccgagcggtggctccgggacgggcgcttcgtgcccgagagcccgtacaggtaccccgtgttccaggccggcgcgcgcgtgtgcgtgggcaaggagctggccctgatggagatgaaggccgtgatcgtggccgtggtccggggcttcgacatcgaggcggtcggacggagctcccgccggcccaggttcgcgccggggctgaccgccacgttcgcgggcggcctgccggtgcgggtgcgccggcgagcacgtgcgagcgggcacaagcgcacaacccgccaatgtgatgaaacggaataaaaagaagaaaaaaaatactgctgctggtgtcatccaggattcgtcctc

SEQ ID NO: 9233 - protein, 417 aa, Zea mays subsp. mays
  peptide (1)..(417): Ceres Seq. ID no. 15180637
HPRRLPRPRDLQRGRGRLAVPAQARGGRAGVAGAARLRGARGGVRAAGPAHPPAPLCCLCLRPRGWRRRRRRRQGPGPAGRVPPLRLRLHLQDLLRPRPWLPAAVDAGVVVRGRLRHGLHALRQARHRAHARRLEAEAPAQLGGREEAPGRGAPRGRARRGGDPAAAQARGRRQLGQRPPVALHGVHRRRLVPPRHRGQLHAGRPRHRGLGADRLLPAPLRPPGGRGRHPGRGRPRRRRRRRRRRAAHGLRLRQAQGHAVRARGAVREHAAVPAGAVRLQVRGGRRHAPGRHGGGEGHAGDLPRLRHGADGVRVGPRLRRVPARAVAPGRALRAREPVQVPRVPGRRARVRGQGAGPDGDEGRDRGRGPGLRHRGGRTELPPAQVRAGADRHVRGRPAGAGAPASTCERAQAHNPPM

SEQ ID NO: 9234 - protein, 221 aa, Zea mays subsp. mays
  peptide (1)..(221): Ceres Seq. ID no. 15180638
  misc_feature (1)..(210): Homolog of NCBI NO: 34908446 NR Description: putative cytochrome P450 [Oryza sativa (japonica group)] >gi|15290017|dbj|BAB63711.1| putative cytochrome P450
  misc_feature (1)..(205): Homolog of NCBI NO: 15226228 NR Description: cytochrome P450, putative [Arabidopsis thaliana]
  misc_feature (1)..(205): Homolog of NCBI NO: 15228396 NR Description: cytochrome P450 family [Arabidopsis thaliana]
  misc_feature (1)..(204): Homolog of NCBI NO: 34902476 NR Description: Putative cytochrome P450 [Oryza sativa (japonica group)] >gi|22748335|gb|AAN05337.1| Putative cytochrome P450
  misc_feature (1)..(204): Homolog of NCBI NO: 15242759 NR Description: cytochrome P450, putative [Arabidopsis thaliana]
  misc_feature (1)..(204): Homolog of NCBI NO: 26452145 NR Description: putative cytochrome P450 [Arabidopsis thaliana]
  misc_feature (1)..(204): Homolog of NCBI NO: 21536522 NR Description: cytochrome P450-like protein [Arabidopsis
  misc_feature (1)..(204): Homolog of NCBI NO: 34909022 NR Description: cytochrome P450-like protein [Oryza sativa
  misc_feature (1)..(205): Homolog of NCBI NO: 15228981 NR Description: cytochrome P450, putative [Arabidopsis thaliana]
  misc_feature (1)..(204): Homolog of NCBI NO: 34909030 NR Description: cytochrome P450-like protein [Oryza sativa
MLDGRDTVASALTAFFLLLSDHPEVAAAIRDEAARVAGDDDDDDGRLTASAFGKLKGMQYVHAALYESMRLFPPVQFDSKFAAGDDTLPDGTAVAKGTRVTYHAYAMGRMESVWGPDCGEFRPERWLRDGRFVPESPYRYPVFQAGARVCVGKELALMEMKAVIVAVVRGFDIEAVGRSSRRPRFAPGLTATFAGGLPVRVRRRARASGHKRTTRQCDETE

SEQ ID NO: 9235 - DNA, 1627 bp, Zea mays subsp. mays
  misc_feature (1)..(1627): Ceres Seq. ID no. 12386885
  misc_feature: MA Experiment ID: 108522 Result: Up-regulated in Transcription
  misc_feature: MA Experiment 108522 PARAMETER Experiment Name: Zm_42deg_Heat_P Parameter: Age (day) Value: 8
  misc_feature: MA Experiment 108522 PARAMETER Experiment Name: Zm_42deg_Heat_P Parameter: Organism Value: Zea mays
  misc_feature: MA Experiment 108522 PARAMETER Experiment Name: Zm_42deg_Heat_P Parameter: Plant Line Value: 35A19
  misc_feature: MA Experiment 108522 PARAMETER Experiment Name: Zm_42deg_Heat_P Parameter: Temperature (deg C) Value: 42 vs. 22
  misc_feature: MA Experiment 108522 PARAMETER Experiment Name: Zm_42deg_Heat_P Parameter: Timepoint (hr) Value: 1
  misc_feature: MA Experiment 108522 PARAMETER Experiment Name: Zm_42deg_Heat_P Parameter: Tissue Value: Aerial
  misc_feature: MA Experiment ID: 108523 Result: Up-regulated in Transcription
  misc_feature: MA Experiment 108523 PARAMETER Experiment Name: Zm_42deg_Heat_P Parameter: Age (day) Value: 8
  misc_feature: MA Experiment 108523 PARAMETER Experiment Name: Zm_42deg_Heat_P Parameter: Organism Value: Zea mays
  misc_feature: MA Experiment 108523 PARAMETER Experiment Name: Zm_42deg_Heat_P Parameter: Plant Line Value: 35A19
  misc_feature: MA Experiment 108523 PARAMETER Experiment Name: Zm_42deg_Heat_P Parameter: Temperature (deg C) Value: 42 vs. 22
  misc_feature: MA Experiment 108523 PARAMETER Experiment Name: Zm_42deg_Heat_P Parameter: Timepoint (hr) Value: 6
  misc_feature: MA Experiment 108523 PARAMETER Experiment Name: Zm_42deg_Heat_P Parameter: Tissue Value: Aerial
  misc_feature: MA Experiment ID: 108529 Result: Down-regulated in Transcription
  misc_feature: MA Experiment 108529 PARAMETER Experiment Name: Zm_Imbibed_Seeds_P Parameter: Age (day) Value: 5 vs. 2
  misc_feature: MA Experiment 108529 PARAMETER Experiment Name: Zm_Imbibed_Seeds_P Parameter: Organism Value: Zea mays
  misc_feature: MA Experiment 108529 PARAMETER Experiment Name: Zm_Imbibed_Seeds_P Parameter: Plant Line Value: 35A19
  misc_feature: MA Experiment 108529 PARAMETER Experiment Name: Zm_Imbibed_Seeds_P Parameter: Tissue Value: Roots vs. Embryo
  misc_feature: MA Experiment ID: 108544 Result: Down-regulated in Transcription
  misc_feature: MA Experiment ID: 108546 Result: Down-regulated in Transcription
  misc_feature: MA Experiment 108546 PARAMETER Experiment Name: Zm_Imbibed_Seeds_P Parameter: Age (day) Value: 3 vs. 2
  misc_feature: MA Experiment 108546 PARAMETER Experiment Name: Zm_Imbibed_Seeds_P Parameter: Organism Value: Zea mays
  misc_feature: MA Experiment 108546 PARAMETER Experiment Name: Zm_Imbibed_Seeds_P Parameter: Plant Line Value: 35A19
  misc_feature: MA Experiment 108546 PARAMETER Experiment Name: Zm_Imbibed_Seeds_P Parameter: Tissue Value: Roots vs. Embryo
  misc_feature: MA Experiment ID: 108556 Result: Up-regulated in Transcription
  misc_feature: MA Experiment 108556 PARAMETER Experiment Name: Zm_Drought_P Parameter: Age (day) Value: 9
  misc_feature: MA Experiment 108556 PARAMETER Experiment Name: Zm_Drought_P Parameter: Organism Value: Zea mays
  misc_feature: MA Experiment 108556 PARAMETER Experiment Name: Zm_Drought_P Parameter: Plant Line Value: 35A19
  misc_feature: MA Experiment 108556 PARAMETER Experiment Name: Zm_Drought_P Parameter: Timepoint (hr) Value: 24
  misc_feature: MA Experiment 108556 PARAMETER Experiment Name: Zm_Drought_P Parameter: Tissue Value: Aerial
  misc_feature: MA Experiment 108556 PARAMETER Experiment Name: Zm_Drought_P Parameter: Treatment Value: Drought vs. No Drought
  misc_feature: MA Experiment ID: 20000477 Result: Down-regulated in Transcription
  misc_feature: MA Experiment 20000477 PARAMETER Experiment Name: Zm_5mM_SA_P Parameter: Age (day) Value: 10
  misc_feature: MA Experiment 20000477 PARAMETER Experiment Name: Zm_5mM_SA_P Parameter: Organism Value: Zea mays
  misc_feature: MA Experiment 20000477 PARAMETER Experiment Name: Zm_5mM_SA_P Parameter: Plant Line Value: 35A19
  misc_feature: MA Experiment 20000477 PARAMETER Experiment Name: Zm_5mM_SA_P Parameter: Timepoint (hr) Value: 48
  misc_feature: MA Experiment 20000477 PARAMETER Experiment Name: Zm_5mM_SA_P Parameter: Tissue Value: Aerial
  misc_feature: MA Experiment 20000477 PARAMETER Experiment Name: Zm_5mM_SA_P Parameter: Treatment Value: 5mM SA vs. No Treatment
  misc_feature: MA Experiment ID: 20000535 Result: Up-regulated in Transcription
  misc_feature: MA Experiment 20000535 PARAMETER Experiment Name: Zm_Hybrid_Seed_Dev_P Parameter: DAP Value: 30 vs. 12
  misc_feature: MA Experiment 20000535 PARAMETER Experiment Name: Zm_Hybrid_Seed_Dev_P Parameter: Organism Value: Zea mays
  misc_feature: MA Experiment 20000535 PARAMETER Experiment Name: Zm_Hybrid_Seed_Dev_P Parameter: Plant Line Value: 35A19
  misc_feature: MA Experiment 20000535 PARAMETER Experiment Name: Zm_Hybrid_Seed_Dev_P Parameter: Tissue Value: Embryo vs. Unfert Floret
aatcctccgaccgagacgaggcagaaaccttcctcgatctccccttccccttccctcgctgtaattccatctccgtctccatctcgttcccaccacgccgctccctgtcgcggtgtcgccattgccccggcttccaagcaaaatcccgcttgcctcgccccaagcattcctgctttcacccggccgccactcttccccagtccccgccactcaaggaaggcggaggattttatctagtcttgcagcgcggccgtctccgtcccgccttctgcgcctcctgtggcgtttggagcatcttccaattttaagctgacactacttgaacttaatgcggctctacgcacctgcgctctgtctgctgcgatcaagcacacatccccaccctaatcagttccgtgcaggattcacgcagagcatggcctcctggaagtgctcgcactcgccgtcaagcccgtaccttgcgaagtcgggtttagtcgattcttctcttaacaggaatgtaaagtcttctcagccacaaagtataaaatactttgtcagcttaatgggccagcagttccgttgcggattgtcaaccagggagggtagcctaagtgtaaagcttgacattccttcacacgaaaaatcaaggataggctggaactggaaaaacatgcatcaaaagataggaggtgtagctggtggactctgctttggtttctcggttactggagtagcaagtgccgaggttcctatcattagagtcaaagacaatgccgagacttcgtcatcatctaccagttcaactcatggaaaggaagtgtacacagattattctgtcacaggtattcctggagatggaaggtgtttattccgctccgtggtgcatggtgcatgcattagatcagggagaccaatacctaatgaagatcttcagagaaaactagctgatgaattgagagcaacggtcgcagatgaatttgtcaagaggcggaaagagaccgaatggttcgttgagggggattttgatacatatgtatcccatattagggagccacatgtgtggggaggcgagccagaattgttcatggcgtcccatgttcttcagatgccaataacggtttacatgcgcgacgaggatgctggcggtctgatagcaatcgcagagtatggccagcagtatggtaaagaagacccaatccaagtcctgtatcatggttttggccattacgacgctctacagatcccagcaaaggttggatcgaagaggaaactgtagacgctgcgcgccgcgagcttgagagaaaattcggaaacaataagctgcatgcatgcatgcattgagatgtgtacctgtacaaaatgtcaatccaagcttcggatgctgaatctgtacaccatgccctgaaaaccgcacttgtgtagtttgtgtgactggtacagtagaagatagaaggggcgccggggacccatttaccatactctgatgactgcaagtacgttcatttagagtgaagtaagctacacagctcaccagttggtccagacgtccagtgagcgtacatgttttgaatgaggggcatgtggagagcacatagacagttgagtccggcactctcctggatcggaattgaattttatttgcagc

SEQ ID NO: 9236 - protein, 309 aa, Zea mays subsp. mays
  peptide (1)..(309): Ceres Seq. ID no. 12386886
  misc_feature (168)..(294): Pfam Name: OTU-like cysteine protease Pfam Description: OTU-like cysteine protease
  misc_feature (100)..(309): Homolog of NCBI NO: 18410816 NR Description: auxin-regulated protein; protein id: At3g57810.1, by cDNA: 101256., supported by cDNA: 29384. [Arabidopsis
  misc_feature (100)..(309): Homolog of NCBI NO: 11280708 NR Description: hypothetical protein T10K17.20 - Arabidopsis >gi|6729524|emb|CAB67609.1| putative protein [Arabidopsis
  misc_feature (162)..(281): Homolog of NCBI NO: 34902010 NR Description: unknown protein [Oryza sativa (japonica
  misc_feature (143)..(278): Homolog of NCBI NO: 30687357 NR Description: auxin-regulated protein -related [Arabidopsis
MRLYAPALCLLRSSTHPHPNQFRAGFTQSMASWKCSHSPSSPYLAKSGLVDSSLNRNVKSSQPQSIKYFVSLMGQQFRCGLSTREGSLSVKLDIPSHEKSRIGWNWKNMHQKIGGVAGGLCFGFSVTGVASAEVPIIRVKDNAETSSSSTSSTHGKEVYTDYSVTGIPGDGRCLFRSVVHGACIRSGRPIPNEDLQRKLADELRATVADEFVKRRKETEWFVEGDFDTYVSHIREPHVWGGEPELFMASHVLQMPITVYMRDEDAGGLIAIAEYGQQYGKEDPIQVLYHGFGHYDALQIPAKVGSKRKL

SEQ ID NO: 9237 - protein, 280 aa, Zea mays subsp. mays
  peptide (1)..(280): Ceres Seq. ID no. 12386887
  misc_feature (139)..(265): Pfam Name: OTU-like cysteine protease Pfam Description: OTU-like cysteine protease
  misc_feature (71)..(280): Homolog of NCBI NO: 18410816 NR Description: auxin-regulated protein; protein id: At3g57810.1, by cDNA: 101256., supported by cDNA: 29384. [Arabidopsis
  misc_feature (71)..(280): Homolog of NCBI NO: 11280708 NR Description: hypothetical protein T10K17.20 - Arabidopsis >gi|6729524|emb|CAB67609.1| putative protein [Arabidopsis
  misc_feature (133)..(252): Homolog of NCBI NO: 34902010 NR Description: unknown protein [Oryza sativa (japonica
  misc_feature (114)..(249): Homolog of NCBI NO: 30687357 NR Description: auxin-regulated protein -related [Arabidopsis
MASWKCSHSPSSPYLAKSGLVDSSLNRNVKSSQPQSIKYFVSLMGQQFRCGLSTREGSLSVKLDIPSHEKSRIGWNWKNMHQKIGGVAGGLCFGFSVTGVASAEVPIIRVKDNAETSSSSTSSTHGKEVYTDYSVTGIPGDGRCLFRSVVHGACIRSGRPIPNEDLQRKLADELRATVADEFVKRRKETEWFVEGDFDTYVSHIREPHVWGGEPELFMASHVLQMPITVYMRDEDAGGLIAIAEYGQQYGKEDPIQVLYHGFGHYDALQIPAKVGSKRKL

SEQ ID NO: 9238 - protein, 237 aa, Zea mays subsp. mays
  peptide (1)..(237): Ceres Seq. ID no. 12386888
  misc_feature (96)..(222): Pfam Name: OTU-like cysteine protease Pfam Description: OTU-like cysteine protease
  misc_feature (28)..(237): Homolog of NCBI NO: 18410816 NR Description: auxin-regulated protein; protein id: At3g57810.1, by cDNA: 101256., supported by cDNA: 29384. [Arabidopsis
  misc_feature (28)..(237): Homolog of NCBI NO: 11280708 NR Description: hypothetical protein T10K17.20 - Arabidopsis >gi|6729524|emb|CAB67609.1| putative protein [Arabidopsis
  misc_feature (90)..(209): Homolog of NCBI NO: 34902010 NR Description: unknown protein [Oryza sativa (japonica
  misc_feature (71)..(206): Homolog of NCBI NO: 30687357 NR Description: auxin-regulated protein -related [Arabidopsis
MGQQFRCGLSTREGSLSVKLDIPSHEKSRIGWNWKNMHQKIGGVAGGLCFGFSVTGVASAEVPIIRVKDNAETSSSSTSSTHGKEVYTDYSVTGIPGDGRCLFRSVVHGACIRSGRPIPNEDLQRKLADELRATVADEFVKRRKETEWFVEGDFDTYVSHIREPHVWGGEPELFMASHVLQMPITVYMRDEDAGGLIAIAEYGQQYGKEDPIQVLYHGFGHYDALQIPAKVGSKRKL

SEQ ID NO: 9239 - DNA, 768 bp, Zea mays subsp. mays
  misc_feature (1)..(768): Ceres Seq. ID no. 12412369
  misc_feature: MA Experiment ID: 108522 Result: Down-regulated in Transcription
  misc_feature: MA Experiment 108522 PARAMETER Experiment Name: Zm_42deg_Heat_P Parameter: Age (day) Value: 8
  misc_feature: MA Experiment 108522 PARAMETER Experiment Name: Zm_42deg_Heat_P Parameter: Organism Value: Zea mays
  misc_feature: MA Experiment 108522 PARAMETER Experiment Name: Zm_42deg_Heat_P Parameter: Plant Line Value: 35A19
  misc_feature: MA Experiment 108522 PARAMETER Experiment Name: Zm_42deg_Heat_P Parameter: Temperature (deg C) Value: 42 vs. 22
  misc_feature: MA Experiment 108522 PARAMETER Experiment Name: Zm_42deg_Heat_P Parameter: Timepoint (hr) Value: 1
  misc_feature: MA Experiment 108522 PARAMETER Experiment Name: Zm_42deg_Heat_P Parameter: Tissue Value: Aerial
  misc_feature: MA Experiment ID: 108523 Result: Down-regulated in Transcription
  misc_feature: MA Experiment 108523 PARAMETER Experiment Name: Zm_42deg_Heat_P Parameter: Age (day) Value: 8
  misc_feature: MA Experiment 108523 PARAMETER Experiment Name: Zm_42deg_Heat_P Parameter: Organism Value: Zea mays
  misc_feature: MA Experiment 108523 PARAMETER Experiment Name: Zm_42deg_Heat_P Parameter: Plant Line Value: 35A19
  misc_feature: MA Experiment 108523 PARAMETER Experiment Name: Zm_42deg_Heat_P Parameter: Temperature (deg C) Value: 42 vs. 22
  misc_feature: MA Experiment 108523 PARAMETER Experiment Name: Zm_42deg_Heat_P Parameter: Timepoint (hr) Value: 6
  misc_feature: MA Experiment 108523 PARAMETER Experiment Name: Zm_42deg_Heat_P Parameter: Tissue Value: Aerial
  misc_feature: MA Experiment ID: 108535 Result: Down-regulated in Transcription
  misc_feature: MA Experiment 108535 PARAMETER Experiment Name: Zm_Meristem_P Parameter: Age (day) Value: 8
  misc_feature: MA Experiment 108535 PARAMETER Experiment Name: Zm_Meristem_P Parameter: Organism Value: Zea mays
  misc_feature: MA Experiment 108535 PARAMETER Experiment Name: Zm_Meristem_P Parameter: Plant Line Value: 35A19
  misc_feature: MA Experiment 108535 PARAMETER Experiment Name: Zm_Meristem_P Parameter: Tissue Value: Root Meristem vs. Above Root Meristem
  misc_feature: MA Experiment ID: 108543 Result: Up-regulated in Transcription
  misc_feature: MA Experiment ID: 108556 Result: Down-regulated in Transcription
  misc_feature: MA Experiment 108556 PARAMETER Experiment Name: Zm_Drought_P Parameter: Age (day) Value: 9
  misc_feature: MA Experiment 108556 PARAMETER Experiment Name: Zm_Drought_P Parameter: Organism Value: Zea mays
  misc_feature: MA Experiment 108556 PARAMETER Experiment Name: Zm_Drought_P Parameter: Plant Line Value: 35A19
  misc_feature: MA Experiment 108556 PARAMETER Experiment Name: Zm_Drought_P Parameter: Timepoint (hr) Value: 24
  misc_feature: MA Experiment 108556 PARAMETER Experiment Name: Zm_Drought_P Parameter: Tissue Value: Aerial
  misc_feature: MA Experiment 108556 PARAMETER Experiment Name: Zm_Drought_P Parameter: Treatment Value: Drought vs. No Drought
  misc_feature: MA Experiment ID: 108559 Result: Down-regulated in Transcription
  misc_feature: MA Experiment 108559 PARAMETER Experiment Name: Zm_5mM_NO_P Parameter: Age (day) Value: 8
  misc_feature: MA Experiment 108559 PARAMETER Experiment Name: Zm_5mM_NO_P Parameter: Organism Value: Zea mays
  misc_feature: MA Experiment 108559 PARAMETER Experiment Name: Zm_5mM_NO_P Parameter: Plant Line Value: 35A19
  misc_feature: MA Experiment 108559 PARAMETER Experiment Name: Zm_5mM_NO_P Parameter: Timepoint (hr) Value: 12
  misc_feature: MA Experiment 108559 PARAMETER Experiment Name: Zm_5mM_NO_P Parameter: Tissue Value: Aerial
  misc_feature: MA Experiment 108559 PARAMETER Experiment Name: Zm_5mM_NO_P Parameter: Treatment Value: 5mM NO vs. No Treatment
  misc_feature: MA Experiment ID: 108597 Result: Down-regulated in Transcription
  misc_feature: MA Experiment 108597 PARAMETER Experiment Name: Zm_100uM_ABA_P Parameter: Age (day) Value: 9
  misc_feature: MA Experiment 108597 PARAMETER Experiment Name: Zm_100uM_ABA_P Parameter: Organism Value: Zea mays
  misc_feature: MA Experiment 108597 PARAMETER Experiment Name: Zm_100uM_ABA_P Parameter: Plant Line Value: 35A19
  misc_feature: MA Experiment 108597 PARAMETER Experiment Name: Zm_100uM_ABA_P Parameter: Timepoint (hr) Value: 24
  misc_feature: MA Experiment 108597 PARAMETER Experiment Name: Zm_100uM_ABA_P Parameter: Tissue Value: Aerial
  misc_feature: MA Experiment 108597 PARAMETER Experiment Name: Zm_100uM_ABA_P Parameter: Treatment Value: 100uM ABA vs. No Treatment
  misc_feature: MA Experiment ID: 20000477 Result: Down-regulated in Transcription
  misc_feature: MA Experiment 20000477 PARAMETER Experiment Name: Zm_5mM_SA_P Parameter: Age (day) Value: 10
  misc_feature: MA Experiment 20000477 PARAMETER Experiment Name: Zm_5mM_SA_P Parameter: Organism Value: Zea mays
  misc_feature: MA Experiment 20000477 PARAMETER Experiment Name: Zm_5mM_SA_P Parameter: Plant Line Value: 35A19
  misc_feature: MA Experiment 20000477 PARAMETER Experiment Name: Zm_5mM_SA_P Parameter: Timepoint (hr) Value: 48
  misc_feature: MA Experiment 20000477 PARAMETER Experiment Name: Zm_5mM_SA_P Parameter: Tissue Value: Aerial
  misc_feature: MA Experiment 20000477 PARAMETER Experiment Name: Zm_5mM_SA_P Parameter: Treatment Value: 5mM SA vs. No Treatment
  misc_feature: MA Experiment ID: 20000478 Result: Down-regulated in Transcription
  misc_feature: MA Experiment 20000478 PARAMETER Experiment Name: Zm_5mM_SA_P Parameter: Age (day) Value: 11
  misc_feature: MA Experiment 20000478 PARAMETER Experiment Name: Zm_5mM_SA_P Parameter: Organism Value: Zea mays
  misc_feature: MA Experiment 20000478 PARAMETER Experiment Name: Zm_5mM_SA_P Parameter: Plant Line Value: 35A19
  misc_feature: MA Experiment 20000478 PARAMETER Experiment Name: Zm_5mM_SA_P Parameter: Timepoint (hr) Value: 72
  misc_feature: MA Experiment 20000478 PARAMETER Experiment Name: Zm_5mM_SA_P Parameter: Tissue Value: Aerial
  misc_feature: MA Experiment 20000478 PARAMETER Experiment Name: Zm_5mM_SA_P Parameter: Treatment Value: 5mM SA vs. No Treatment
  misc_feature: MA Experiment ID: 20000479 Result: Down-regulated in Transcription
  misc_feature: MA Experiment 20000479 PARAMETER Experiment Name: Zm_Drought_P Parameter: Age (day) Value: 10
  misc_feature: MA Experiment 20000479 PARAMETER Experiment Name: Zm_Drought_P Parameter: Organism Value: Zea mays
  misc_feature: MA Experiment 20000479 PARAMETER Experiment Name: Zm_Drought_P Parameter: Plant Line Value: 35A19
  misc_feature: MA Experiment 20000479 PARAMETER Experiment Name: Zm_Drought_P Parameter: Timepoint (hr) Value: 48
  misc_feature: MA Experiment 20000479 PARAMETER Experiment Name: Zm_Drought_P Parameter: Tissue Value: Aerial
  misc_feature: MA Experiment 20000479 PARAMETER Experiment Name: Zm_Drought_P Parameter: Treatment Value: Drought vs. No Drought
  misc_feature: MA Experiment ID: 20000480 Result: Down-regulated in Transcription
  misc_feature: MA Experiment 20000480 PARAMETER Experiment Name: Zm_Drought_P Parameter: Age (day) Value: 11
  misc_feature: MA Experiment 20000480 PARAMETER Experiment Name: Zm_Drought_P Parameter: Organism Value: Zea mays
  misc_feature: MA Experiment 20000480 PARAMETER Experiment Name: Zm_Drought_P Parameter: Plant Line Value: 35A19
  misc_feature: MA Experiment 20000480 PARAMETER Experiment Name: Zm_Drought_P Parameter: Timepoint (hr) Value: 72
  misc_feature: MA Experiment 20000480 PARAMETER Experiment Name: Zm_Drought_P Parameter: Tissue Value: Aerial
  misc_feature: MA Experiment 20000480 PARAMETER Experiment Name: Zm_Drought_P Parameter: Treatment Value: Drought vs. No Drought
  misc_feature: MA Experiment ID: 20000535 Result: Down-regulated in Transcription
  misc_feature: MA Experiment 20000535 PARAMETER Experiment Name: Zm_Hybrid_Seed_Dev_P Parameter: DAP Value: 30 vs. 12
  misc_feature: MA Experiment 20000535 PARAMETER Experiment Name: Zm_Hybrid_Seed_Dev_P Parameter: Organism Value: Zea mays
  misc_feature: MA Experiment 20000535 PARAMETER Experiment Name: Zm_Hybrid_Seed_Dev_P Parameter: Plant Line Value: 35A19
  misc_feature: MA Experiment 20000535 PARAMETER Experiment Name: Zm_Hybrid_Seed_Dev_P Parameter: Tissue Value: Embryo vs. Unfert Floret
agtaccaccaacaaacttctttctcgccttgcatcggccgccggccctccatccaccgcaccagctagcaacgacgacacgctagccaggtagcgtagccgaccagcctccgcgcgcgcgggcactcagttcgccatggcgcgcctgctccgcgccgccgccggcctcgcgctcctcctggccgtccttgccccggcggcgtcggcgggcggcgacctggcccagctgggcgccgccgtcgtgacgcggcgcggcggcgagcggacgacgtgccgcggaggcacggtgggcgagtgcatggagtacctggacgtggacgcggagggcgaggccgacgtggcgggcatggccaccggcggcggcaagcgccgggtgctgcagggcggctccggctacatcggctacgacgcgctgcgcagggacaacgtgccgtgctcgcagcgcggcgcgtcctactacaactgccagcccggcgccgaggccaacccctactcgcgcggctgcagcgccatcacccagtgcaggggctgatgcctgcctgatgatttccgttccgtttcgtccccagctattagtcgggtcttcaatttaaagaagaagacatgcatggagcgatgtcgtcgtctttgctgtgcgcgctatagcctttctcgtccgcctgaggcacgcatgactcgtccgtcgattattgtgctgcagtggacatgtgtatgtgctcctgtttctagcatatccccttgctttcaggaagaaagtgaaagtaattat

SEQ ID NO: 9240 - protein, 131 aa, Zea mays subsp. mays
  peptide (1)..(131): Ceres Seq. ID no. 12412370
  misc_feature (63)..(131): Pfam Name: Rapid ALkalinization Factor (RALF) Pfam Description: Rapid ALkalinization Factor (RALF)
  misc_feature (7)..(131): Homolog of NCBI NO: 34902918 NR Description: unnamed protein product [Oryza sativa (japonica group)] >gi|6016877|dbj|BAA85220.1| unnamed protein product
  misc_feature (1)..(131): Homolog of NCBI NO: 34915066 NR Description: P0025H06.17 [Oryza sativa (japonica
  misc_feature (1)..(131): Homolog of NCBI NO: 34915062 NR Description: P0025H06.15 [Oryza sativa (japonica
  misc_feature (21)..(131): Homolog of NCBI NO: 34907152 NR Description: P0506E04.27 [Oryza sativa (japonica
  misc_feature (60)..(131): Homolog of NCBI NO: 37532832 NR Description: hypothetical protein [Oryza sativa (japonica group)] >gi|16905228|gb|AAL31098.1| hypothetical protein [Oryza >gi|20303619|gb|AAM19046.1| putative rapid alkalinization factor
  misc_feature (11)..(130): Homolog of NCBI NO: 16566316 NR Description: RALF precursor [Nicotiana tabacum]
  misc_feature (1)..(131): Homolog of NCBI NO: 28628205 NR Description: rapid alkalinization factor 2 precursor [Populus
  misc_feature (6)..(130): Homolog of NCBI NO: 18397246 NR Description: expressed protein; protein id: At3g05490.1, by cDNA: 9221. [Arabidopsis thaliana] >gi|7596763|gb|AAF64534.1| protein [Arabidopsis thaliana] >gi|21617970|gb|AAM67020.1| RALF
  misc_feature (8)..(130): Homolog of NCBI NO: 28628203 NR Description: rapid alkalinization factor 1 precursor [Populus
  misc_feature (31)..(130): Homolog of NCBI NO: 18414528 NR Description: Expressed protein; protein id: At4g15800.1, by cDNA: 5455. [Arabidopsis thaliana] >gi|21593878|gb|AAM65845.1|
MARLLRAAAGLALLLAVLAPAASAGGDLAQLGAAVVTRRGGERTTCRGGTVGECMEYLDVDAEGEADVAGMATGGGKRRVLQGGSGYIGYDALRRDNVPCSQRGASYYNCQPGAEANPYSRGCSAITQCRG

SEQ ID NO: 9241 - protein, 77 aa, Zea mays subsp. mays
  peptide (1)..(77): Ceres Seq. ID no. 12412371
  misc_feature (9)..(77): Pfam Name: Rapid ALkalinization Factor (RALF) Pfam Description: Rapid ALkalinization Factor (RALF)
  misc_feature (1)..(77): Homolog of NCBI NO: 34902918 NR Description: unnamed protein product [Oryza sativa (japonica group)] >gi|6016877|dbj|BAA85220.1| unnamed protein product
  misc_feature (1)..(77): Homolog of NCBI NO: 34915066 NR Description: P0025H06.17 [Oryza sativa (japonica
  misc_feature (1)..(77): Homolog of NCBI NO: 34915062 NR Description: P0025H06.15 [Oryza sativa (japonica
  misc_feature (1)..(77): Homolog of NCBI NO: 34907152 NR Description: P0506E04.27 [Oryza sativa (japonica
  misc_feature (6)..(77): Homolog of NCBI NO: 37532832 NR Description: hypothetical protein [Oryza sativa (japonica group)] >gi|16905228|gb|AAL31098.1| hypothetical protein [Oryza >gi|20303619|gb|AAM19046.1| putative rapid alkalinization factor
  misc_feature (1)..(76): Homolog of NCBI NO: 16566316 NR Description: RALF precursor [Nicotiana tabacum]
  misc_feature (1)..(77): Homolog of NCBI NO: 28628205 NR Description: rapid alkalinization factor 2 precursor [Populus
  misc_feature (1)..(76): Homolog of NCBI NO: 18397246 NR Description: expressed protein; protein id: At3g05490.1, by cDNA: 9221. [Arabidopsis thaliana] >gi|7596763|gb|AAF64534.1| protein [Arabidopsis thaliana] >gi|21617970|gb|AAM67020.1| RALF
  misc_feature (1)..(76): Homolog of NCBI NO: 28628203 NR Description: rapid alkalinization factor 1 precursor [Populus
  misc_feature (1)..(76): Homolog of NCBI NO: 18414528 NR Description: Expressed protein; protein id: At4g15800.1, by cDNA: 5455. [Arabidopsis thaliana] >gi|21593878|gb|AAM65845.1|
MEYLDVDAEGEADVAGMATGGGKRRVLQGGSGYIGYDALRRDNVPCSQRGASYYNCQPGAEANPYSRGCSAITQCRG

SEQ ID NO: 9242 - DNA, 1769 bp, Zea mays subsp. mays
  misc_feature (1)..(1769): Ceres Seq. ID no. 12484003
  misc_feature: MA Experiment ID: 108522 Result: Up-regulated in Transcription
  misc_feature: MA Experiment 108522 PARAMETER Experiment Name: Zm_42deg_Heat_P Parameter: Age (day) Value: 8
  misc_feature: MA Experiment 108522 PARAMETER Experiment Name: Zm_42deg_Heat_P Parameter: Organism Value: Zea mays
  misc_feature: MA Experiment 108522 PARAMETER Experiment Name: Zm_42deg_Heat_P Parameter: Plant Line Value: 35A19
  misc_feature: MA Experiment 108522 PARAMETER Experiment Name: Zm_42deg_Heat_P Parameter: Temperature (deg C) Value: 42 vs. 22
  misc_feature: MA Experiment 108522 PARAMETER Experiment Name: Zm_42deg_Heat_P Parameter: Timepoint (hr) Value: 1
  misc_feature: MA Experiment 108522 PARAMETER Experiment Name: Zm_42deg_Heat_P Parameter: Tissue Value: Aerial
  misc_feature: MA Experiment ID: 108530 Result: Up-regulated in Transcription
  misc_feature: MA Experiment 108530 PARAMETER Experiment Name: Zm_Imbibed_Seeds_P Parameter: Age (day) Value: 6 vs. 2
  misc_feature: MA Experiment 108530 PARAMETER Experiment Name: Zm_Imbibed_Seeds_P Parameter: Organism Value: Zea mays
  misc_feature: MA Experiment 108530 PARAMETER Experiment Name: Zm_Imbibed_Seeds_P Parameter: Plant Line Value: 35A19
  misc_feature: MA Experiment 108530 PARAMETER Experiment Name: Zm_Imbibed_Seeds_P Parameter: Tissue Value: Aerial vs. Embryo
  misc_feature: MA Experiment ID: 108535 Result: Down-regulated in Transcription
  misc_feature: MA Experiment 108535 PARAMETER Experiment Name: Zm_Meristem_P Parameter: Age (day) Value: 8
  misc_feature: MA Experiment 108535 PARAMETER Experiment Name: Zm_Meristem_P Parameter: Organism Value: Zea mays
  misc_feature: MA Experiment 108535 PARAMETER Experiment Name: Zm_Meristem_P Parameter: Plant Line Value: 35A19
  misc_feature: MA Experiment 108535 PARAMETER Experiment Name: Zm_Meristem_P Parameter: Tissue Value: Root Meristem vs. Above Root Meristem
  misc_feature: MA Experiment ID: 108536 Result: Up-regulated in Transcription
  misc_feature: MA Experiment 108536 PARAMETER Experiment Name: Zm_Meristem_P Parameter: Age (day) Value: 8
  misc_feature: MA Experiment 108536 PARAMETER Experiment Name: Zm_Meristem_P Parameter: Organism Value: Zea mays
  misc_feature: MA Experiment 108536 PARAMETER Experiment Name: Zm_Meristem_P Parameter: Plant Line Value: 35A19
  misc_feature: MA Experiment 108536 PARAMETER Experiment Name: Zm_Meristem_P Parameter: Tissue Value: Shoot Meristem vs. Above Shoot Meristem
  misc_feature: MA Experiment ID: 108544 Result: Up-regulated in Transcription
  misc_feature: MA Experiment ID: 108687 Result: Down-regulated in Transcription
  misc_feature: MA Experiment 108687 PARAMETER Experiment Name: Zm_Embryos-Flowers__P Parameter: Tissue Value: Embryo vs. Aerial+
  misc_feature: MA Experiment ID: 20000535 Result: Down-regulated in Transcription
  misc_feature: MA Experiment 20000535 PARAMETER Experiment Name: Zm_Hybrid_Seed_Dev_P Parameter: DAP Value: 30 vs. 12
  misc_feature: MA Experiment 20000535 PARAMETER Experiment Name: Zm_Hybrid_Seed_Dev_P Parameter: Organism Value: Zea mays
  misc_feature: MA Experiment 20000535 PARAMETER Experiment Name: Zm_Hybrid_Seed_Dev_P Parameter: Plant Line Value: 35A19
  misc_feature: MA Experiment 20000535 PARAMETER Experiment Name: Zm_Hybrid_Seed_Dev_P Parameter: Tissue Value: Embryo vs. Unfert Floret
aggataactcccataagaaaaatcgccaaatacgccattcatcttctccgcccgggtttcagaacgtgcggcagtttagccaggatggtggcgatcgagaaccagaaccagagccaggccgcggtggcggtggcggcggaggcggtgccggcgccggcgtcgcggatccccagggaggcgcggcgcctgctgcacgagctggcggcggcgtgggcggacgtggccgactgccgcgcgctggaggtcgtgccgctcaagggggccatgaccaacgaggtctaccaggcgcgctggctcactgcaggccctgccggccagaaggaggagcccagggcggagagggaggtgaggaaggtgctcgtgcggatttacggcgacggcgtcgacctcttcttcgaccgcgaggacgaggtgcgcaccttcgagtgcatgtcacgccatggccagggtccccgcctcctcggccgcttcccgaacggccgcgtcgaggagttcatccacgcaaggacattgtcagctgccgaccttcgcgatcctgaaatttcagctctggtggcttccaagctgagggagttccacaaccttgacatgcctggtcccaaatctgtgctcatttgggacagacttaggaactggctcagaactgccaagagcttgtgtccacctgaagaagccaaggaatttcggttggacagtctggagaaccagattactgcattggagaacgagtgttcaggtgattaccagtggattggtttctgtcacaatgatcttcagtatggcaatatcatgattgatgaagagaccaacgtgctgaccatcattgattatgagtatgcaagcttcaacccagttgcatatgacattgctaaccatttctgtgagatggcagcagactatcattcatcaaagcctcatatactggactacagcagatatccagatgttgatgagcagaagcgttttgttaagacctacctgaacatttctggtgaggaacctgatgcggaagttgtggagaacctgctccaaagcattgagaagcacacgctcgccagccatctagtatggggcctctggggaataatttcggaccatgttaacgacattgacttcgactacaaggagtatgcgaggcagagattcgagcagtactggcacaagtctgcgatcttaacatcttgaacatgtgtataaacacccgtacgtggtctcaggaactccctgagggcctgtggctgcacacacgaaattgtgcagtgccactgacacatagataagctgtgaaagaagaaatactgacgacgacgacgaataatcccgttttgggctcgggaggttatttctccgcaactcgatgagcttcaggcttcagcttcaggaaggaaggaaggagctatggggatttggctgcccgcttatgctgtaccaatgcaattaaaagataaagatccggtccggtgttgcgtgtgctatgtttagttttggctagcaccgccgagagccgtggtcctgttgtggtgtttctagtttctgtatgcttgatgttgttagtgtgctggataatttggttttgtgcttggggagtccttagctttgggacaacgcatacattgtatactgggtagatgtataaacataaaacagctatgggaatttggttctctacctttatttctctctcgaacaggctgtatttcgttaagaaggttaaatttgggtttgtatttgttattatcagcttgttatacatgtgtcagatcaaatcc

SEQ ID NO: 9243 - protein, 394 aa, Zea mays subsp. mays
  peptide (1)..(394): Ceres Seq. ID no. 12484004
  misc_feature (115)..(376): Pfam Name: Choline/ethanolamine kinase Pfam Description: Choline/ethanolamine kinase
  misc_feature (29)..(394): Homolog of NCBI NO: 33149685 NR Description: choline kinase [Oryza sativa (indica
  misc_feature (29)..(376): Homolog of NCBI NO: 34910612 NR Description: putative choline kinase [Oryza sativa (japonica group)] >gi|20160889|dbj|BAB89827.1| putative choline kinase
  misc_feature (53)..(392): Homolog of NCBI NO: 7488654 NR Description: choline kinase (EC 2.7.1.32) CK3 - soybean
  misc_feature (55)..(386): Homolog of NCBI NO: 22330627 NR Description: putative choline kinase; protein id: At1g74320.1, by cDNA: gi_20453121 [Arabidopsis thaliana] At1g74320/F1O17_1 [Arabidopsis thaliana]
  misc_feature (55)..(386): Homolog of NCBI NO: 25348157 NR Description: protein choline kinase F1O17.1 [imported] -
  misc_feature (59)..(394): Homolog of NCBI NO: 7488653 NR Description: choline kinase (EC 2.7.1.32) CK2 - soybean
  misc_feature (42)..(392): Homolog of NCBI NO: 15217543 NR Description: choline kinase, putative; protein id: At1g71697.1
  misc_feature (59)..(392): Homolog of NCBI NO: 12311795 NR Description: choline kinase [Pisum sativum]
  misc_feature (52)..(394): Homolog of NCBI NO: 15234032 NR Description: choline kinase GmCK2p -like protein; protein id: supported by cDNA: 126037., supported by cDNA: 7395. [Arabidopsis >gi|7484868|pir||T04023 choline kinase 2 homolog [Arabidopsis
  misc_feature (52)..(394): Homolog of NCBI NO: 21537276 NR Description: choline kinase GmCK2p-like protein [Arabidopsis
RITPIRKIAKYAIHLLRPGFRTCGSLARMVAIENQNQSQAAVAVAAEAVPAPASRIPREARRLLHELAAAWADVADCRALEVVPLKGAMTNEVYQARWLTAGPAGQKEEPRAEREVRKVLVRIYGDGVDLFFDREDEVRTFECMSRHGQGPRLLGRFPNGRVEEFIHARTLSAADLRDPEISALVASKLREFHNLDMPGPKSVLIWDRLRNWLRTAKSLCPPEEAKEFRLDSLENQITALENECSGDYQWIGFCHNDLQYGNIMIDEETNVLTIIDYEYASFNPVAYDIANHFCEMAADYHSSKPHILDYSRYPDVDEQKRFVKTYLNISGEEPDAEVVENLLQSIEKHTLASHLVWGLWGIISDHVNDIDFDYKEYARQRFEQYWHKSAILTS

SEQ ID NO: 9244 - protein, 366 aa, Zea mays subsp. mays
  peptide (1)..(366): Ceres Seq. ID no. 12484005
  misc_feature (87)..(348): Pfam Name: Choline/ethanolamine kinase Pfam Description: Choline/ethanolamine kinase
  misc_feature (1)..(366): Homolog of NCBI NO: 33149685 NR Description: choline kinase [Oryza sativa (indica
  misc_feature (1)..(348): Homolog of NCBI NO: 34910612 NR Description: putative choline kinase [Oryza sativa (japonica group)] >gi|20160889|dbj|BAB89827.1| putative choline kinase
  misc_feature (25)..(364): Homolog of NCBI NO: 7488654 NR Description: choline kinase (EC 2.7.1.32) CK3 - soybean
  misc_feature (27)..(358): Homolog of NCBI NO: 22330627 NR Description: putative choline kinase; protein id: At1g74320.1, by cDNA: gi_20453121 [Arabidopsis thaliana] At1g74320/F1O17_1 [Arabidopsis thaliana]
  misc_feature (27)..(358): Homolog of NCBI NO: 25348157 NR Description: protein choline kinase F1O17.1 [imported] -
  misc_feature (31)..(366): Homolog of NCBI NO: 7488653 NR Description: choline kinase (EC 2.7.1.32) CK2 - soybean
  misc_feature (14)..(364): Homolog of NCBI NO: 15217543 NR Description: choline kinase, putative; protein id: At1g71697.1
  misc_feature (31)..(364): Homolog of NCBI NO: 12311795 NR Description: choline kinase [Pisum sativum]
  misc_feature (24)..(366): Homolog of NCBI NO: 15234032 NR Description: choline kinase GmCK2p -like protein; protein id: supported by cDNA: 126037., supported by cDNA: 7395. [Arabidopsis >gi|7484868|pir||T04023 choline kinase 2 homolog [Arabidopsis
  misc_feature (24)..(366): Homolog of NCBI NO: 21537276 NR Description: choline kinase GmCK2p-like protein [Arabidopsis
MVAIENQNQSQAAVAVAAEAVPAPASRIPREARRLLHELAAAWADVADCRALEVVPLKGAMTNEVYQARWLTAGPAGQKEEPRAEREVRKVLVRIYGDGVDLFFDREDEVRTFECMSRHGQGPRLLGRFPNGRVEEFIHARTLSAADLRDPEISALVASKLREFHNLDMPGPKSVLIWDRLRNWLRTAKSLCPPEEAKEFRLDSLENQITALENECSGDYQWIGFCHNDLQYGNIMIDEETNVLTIIDYEYASFNPVAYDIANHFCEMAADYHSSKPHILDYSRYPDVDEQKRFVKTYLNISGEEPDAEVVENLLQSIEKHTLASHLVWGLWGIISDHVNDIDFDYKEYARQRFEQYWHKSAILTS

SEQ ID NO: 9245 - protein, 306 aa, Zea mays subsp. mays
  peptide (1)..(306): Ceres Seq. ID no. 12484006
  misc_feature (27)..(288): Pfam Name: Choline/ethanolamine kinase Pfam Description: Choline/ethanolamine kinase
  misc_feature (1)..(306): Homolog of NCBI NO: 33149685 NR Description: choline kinase [Oryza sativa (indica
  misc_feature (1)..(288): Homolog of NCBI NO: 34910612 NR Description: putative choline kinase [Oryza sativa (japonica group)] >gi|20160889|dbj|BAB89827.1| putative choline kinase
  misc_feature (1)..(304): Homolog of NCBI NO: 7488654 NR Description: choline kinase (EC 2.7.1.32) CK3 - soybean
  misc_feature (1)..(298): Homolog of NCBI NO: 22330627 NR Description: putative choline kinase; protein id: At1g74320.1, by cDNA: gi_20453121 [Arabidopsis thaliana] At1g74320/F1O17_1 [Arabidopsis thaliana]
  misc_feature (1)..(298): Homolog of NCBI NO: 25348157 NR Description: protein choline kinase F1O17.1 [imported] -
  misc_feature (1)..(306): Homolog of NCBI NO: 7488653 NR Description: choline kinase (EC 2.7.1.32) CK2 - soybean
  misc_feature (1)..(304): Homolog of NCBI NO: 15217543 NR Description: choline kinase, putative; protein id: At1g71697.1
  misc_feature (1)..(304): Homolog of NCBI NO: 12311795 NR Description: choline kinase [Pisum sativum]
  misc_feature (1)..(306): Homolog of NCBI NO: 15234032 NR Description: choline kinase GmCK2p -like protein; protein id: supported by cDNA: 126037., supported by cDNA: 7395. [Arabidopsis >gi|7484868|pir||T04023 choline kinase 2 homolog [Arabidopsis
  misc_feature (1)..(306): Homolog of NCBI NO: 21537276 NR Description: choline kinase GmCK2p-like protein [Arabidopsis
MTNEVYQARWLTAGPAGQKEEPRAEREVRKVLVRIYGDGVDLFFDREDEVRTFECMSRHGQGPRLLGRFPNGRVEEFIHARTLSAADLRDPEISALVASKLREFHNLDMPGPKSVLIWDRLRNWLRTAKSLCPPEEAKEFRLDSLENQITALENECSGDYQWIGFCHNDLQYGNIMIDEETNVLTIIDYEYASFNPVAYDIANHFCEMAADYHSSKPHILDYSRYPDVDEQKRFVKTYLNISGEEPDAEVVENLLQSIEKHTLASHLVWGLWGIISDHVNDIDFDYKEYARQRFEQYWHKSAILTS

SEQ ID NO: 9246 - DNA, 1349 bp, Zea mays subsp. mays
  misc_feature (1)..(1349): Ceres Seq. ID no. 12356860
  misc_feature: MA Experiment ID: 108523 Result: Up-regulated in Transcription
  misc_feature: MA Experiment 108523 PARAMETER Experiment Name: Zm_42deg_Heat_P Parameter: Age (day) Value: 8
  misc_feature: MA Experiment 108523 PARAMETER Experiment Name: Zm_42deg_Heat_P Parameter: Organism Value: Zea mays
  misc_feature: MA Experiment 108523 PARAMETER Experiment Name: Zm_42deg_Heat_P Parameter: Plant Line Value: 35A19
  misc_feature: MA Experiment 108523 PARAMETER Experiment Name: Zm_42deg_Heat_P Parameter: Temperature (deg C) Value: 42 vs. 22
  misc_feature: MA Experiment 108523 PARAMETER Experiment Name: Zm_42deg_Heat_P Parameter: Timepoint (hr) Value: 6
  misc_feature: MA Experiment 108523 PARAMETER Experiment Name: Zm_42deg_Heat_P Parameter: Tissue Value: Aerial
  misc_feature: MA Experiment ID: 108535 Result: Up-regulated in Transcription
  misc_feature: MA Experiment 108535 PARAMETER Experiment Name: Zm_Meristem_P Parameter: Age (day) Value: 8
  misc_feature: MA Experiment 108535 PARAMETER Experiment Name: Zm_Meristem_P Parameter: Organism Value: Zea mays
  misc_feature: MA Experiment 108535 PARAMETER Experiment Name: Zm_Meristem_P Parameter: Plant Line Value: 35A19
  misc_feature: MA Experiment 108535 PARAMETER Experiment Name: Zm_Meristem_P Parameter: Tissue Value: Root Meristem vs. Above Root Meristem
  misc_feature: MA Experiment ID: 20000488 Result: Up-regulated in Transcription
  misc_feature: MA Experiment 20000488 PARAMETER Experiment Name: Zm_50mM_NH4NO3_L_to_H_P Parameter: Organism Value: Zea mays
  misc_feature: MA Experiment 20000488 PARAMETER Experiment Name: Zm_50mM_NH4NO3_L_to_H_P Parameter: Timepoint (hr) Value: 8
  misc_feature: MA Experiment 20000488 PARAMETER Experiment Name: Zm_50mM_NH4NO3_L_to_H_P Parameter: Tissue Value: Leaves
  misc_feature: MA Experiment 20000488 PARAMETER Experiment Name: Zm_50mM_NH4NO3_L_to_H_P Parameter: Treatment Value: 50mM NH4NO3 vs. 100mM Mannitol
  misc_feature: MA Experiment ID: 20000492 Result: Up-regulated in Transcription
  misc_feature: MA Experiment 20000492 PARAMETER Experiment Name: Zm_Hybrid_Seed_Dev_P Parameter: DAP Value: 12
  misc_feature: MA Experiment 20000492 PARAMETER Experiment Name: Zm_Hybrid_Seed_Dev_P Parameter: Organism Value: Zea mays
  misc_feature: MA Experiment 20000492 PARAMETER Experiment Name: Zm_Hybrid_Seed_Dev_P Parameter: Plant Line Value: 35A19
  misc_feature: MA Experiment 20000492 PARAMETER Experiment Name: Zm_Hybrid_Seed_Dev_P Parameter: Tissue Value: Fert Kernel vs. Unfert Floret
accagcgaaaccccagaatgttcgtcctccgcaaaaccctcctccatgcgccgccggccgccgccgcggcggtcccctctcggatctcttccctcctccgcctcatcccctctgcatctttttctgaggtaagcggaggtggggaagaatggggcgcctcctcacccggaggcggcggcggcaggggtgggggtgggaacgaatggagctccacctggtctaccggcctcaccaaggaccatttcgacggatcctcgccctccgtcggccgttctgtcccttccgagtcagcgcccgtctctcgtgagcgggcggccattcgcgctatggatgagtgggacgagagggtccgggaactggagcgtaacaatgtcgaggcgaaggcgtatgtggattcatgggacgaccggatgcgggagacctgtgcgctgctgaagcaggtgcgggagccgggcgctccggggctcgtatctcaaggactcggagaagcaggagatgtaccggctgcacaaggaggaccccgcgacttacaccgtggagcggctcgccaaggacttccgtgtcatgcgacagcgcgtgcacgccatcctctggctcaaggagatggaagaggaagaggagaggaagaggggccagccgctcgacgactccatcgaaatcctgctcgacagctgcccagagttcttcaattctcatgacagggaatttcatgtagcatctcttccatataaacctgacttcaaagtaatgcctgaggactgggatggcacaacacgagatcctgatgaggttctatatgaaatttcaattaaggaagataaaatgttgtatgaggaattcgttcaacgcttggaattcaacaagaagaaggtggcaggagaagttaagtgccacaagtacagccggcgcaagccagacaatggatggagctacatggtcgaaaagcttggttctcagggaaagcgtggtgtaggagggggctggaagttcatcagcttgcctgatggatcaagccgtgcactaaatgatatggagaagatgtatgttaagcgggagactccaaaacggcggcggaggataattgcaccatacaagtgacatggacaacttcagtttgctgaaatgcaaattttctcaactgtcttttgacattgtccagcgaggctgaagcaagaaactgtgaagtagtttggaaccgccagaacagctcctgtttttttcacagcacagtagatggtttgatgtgttttgtaacaaggattatttccccacattttggcagccgaataattatcttttaaacttttcggtgttcctcccgtctctatgcactgccgagcaacaattcc

SEQ ID NO: 9247 - protein, 231 aa, Zea mays subsp. mays
  peptide (1)..(231): Ceres Seq. ID no. 12356861
  misc_feature (6)..(154): Homolog of NCBI NO: 34908962 NR Description: P0003D09.18 [Oryza sativa (japonica
  misc_feature (29)..(154): Homolog of NCBI NO: 8809640 NR Description: gb|AAC32909.1~gene_id:MMI9.10~similar to unknown
  misc_feature (29)..(154): Homolog of NCBI NO: 15241764 NR Description: putative protein; protein id: At5g62270.1
QRNPRMFVLRKTLLHAPPAAAAAVPSRISSLLRLIPSASFSEVSGGGEEWGASSPGGGGGRGGGGNEWSSTWSTGLTKDHFDGSSPSVGRSVPSESAPVSRERAAIRAMDEWDERVRELERNNVEAKAYVDSWDDRMRETCALLKQVREPGAPGLVSQGLGEAGDVPAAQGGPRDLHRGAARQGLPCHATARARHPLAQGDGRGRGEEEGPAARRLHRNPARQLPRVLQFS

SEQ ID NO: 9248 - protein, 226 aa, Zea mays subsp. mays
  peptide (1)..(226): Ceres Seq. ID no. 12356862
  misc_feature (1)..(149): Homolog of NCBI NO: 34908962 NR Description: P0003D09.18 [Oryza sativa (japonica
  misc_feature (24)..(149): Homolog of NCBI NO: 8809640 NR Description: gb|AAC32909.1~gene_id:MMI9.10~similar to unknown
  misc_feature (24)..(149): Homolog of NCBI NO: 15241764 NR Description: putative protein; protein id: At5g62270.1
MFVLRKTLLHAPPAAAAAVPSRISSLLRLIPSASFSEVSGGGEEWGASSPGGGGGRGGGGNEWSSTWSTGLTKDHFDGSSPSVGRSVPSESAPVSRERAAIRAMDEWDERVRELERNNVEAKAYVDSWDDRMRETCALLKQVREPGAPGLVSQGLGEAGDVPAAQGGPRDLHRGAARQGLPCHATARARHPLAQGDGRGRGEEEGPAARRLHRNPARQLPRVLQFS

SEQ ID NO: 9249 - protein, 200 aa, Zea mays subsp. mays
  peptide (1)..(200): Ceres Seq. ID no. 12356863
  misc_feature (1)..(200): Homolog of NCBI NO: 34908962 NR Description: P0003D09.18 [Oryza sativa (japonica
  misc_feature (1)..(197): Homolog of NCBI NO: 8809640 NR Description: gb|AAC32909.1~gene_id:MMI9.10~similar to unknown
  misc_feature (1)..(184): Homolog of NCBI NO: 15241764 NR Description: putative protein; protein id: At5g62270.1
  misc_feature (18)..(194): Homolog of NCBI NO: 18071389 NR Description: putative mucin [Oryza sativa]
  misc_feature (1)..(178): Homolog of NCBI NO: 15227059 NR Description: predicted by genscan; protein id: At2g02880.1
MYRLHKEDPATYTVERLAKDFRVMRQRVHAILWLKEMEEEEERKRGQPLDDSIEILLDSCPEFFNSHDREFHVASLPYKPDFKVMPEDWDGTTRDPDEVLYEISIKEDKMLYEEFVQRLEFNKKKVAGEVKCHKYSRRKPDNGWSYMVEKLGSQGKRGVGGGWKFISLPDGSSRALNDMEKMYVKRETPKRRRRIIAPYK

SEQ ID NO: 9250 - DNA, 1466 bp, Zea mays subsp. mays
  misc_feature (1)..(1466): Ceres Seq. ID no. 12423837
  misc_feature: MA Experiment ID: 108543 Result: Down-regulated in Transcription
  misc_feature: MA Experiment ID: 108556 Result: Up-regulated in Transcription
  misc_feature: MA Experiment 108556 PARAMETER Experiment Name: Zm_Drought_P Parameter: Age (day) Value: 9
  misc_feature: MA Experiment 108556 PARAMETER Experiment Name: Zm_Drought_P Parameter: Organism Value: Zea mays
  misc_feature: MA Experiment 108556 PARAMETER Experiment Name: Zm_Drought_P Parameter: Plant Line Value: 35A19
  misc_feature: MA Experiment 108556 PARAMETER Experiment Name: Zm_Drought_P Parameter: Timepoint (hr) Value: 24
  misc_feature: MA Experiment 108556 PARAMETER Experiment Name: Zm_Drought_P Parameter: Tissue Value: Aerial
  misc_feature: MA Experiment 108556 PARAMETER Experiment Name: Zm_Drought_P Parameter: Treatment Value: Drought vs. No Drought
  misc_feature: MA Experiment ID: 108689 Result: Up-regulated in Transcription
  misc_feature: MA Experiment 108689 PARAMETER Experiment Name: Zm_Drought_Roots_P Parameter: Age (day) Value: 9
  misc_feature: MA Experiment 108689 PARAMETER Experiment Name: Zm_Drought_Roots_P Parameter: Organism Value: Zea mays
  misc_feature: MA Experiment 108689 PARAMETER Experiment Name: Zm_Drought_Roots_P Parameter: Plant Line Value: 35A19
  misc_feature: MA Experiment 108689 PARAMETER Experiment Name: Zm_Drought_Roots_P Parameter: Timepoint (hr) Value: 24
  misc_feature: MA Experiment 108689 PARAMETER Experiment Name: Zm_Drought_Roots_P Parameter: Tissue Value: Roots
  misc_feature: MA Experiment 108689 PARAMETER Experiment Name: Zm_Drought_Roots_P Parameter: Treatment Value: Drought vs. No Drought
  misc_feature: MA Experiment ID: 20000480 Result: Up-regulated in Transcription
  misc_feature: MA Experiment 20000480 PARAMETER Experiment Name: Zm_Drought_P Parameter: Age (day) Value: 11
  misc_feature: MA Experiment 20000480 PARAMETER Experiment Name: Zm_Drought_P Parameter: Organism Value: Zea mays
  misc_feature: MA Experiment 20000480 PARAMETER Experiment Name: Zm_Drought_P Parameter: Plant Line Value: 35A19
  misc_feature: MA Experiment 20000480 PARAMETER Experiment Name: Zm_Drought_P Parameter: Timepoint (hr) Value: 72
  misc_feature: MA Experiment 20000480 PARAMETER Experiment Name: Zm_Drought_P Parameter: Tissue Value: Aerial
  misc_feature: MA Experiment 20000480 PARAMETER Experiment Name: Zm_Drought_P Parameter: Treatment Value: Drought vs. No Drought
  misc_feature: MA Experiment ID: 20000534 Result: Up-regulated in Transcription
  misc_feature: MA Experiment 20000534 PARAMETER Experiment Name: Zm_Hybrid_Pollen_P Parameter: Age (day) Value: 8
  misc_feature: MA Experiment 20000534 PARAMETER Experiment Name: Zm_Hybrid_Pollen_P Parameter: Organism Value: Zea mays
  misc_feature: MA Experiment 20000534 PARAMETER Experiment Name: Zm_Hybrid_Pollen_P Parameter: Plant Line Value: 35A19
  misc_feature: MA Experiment 20000534 PARAMETER Experiment Name: Zm_Hybrid_Pollen_P Parameter: Tissue Value: Pollen vs. Aerial
ataacagatacaggcaccccctcctctcctctcctctcctctctctccctctcatcaccaaagaactgcaactaggaacggttcgccacaaaaaaagaacgtacggctatgaagacgaggcgcggtgcctgccacgcggcggcggcggccacggcgccgggcgaggggccggaggcgcaacgccggaagcggcgcaggacggcggcggccgaggggtcgccagcggcggccggcactccaggtgtccgcccggtgggcagagacatgttcgagagagctgcctgacgatctcgtcgtctccatactacgggacgtcgccgcgtccgccagttcgccggccgatctcgccggcgccatgctcacgtgcaagaggttcagggagctcgggcagagcaaggtggtgctggcgcgggcgtcnccgcagtgcctggcggtgcgcgccaaggcctggtcggaggaggcgcaccggttcctgcagcgctgcgccgacgcgggcagcctggaagcgtgctacctccttggcatgattcggttctactgcctggggatccgcggctcgggcgcggcgctgatggcggcggcggcggtgggcgggcaccgcgaggcgctctactcgctggccgtggtccagttcaacggcagcggcgggggcaaggacgaccgcgacctccgcgccggagccgcgctgtgcgcgcgcgcggcgtcgctgggccacgtgggcgcgctccgcgagctggggcactgcctccaggacggctacggcgtgcggcggtccgtgctggacgggcggcgcctcctgatccaggcgaacgcgcgcgagctcgccgccgccgccgcctcgccgccgcaagccgcagccgctcggcaaggcggcgccccacccgactcggcgtcactcgtgcctcctgagcgacttcgggtgccgcgccgcggccggggagccgcacgcggccaaccggttcctggcggactggttcgngtcncggccgctcggtacggcggcggcggcggcagcggncggcgggancggctcctcgcccnaggaggacggcgccggcgcgnngcggntgtgctngcaggcgctgtgcgggcggcccnagacgcggcggcacgagttcaggcggtgctccgtgtggcggcctggtgaannactgctaccgcgcgtgccaggcgctgcantggaagatggcgcacaaggcggagtgcacgcccatggaccggtggctnnnacgtggtcggcgtcggcggcggcgcggcgccgcagccccacgctaatgccgacggcgccgcggcggccccggcgccgtgacgcgctggcggtcgtccgtttcttgtcacttgtcagttagcgtccgcaacgtcagtttttactccttttttttttctgtccgtttctcgccctccatttgtcctctgtactacggcacctgtggttatagttggcaattggcatggcatgctgaggt

SEQ ID NO: 9251 - protein, 263 aa, Zea mays subsp. mays
  peptide (1)..(263): Ceres Seq. ID no. 12423838
  misc_feature (1)..(166): Homolog of NCBI NO: 18408746 NR Description: F-box protein family; protein id: At1g67340.1, by cDNA: gi_16209725, supported by cDNA: gi_20260405 [Arabidopsis
  misc_feature (1)..(174): Homolog of NCBI NO: 19386803 NR Description: OJ1485_B09.11 [Oryza sativa (japonica
  misc_feature (1)..(192): Homolog of NCBI NO: 15240674 NR Description: putative protein; protein id: At5g50450.1, by cDNA: gi_20466553 [Arabidopsis thaliana] gb|AAB95234.1~gene_id:MXI22.17~strong similarity to unknown
  misc_feature (21)..(21): Xaa is any aa, unknown or other
  misc_feature (208)..(208): Xaa is any aa, unknown or other
  misc_feature (210)..(210): Xaa is any aa, unknown or other
  misc_feature (221)..(221): Xaa is any aa, unknown or other
  misc_feature (224)..(224): Xaa is any aa, unknown or other
  misc_feature (229)..(229): Xaa is any aa, unknown or other
  misc_feature (236)..(236): Xaa is any aa, unknown or other
  misc_feature (238)..(238): Xaa is any aa, unknown or other
  misc_feature (240)..(240): Xaa is any aa, unknown or other
  misc_feature (248)..(248): Xaa is any aa, unknown or other
MLTCKRFRELGQSKVVLARAXPQCLAVRAKAWSEEAHRFLQRCADAGSLEACYLLGMIRFYCLGIRGSGAALMAAAAVGGHREALYSLAVVQFNGSGGGKDDRDLRAGAALCARAASLGHVGALRELGHCLQDGYGVRRSVLDGRRLLIQANARELAAAAASPPQAAAARQGGAPPDSASLVPPERLRVPRRGRGAARGQPVPGGLVXVXAARYGGGGGSXRRXRLLAXGGRRRRXAXVXAGAVRAAXDAAARVQAVLRVAAW

SEQ ID NO: 9252 - protein, 207 aa, Zea mays subsp. mays
  peptide (1)..(207): Ceres Seq. ID no. 12423839
  misc_feature (1)..(110): Homolog of NCBI NO: 18408746 NR Description: F-box protein family; protein id: At1g67340.1, by cDNA: gi_16209725, supported by cDNA: gi_20260405 [Arabidopsis
  misc_feature (1)..(118): Homolog of NCBI NO: 19386803 NR Description: OJ1485_B09.11 [Oryza sativa (japonica
  misc_feature (1)..(136): Homolog of NCBI NO: 15240674 NR Description: putative protein; protein id: At5g50450.1, by cDNA: gi_20466553 [Arabidopsis thaliana] gb|AAB95234.1~gene_id:MXI22.17~strong similarity to unknown
  misc_feature (152)..(152): Xaa is any aa, unknown or other
  misc_feature (154)..(154): Xaa is any aa, unknown or other
  misc_feature (165)..(165): Xaa is any aa, unknown or other
  misc_feature (168)..(168): Xaa is any aa, unknown or other
  misc_feature (173)..(173): Xaa is any aa, unknown or other
  misc_feature (180)..(180): Xaa is any aa, unknown or other
  misc_feature (182)..(182): Xaa is any aa, unknown or other
  misc_feature (184)..(184): Xaa is any aa, unknown or other
  misc_feature (192)..(192): Xaa is any aa, unknown or other
MIRFYCLGIRGSGAALMAAAAVGGHREALYSLAVVQFNGSGGGKDDRDLRAGAALCARAASLGHVGALRELGHCLQDGYGVRRSVLDGRRLLIQANARELAAAAASPPQAAAARQGGAPPDSASLVPPERLRVPRRGRGAARGQPVPGGLVXVXAARYGGGGGSXRRXRLLAXGGRRRRXAXVXAGAVRAAXDAAARVQAVLRVAAW

SEQ ID NO: 9253 - protein, 191 aa, Zea mays subsp. mays
  peptide (1)..(191): Ceres Seq. ID no. 12423840
  misc_feature (1)..(94): Homolog of NCBI NO: 18408746 NR Description: F-box protein family; protein id: At1g67340.1, by cDNA: gi_16209725, supported by cDNA: gi_20260405 [Arabidopsis
  misc_feature (1)..(102): Homolog of NCBI NO: 19386803 NR Description: OJ1485_B09.11 [Oryza sativa (japonica
  misc_feature (1)..(120): Homolog of NCBI NO: 15240674 NR Description: putative protein; protein id: At5g50450.1, by cDNA: gi_20466553 [Arabidopsis thaliana] gb|AAB95234.1~gene_id:MXI22.17~strong similarity to unknown
  misc_feature (136)..(136): Xaa is any aa, unknown or other
  misc_feature (138)..(138): Xaa is any aa, unknown or other
  misc_feature (149)..(149): Xaa is any aa, unknown or other
  misc_feature (152)..(152): Xaa is any aa, unknown or other
  misc_feature (157)..(157): Xaa is any aa, unknown or other
  misc_feature (164)..(164): Xaa is any aa, unknown or other
  misc_feature (166)..(166): Xaa is any aa, unknown or other
  misc_feature (168)..(168): Xaa is any aa, unknown or other
  misc_feature (176)..(176): Xaa is any aa, unknown or other
MAAAAVGGHREALYSLAVVQFNGSGGGKDDRDLRAGAALCARAASLGHVGALRELGHCLQDGYGVRRSVLDGRRLLIQANARELAAAAASPPQAAAARQGGAPPDSASLVPPERLRVPRRGRGAARGQPVPGGLVXVXAARYGGGGGSXRRXRLLAXGGRRRRXAXVXAGAVRAAXDAAARVQAVLRVAAW

SEQ ID NO: 9254 - DNA, 1234 bp, Zea mays subsp. mays
  misc_feature (1)..(1234): Ceres Seq. ID no. 12354115
  misc_feature: MA Experiment ID: 108527 Result: Down-regulated in Transcription
  misc_feature: MA Experiment 108527 PARAMETER Experiment Name: Zm_5mM_NO_P Parameter: Age (day) Value: 8
  misc_feature: MA Experiment 108527 PARAMETER Experiment Name: Zm_5mM_NO_P Parameter: Organism Value: Zea mays
  misc_feature: MA Experiment 108527 PARAMETER Experiment Name: Zm_5mM_NO_P Parameter: Plant Line Value: 35A19
  misc_feature: MA Experiment 108527 PARAMETER Experiment Name: Zm_5mM_NO_P Parameter: Timepoint (hr) Value: 6
  misc_feature: MA Experiment 108527 PARAMETER Experiment Name: Zm_5mM_NO_P Parameter: Tissue Value: Aerial
  misc_feature: MA Experiment 108527 PARAMETER Experiment Name: Zm_5mM_NO_P Parameter: Treatment Value: 5mM NO vs. No Treatment
  misc_feature: MA Experiment ID: 108528 Result: Down-regulated in Transcription
  misc_feature: MA Experiment 108528 PARAMETER Experiment Name: Zm_Imbibed_Seeds_P Parameter: Age (day) Value: 5 vs. 2
  misc_feature: MA Experiment 108528 PARAMETER Experiment Name: Zm_Imbibed_Seeds_P Parameter: Organism Value: Zea mays
  misc_feature: MA Experiment 108528 PARAMETER Experiment Name: Zm_Imbibed_Seeds_P Parameter: Plant Line Value: 35A19
  misc_feature: MA Experiment 108528 PARAMETER Experiment Name: Zm_Imbibed_Seeds_P Parameter: Tissue Value: Aerial vs. Embryo
  misc_feature: MA Experiment ID: 108529 Result: Down-regulated in Transcription
  misc_feature: MA Experiment 108529 PARAMETER Experiment Name: Zm_Imbibed_Seeds_P Parameter: Age (day) Value: 5 vs. 2
  misc_feature: MA Experiment 108529 PARAMETER Experiment Name: Zm_Imbibed_Seeds_P Parameter: Organism Value: Zea mays
  misc_feature: MA Experiment 108529 PARAMETER Experiment Name: Zm_Imbibed_Seeds_P Parameter: Plant Line Value: 35A19
  misc_feature: MA Experiment 108529 PARAMETER Experiment Name: Zm_Imbibed_Seeds_P Parameter: Tissue Value: Roots vs. Embryo
  misc_feature: MA Experiment ID: 108530 Result: Down-regulated in Transcription
  misc_feature: MA Experiment 108530 PARAMETER Experiment Name: Zm_Imbibed_Seeds_P Parameter: Age (day) Value: 6 vs. 2
  misc_feature: MA Experiment 108530 PARAMETER Experiment Name: Zm_Imbibed_Seeds_P Parameter: Organism Value: Zea mays
  misc_feature: MA Experiment 108530 PARAMETER Experiment Name: Zm_Imbibed_Seeds_P Parameter: Plant Line Value: 35A19
  misc_feature: MA Experiment 108530 PARAMETER Experiment Name: Zm_Imbibed_Seeds_P Parameter: Tissue Value: Aerial vs. Embryo
  misc_feature: MA Experiment ID: 108535 Result: Down-regulated in Transcription
  misc_feature: MA Experiment 108535 PARAMETER Experiment Name: Zm_Meristem_P Parameter: Age (day) Value: 8
  misc_feature: MA Experiment 108535 PARAMETER Experiment Name: Zm_Meristem_P Parameter: Organism Value: Zea mays
  misc_feature: MA Experiment 108535 PARAMETER Experiment Name: Zm_Meristem_P Parameter: Plant Line Value: 35A19
  misc_feature: MA Experiment 108535 PARAMETER Experiment Name: Zm_Meristem_P Parameter: Tissue Value: Root Meristem vs. Above Root Meristem
  misc_feature: MA Experiment ID: 108536 Result: Up-regulated in Transcription
  misc_feature: MA Experiment 108536 PARAMETER Experiment Name: Zm_Meristem_P Parameter: Age (day) Value: 8
  misc_feature: MA Experiment 108536 PARAMETER Experiment Name: Zm_Meristem_P Parameter: Organism Value: Zea mays
  misc_feature: MA Experiment 108536 PARAMETER Experiment Name: Zm_Meristem_P Parameter: Plant Line Value: 35A19
  misc_feature: MA Experiment 108536 PARAMETER Experiment Name: Zm_Meristem_P Parameter: Tissue Value: Shoot Meristem vs. Above Shoot Meristem
  misc_feature: MA Experiment ID: 108543 Result: Up-regulated in Transcription
  misc_feature: MA Experiment ID: 108544 Result: Down-regulated in Transcription
  misc_feature: MA Experiment ID: 108545 Result: Down-regulated in Transcription
  misc_feature: MA Experiment 108545 PARAMETER Experiment Name: Zm_Imbibed_Seeds_P Parameter: Age (day) Value: 3 vs. 2
  misc_feature: MA Experiment 108545 PARAMETER Experiment Name: Zm_Imbibed_Seeds_P Parameter: Organism Value: Zea mays
  misc_feature: MA Experiment 108545 PARAMETER Experiment Name: Zm_Imbibed_Seeds_P Parameter: Plant Line Value: 35A19
  misc_feature: MA Experiment 108545 PARAMETER Experiment Name: Zm_Imbibed_Seeds_P Parameter: Tissue Value: Aerial vs. Embryo
  misc_feature: MA Experiment ID: 108559 Result: Down-regulated in Transcription
  misc_feature: MA Experiment 108559 PARAMETER Experiment Name: Zm_5mM_NO_P Parameter: Age (day) Value: 8
  misc_feature: MA Experiment 108559 PARAMETER Experiment Name: Zm_5mM_NO_P Parameter: Organism Value: Zea mays
  misc_feature: MA Experiment 108559 PARAMETER Experiment Name: Zm_5mM_NO_P Parameter: Plant Line Value: 35A19
  misc_feature: MA Experiment 108559 PARAMETER Experiment Name: Zm_5mM_NO_P Parameter: Timepoint (hr) Value: 12
  misc_feature: MA Experiment 108559 PARAMETER Experiment Name: Zm_5mM_NO_P Parameter: Tissue Value: Aerial
  misc_feature: MA Experiment 108559 PARAMETER Experiment Name: Zm_5mM_NO_P Parameter: Treatment Value: 5mM NO vs. No Treatment
  misc_feature: MA Experiment ID: 20000477 Result: Down-regulated in Transcription
  misc_feature: MA Experiment 20000477 PARAMETER Experiment Name: Zm_5mM_SA_P Parameter: Age (day) Value: 10
  misc_feature: MA Experiment 20000477 PARAMETER Experiment Name: Zm_5mM_SA_P Parameter: Organism Value: Zea mays
  misc_feature: MA Experiment 20000477 PARAMETER Experiment Name: Zm_5mM_SA_P Parameter: Plant Line Value: 35A19
  misc_feature: MA Experiment 20000477 PARAMETER Experiment Name: Zm_5mM_SA_P Parameter: Timepoint (hr) Value: 48
  misc_feature: MA Experiment 20000477 PARAMETER Experiment Name: Zm_5mM_SA_P Parameter: Tissue Value: Aerial
  misc_feature: MA Experiment 20000477 PARAMETER Experiment Name: Zm_5mM_SA_P Parameter: Treatment Value: 5mM SA vs. No Treatment
  misc_feature: MA Experiment ID: 20000479 Result: Down-regulated in Transcription
  misc_feature: MA Experiment 20000479 PARAMETER Experiment Name: Zm_Drought_P Parameter: Age (day) Value: 10
  misc_feature: MA Experiment 20000479 PARAMETER Experiment Name: Zm_Drought_P Parameter: Organism Value: Zea mays
  misc_feature: MA Experiment 20000479 PARAMETER Experiment Name: Zm_Drought_P Parameter: Plant Line Value: 35A19
  misc_feature: MA Experiment 20000479 PARAMETER Experiment Name: Zm_Drought_P Parameter: Timepoint (hr) Value: 48
  misc_feature: MA Experiment 20000479 PARAMETER Experiment Name: Zm_Drought_P Parameter: Tissue Value: Aerial
  misc_feature: MA Experiment 20000479 PARAMETER Experiment Name: Zm_Drought_P Parameter: Treatment Value: Drought vs. No Drought
  misc_feature: MA Experiment ID: 20000480 Result: Down-regulated in Transcription
  misc_feature: MA Experiment 20000480 PARAMETER Experiment Name: Zm_Drought_P Parameter: Age (day) Value: 11
  misc_feature: MA Experiment 20000480 PARAMETER Experiment Name: Zm_Drought_P Parameter: Organism Value: Zea mays
  misc_feature: MA Experiment 20000480 PARAMETER Experiment Name: Zm_Drought_P Parameter: Plant Line Value: 35A19
  misc_feature: MA Experiment 20000480 PARAMETER Experiment Name: Zm_Drought_P Parameter: Timepoint (hr) Value: 72
  misc_feature: MA Experiment 20000480 PARAMETER Experiment Name: Zm_Drought_P Parameter: Tissue Value: Aerial
  misc_feature: MA Experiment 20000480 PARAMETER Experiment Name: Zm_Drought_P Parameter: Treatment Value: Drought vs. No Drought
  misc_feature: MA Experiment ID: 20000488 Result: Down-regulated in Transcription
  misc_feature: MA Experiment 20000488 PARAMETER Experiment Name: Zm_50mM_NH4NO3_L_to_H_P Parameter: Organism Value: Zea mays
  misc_feature: MA Experiment 20000488 PARAMETER Experiment Name: Zm_50mM_NH4NO3_L_to_H_P Parameter: Timepoint (hr) Value: 8
  misc_feature: MA Experiment 20000488 PARAMETER Experiment Name: Zm_50mM_NH4NO3_L_to_H_P Parameter: Tissue Value: Leaves
  misc_feature: MA Experiment 20000488 PARAMETER Experiment Name: Zm_50mM_NH4NO3_L_to_H_P Parameter: Treatment Value: 50mM NH4NO3 vs. 100mM Mannitol
  misc_feature: MA Experiment ID: 20000535 Result: Down-regulated in Transcription
  misc_feature: MA Experiment 20000535 PARAMETER Experiment Name: Zm_Hybrid_Seed_Dev_P Parameter: DAP Value: 30 vs. 12
  misc_feature: MA Experiment 20000535 PARAMETER Experiment Name: Zm_Hybrid_Seed_Dev_P Parameter: Organism Value: Zea mays
  misc_feature: MA Experiment 20000535 PARAMETER Experiment Name: Zm_Hybrid_Seed_Dev_P Parameter: Plant Line Value: 35A19
  misc_feature: MA Experiment 20000535 PARAMETER Experiment Name: Zm_Hybrid_Seed_Dev_P Parameter: Tissue Value: Embryo vs. Unfert Floret
  misc_feature: MA Experiment ID: 20000626 Result: Down-regulated in Transcription
  misc_feature: MA Experiment 20000626 PARAMETER Experiment Name: Zm_Herbicide-Treatments_P Parameter: Timepoint (hr) Value: 12
  misc_feature: MA Experiment 20000626 PARAMETER Experiment Name: Zm_Herbicide-Treatments_P Parameter: Tissue Value: Aerial
  misc_feature: MA Experiment 20000626 PARAMETER Experiment Name: Zm_Herbicide-Treatments_P Parameter: Treatment Value: Roundup vs. No Treatment
  misc_feature: MA Experiment ID: 20000630 Result: Up-regulated in Transcription
  misc_feature: MA Experiment 20000630 PARAMETER Experiment Name: Zm_Herbicide-Treatments_P Parameter: Timepoint (hr) Value: 4
  misc_feature: MA Experiment 20000630 PARAMETER Experiment Name: Zm_Herbicide-Treatments_P Parameter: Tissue Value: Aerial
  misc_feature: MA Experiment 20000630 PARAMETER Experiment Name: Zm_Herbicide-Treatments_P Parameter: Treatment Value: Roundup vs. No Treatment
acccaaaaccagaattaattatctgacggtgcatgccatgcccatgacacccctcgagtgcgacatggcccctgcagcttctcgccagtcgtggcctcttcctcgctgcggcctgctggtcttggcccttgcactggcgacgaccgccgcggtgggcagcgcgcagctgtcgtcggagagctactacgacgcgtcctgccccgccgcccttctcaccatcaggaccgccgtctcgacggccgtgctgctggagccccgcatgggggcctcccttctccgcctccacttccacgactgtttcgtgcagggttgcgacgcgtcggtgctgctagacgacacggcgagcttcaccggcgagaagggggcggggccgaacgcggggtcgctccggggcttcgacgtgatcgacaacatcaagatgctgctggagctgctgtgccccgcagaccgtctcctgcgccgacatcctcgccgtcgccgcccgcgactcggttgcacaactgggaggaccatcgtgggcggttccgctgggcaggagggacgcgaccacggcgagcgcgtccctggccaacagtgacctccctgggcctaccagcagcctcaacggcctgctcaacgctttctccaacaagggtttgagcagcaccgacatggttgccctctcaggtgcccacaccgtcggccgggcgcagtgcaagaactgccgggcccggatctacaacgacaccgacatcgacgcctccttcgcggcgtcgctgcgggccagctgtcccgcgcaggccggcgccggcgacggcgcgctcgagccgctcgacggctccacgccggacgccttcgacaacgcctacttcggcaacctgctctcccagcgcggcctgctccactccgaccaggcgctcttcggcggcggcggcggcggcgcgactgacggcctggtcagcgcctacgcgtccaacgccggccagtggggggccgacttcgcggcggccatggtcaagatgggcagcatcagcccgctcaccggcacggacggcgagatcagggtcaactgccggagagtgaattaattatttattacagccacgttgattgcatttgctcttggggtagtggactagcgtgcatattttgcaaagaggcagagaagaattgaaatggagcctaagctcatatgtatacaaatgttgtttattattccatattatttcttgcatatataatatatatagcatac

SEQ ID NO: 9255 - protein, 191 aa, Zea mays subsp. mays
  peptide (1)..(191): Ceres Seq. ID no. 12354116
  misc_feature (73)..(146): Pfam Name: Peroxidase Pfam Description: Peroxidase
  misc_feature (36)..(146): Homolog of NCBI NO: 34393249 NR Description: putative peroxidase precursor [Oryza sativa
  misc_feature (43)..(146): Homolog of NCBI NO: 2117619 NR Description: peroxidase (EC 1.11.1.7) 4 precursor - wheat
  misc_feature (40)..(146): Homolog of NCBI NO: 585662 NR Description: Peroxidase 2 precursor >gi|7433040|pir||T03929
  misc_feature (40)..(146): Homolog of NCBI NO: 2429292 NR Description: peroxidase [Oryza sativa]
  misc_feature (41)..(146): Homolog of NCBI NO: 34393250 NR Description: peroxidase [Oryza sativa (japonica
  misc_feature (38)..(146): Homolog of NCBI NO: 34393251 NR Description: peroxidase [Oryza sativa (japonica
  misc_feature (38)..(146): Homolog of NCBI NO: 100694 NR Description: peroxidase (EC 1.11.1.7) precursor - rice
  misc_feature (38)..(146): Homolog of NCBI NO: 2429286 NR Description: peroxidase [Oryza sativa]
  misc_feature (32)..(147): Homolog of NCBI NO: 577503 NR Description: cationic peroxidase
  misc_feature (41)..(146): Homolog of NCBI NO: 2429288 NR Description: peroxidase [Oryza sativa]
PKTRINYLTVHAMPMTPLECDMAPAASRQSWPLPRCGLLVLALALATTAAVGSAQLSSESYYDASCPAALLTIRTAVSTAVLLEPRMGASLLRLHFHDCFVQGCDASVLLDDTASFTGEKGAGPNAGSLRGFDVIDNIKMLLELLCPADRLLRRHPRRRRPRLGCTTGRTIVGGSAGQEGRDHGERVPGQQ

SEQ ID NO: 9256 - protein, 179 aa, Zea mays subsp. mays
  peptide (1)..(179): Ceres Seq. ID no. 12354117
  misc_feature (61)..(134): Pfam Name: Peroxidase Pfam Description: Peroxidase
  misc_feature (24)..(134): Homolog of NCBI NO: 34393249 NR Description: putative peroxidase precursor [Oryza sativa
  misc_feature (31)..(134): Homolog of NCBI NO: 2117619 NR Description: peroxidase (EC 1.11.1.7) 4 precursor - wheat
  misc_feature (28)..(134): Homolog of NCBI NO: 585662 NR Description: Peroxidase 2 precursor >gi|7433040|pir||T03929
  misc_feature (28)..(134): Homolog of NCBI NO: 2429292 NR Description: peroxidase [Oryza sativa]
  misc_feature (29)..(134): Homolog of NCBI NO: 34393250 NR Description: peroxidase [Oryza sativa (japonica
  misc_feature (26)..(134): Homolog of NCBI NO: 34393251 NR Description: peroxidase [Oryza sativa (japonica
  misc_feature (26)..(134): Homolog of NCBI NO: 100694 NR Description: peroxidase (EC 1.11.1.7) precursor - rice
  misc_feature (26)..(134): Homolog of NCBI NO: 2429286 NR Description: peroxidase [Oryza sativa]
  misc_feature (20)..(135): Homolog of NCBI NO: 577503 NR Description: cationic peroxidase
  misc_feature (29)..(134): Homolog of NCBI NO: 2429288 NR Description: peroxidase [Oryza sativa]
MPMTPLECDMAPAASRQSWPLPRCGLLVLALALATTAAVGSAQLSSESYYDASCPAALLTIRTAVSTAVLLEPRMGASLLRLHFHDCFVQGCDASVLLDDTASFTGEKGAGPNAGSLRGFDVIDNIKMLLELLCPADRLLRRHPRRRRPRLGCTTGRTIVGGSAGQEGRDHGERVPGQQ

SEQ ID NO: 9257 - protein, 177 aa, Zea mays subsp. mays
  peptide (1)..(177): Ceres Seq. ID no. 12354118
  misc_feature (59)..(132): Pfam Name: Peroxidase Pfam Description: Peroxidase
  misc_feature (22)..(132): Homolog of NCBI NO: 34393249 NR Description: putative peroxidase precursor [Oryza sativa
  misc_feature (29)..(132): Homolog of NCBI NO: 2117619 NR Description: peroxidase (EC 1.11.1.7) 4 precursor - wheat
  misc_feature (26)..(132): Homolog of NCBI NO: 585662 NR Description: Peroxidase 2 precursor >gi|7433040|pir||T03929
  misc_feature (26)..(132): Homolog of NCBI NO: 2429292 NR Description: peroxidase [Oryza sativa]
  misc_feature (27)..(132): Homolog of NCBI NO: 34393250 NR Description: peroxidase [Oryza sativa (japonica
  misc_feature (24)..(132): Homolog of NCBI NO: 34393251 NR Description: peroxidase [Oryza sativa (japonica
  misc_feature (24)..(132): Homolog of NCBI NO: 100694 NR Description: peroxidase (EC 1.11.1.7) precursor - rice
  misc_feature (24)..(132): Homolog of NCBI NO: 2429286 NR Description: peroxidase [Oryza sativa]
  misc_feature (18)..(133): Homolog of NCBI NO: 577503 NR Description: cationic peroxidase
  misc_feature (27)..(132): Homolog of NCBI NO: 2429288 NR Description: peroxidase [Oryza sativa]
MTPLECDMAPAASRQSWPLPRCGLLVLALALATTAAVGSAQLSSESYYDASCPAALLTIRTAVSTAVLLEPRMGASLLRLHFHDCFVQGCDASVLLDDTASFTGEKGAGPNAGSLRGFDVIDNIKMLLELLCPADRLLRRHPRRRRPRLGCTTGRTIVGGSAGQEGRDHGERVPGQQ

SEQ ID NO: 9258 - DNA, 1256 bp, Zea mays subsp. mays
  misc_feature (1)..(1256): Ceres Seq. ID no. 12362320
  misc_feature: MA Experiment ID: 108547 Result: Down-regulated in Transcription
  misc_feature: MA Experiment 108547 PARAMETER Experiment Name: Zm_Imbibed_Seeds_P Parameter: Age (day) Value: 4 vs. 2
  misc_feature: MA Experiment 108547 PARAMETER Experiment Name: Zm_Imbibed_Seeds_P Parameter: Organism Value: Zea mays
  misc_feature: MA Experiment 108547 PARAMETER Experiment Name: Zm_Imbibed_Seeds_P Parameter: Plant Line Value: 35A19
  misc_feature: MA Experiment 108547 PARAMETER Experiment Name: Zm_Imbibed_Seeds_P Parameter: Tissue Value: Aerial vs. Embryo
  misc_feature: MA Experiment ID: 20000477 Result: Down-regulated in Transcription
  misc_feature: MA Experiment 20000477 PARAMETER Experiment Name: Zm_5mM_SA_P Parameter: Age (day) Value: 10
  misc_feature: MA Experiment 20000477 PARAMETER Experiment Name: Zm_5mM_SA_P Parameter: Organism Value: Zea mays
  misc_feature: MA Experiment 20000477 PARAMETER Experiment Name: Zm_5mM_SA_P Parameter: Plant Line Value: 35A19
  misc_feature: MA Experiment 20000477 PARAMETER Experiment Name: Zm_5mM_SA_P Parameter: Timepoint (hr) Value: 48
  misc_feature: MA Experiment 20000477 PARAMETER Experiment Name: Zm_5mM_SA_P Parameter: Tissue Value: Aerial
  misc_feature: MA Experiment 20000477 PARAMETER Experiment Name: Zm_5mM_SA_P Parameter: Treatment Value: 5mM SA vs. No Treatment
gcacgagaccattacctagaacatcctaatcgaaaaactcggcctcggccacggccaccctctcaaaccaaacagaacccacacgcgtgcacggacacggagcacgcgtgcgcgccccacgagcgatgtctccccttcgccgcgcgcgctctaccctgctcctcctccactacgtggccgcctcccacttcctgctgtgcgcgccgatccagcgcaccgccgcggccacattgccggaccccgcgccactcgacccggcactgatcctcccctcggcgacctcggtgcagcccaccgccactaccattcccgggggcacgatcccggcgttccccgagcagtcggactcgctagcggggtcctcgtccgcgtgcccgctcgccccttccccggtgctcctcccggccgtgcggtcctcctgcgccaccgacgacggcgcgctgccgccgaggctgcgctgctgccccgcgctggccgcgtggctgttcgccgcctacgcgcccaccgcgctagcggagcggcccccggccgcggccgcggctaccgtggacatgccgctgccgcccgacgactccgagacgtgcgcgggcgccgtggaccgcgcgctgcgtgcggcgggagcggcgctgccccgcccccctggcgctggcggcaacgggacgtgcgacgtggcgttctgctactgcggggtgaggctgaggcggctggcctgcgggtccccgccggctgagggcgggatgtggtcgccagctgacgccgcggcgagggagctggagaaggactgcgcgcagccgggcgtccctggctgttccaaatgcctccttgctcttaccacgataaaggccacgaatcccgggtgtggtgctggcgtggaggcagcaggcaagaagaagcagcagatctaccgatggaccgcgagtgaccgtgactgcgagctcatggggctcatgtggctgctgcagcgcaatgccacacggtacggagcggcggccacggccgtgatccgggccctaatggccgtggacgaggcgttcaccgcaggggtcgcggtggcggcagatacgggggcagccgtggcgtgctcgctgcccgtggacgacgacatgcccctcccggccgagtacgcgcaggtcagcagggccagcgacgcgcctcgtctctgctgcttcctgctcgtgctgctctccattctaagcttctgttttgtgtactcgttgtaatactttgcgatttaattgaagttcgttgtatggtcc

SEQ ID NO: 9259 - protein, 364 aa, Zea mays subsp. mays
  peptide (1)..(364): Ceres Seq. ID no. 12362321
  misc_feature (45)..(340): Homolog of NCBI NO: 34394002 NR Description: unknown protein [Oryza sativa (japonica
  misc_feature (47)..(333): Homolog of NCBI NO: 18401752 NR Description: expressed protein; protein id: At3g18050.1, by cDNA: gi_15451205 [Arabidopsis thaliana] emb|CAB36779.1~gene_id:MRC8.3~similar to unknown protein
  misc_feature (65)..(297): Homolog of NCBI NO: 18417127 NR Description: expressed protein; protein id: At4g28100.1, by cDNA: 42155. [Arabidopsis thaliana] >gi|7486959|pir||T02911
  misc_feature (65)..(297): Homolog of NCBI NO: 21593735 NR Description: unknown [Arabidopsis thaliana]
MSPLRRARSTLLLLHYVAASHFLLCAPIQRTAAATLPDPAPLDPALILPSATSVQPTATTIPGGTIPAFPEQSDSLAGSSSACPLAPSPVLLPAVRSSCATDDGALPPRLRCCPALAAWLFAAYAPTALAERPPAAAAATVDMPLPPDDSETCAGAVDRALRAAGAALPRPPGAGGNGTCDVAFCYCGVRLRRLACGSPPAEGGMWSPADAAARELEKDCAQPGVPGCSKCLLALTTIKATNPGCGAGVEAAGKKKQQIYRWTASDRDCELMGLMWLLQRNATRYGAAATAVIRALMAVDEAFTAGVAVAADTGAAVACSLPVDDDMPLPAEYAQVSRASDAPRLCCFLLVLLSILSFCFVYSL

SEQ ID NO: 9260 - protein, 222 aa, Zea mays subsp. mays
  peptide (1)..(222): Ceres Seq. ID no. 12362322
  misc_feature (1)..(198): Homolog of NCBI NO: 34394002 NR Description: unknown protein [Oryza sativa (japonica
  misc_feature (1)..(191): Homolog of NCBI NO: 18401752 NR Description: expressed protein; protein id: At3g18050.1, by cDNA: gi_15451205 [Arabidopsis thaliana] emb|CAB36779.1~gene_id:MRC8.3~similar to unknown protein
  misc_feature (1)..(155): Homolog of NCBI NO: 18417127 NR Description: expressed protein; protein id: At4g28100.1, by cDNA: 42155. [Arabidopsis thaliana] >gi|7486959|pir||T02911
  misc_feature (1)..(155): Homolog of NCBI NO: 21593735 NR Description: unknown [Arabidopsis thaliana]
MPLPPDDSETCAGAVDRALRAAGAALPRPPGAGGNGTCDVAFCYCGVRLRRLACGSPPAEGGMWSPADAAARELEKDCAQPGVPGCSKCLLALTTIKATNPGCGAGVEAAGKKKQQIYRWTASDRDCELMGLMWLLQRNATRYGAAATAVIRALMAVDEAFTAGVAVAADTGAAVACSLPVDDDMPLPAEYAQVSRASDAPRLCCFLLVLLSILSFCFVYSL

SEQ ID NO: 9261 - DNA, 1772 bp, Zea mays subsp. mays
  misc_feature (1)..(1772): Ceres Seq. ID no. 12406393
  misc_feature: MA Experiment ID: 108556 Result: Down-regulated in Transcription
  misc_feature: MA Experiment 108556 PARAMETER Experiment Name: Zm_Drought_P Parameter: Age (day) Value: 9
  misc_feature: MA Experiment 108556 PARAMETER Experiment Name: Zm_Drought_P Parameter: Organism Value: Zea mays
  misc_feature: MA Experiment 108556 PARAMETER Experiment Name: Zm_Drought_P Parameter: Plant Line Value: 35A19
  misc_feature: MA Experiment 108556 PARAMETER Experiment Name: Zm_Drought_P Parameter: Timepoint (hr) Value: 24
  misc_feature: MA Experiment 108556 PARAMETER Experiment Name: Zm_Drought_P Parameter: Tissue Value: Aerial
  misc_feature: MA Experiment 108556 PARAMETER Experiment Name: Zm_Drought_P Parameter: Treatment Value: Drought vs. No Drought
  misc_feature: MA Experiment ID: 108689 Result: Down-regulated in Transcription
  misc_feature: MA Experiment 108689 PARAMETER Experiment Name: Zm_Drought_Roots_P Parameter: Age (day) Value: 9
  misc_feature: MA Experiment 108689 PARAMETER Experiment Name: Zm_Drought_Roots_P Parameter: Organism Value: Zea mays
  misc_feature: MA Experiment 108689 PARAMETER Experiment Name: Zm_Drought_Roots_P Parameter: Plant Line Value: 35A19
  misc_feature: MA Experiment 108689 PARAMETER Experiment Name: Zm_Drought_Roots_P Parameter: Timepoint (hr) Value: 24
  misc_feature: MA Experiment 108689 PARAMETER Experiment Name: Zm_Drought_Roots_P Parameter: Tissue Value: Roots
  misc_feature: MA Experiment 108689 PARAMETER Experiment Name: Zm_Drought_Roots_P Parameter: Treatment Value: Drought vs. No Drought
  misc_feature: MA Experiment ID: 20000477 Result: Down-regulated in Transcription
  misc_feature: MA Experiment 20000477 PARAMETER Experiment Name: Zm_5mM_SA_P Parameter: Age (day) Value: 10
  misc_feature: MA Experiment 20000477 PARAMETER Experiment Name: Zm_5mM_SA_P Parameter: Organism Value: Zea mays
  misc_feature: MA Experiment 20000477 PARAMETER Experiment Name: Zm_5mM_SA_P Parameter: Plant Line Value: 35A19
  misc_feature: MA Experiment 20000477 PARAMETER Experiment Name: Zm_5mM_SA_P Parameter: Timepoint (hr) Value: 48
  misc_feature: MA Experiment 20000477 PARAMETER Experiment Name: Zm_5mM_SA_P Parameter: Tissue Value: Aerial
  misc_feature: MA Experiment 20000477 PARAMETER Experiment Name: Zm_5mM_SA_P Parameter: Treatment Value: 5mM SA vs. No Treatment
  misc_feature: MA Experiment ID: 20000478 Result: Down-regulated in Transcription
  misc_feature: MA Experiment 20000478 PARAMETER Experiment Name: Zm_5mM_SA_P Parameter: Age (day) Value: 11
  misc_feature: MA Experiment 20000478 PARAMETER Experiment Name: Zm_5mM_SA_P Parameter: Organism Value: Zea mays
  misc_feature: MA Experiment 20000478 PARAMETER Experiment Name: Zm_5mM_SA_P Parameter: Plant Line Value: 35A19
  misc_feature: MA Experiment 20000478 PARAMETER Experiment Name: Zm_5mM_SA_P Parameter: Timepoint (hr) Value: 72
  misc_feature: MA Experiment 20000478 PARAMETER Experiment Name: Zm_5mM_SA_P Parameter: Tissue Value: Aerial
  misc_feature: MA Experiment 20000478 PARAMETER Experiment Name: Zm_5mM_SA_P Parameter: Treatment Value: 5mM SA vs. No Treatment
  misc_feature: MA Experiment ID: 20000479 Result: Down-regulated in Transcription
  misc_feature: MA Experiment 20000479 PARAMETER Experiment Name: Zm_Drought_P Parameter: Age (day) Value: 10
  misc_feature: MA Experiment 20000479 PARAMETER Experiment Name: Zm_Drought_P Parameter: Organism Value: Zea mays
  misc_feature: MA Experiment 20000479 PARAMETER Experiment Name: Zm_Drought_P Parameter: Plant Line Value: 35A19
  misc_feature: MA Experiment 20000479 PARAMETER Experiment Name: Zm_Drought_P Parameter: Timepoint (hr) Value: 48
  misc_feature: MA Experiment 20000479 PARAMETER Experiment Name: Zm_Drought_P Parameter: Tissue Value: Aerial
  misc_feature: MA Experiment 20000479 PARAMETER Experiment Name: Zm_Drought_P Parameter: Treatment Value: Drought vs. No Drought
  misc_feature: MA Experiment ID: 20000480 Result: Down-regulated in Transcription
  misc_feature: MA Experiment 20000480 PARAMETER Experiment Name: Zm_Drought_P Parameter: Age (day) Value: 11
  misc_feature: MA Experiment 20000480 PARAMETER Experiment Name: Zm_Drought_P Parameter: Organism Value: Zea mays
  misc_feature: MA Experiment 20000480 PARAMETER Experiment Name: Zm_Drought_P Parameter: Plant Line Value: 35A19
  misc_feature: MA Experiment 20000480 PARAMETER Experiment Name: Zm_Drought_P Parameter: Timepoint (hr) Value: 72
  misc_feature: MA Experiment 20000480 PARAMETER Experiment Name: Zm_Drought_P Parameter: Tissue Value: Aerial
  misc_feature: MA Experiment 20000480 PARAMETER Experiment Name: Zm_Drought_P Parameter: Treatment Value: Drought vs. No Drought
gcacgagaccattacctagaacatcctaatcaaaaaccccaccagtctctggcaggttctcccccccacccctctccgtctccgatcccgtccgcattgcttcgcgccggaccaaggaggaagggtcggcgtcgcaggcattgcggtctgctagccacgagggccatggacccgtgcccgttcgtgcgggtgctggtcggcaacctggcgctgaagatgccggcatcggcgccccccgccgccgccgcggcgtccggctccggcgtgcacccggccacgccgccctgctactactgccgcatccgcctcaacaagctgccctaccagacggcgcccgcgccgctgctgccggccaccgaggagggctcggcgccggcgccggcgccggcgtcgtgcgcggccgccttccacgcctccaaggccgacctggaccgggccgccgccaggcccgcgctcttcctcggcggccgcctccgcaccgcgcgcctcaaggtggccgtgtacgccggccgcgggggcggtgaaggcggcgggaggctgctcggcaagctcgtcttccggttcgacctcaggcgcgccgtggccgagcccttcgtcttcctcagcggctggttcgacatcggcaagcgcggcgccgggaagccggcggcggccaacgccgcgcgcgcgcagctcaacctcaccgtcctcggcgagcctgacccgaggttcgtcttcgagttcgacggcgagcccgagtgcagcccgcaggtgctccaggttaaggggagcatgaagcagcccatgttcacgtgcaagttctcctgccgcagcaacagcgacctgcgctcgcggtccgtgcagtccgactcgggcgccgtcggcccgcgcaactggctggcgaagctgtggtccgagcgcgagcgcgagcgcgcggggaaggagcgcaaggggtggtcggtgacggtgcacgacctgtcggggtcgccggtggcgctggcgtcgatggtgacgccgttcgtggcgtccccggggacggaccgcgtgggccgctccaacccgggcggctggctcatcctgcgccgccgcgtggacgggacctggacgccgtggggccgcctcgagtgctggcgcgatcgcggcggcagcgccggggacgcccagctgggctaccgcttcgagctggtgcccgaccacaacagcaacgtcacgggcacgggcgtgtgcgtggccgagtccggcgtcccggcggcccgcggcgggcggttcgccatcgacctgaccacggccggatcccccgggcggggcagcggcgagttgagccgccacgcgctctggcccccgggcggcttcgtgatgtcggccgccgtgcagggggagggccggcgcggcaggccctccgtggagatcggcgtggcgcacgtcgggtgcgccgaggacgccgccgcgttcgtcgctctggcggccgccgtcgacctcagcatggacgcgtgccggctcttctcctgcaagctgcgccgggagctgtcggcgtgaacggcgaggggggagggagattggatggtgatcggacgaacttgttttcgttgtttgtctgtaatcccgctgagttctggtgtgatgttcgtcttctaggtgccttttgtagcttagaagaagccataaaactgggctctggggtgagcgaggcgaggtgtgtgttgttggatgtttttttttggattcccagcctctccgcatcgtgctgctaccgaagtggtagagatcaaattttcaaagctgtttgtgctgtc

SEQ ID NO: 9262 - protein, 504 aa, Zea mays subsp. mays
  peptide (1)..(504): Ceres Seq. ID no. 12406394
  misc_feature (329)..(435): Pfam Name: Protein of unknown function (DUF1005) Pfam Description: Protein of unknown function (DUF1005)
  misc_feature (56)..(435): Homolog of NCBI NO: 15218372 NR Description: unknown protein; protein id: At1g10020.1
  misc_feature (423)..(502): Homolog of NCBI NO: 15218372 NR Description: unknown protein; protein id: At1g10020.1
  misc_feature (82)..(503): Homolog of NCBI NO: 36104436 NR Description: unknown protein [Oryza sativa (japonica
  misc_feature (114)..(503): Homolog of NCBI NO: 34896878 NR Description: unknown protein [Oryza sativa (japonica
  misc_feature (51)..(502): Homolog of NCBI NO: 34909364 NR Description: P0638D12.14 [Oryza sativa (japonica
  misc_feature (99)..(502): Homolog of NCBI NO: 15233530 NR Description: putative protein; protein id: At4g29310.1, by cDNA: gi_20260629 [Arabidopsis thaliana]
  misc_feature (56)..(485): Homolog of NCBI NO: 18176372 NR Description: unknown protein [Arabidopsis thaliana]
  misc_feature (56)..(485): Homolog of NCBI NO: 15230917 NR Description: unknown protein; protein id: At3g19680.1, by cDNA: gi_18176371 [Arabidopsis thaliana]
  misc_feature (56)..(306): Homolog of NCBI NO: 36104436 NR Description: unknown protein [Oryza sativa (japonica
  misc_feature (56)..(434): Homolog of NCBI NO: 15222861 NR Description: hypothetical protein; protein id: At1g50040.1, by cDNA: gi_18389271, supported by cDNA: gi_20258934 [Arabidopsis
ARDHYLEHPNQKPHQSLAGSPPHPSPSPIPSALLRAGPRRKGRRRRHCGLLATRAMDPCPFVRVLVGNLALKMPASAPPAAAAASGSGVHPATPPCYYCRIRLNKLPYQTAPAPLLPATEEGSAPAPAPASCAAAFHASKADLDRAAARPALFLGGRLRTARLKVAVYAGRGGGEGGGRLLGKLVFRFDLRRAVAEPFVFLSGWFDIGKRGAGKPAAANAARAQLNLTVLGEPDPRFVFEFDGEPECSPQVLQVKGSMKQPMFTCKFSCRSNSDLRSRSVQSDSGAVGPRNWLAKLWSERERERAGKERKGWSVTVHDLSGSPVALASMVTPFVASPGTDRVGRSNPGGWLILRRRVDGTWTPWGRLECWRDRGGSAGDAQLGYRFELVPDHNSNVTGTGVCVAESGVPAARGGRFAIDLTTAGSPGRGSGELSRHALWPPGGFVMSAAVQGEGRRGRPSVEIGVAHVGCAEDAAAFVALAAAVDLSMDACRLFSCKLRRELSA

SEQ ID NO: 9263 - protein, 449 aa, Zea mays subsp. mays
  peptide (1)..(449): Ceres Seq. ID no. 12406395
  misc_feature (274)..(380): Pfam Name: Protein of unknown function (DUF1005) Pfam Description: Protein of unknown function (DUF1005)
  misc_feature (1)..(380): Homolog of NCBI NO: 15218372 NR Description: unknown protein; protein id: At1g10020.1
  misc_feature (368)..(447): Homolog of NCBI NO: 15218372 NR Description: unknown protein; protein id: At1g10020.1
  misc_feature (27)..(448): Homolog of NCBI NO: 36104436 NR Description: unknown protein [Oryza sativa (japonica
  misc_feature (59)..(448): Homolog of NCBI NO: 34896878 NR Description: unknown protein [Oryza sativa (japonica
  misc_feature (1)..(447): Homolog of NCBI NO: 34909364 NR Description: P0638D12.14 [Oryza sativa (japonica
  misc_feature (44)..(447): Homolog of NCBI NO: 15233530 NR Description: putative protein; protein id: At4g29310.1, by cDNA: gi_20260629 [Arabidopsis thaliana]
  misc_feature (1)..(430): Homolog of NCBI NO: 18176372 NR Description: unknown protein [Arabidopsis thaliana]
  misc_feature (1)..(430): Homolog of NCBI NO: 15230917 NR Description: unknown protein; protein id: At3g19680.1, by cDNA: gi_18176371 [Arabidopsis thaliana]
  misc_feature (1)..(251): Homolog of NCBI NO: 36104436 NR Description: unknown protein [Oryza sativa (japonica
  misc_feature (1)..(379): Homolog of NCBI NO: 15222861 NR Description: hypothetical protein; protein id: At1g50040.1, by cDNA: gi_18389271, supported by cDNA: gi_20258934 [Arabidopsis
MDPCPFVRVLVGNLALKMPASAPPAAAAASGSGVHPATPPCYYCRIRLNKLPYQTAPAPLLPATEEGSAPAPAPASCAAAFHASKADLDRAAARPALFLGGRLRTARLKVAVYAGRGGGEGGGRLLGKLVFRFDLRRAVAEPFVFLSGWFDIGKRGAGKPAAANAARAQLNLTVLGEPDPRFVFEFDGEPECSPQVLQVKGSMKQPMFTCKFSCRSNSDLRSRSVQSDSGAVGPRNWLAKLWSERERERAGKERKGWSVTVHDLSGSPVALASMVTPFVASPGTDRVGRSNPGGWLILRRRVDGTWTPWGRLECWRDRGGSAGDAQLGYRFELVPDHNSNVTGTGVCVAESGVPAARGGRFAIDLTTAGSPGRGSGELSRHALWPPGGFVMSAAVQGEGRRGRPSVEIGVAHVGCAEDAAAFVALAAAVDLSMDACRLFSCKLRRELSA

SEQ ID NO: 9264 - protein, 432 aa, Zea mays subsp. mays
  peptide (1)..(432): Ceres Seq. ID no. 12406396
  misc_feature (257)..(363): Pfam Name: Protein of unknown function (DUF1005) Pfam Description: Protein of unknown function (DUF1005)
  misc_feature (1)..(363): Homolog of NCBI NO: 15218372 NR Description: unknown protein; protein id: At1g10020.1
  misc_feature (351)..(430): Homolog of NCBI NO: 15218372 NR Description: unknown protein; protein id: At1g10020.1
  misc_feature (10)..(431): Homolog of NCBI NO: 36104436 NR Description: unknown protein [Oryza sativa (japonica
  misc_feature (42)..(431): Homolog of NCBI NO: 34896878 NR Description: unknown protein [Oryza sativa (japonica
  misc_feature (1)..(430): Homolog of NCBI NO: 34909364 NR Description: P0638D12.14 [Oryza sativa (japonica
  misc_feature (27)..(430): Homolog of NCBI NO: 15233530 NR Description: putative protein; protein id: At4g29310.1, by cDNA: gi_20260629 [Arabidopsis thaliana]
  misc_feature (1)..(413): Homolog of NCBI NO: 18176372 NR Description: unknown protein [Arabidopsis thaliana]
  misc_feature (1)..(413): Homolog of NCBI NO: 15230917 NR Description: unknown protein; protein id: At3g19680.1, by cDNA: gi_18176371 [Arabidopsis thaliana]
  misc_feature (1)..(234): Homolog of NCBI NO: 36104436 NR Description: unknown protein [Oryza sativa (japonica
  misc_feature (1)..(362): Homolog of NCBI NO: 15222861 NR Description: hypothetical protein; protein id: At1g50040.1, by cDNA: gi_18389271, supported by cDNA: gi_20258934 [Arabidopsis
MPASAPPAAAAASGSGVHPATPPCYYCRIRLNKLPYQTAPAPLLPATEEGSAPAPAPASCAAAFHASKADLDRAAARPALFLGGRLRTARLKVAVYAGRGGGEGGGRLLGKLVFRFDLRRAVAEPFVFLSGWFDIGKRGAGKPAAANAARAQLNLTVLGEPDPRFVFEFDGEPECSPQVLQVKGSMKQPMFTCKFSCRSNSDLRSRSVQSDSGAVGPRNWLAKLWSERERERAGKERKGWSVTVHDLSGSPVALASMVTPFVASPGTDRVGRSNPGGWLILRRRVDGTWTPWGRLECWRDRGGSAGDAQLGYRFELVPDHNSNVTGTGVCVAESGVPAARGGRFAIDLTTAGSPGRGSGELSRHALWPPGGFVMSAAVQGEGRRGRPSVEIGVAHVGCAEDAAAFVALAAAVDLSMDACRLFSCKLRRELSA

SEQ ID NO: 9265 - DNA, 1506 bp, Zea mays subsp. mays
  misc_feature (1)..(1506): Ceres Seq. ID no. 12349452
  misc_feature: MA Experiment ID: 108556 Result: Up-regulated in Transcription
  misc_feature: MA Experiment 108556 PARAMETER Experiment Name: Zm_Drought_P Parameter: Age (day) Value: 9
  misc_feature: MA Experiment 108556 PARAMETER Experiment Name: Zm_Drought_P Parameter: Organism Value: Zea mays
  misc_feature: MA Experiment 108556 PARAMETER Experiment Name: Zm_Drought_P Parameter: Plant Line Value: 35A19
  misc_feature: MA Experiment 108556 PARAMETER Experiment Name: Zm_Drought_P Parameter: Timepoint (hr) Value: 24
  misc_feature: MA Experiment 108556 PARAMETER Experiment Name: Zm_Drought_P Parameter: Tissue Value: Aerial
  misc_feature: MA Experiment 108556 PARAMETER Experiment Name: Zm_Drought_P Parameter: Treatment Value: Drought vs. No Drought
  misc_feature: MA Experiment ID: 20000479 Result: Up-regulated in Transcription
  misc_feature: MA Experiment 20000479 PARAMETER Experiment Name: Zm_Drought_P Parameter: Age (day) Value: 10
  misc_feature: MA Experiment 20000479 PARAMETER Experiment Name: Zm_Drought_P Parameter: Organism Value: Zea mays
  misc_feature: MA Experiment 20000479 PARAMETER Experiment Name: Zm_Drought_P Parameter: Plant Line Value: 35A19
  misc_feature: MA Experiment 20000479 PARAMETER Experiment Name: Zm_Drought_P Parameter: Timepoint (hr) Value: 48
  misc_feature: MA Experiment 20000479 PARAMETER Experiment Name: Zm_Drought_P Parameter: Tissue Value: Aerial
  misc_feature: MA Experiment 20000479 PARAMETER Experiment Name: Zm_Drought_P Parameter: Treatment Value: Drought vs. No Drought
  misc_feature: MA Experiment ID: 20000480 Result: Up-regulated in Transcription
  misc_feature: MA Experiment 20000480 PARAMETER Experiment Name: Zm_Drought_P Parameter: Age (day) Value: 11
  misc_feature: MA Experiment 20000480 PARAMETER Experiment Name: Zm_Drought_P Parameter: Organism Value: Zea mays
  misc_feature: MA Experiment 20000480 PARAMETER Experiment Name: Zm_Drought_P Parameter: Plant Line Value: 35A19
  misc_feature: MA Experiment 20000480 PARAMETER Experiment Name: Zm_Drought_P Parameter: Timepoint (hr) Value: 72
  misc_feature: MA Experiment 20000480 PARAMETER Experiment Name: Zm_Drought_P Parameter: Tissue Value: Aerial
  misc_feature: MA Experiment 20000480 PARAMETER Experiment Name: Zm_Drought_P Parameter: Treatment Value: Drought vs. No Drought
  misc_feature: MA Experiment ID: 20000535 Result: Up-regulated in Transcription
  misc_feature: MA Experiment 20000535 PARAMETER Experiment Name: Zm_Hybrid_Seed_Dev_P Parameter: DAP Value: 30 vs. 12
  misc_feature: MA Experiment 20000535 PARAMETER Experiment Name: Zm_Hybrid_Seed_Dev_P Parameter: Organism Value: Zea mays
  misc_feature: MA Experiment 20000535 PARAMETER Experiment Name: Zm_Hybrid_Seed_Dev_P Parameter: Plant Line Value: 35A19
  misc_feature: MA Experiment 20000535 PARAMETER Experiment Name: Zm_Hybrid_Seed_Dev_P Parameter: Tissue Value: Embryo vs. Unfert Floret
atgggcgctgctggggacacggatgccgcgctccacgctcttcttcccgctctacctcatgtccatcgggcaaggcgggtaccagccttcgctgcaagcgttcggcgccgaccagctgagcatcggggacgatgacgacgacgacggtgacaccgagcccggcgcgtcgtcgacgccggaggagaagtccaaggtgaagagcatgttcttccggtggtggtacttcggcatgtgcagcggcagcctgctggggaactccaccatgtcgtacgtccaagacaacctcggctggggcctcggtttcgccatcccctgcgccgtcatggccttgtccgtcgcggccttcttctgctgcacccctctgtacaagcgcaaggtgcaggtacagcagccgaagggcgccggtattaggccgtctccgagtagcgtcttcaagtcggtgctcggcgctagccgaaagatcagtctgccgccgtcgaggtcatcagacgacaatggcgacgccatttctgagcttgagttgcaagagaagccactgaaaactgatgaagcatcagagtcctcctctgacgaggctgccgctgctcccggcgtggccaaggtcatactcggcctcctgccgatctgggcgatcctgctcgtcttcgcggtgatcttccagcagccgatgaccttcttcaccaagcaaggcatgctgatgaaccacacgatcggcgtcggcgtcggctccggctccctggtgatcccgccggcgatgctgcagagctccatcaccgtctccatcatcctgctcgtgcccatgtacgaccggatgatcgtcccgctgaccaacgccgtcacggggggcagcgacggcatcacggtgctccagcggatcggcgtcggcatggtcctctccgtggtggccatggtcgccgcggcgctcgtcgagtcgcggcggctccgcgcggagcccgccctgctgagcatcttctggctcctgccgcagtacgtcctgctgggggtctccgacgtgttcaccgtggtggggatgcaggagttcttctactcgcaggtgccggcctccatgaggaccaccggcatcgggctctacctcagcgtcttcggcgtcggcggattcctcggcgcgtccctcatcaccctgctcgagatggccacggcgaggcccggcaacgcccgcggatggttctctgacgacccgcgggaggcgcggatagataacttctactggttcttggctctcctctgcttcgtcagctttgtcgtcttcacgcacttgtgcaagtactacaacgacagatctgcgtcagggaggtaggatcgacccgagtaattaagctgggggtggacgagaggatcttcgatcttgattttgcttgacagcttgagtgagaatttattacttgtattttcagggcgattctattctagctagagatagttcggctgtgtaatgttttcagaaagacatgtaattcaggactccagacgtaatggttctgttcc

SEQ ID NO: 9266 - protein, 438 aa, Zea mays subsp. mays
  peptide (1)..(438): Ceres Seq. ID no. 12349453
  misc_feature (2)..(368): Pfam Name: POT family Pfam Description: POT family
  misc_feature (2)..(434): Homolog of NCBI NO: 15242171 NR Description: oligopeptide transporter -like protein; protein At5g14940.1 [Arabidopsis thaliana] >gi|11358595|pir||T51439
  misc_feature (180)..(430): Homolog of NCBI NO: 34908690 NR Description: P0039A07.26 [Oryza sativa (japonica
  misc_feature (11)..(168): Homolog of NCBI NO: 34908690 NR Description: P0039A07.26 [Oryza sativa (japonica
  misc_feature (180)..(430): Homolog of NCBI NO: 34908688 NR Description: P0039A07.25 [Oryza sativa (japonica
  misc_feature (14)..(172): Homolog of NCBI NO: 34908688 NR Description: P0039A07.25 [Oryza sativa (japonica
  misc_feature (3)..(430): Homolog of NCBI NO: 25402970 NR Description: Similar to peptide transporter [imported] - thaliana >gi|6587835|gb|AAF18524.1|AC006551_10 Similar to peptide
  misc_feature (3)..(430): Homolog of NCBI NO: 30687920 NR Description: oligopeptide transporter -related [Arabidopsis
  misc_feature (14)..(430): Homolog of NCBI NO: 15218352 NR Description: oligopeptide transporter, putative; protein id: [Arabidopsis thaliana] >gi|25406146|pir||E96744 probable
  misc_feature (199)..(430): Homolog of NCBI NO: 15218381 NR Description: peptide transporter PTR2-B, putative; protein id:
  misc_feature (13)..(123): Homolog of NCBI NO: 15218381 NR Description: peptide transporter PTR2-B, putative; protein id:
WALLGTRMPRSTLFFPLYLMSIGQGGYQPSLQAFGADQLSIGDDDDDDGDTEPGASSTPEEKSKVKSMFFRWWYFGMCSGSLLGNSTMSYVQDNLGWGLGFAIPCAVMALSVAAFFCCTPLYKRKVQVQQPKGAGIRPSPSSVFKSVLGASRKISLPPSRSSDDNGDAISELELQEKPLKTDEASESSSDEAAAAPGVAKVILGLLPIWAILLVFAVIFQQPMTFFTKQGMLMNHTIGVGVGSGSLVIPPAMLQSSITVSIILLVPMYDRMIVPLTNAVTGGSDGITVLQRIGVGMVLSVVAMVAAALVESRRLRAEPALLSIFWLLPQYVLLGVSDVFTVVGMQEFFYSQVPASMRTTGIGLYLSVFGVGGFLGASLITLLEMATARPGNARGWFSDDPREARIDNFYWFLALLCFVSFVVFTHLCKYYNDRSASGR

SEQ ID NO: 9267 - protein, 431 aa, Zea mays subsp. mays
  peptide (1)..(431): Ceres Seq. ID no. 12349454
  misc_feature (1)..(361): Pfam Name: POT family Pfam Description: POT family
  misc_feature (1)..(427): Homolog of NCBI NO: 15242171 NR Description: oligopeptide transporter -like protein; protein At5g14940.1 [Arabidopsis thaliana] >gi|11358595|pir||T51439
  misc_feature (173)..(423): Homolog of NCBI NO: 34908690 NR Description: P0039A07.26 [Oryza sativa (japonica
  misc_feature (4)..(161): Homolog of NCBI NO: 34908690 NR Description: P0039A07.26 [Oryza sativa (japonica
  misc_feature (173)..(423): Homolog of NCBI NO: 34908688 NR Description: P0039A07.25 [Oryza sativa (japonica
  misc_feature (7)..(165): Homolog of NCBI NO: 34908688 NR Description: P0039A07.25 [Oryza sativa (japonica
  misc_feature (1)..(423): Homolog of NCBI NO: 25402970 NR Description: Similar to peptide transporter [imported] - thaliana >gi|6587835|gb|AAF18524.1|AC006551_10 Similar to peptide
  misc_feature (1)..(423): Homolog of NCBI NO: 30687920 NR Description: oligopeptide transporter -related [Arabidopsis
  misc_feature (7)..(423): Homolog of NCBI NO: 15218352 NR Description: oligopeptide transporter, putative; protein id: [Arabidopsis thaliana] >gi|25406146|pir||E96744 probable
  misc_feature (192)..(423): Homolog of NCBI NO: 15218381 NR Description: peptide transporter PTR2-B, putative; protein id:
  misc_feature (6)..(116): Homolog of NCBI NO: 15218381 NR Description: peptide transporter PTR2-B, putative; protein id:
MPRSTLFFPLYLMSIGQGGYQPSLQAFGADQLSIGDDDDDDGDTEPGASSTPEEKSKVKSMFFRWWYFGMCSGSLLGNSTMSYVQDNLGWGLGFAIPCAVMALSVAAFFCCTPLYKRKVQVQQPKGAGIRPSPSSVFKSVLGASRKISLPPSRSSDDNGDAISELELQEKPLKTDEASESSSDEAAAAPGVAKVILGLLPIWAILLVFAVIFQQPMTFFTKQGMLMNHTIGVGVGSGSLVIPPAMLQSSITVSIILLVPMYDRMIVPLTNAVTGGSDGITVLQRIGVGMVLSVVAMVAAALVESRRLRAEPALLSIFWLLPQYVLLGVSDVFTVVGMQEFFYSQVPASMRTTGIGLYLSVFGVGGFLGASLITLLEMATARPGNARGWFSDDPREARIDNFYWFLALLCFVSFVVFTHLCKYYNDRSASGR

SEQ ID NO: 9268 - protein, 419 aa, Zea mays subsp. mays
  peptide (1)..(419): Ceres Seq. ID no. 12349455
  misc_feature (1)..(349): Pfam Name: POT family Pfam Description: POT family
  misc_feature (1)..(415): Homolog of NCBI NO: 15242171 NR Description: oligopeptide transporter -like protein; protein At5g14940.1 [Arabidopsis thaliana] >gi|11358595|pir||T51439
  misc_feature (161)..(411): Homolog of NCBI NO: 34908690 NR Description: P0039A07.26 [Oryza sativa (japonica
  misc_feature (1)..(149): Homolog of NCBI NO: 34908690 NR Description: P0039A07.26 [Oryza sativa (japonica
  misc_feature (161)..(411): Homolog of NCBI NO: 34908688 NR Description: P0039A07.25 [Oryza sativa (japonica
  misc_feature (1)..(153): Homolog of NCBI NO: 34908688 NR Description: P0039A07.25 [Oryza sativa (japonica
  misc_feature (1)..(411): Homolog of NCBI NO: 25402970 NR Description: Similar to peptide transporter [imported] - thaliana >gi|6587835|gb|AAF18524.1|AC006551_10 Similar to peptide
  misc_feature (1)..(411): Homolog of NCBI NO: 30687920 NR Description: oligopeptide transporter -related [Arabidopsis
  misc_feature (1)..(411): Homolog of NCBI NO: 15218352 NR Description: oligopeptide transporter, putative; protein id: [Arabidopsis thaliana] >gi|25406146|pir||E96744 probable
  misc_feature (180)..(411): Homolog of NCBI NO: 15218381 NR Description: peptide transporter PTR2-B, putative; protein id:
  misc_feature (1)..(104): Homolog of NCBI NO: 15218381 NR Description: peptide transporter PTR2-B, putative; protein id:
MSIGQGGYQPSLQAFGADQLSIGDDDDDDGDTEPGASSTPEEKSKVKSMFFRWWYFGMCSGSLLGNSTMSYVQDNLGWGLGFAIPCAVMALSVAAFFCCTPLYKRKVQVQQPKGAGIRPSPSSVFKSVLGASRKISLPPSRSSDDNGDAISELELQEKPLKTDEASESSSDEAAAAPGVAKVILGLLPIWAILLVFAVIFQQPMTFFTKQGMLMNHTIGVGVGSGSLVIPPAMLQSSITVSIILLVPMYDRMIVPLTNAVTGGSDGITVLQRIGVGMVLSVVAMVAAALVESRRLRAEPALLSIFWLLPQYVLLGVSDVFTVVGMQEFFYSQVPASMRTTGIGLYLSVFGVGGFLGASLITLLEMATARPGNARGWFSDDPREARIDNFYWFLALLCFVSFVVFTHLCKYYNDRSASGR

SEQ ID NO: 9269 - DNA, 834 bp, Zea mays subsp. mays
  misc_feature (1)..(834): Ceres Seq. ID no. 12404684
  misc_feature: MA Experiment ID: 108504 Result: Up-regulated in Transcription
  misc_feature: MA Experiment 108504 PARAMETER Experiment Name: Zm_Drought_P Parameter: Age (day) Value: 8
  misc_feature: MA Experiment 108504 PARAMETER Experiment Name: Zm_Drought_P Parameter: Organism Value: Zea mays
  misc_feature: MA Experiment 108504 PARAMETER Experiment Name: Zm_Drought_P Parameter: Plant Line Value: 35A19
  misc_feature: MA Experiment 108504 PARAMETER Experiment Name: Zm_Drought_P Parameter: Timepoint (hr) Value: 12
  misc_feature: MA Experiment 108504 PARAMETER Experiment Name: Zm_Drought_P Parameter: Tissue Value: Aerial
  misc_feature: MA Experiment 108504 PARAMETER Experiment Name: Zm_Drought_P Parameter: Treatment Value: Drought vs. No Drought
  misc_feature: MA Experiment ID: 108515 Result: Up-regulated in Transcription
  misc_feature: MA Experiment 108515 PARAMETER Experiment Name: Zm_2mM_SA_P Parameter: Age (day) Value: 8
  misc_feature: MA Experiment 108515 PARAMETER Experiment Name: Zm_2mM_SA_P Parameter: Organism Value: Zea mays
  misc_feature: MA Experiment 108515 PARAMETER Experiment Name: Zm_2mM_SA_P Parameter: Plant Line Value: 35A19
  misc_feature: MA Experiment 108515 PARAMETER Experiment Name: Zm_2mM_SA_P Parameter: Timepoint (hr) Value: 12
  misc_feature: MA Experiment 108515 PARAMETER Experiment Name: Zm_2mM_SA_P Parameter: Tissue Value: Aerial
  misc_feature: MA Experiment 108515 PARAMETER Experiment Name: Zm_2mM_SA_P Parameter: Treatment Value: 2mM SA vs. No Treatment
  misc_feature: MA Experiment ID: 108522 Result: Up-regulated in Transcription
  misc_feature: MA Experiment 108522 PARAMETER Experiment Name: Zm_42deg_Heat_P Parameter: Age (day) Value: 8
  misc_feature: MA Experiment 108522 PARAMETER Experiment Name: Zm_42deg_Heat_P Parameter: Organism Value: Zea mays
  misc_feature: MA Experiment 108522 PARAMETER Experiment Name: Zm_42deg_Heat_P Parameter: Plant Line Value: 35A19
  misc_feature: MA Experiment 108522 PARAMETER Experiment Name: Zm_42deg_Heat_P Parameter: Temperature (deg C) Value: 42 vs. 22
  misc_feature: MA Experiment 108522 PARAMETER Experiment Name: Zm_42deg_Heat_P Parameter: Timepoint (hr) Value: 1
  misc_feature: MA Experiment 108522 PARAMETER Experiment Name: Zm_42deg_Heat_P Parameter: Tissue Value: Aerial
  misc_feature: MA Experiment ID: 108523 Result: Up-regulated in Transcription
  misc_feature: MA Experiment 108523 PARAMETER Experiment Name: Zm_42deg_Heat_P Parameter: Age (day) Value: 8
  misc_feature: MA Experiment 108523 PARAMETER Experiment Name: Zm_42deg_Heat_P Parameter: Organism Value: Zea mays
  misc_feature: MA Experiment 108523 PARAMETER Experiment Name: Zm_42deg_Heat_P Parameter: Plant Line Value: 35A19
  misc_feature: MA Experiment 108523 PARAMETER Experiment Name: Zm_42deg_Heat_P Parameter: Temperature (deg C) Value: 42 vs. 22
  misc_feature: MA Experiment 108523 PARAMETER Experiment Name: Zm_42deg_Heat_P Parameter: Timepoint (hr) Value: 6
  misc_feature: MA Experiment 108523 PARAMETER Experiment Name: Zm_42deg_Heat_P Parameter: Tissue Value: Aerial
  misc_feature: MA Experiment ID: 108526 Result: Up-regulated in Transcription
  misc_feature: MA Experiment 108526 PARAMETER Experiment Name: Zm_5mM_NO_P Parameter: Age (day) Value: 8
  misc_feature: MA Experiment 108526 PARAMETER Experiment Name: Zm_5mM_NO_P Parameter: Organism Value: Zea mays
  misc_feature: MA Experiment 108526 PARAMETER Experiment Name: Zm_5mM_NO_P Parameter: Plant Line Value: 35A19
  misc_feature: MA Experiment 108526 PARAMETER Experiment Name: Zm_5mM_NO_P Parameter: Timepoint (hr) Value: 1
  misc_feature: MA Experiment 108526 PARAMETER Experiment Name: Zm_5mM_NO_P Parameter: Tissue Value: Aerial
  misc_feature: MA Experiment 108526 PARAMETER Experiment Name: Zm_5mM_NO_P Parameter: Treatment Value: 5mM NO vs. No Treatment
  misc_feature: MA Experiment ID: 108527 Result: Up-regulated in Transcription
  misc_feature: MA Experiment 108527 PARAMETER Experiment Name: Zm_5mM_NO_P Parameter: Age (day) Value: 8
  misc_feature: MA Experiment 108527 PARAMETER Experiment Name: Zm_5mM_NO_P Parameter: Organism Value: Zea mays
  misc_feature: MA Experiment 108527 PARAMETER Experiment Name: Zm_5mM_NO_P Parameter: Plant Line Value: 35A19
  misc_feature: MA Experiment 108527 PARAMETER Experiment Name: Zm_5mM_NO_P Parameter: Timepoint (hr) Value: 6
  misc_feature: MA Experiment 108527 PARAMETER Experiment Name: Zm_5mM_NO_P Parameter: Tissue Value: Aerial
  misc_feature: MA Experiment 108527 PARAMETER Experiment Name: Zm_5mM_NO_P Parameter: Treatment Value: 5mM NO vs. No Treatment
  misc_feature: MA Experiment ID: 108528 Result: Down-regulated in Transcription
  misc_feature: MA Experiment 108528 PARAMETER Experiment Name: Zm_Imbibed_Seeds_P Parameter: Age (day) Value: 5 vs. 2
  misc_feature: MA Experiment 108528 PARAMETER Experiment Name: Zm_Imbibed_Seeds_P Parameter: Organism Value: Zea mays
  misc_feature: MA Experiment 108528 PARAMETER Experiment Name: Zm_Imbibed_Seeds_P Parameter: Plant Line Value: 35A19
  misc_feature: MA Experiment 108528 PARAMETER Experiment Name: Zm_Imbibed_Seeds_P Parameter: Tissue Value: Aerial vs. Embryo
  misc_feature: MA Experiment ID: 108529 Result: Down-regulated in Transcription
  misc_feature: MA Experiment 108529 PARAMETER Experiment Name: Zm_Imbibed_Seeds_P Parameter: Age (day) Value: 5 vs. 2
  misc_feature: MA Experiment 108529 PARAMETER Experiment Name: Zm_Imbibed_Seeds_P Parameter: Organism Value: Zea mays
  misc_feature: MA Experiment 108529 PARAMETER Experiment Name: Zm_Imbibed_Seeds_P Parameter: Plant Line Value: 35A19
  misc_feature: MA Experiment 108529 PARAMETER Experiment Name: Zm_Imbibed_Seeds_P Parameter: Tissue Value: Roots vs. Embryo
  misc_feature: MA Experiment ID: 108530 Result: Down-regulated in Transcription
  misc_feature: MA Experiment 108530 PARAMETER Experiment Name: Zm_Imbibed_Seeds_P Parameter: Age (day) Value: 6 vs. 2
  misc_feature: MA Experiment 108530 PARAMETER Experiment Name: Zm_Imbibed_Seeds_P Parameter: Organism Value: Zea mays
  misc_feature: MA Experiment 108530 PARAMETER Experiment Name: Zm_Imbibed_Seeds_P Parameter: Plant Line Value: 35A19
  misc_feature: MA Experiment 108530 PARAMETER Experiment Name: Zm_Imbibed_Seeds_P Parameter: Tissue Value: Aerial vs. Embryo
  misc_feature: MA Experiment ID: 108534 Result: Up-regulated in Transcription
  misc_feature: MA Experiment 108534 PARAMETER Experiment Name: Zm_4deg_Cold_P Parameter: Age (hr) Value: 8
  misc_feature: MA Experiment 108534 PARAMETER Experiment Name: Zm_4deg_Cold_P Parameter: Organism Value: Zea mays
  misc_feature: MA Experiment 108534 PARAMETER Experiment Name: Zm_4deg_Cold_P Parameter: Plant Line Value: 35A19
  misc_feature: MA Experiment 108534 PARAMETER Experiment Name: Zm_4deg_Cold_P Parameter: Temperature (deg C) Value: 4 vs. 22
  misc_feature: MA Experiment 108534 PARAMETER Experiment Name: Zm_4deg_Cold_P Parameter: Timepoint (hr) Value: 6
  misc_feature: MA Experiment 108534 PARAMETER Experiment Name: Zm_4deg_Cold_P Parameter: Tissue Value: Aerial
  misc_feature: MA Experiment ID: 108536 Result: Up-regulated in Transcription
  misc_feature: MA Experiment 108536 PARAMETER Experiment Name: Zm_Meristem_P Parameter: Age (day) Value: 8
  misc_feature: MA Experiment 108536 PARAMETER Experiment Name: Zm_Meristem_P Parameter: Organism Value: Zea mays
  misc_feature: MA Experiment 108536 PARAMETER Experiment Name: Zm_Meristem_P Parameter: Plant Line Value: 35A19
  misc_feature: MA Experiment 108536 PARAMETER Experiment Name: Zm_Meristem_P Parameter: Tissue Value: Shoot Meristem vs. Above Shoot Meristem
  misc_feature: MA Experiment ID: 108540 Result: Up-regulated in Transcription
  misc_feature: MA Experiment 108540 PARAMETER Experiment Name: Zm_20percent_PEG_P Parameter: Age (day) Value: 8
  misc_feature: MA Experiment 108540 PARAMETER Experiment Name: Zm_20percent_PEG_P Parameter: Organism Value: Zea mays
  misc_feature: MA Experiment 108540 PARAMETER Experiment Name: Zm_20percent_PEG_P Parameter: Plant Line Value: 35A19
  misc_feature: MA Experiment 108540 PARAMETER Experiment Name: Zm_20percent_PEG_P Parameter: Timepoint (hr) Value: 6
  misc_feature: MA Experiment 108540 PARAMETER Experiment Name: Zm_20percent_PEG_P Parameter: Tissue Value: Aerial
  misc_feature: MA Experiment 108540 PARAMETER Experiment Name: Zm_20percent_PEG_P Parameter: Treatment Value: 20percent PEG vs. No Treatment
  misc_feature: MA Experiment ID: 108542 Result: Up-regulated in Transcription
  misc_feature: MA Experiment 108542 PARAMETER Experiment Name: Zm_150mM_NaCl_P Parameter: Age (day) Value: 8
  misc_feature: MA Experiment 108542 PARAMETER Experiment Name: Zm_150mM_NaCl_P Parameter: Organism Value: Zea mays
  misc_feature: MA Experiment 108542 PARAMETER Experiment Name: Zm_150mM_NaCl_P Parameter: Plant Line Value: 35A19
  misc_feature: MA Experiment 108542 PARAMETER Experiment Name: Zm_150mM_NaCl_P Parameter: Timepoint (hr) Value: 6
  misc_feature: MA Experiment 108542 PARAMETER Experiment Name: Zm_150mM_NaCl_P Parameter: Tissue Value: Aerial
  misc_feature: MA Experiment 108542 PARAMETER Experiment Name: Zm_150mM_NaCl_P Parameter: Treatment Value: 150mM NaCl vs. No Treatment
  misc_feature: MA Experiment ID: 108544 Result: Up-regulated in Transcription
  misc_feature: MA Experiment ID: 108545 Result: Down-regulated in Transcription
  misc_feature: MA Experiment 108545 PARAMETER Experiment Name: Zm_Imbibed_Seeds_P Parameter: Age (day) Value: 3 vs. 2
  misc_feature: MA Experiment 108545 PARAMETER Experiment Name: Zm_Imbibed_Seeds_P Parameter: Organism Value: Zea mays
  misc_feature: MA Experiment 108545 PARAMETER Experiment Name: Zm_Imbibed_Seeds_P Parameter: Plant Line Value: 35A19
  misc_feature: MA Experiment 108545 PARAMETER Experiment Name: Zm_Imbibed_Seeds_P Parameter: Tissue Value: Aerial vs. Embryo
  misc_feature: MA Experiment ID: 108546 Result: Down-regulated in Transcription
  misc_feature: MA Experiment 108546 PARAMETER Experiment Name: Zm_Imbibed_Seeds_P Parameter: Age (day) Value: 3 vs. 2
  misc_feature: MA Experiment 108546 PARAMETER Experiment Name: Zm_Imbibed_Seeds_P Parameter: Organism Value: Zea mays
  misc_feature: MA Experiment 108546 PARAMETER Experiment Name: Zm_Imbibed_Seeds_P Parameter: Plant Line Value: 35A19
  misc_feature: MA Experiment 108546 PARAMETER Experiment Name: Zm_Imbibed_Seeds_P Parameter: Tissue Value: Roots vs. Embryo
  misc_feature: MA Experiment ID: 108547 Result: Down-regulated in Transcription
  misc_feature: MA Experiment 108547 PARAMETER Experiment Name: Zm_Imbibed_Seeds_P Parameter: Age (day) Value: 4 vs. 2
  misc_feature: MA Experiment 108547 PARAMETER Experiment Name: Zm_Imbibed_Seeds_P Parameter: Organism Value: Zea mays
  misc_feature: MA Experiment 108547 PARAMETER Experiment Name: Zm_Imbibed_Seeds_P Parameter: Plant Line Value: 35A19
  misc_feature: MA Experiment 108547 PARAMETER Experiment Name: Zm_Imbibed_Seeds_P Parameter: Tissue Value: Aerial vs. Embryo
  misc_feature: MA Experiment ID: 108556 Result: Up-regulated in Transcription
  misc_feature: MA Experiment 108556 PARAMETER Experiment Name: Zm_Drought_P Parameter: Age (day) Value: 9
  misc_feature: MA Experiment 108556 PARAMETER Experiment Name: Zm_Drought_P Parameter: Organism Value: Zea mays
  misc_feature: MA Experiment 108556 PARAMETER Experiment Name: Zm_Drought_P Parameter: Plant Line Value: 35A19
  misc_feature: MA Experiment 108556 PARAMETER Experiment Name: Zm_Drought_P Parameter: Timepoint (hr) Value: 24
  misc_feature: MA Experiment 108556 PARAMETER Experiment Name: Zm_Drought_P Parameter: Tissue Value: Aerial
  misc_feature: MA Experiment 108556 PARAMETER Experiment Name: Zm_Drought_P Parameter: Treatment Value: Drought vs. No Drought
  misc_feature: MA Experiment ID: 108559 Result: Up-regulated in Transcription
  misc_feature: MA Experiment 108559 PARAMETER Experiment Name: Zm_5mM_NO_P Parameter: Age (day) Value: 8
  misc_feature: MA Experiment 108559 PARAMETER Experiment Name: Zm_5mM_NO_P Parameter: Organism Value: Zea mays
  misc_feature: MA Experiment 108559 PARAMETER Experiment Name: Zm_5mM_NO_P Parameter: Plant Line Value: 35A19
  misc_feature: MA Experiment 108559 PARAMETER Experiment Name: Zm_5mM_NO_P Parameter: Timepoint (hr) Value: 12
  misc_feature: MA Experiment 108559 PARAMETER Experiment Name: Zm_5mM_NO_P Parameter: Tissue Value: Aerial
  misc_feature: MA Experiment 108559 PARAMETER Experiment Name: Zm_5mM_NO_P Parameter: Treatment Value: 5mM NO vs. No Treatment
  misc_feature: MA Experiment ID: 108597 Result: Up-regulated in Transcription
  misc_feature: MA Experiment 108597 PARAMETER Experiment Name: Zm_100uM_ABA_P Parameter: Age (day) Value: 9
  misc_feature: MA Experiment 108597 PARAMETER Experiment Name: Zm_100uM_ABA_P Parameter: Organism Value: Zea mays
  misc_feature: MA Experiment 108597 PARAMETER Experiment Name: Zm_100uM_ABA_P Parameter: Plant Line Value: 35A19
  misc_feature: MA Experiment 108597 PARAMETER Experiment Name: Zm_100uM_ABA_P Parameter: Timepoint (hr) Value: 24
  misc_feature: MA Experiment 108597 PARAMETER Experiment Name: Zm_100uM_ABA_P Parameter: Tissue Value: Aerial
  misc_feature: MA Experiment 108597 PARAMETER Experiment Name: Zm_100uM_ABA_P Parameter: Treatment Value: 100uM ABA vs. No Treatment
  misc_feature: MA Experiment ID: 20000477 Result: Up-regulated in Transcription
  misc_feature: MA Experiment 20000477 PARAMETER Experiment Name: Zm_5mM_SA_P Parameter: Age (day) Value: 10
  misc_feature: MA Experiment 20000477 PARAMETER Experiment Name: Zm_5mM_SA_P Parameter: Organism Value: Zea mays
  misc_feature: MA Experiment 20000477 PARAMETER Experiment Name: Zm_5mM_SA_P Parameter: Plant Line Value: 35A19
  misc_feature: MA Experiment 20000477 PARAMETER Experiment Name: Zm_5mM_SA_P Parameter: Timepoint (hr) Value: 48
  misc_feature: MA Experiment 20000477 PARAMETER Experiment Name: Zm_5mM_SA_P Parameter: Tissue Value: Aerial
  misc_feature: MA Experiment 20000477 PARAMETER Experiment Name: Zm_5mM_SA_P Parameter: Treatment Value: 5mM SA vs. No Treatment
  misc_feature: MA Experiment ID: 20000478 Result: Up-regulated in Transcription
  misc_feature: MA Experiment 20000478 PARAMETER Experiment Name: Zm_5mM_SA_P Parameter: Age (day) Value: 11
  misc_feature: MA Experiment 20000478 PARAMETER Experiment Name: Zm_5mM_SA_P Parameter: Organism Value: Zea mays
  misc_feature: MA Experiment 20000478 PARAMETER Experiment Name: Zm_5mM_SA_P Parameter: Plant Line Value: 35A19
  misc_feature: MA Experiment 20000478 PARAMETER Experiment Name: Zm_5mM_SA_P Parameter: Timepoint (hr) Value: 72
  misc_feature: MA Experiment 20000478 PARAMETER Experiment Name: Zm_5mM_SA_P Parameter: Tissue Value: Aerial
  misc_feature: MA Experiment 20000478 PARAMETER Experiment Name: Zm_5mM_SA_P Parameter: Treatment Value: 5mM SA vs. No Treatment
  misc_feature: MA Experiment ID: 20000480 Result: Up-regulated in Transcription
  misc_feature: MA Experiment 20000480 PARAMETER Experiment Name: Zm_Drought_P Parameter: Age (day) Value: 11
  misc_feature: MA Experiment 20000480 PARAMETER Experiment Name: Zm_Drought_P Parameter: Organism Value: Zea mays
  misc_feature: MA Experiment 20000480 PARAMETER Experiment Name: Zm_Drought_P Parameter: Plant Line Value: 35A19
  misc_feature: MA Experiment 20000480 PARAMETER Experiment Name: Zm_Drought_P Parameter: Timepoint (hr) Value: 72
  misc_feature: MA Experiment 20000480 PARAMETER Experiment Name: Zm_Drought_P Parameter: Tissue Value: Aerial
  misc_feature: MA Experiment 20000480 PARAMETER Experiment Name: Zm_Drought_P Parameter: Treatment Value: Drought vs. No Drought
  misc_feature: MA Experiment ID: 20000533 Result: Up-regulated in Transcription
  misc_feature: MA Experiment 20000533 PARAMETER Experiment Name: Zm_0.001percent_MeJA_P Parameter: Age (day) Value: 11
  misc_feature: MA Experiment 20000533 PARAMETER Experiment Name: Zm_0.001percent_MeJA_P Parameter: Organism Value: Zea mays
  misc_feature: MA Experiment 20000533 PARAMETER Experiment Name: Zm_0.001percent_MeJA_P Parameter: Plant Line Value: 35A19
  misc_feature: MA Experiment 20000533 PARAMETER Experiment Name: Zm_0.001percent_MeJA_P Parameter: Timepoint (hr) Value: 72
  misc_feature: MA Experiment 20000533 PARAMETER Experiment Name: Zm_0.001percent_MeJA_P Parameter: Tissue Value: Aerial
  misc_feature: MA Experiment 20000533 PARAMETER Experiment Name: Zm_0.001percent_MeJA_P Parameter: Treatment Value: 0.001percent MeJA vs. No Treatment
  misc_feature: MA Experiment ID: 20000535 Result: Up-regulated in Transcription
  misc_feature: MA Experiment 20000535 PARAMETER Experiment Name: Zm_Hybrid_Seed_Dev_P Parameter: DAP Value: 30 vs. 12
  misc_feature: MA Experiment 20000535 PARAMETER Experiment Name: Zm_Hybrid_Seed_Dev_P Parameter: Organism Value: Zea mays
  misc_feature: MA Experiment 20000535 PARAMETER Experiment Name: Zm_Hybrid_Seed_Dev_P Parameter: Plant Line Value: 35A19
  misc_feature: MA Experiment 20000535 PARAMETER Experiment Name: Zm_Hybrid_Seed_Dev_P Parameter: Tissue Value: Embryo vs. Unfert Floret
  misc_feature: MA Experiment ID: 20000626 Result: Up-regulated in Transcription
  misc_feature: MA Experiment 20000626 PARAMETER Experiment Name: Zm_Herbicide-Treatments_P Parameter: Timepoint (hr) Value: 12
  misc_feature: MA Experiment 20000626 PARAMETER Experiment Name: Zm_Herbicide-Treatments_P Parameter: Tissue Value: Aerial
  misc_feature: MA Experiment 20000626 PARAMETER Experiment Name: Zm_Herbicide-Treatments_P Parameter: Treatment Value: Roundup vs. No Treatment
gaaccaagaaagaatcacacaacagcagctcaaaaacctaacacacctcaacaagcagagcaaagacccgggattcgccggcgcggtagcgagagcgagagatggacgggaggatgttcggtctcgagacccccctgatggtggcgctgcagcaccttctggacgtgcccgacggcgacgccggcgcgggcggcgacaaggcgagtggtgccgcggcgggcggcgggcccacgcgcacctacgtccgcgacgcgcgcgccatggcggccaccccggccgacgtcaaggagctcccgggcgcgtacgcgttcgtggtggacatgccggggctgggcacgggcgacatcaaggtgcaggtggaggacgagcgggtgctggtgatcagcggcgagcggcgccgggcaggagcgcgaggacgccaagtacctgcgcatggagcggcggatgggcaagttcatgcgcaagttcgtgctgccggacaacgccgacatggacaagatctcggcggtgtgcagggacggcgtgctcaccgtgaccgtcgagaagctgcccccgcccgagcccaagaaacccaagaccatcgaggtcaaggtcgcctgaggtgggactaggtcgaccgatcgtggctctgaagatgtgggagcagtgccagcgagttgtgaggacctctacctgtgtggaatgtggcgaggaataatcgtagtctgtagtgggggtgcttctggtgtgcgtgtttgcgttccttcggtctcggtgtctgtctaccaattcctatctgatgtatcggcttcggtttcgtatgaaccatgccggatgctttcagtatgttcatcg

SEQ ID NO: 9270 - protein, 177 aa, Zea mays subsp. mays
  peptide (1)..(177): Ceres Seq. ID no. 12404685
NQERITQQQLKNLTHLNKQSKDPGFAGAVARARDGREDVRSRDPPDGGAAAPSGRARRRRRRGRRQGEWCRGGRRAHAHLRPRRARHGGHPGRRQGAPGRVRVRGGHAGAGHGRHQGAGGGRAGAGDQRRAAPGRSARTPSTCAWSGGWASSCASSCCRTTPTWTRSRRCAGTACSP

SEQ ID NO: 9271 - protein, 169 aa, Zea mays subsp. mays
  peptide (1)..(169): Ceres Seq. ID no. 12404686
  misc_feature (1)..(100): Homolog of NCBI NO: 100790 NR Description: heat shock protein 17.3 - wheat
  misc_feature (1)..(100): Homolog of NCBI NO: 5257560 NR Description: cytosolic class II low molecular weight heat
  misc_feature (1)..(100): Homolog of NCBI NO: 123549 NR Description: 17.5 KD CLASS II HEAT SHOCK PROTEIN
  misc_feature (1)..(100): Homolog of NCBI NO: 123553 NR Description: 17.8 KD CLASS II HEAT SHOCK PROTEIN
  misc_feature (1)..(102): Homolog of NCBI NO: 34906270 NR Description: putative heat shock protein, 18K - maize [Oryza
  misc_feature (1)..(100): Homolog of NCBI NO: 14009833 NR Description: small heat shock protein HSP17.8 [Triticum
  misc_feature (1)..(100): Homolog of NCBI NO: 729762 NR Description: 17.0 KD CLASS II HEAT SHOCK PROTEIN (HSP 18)
  misc_feature (1)..(100): Homolog of NCBI NO: 123549 NR Description: 17.5 KD CLASS II HEAT SHOCK PROTEIN
  misc_feature (1)..(100): Homolog of NCBI NO: 123553 NR Description: 17.8 KD CLASS II HEAT SHOCK PROTEIN
  misc_feature (1)..(102): Homolog of NCBI NO: 34906270 NR Description: putative heat shock protein, 18K - maize [Oryza
  misc_feature (1)..(100): Homolog of NCBI NO: 14009833 NR Description: small heat shock protein HSP17.8 [Triticum
  misc_feature (1)..(100): Homolog of NCBI NO: 729762 NR Description: 17.0 KD CLASS II HEAT SHOCK PROTEIN (HSP 18)
  misc_feature (1)..(100): Homolog of NCBI NO: 100790 NR Description: heat shock protein 17.3 - wheat
  misc_feature (1)..(100): Homolog of NCBI NO: 5257560 NR Description: cytosolic class II low molecular weight heat
MDGRMFGLETPLMVALQHLLDVPDGDAGAGGDKASGAAAGGGPTRTYVRDARAMAATPADVKELPGAYAFVVDMPGLGTGDIKVQVEDERVLVISGERRRAGARGRQVPAHGAADGQVHAQVRAAGQRRHGQDLGGVQGRRAHRDRREAAPARAQETQDHRGQGRLRWD

SEQ ID NO: 9272 - protein, 165 aa, Zea mays subsp. mays
  peptide (1)..(165): Ceres Seq. ID no. 12404687
  misc_feature (1)..(96): Homolog of NCBI NO: 123549 NR Description: 17.5 KD CLASS II HEAT SHOCK PROTEIN
  misc_feature (1)..(96): Homolog of NCBI NO: 123553 NR Description: 17.8 KD CLASS II HEAT SHOCK PROTEIN
  misc_feature (1)..(98): Homolog of NCBI NO: 34906270 NR Description: putative heat shock protein, 18K - maize [Oryza
  misc_feature (1)..(96): Homolog of NCBI NO: 14009833 NR Description: small heat shock protein HSP17.8 [Triticum
  misc_feature (1)..(96): Homolog of NCBI NO: 729762 NR Description: 17.0 KD CLASS II HEAT SHOCK PROTEIN (HSP 18)
  misc_feature (1)..(96): Homolog of NCBI NO: 100790 NR Description: heat shock protein 17.3 - wheat
  misc_feature (1)..(96): Homolog of NCBI NO: 5257560 NR Description: cytosolic class II low molecular weight heat
  misc_feature (1)..(96): Homolog of NCBI NO: 100790 NR Description: heat shock protein 17.3 - wheat
  misc_feature (1)..(96): Homolog of NCBI NO: 5257560 NR Description: cytosolic class II low molecular weight heat
  misc_feature (1)..(96): Homolog of NCBI NO: 123549 NR Description: 17.5 KD CLASS II HEAT SHOCK PROTEIN
  misc_feature (1)..(96): Homolog of NCBI NO: 123553 NR Description: 17.8 KD CLASS II HEAT SHOCK PROTEIN
  misc_feature (1)..(98): Homolog of NCBI NO: 34906270 NR Description: putative heat shock protein, 18K - maize [Oryza
  misc_feature (1)..(96): Homolog of NCBI NO: 14009833 NR Description: small heat shock protein HSP17.8 [Triticum
  misc_feature (1)..(96): Homolog of NCBI NO: 729762 NR Description: 17.0 KD CLASS II HEAT SHOCK PROTEIN (HSP 18)
MFGLETPLMVALQHLLDVPDGDAGAGGDKASGAAAGGGPTRTYVRDARAMAATPADVKELPGAYAFVVDMPGLGTGDIKVQVEDERVLVISGERRRAGARGRQVPAHGAADGQVHAQVRAAGQRRHGQDLGGVQGRRAHRDRREAAPARAQETQDHRGQGRLRWD

SEQ ID NO: 9273 - DNA, 1421 bp, Zea mays subsp. mays
  misc_feature (1)..(1421): Ceres Seq. ID no. 12407029
  misc_feature: MA Experiment ID: 108522 Result: Up-regulated in Transcription
  misc_feature: MA Experiment 108522 PARAMETER Experiment Name: Zm_42deg_Heat_P Parameter: Age (day) Value: 8
  misc_feature: MA Experiment 108522 PARAMETER Experiment Name: Zm_42deg_Heat_P Parameter: Organism Value: Zea mays
  misc_feature: MA Experiment 108522 PARAMETER Experiment Name: Zm_42deg_Heat_P Parameter: Plant Line Value: 35A19
  misc_feature: MA Experiment 108522 PARAMETER Experiment Name: Zm_42deg_Heat_P Parameter: Temperature (deg C) Value: 42 vs. 22
  misc_feature: MA Experiment 108522 PARAMETER Experiment Name: Zm_42deg_Heat_P Parameter: Timepoint (hr) Value: 1
  misc_feature: MA Experiment 108522 PARAMETER Experiment Name: Zm_42deg_Heat_P Parameter: Tissue Value: Aerial
  misc_feature: MA Experiment ID: 20000477 Result: Down-regulated in Transcription
  misc_feature: MA Experiment 20000477 PARAMETER Experiment Name: Zm_5mM_SA_P Parameter: Age (day) Value: 10
  misc_feature: MA Experiment 20000477 PARAMETER Experiment Name: Zm_5mM_SA_P Parameter: Organism Value: Zea mays
  misc_feature: MA Experiment 20000477 PARAMETER Experiment Name: Zm_5mM_SA_P Parameter: Plant Line Value: 35A19
  misc_feature: MA Experiment 20000477 PARAMETER Experiment Name: Zm_5mM_SA_P Parameter: Timepoint (hr) Value: 48
  misc_feature: MA Experiment 20000477 PARAMETER Experiment Name: Zm_5mM_SA_P Parameter: Tissue Value: Aerial
  misc_feature: MA Experiment 20000477 PARAMETER Experiment Name: Zm_5mM_SA_P Parameter: Treatment Value: 5mM SA vs. No Treatment
accaccaccctccctctctgcctcaccacctactccgcctgcgcctgcgagctgtgctgtgctgcgcaacggggagatccaatccacagaacaggatgcagtccaagcaccgggtcttcgcggaggacctgctcctggcggcggcggcggagggcgaggaccacttcgaccgggtgcccgactccctggtgctcctcatcttcaacaagctggccgacgcgcggtcgctggggcgctgctccgcggtgtcgcgccgcttcagcgcgctggtcccgctcgtggacgacgcctgcctgcgcatcgaccgcgtcatccccgccgacgccgccgacgcgggggcgccgcgcccgcgcgccgcgctctcgcacctcctcaagtccgtgctgctcgccgtgctcaagcccttcgcgcactgcgacgccaagtccgcgtcgccgcaaaagcacgcgcaccagcagcagcagcaccactcgcccgcccaggtgctcaggaacttcagcagcatccgcagcctccggatggagctcccggtctccgacgtgggcaccgacgacggcgtcgtgctcaggtggaaggccgtcttcggcagcacgctgcagagctgcgtcatcctcggcggcaccagggtggaccgcgcgggaccgccgcacgccccctcctccggctccgctccccccgcggtcgacgacgacggcggcagcatcccggagtccctgtacaccaacggcggcctcaagctgcgcgtcgtctggaccatcagctccctcatcgccgcggccancaggcactacctcctccgngagatcgtcaaggagcaccccaccctcgagcgggtggcgctgacggacgccggcgggcagggcacgctcagcatgggggcgcgaccagcctcagggagttcagggacaggccgctcgccgccgcgcccgccgccgccgccaaccgcacgcaggtgcccgcctgcaacatgaagctgcgctacgcgccgctgctggagctctcggacggcaccaggatccacggcgccacgctcgtggtcattcaagcccgtcggcgacgccggcgggaaggacctcgacgagctcggcgccggcgccttcgacgggcccctgagggaggccgtggccgcgctcggcaagcgccgcgcatacctgctcgagatgaacggcttctagtctgcgcgcctctctgctccattgcaatgggcattgttaattggccaatgggcaacggcaactagctagctagattgctcctccgctcgcttcacctcagctgtcagtcagctcctgtcctgacgatatccttgtgaaaaaaaaacagtagtatagaatggagtgggcagcgccagccagccggccagcttcacagtgcattctgatgctatcatgaacggaaatgaagcagtcagtcacatttcg

SEQ ID NO: 9274 - protein, 412 aa, Zea mays subsp. mays
  peptide (1)..(412): Ceres Seq. ID no. 12407030
  misc_feature (35)..(382): Homolog of NCBI NO: 23106243 NR Description: hypothetical protein [Azotobacter vinelandii]
  misc_feature (44)..(386): Homolog of NCBI NO: 23018055 NR Description: hypothetical protein [Thermobifida fusca]
  misc_feature (37)..(294): Homolog of NCBI NO: 23104350 NR Description: hypothetical protein [Azotobacter vinelandii]
  misc_feature (13)..(326): Homolog of NCBI NO: 29247944 NR Description: GLP_26_54603_52153 [Giardia lamblia ATCC 50803]
  misc_feature (1)..(382): Homolog of NCBI NO: 11362193 NR Description: hypothetical protein [imported] - Microbacterium (fragment) >gi|1679831|emb|CAA55649.1| unknown [Microbacterium
  misc_feature (36)..(386): Homolog of NCBI NO: 23018055 NR Description: hypothetical protein [Thermobifida fusca]
  misc_feature (65)..(317): Homolog of NCBI NO: 23018055 NR Description: hypothetical protein [Thermobifida fusca]
  misc_feature (260)..(260): Xaa is any aa, unknown or other
  misc_feature (267)..(267): Xaa is any aa, unknown or other
PPPSLSASPPTPPAPASCAVLRNGEIQSTEQDAVQAPGLRGGPAPGGGGGGRGPLRPGARLPGAPHLQQAGRRAVAGALLRGVAPLQRAGPARGRRLPAHRPRHPRRRRRRGGAAPARRALAPPQVRAARRAQALRALRRQVRVAAKARAPAAAAPLARPGAQELQQHPQPPDGAPGLRRGHRRRRRAQVEGRLRQHAAELRHPRRHQGGPRGTAARPLLRLRSPRGRRRRRQHPGVPVHQRRPQAARRLDHQLPHRRGXQALPPPXDRQGAPHPRAGGADGRRRAGHAQHGGATSLREFRDRPLAAAPAAAANRTQVPACNMKLRYAPLLELSDGTRIHGATLVVIQARRRRRREGPRRARRRRLRRAPEGGRGRARQAPRIPARDERLLVCAPLCSIAMGIVNWPMGNGN

SEQ ID NO: 9275 - protein, 322 aa, Zea mays subsp. mays
  peptide (1)..(322): Ceres Seq. ID no. 12407031
  misc_feature (53)..(322): Homolog of NCBI NO: 34909194 NR Description: P0425G02.20 [Oryza sativa (japonica
  misc_feature (155)..(322): Homolog of NCBI NO: 15236865 NR Description: hypothetical protein; protein id: At4g18380.1
  misc_feature (53)..(134): Homolog of NCBI NO: 15236865 NR Description: hypothetical protein; protein id: At4g18380.1
  misc_feature (155)..(322): Homolog of NCBI NO: 15237391 NR Description: putative protein; protein id: At5g46170.1, by cDNA: gi_17979206 [Arabidopsis thaliana] gene_id:MCL19.23~pir||T04534~strong similarity to unknown protein
  misc_feature (53)..(134): Homolog of NCBI NO: 15237391 NR Description: putative protein; protein id: At5g46170.1, by cDNA: gi_17979206 [Arabidopsis thaliana] gene_id:MCL19.23~pir||T04534~strong similarity to unknown protein
  misc_feature (112)..(322): Homolog of NCBI NO: 34909910 NR Description: P0665A11.15 [Oryza sativa (japonica
  misc_feature (53)..(134): Homolog of NCBI NO: 34909910 NR Description: P0665A11.15 [Oryza sativa (japonica
  misc_feature (155)..(322): Homolog of NCBI NO: 18397400 NR Description: expressed protein; protein id: At1g30200.1, by cDNA: gi_14335117, supported by cDNA: gi_16604496 [Arabidopsis
  misc_feature (53)..(121): Homolog of NCBI NO: 18397400 NR Description: expressed protein; protein id: At1g30200.1, by cDNA: gi_14335117, supported by cDNA: gi_16604496 [Arabidopsis
  misc_feature (53)..(322): Homolog of NCBI NO: 18411823 NR Description: expressed protein; protein id: At1g78100.1, by cDNA: gi_15450975, supported by cDNA: gi_20148730 [Arabidopsis
  misc_feature (260)..(260): Xaa is any aa, unknown or other
  misc_feature (266)..(266): Xaa is any aa, unknown or other
HHPPSLPHHLLRLRLRAVLCCATGRSNPQNRMQSKHRVFAEDLLLAAAAEGEDHFDRVPDSLVLLIFNKLADARSLGRCSAVSRRFSALVPLVDDACLRIDRVIPADAADAGAPRPRAALSHLLKSVLLAVLKPFAHCDAKSASPQKHAHQQQQHHSPAQVLRNFSSIRSLRMELPVSDVGTDDGVVLRWKAVFGSTLQSCVILGGTRVDRAGPPHAPSSGSAPPAVDDDGGSIPESLYTNGGLKLRVVWTISSLIAAAXRHYLLXEIVKEHPTLERVALTDAGGQGTLSMGARPASGSSGTGRSPPRPPPPPTARRCPPAT

SEQ ID NO: 9276 - protein, 291 aa, Zea mays subsp. mays
  peptide (1)..(291): Ceres Seq. ID no. 12407032
  misc_feature (22)..(291): Homolog of NCBI NO: 34909194 NR Description: P0425G02.20 [Oryza sativa (japonica
  misc_feature (124)..(291): Homolog of NCBI NO: 15236865 NR Description: hypothetical protein; protein id: At4g18380.1
  misc_feature (22)..(103): Homolog of NCBI NO: 15236865 NR Description: hypothetical protein; protein id: At4g18380.1
  misc_feature (124)..(291): Homolog of NCBI NO: 15237391 NR Description: putative protein; protein id: At5g46170.1, by cDNA: gi_17979206 [Arabidopsis thaliana] gene_id:MCL19.23~pir||T04534~strong similarity to unknown protein
  misc_feature (22)..(103): Homolog of NCBI NO: 15237391 NR Description: putative protein; protein id: At5g46170.1, by cDNA: gi_17979206 [Arabidopsis thaliana] gene_id:MCL19.23~pir||T04534~strong similarity to unknown protein
  misc_feature (81)..(291): Homolog of NCBI NO: 34909910 NR Description: P0665A11.15 [Oryza sativa (japonica
  misc_feature (22)..(103): Homolog of NCBI NO: 34909910 NR Description: P0665A11.15 [Oryza sativa (japonica
  misc_feature (124)..(291): Homolog of NCBI NO: 18397400 NR Description: expressed protein; protein id: At1g30200.1, by cDNA: gi_14335117, supported by cDNA: gi_16604496 [Arabidopsis
  misc_feature (22)..(90): Homolog of NCBI NO: 18397400 NR Description: expressed protein; protein id: At1g30200.1, by cDNA: gi_14335117, supported by cDNA: gi_16604496 [Arabidopsis
  misc_feature (22)..(291): Homolog of NCBI NO: 18411823 NR Description: expressed protein; protein id: At1g78100.1, by cDNA: gi_15450975, supported by cDNA: gi_20148730 [Arabidopsis
  misc_feature (229)..(229): Xaa is any aa, unknown or other
  misc_feature (235)..(235): Xaa is any aa, unknown or other
MQSKHRVFAEDLLLAAAAEGEDHFDRVPDSLVLLIFNKLADARSLGRCSAVSRRFSALVPLVDDACLRIDRVIPADAADAGAPRPRAALSHLLKSVLLAVLKPFAHCDAKSASPQKHAHQQQQHHSPAQVLRNFSSIRSLRMELPVSDVGTDDGVVLRWKAVFGSTLQSCVILGGTRVDRAGPPHAPSSGSAPPAVDDDGGSIPESLYTNGGLKLRVVWTISSLIAAAXRHYLLXEIVKEHPTLERVALTDAGGQGTLSMGARPASGSSGTGRSPPRPPPPPTARRCPPAT

SEQ ID NO: 9277 - DNA, 1575 bp, Zea mays subsp. mays
  misc_feature (1)..(1575): Ceres Seq. ID no. 13493270
  misc_feature: MA Experiment ID: 108527 Result: Up-regulated in Transcription
  misc_feature: MA Experiment 108527 PARAMETER Experiment Name: Zm_5mM_NO_P Parameter: Age (day) Value: 8
  misc_feature: MA Experiment 108527 PARAMETER Experiment Name: Zm_5mM_NO_P Parameter: Organism Value: Zea mays
  misc_feature: MA Experiment 108527 PARAMETER Experiment Name: Zm_5mM_NO_P Parameter: Plant Line Value: 35A19
  misc_feature: MA Experiment 108527 PARAMETER Experiment Name: Zm_5mM_NO_P Parameter: Timepoint (hr) Value: 6
  misc_feature: MA Experiment 108527 PARAMETER Experiment Name: Zm_5mM_NO_P Parameter: Tissue Value: Aerial
  misc_feature: MA Experiment 108527 PARAMETER Experiment Name: Zm_5mM_NO_P Parameter: Treatment Value: 5mM NO vs. No Treatment
  misc_feature: MA Experiment ID: 108528 Result: Down-regulated in Transcription
  misc_feature: MA Experiment 108528 PARAMETER Experiment Name: Zm_Imbibed_Seeds_P Parameter: Age (day) Value: 5 vs. 2
  misc_feature: MA Experiment 108528 PARAMETER Experiment Name: Zm_Imbibed_Seeds_P Parameter: Organism Value: Zea mays
  misc_feature: MA Experiment 108528 PARAMETER Experiment Name: Zm_Imbibed_Seeds_P Parameter: Plant Line Value: 35A19
  misc_feature: MA Experiment 108528 PARAMETER Experiment Name: Zm_Imbibed_Seeds_P Parameter: Tissue Value: Aerial vs. Embryo
  misc_feature: MA Experiment ID: 108559 Result: Up-regulated in Transcription
  misc_feature: MA Experiment 108559 PARAMETER Experiment Name: Zm_5mM_NO_P Parameter: Age (day) Value: 8
  misc_feature: MA Experiment 108559 PARAMETER Experiment Name: Zm_5mM_NO_P Parameter: Organism Value: Zea mays
  misc_feature: MA Experiment 108559 PARAMETER Experiment Name: Zm_5mM_NO_P Parameter: Plant Line Value: 35A19
  misc_feature: MA Experiment 108559 PARAMETER Experiment Name: Zm_5mM_NO_P Parameter: Timepoint (hr) Value: 12
  misc_feature: MA Experiment 108559 PARAMETER Experiment Name: Zm_5mM_NO_P Parameter: Tissue Value: Aerial
  misc_feature: MA Experiment 108559 PARAMETER Experiment Name: Zm_5mM_NO_P Parameter: Treatment Value: 5mM NO vs. No Treatment
  misc_feature: MA Experiment ID: 20000108 Result: Down-regulated in Transcription
  misc_feature: MA Experiment 20000108 PARAMETER Experiment Name: Zm_Root-Tips_P Parameter: Age (day) Value: 12
  misc_feature: MA Experiment 20000108 PARAMETER Experiment Name: Zm_Root-Tips_P Parameter: Organism Value: Zea mays
  misc_feature: MA Experiment 20000108 PARAMETER Experiment Name: Zm_Root-Tips_P Parameter: Tissue Value: Root tips vs. Root mid region    35
  misc_feature: MA Experiment 20000108 PARAMETER Experiment Name: Zm_Root-Tips_P Parameter: Tissue Value: Root tips vs. Root mid region   Sequence Listing-Misc Features (4)
  misc_feature: MA Experiment ID: 20000535 Result: Down-regulated in Transcription
  misc_feature: MA Experiment 20000535 PARAMETER Experiment Name: Zm_Hybrid_Seed_Dev_P Parameter: DAP Value: 30 vs. 12
  misc_feature: MA Experiment 20000535 PARAMETER Experiment Name: Zm_Hybrid_Seed_Dev_P Parameter: Organism Value: Zea mays
  misc_feature: MA Experiment 20000535 PARAMETER Experiment Name: Zm_Hybrid_Seed_Dev_P Parameter: Plant Line Value: 35A19
  misc_feature: MA Experiment 20000535 PARAMETER Experiment Name: Zm_Hybrid_Seed_Dev_P Parameter: Tissue Value: Embryo vs. Unfert Floret
  misc_feature: MA Experiment ID: 20000627 Result: Up-regulated in Transcription
  misc_feature: MA Experiment 20000627 PARAMETER Experiment Name: Zm_Herbicide-Treatments_P Parameter: Timepoint (hr) Value: 12
  misc_feature: MA Experiment 20000627 PARAMETER Experiment Name: Zm_Herbicide-Treatments_P Parameter: Tissue Value: Aerial
  misc_feature: MA Experiment 20000627 PARAMETER Experiment Name: Zm_Herbicide-Treatments_P Parameter: Treatment Value: Finale vs. No Treatment
gcacgagaccattacctagaacatcctaatcgaaaacagtcaccaccacggccaccctcctcttgtatagtcaaaccggccctctccttgtaaccttgggcaagaggagcagaaaggtcccagctttccgtgttcttctgcttctttccccgcctcgccttcgttccccccgtcaccagatctcgaggcagcggagtccggggacgccgttctttccgttgtgcttcctttgcctcttgctgccggcggccggtgattttcccgaggtctgtttgggcggcaggtagaggctattttcttggcggctggtgggatggatagccacgccgccgggtcgagctccggcgggtccggggatggcggcgcgcagcccaggaggagctccaggaagcccaagtattccaagtttactcagcaggagcttccagcttgcaagccgattcttactccaaaatgggttatttcagtattcgttcttgttggcgtgatttttgtcccgattggtattgtttcgctgcaagcttcacgacaggttgtcgagatcgttgatcggtatgatgatgcatgtgtccctgctggtgtgactgacaagcttgcttacatccggaatgatagtataccaaaaagctgcacaaggaatctgacgattacaaaggatatgaagcagccgatttttgtgtattatcagctggatgacttttaccagaatcataggaggtatgtcaagagtcgtaatgatgcacagctaagagataaaagtaaagcgactgactttaccaattgtgatcctgaggccaaaacggtagatggaaaaccaattgtgccttgtggtcttattgcatggagcctgttcaatgatacatataaactcattcacaacaatgtaaccttgagagtggagaagaaggacatctcttggaagagtgacagagaccacaaatttgggagtgatgtcttcccaacgaactttcagaaaggacctcttaaaggtggaaaaacacttgatccaagtatcccgttgagtaagcaagaggacctcattgtttggatgcggactgcagcacttccgacattcagaaagctgtatggaaggatatatgttgatctcaaggaaaacgatacaatcacagtccagttggacaacaactacaacacctatagctttggtggcaagaagaagctggtgctttctaccgcaacctggctcgggggaaagaacgattttctgggccttgcgtacctcaccgtcggcggactctgcttcttcttggcattcgcgttcaccttgctatacttgataaagccaaggaaaatgggagataacagctacctgtcatggaacagacccccttcaggtcgctgatgatgtgctttggaagttaaatgcgatacacaggcagcaccaaacagattcagattatggtcggaatgtatcttgtaccacagagaaattttatccgtgctcgtcggtgtagaatatatacggcacccttgcacatattgtacattacatcgaaacacatagctttgttttctacaaaattgtatactcaaaattgtatactcaaaagtttc

SEQ ID NO: 9278 - protein, 349 aa, Zea mays subsp. mays
  peptide (1)..(349): Ceres Seq. ID no. 13493271
  misc_feature (67)..(338): Pfam Name: LEM3 (ligand-effect modulator 3) family / CDC50 family Pfam Description: LEM3 (ligand-effect modulator 3) family / CDC50
  misc_feature (1)..(349): Homolog of NCBI NO: 18404877 NR Description: membrane protein common family [Arabidopsis
  misc_feature (5)..(349): Homolog of NCBI NO: 18399730 NR Description: membrane protein common family [Arabidopsis >gi|11994416|dbj|BAB02418.1| similarity to unknown protein [Arabidopsis thaliana]
  misc_feature (1)..(348): Homolog of NCBI NO: 18412377 NR Description: membrane protein common family [Arabidopsis
  misc_feature (30)..(348): Homolog of NCBI NO: 25347303 NR Description: protein F3O9.16 [imported] - Arabidopsis thaliana
  misc_feature (32)..(348): Homolog of NCBI NO: 25347301 NR Description: T8K14.13 [imported] - Arabidopsis thaliana
  misc_feature (44)..(348): Homolog of NCBI NO: 15219220 NR Description: membrane protein common family [Arabidopsis
  misc_feature (22)..(344): Homolog of NCBI NO: 18422638 NR Description: membrane protein common family [Arabidopsis >gi|30694892|ref|NP_851139.1| membrane protein common family
  misc_feature (22)..(344): Homolog of NCBI NO: 21554054 NR Description: unknown [Arabidopsis thaliana]
  misc_feature (22)..(332): Homolog of NCBI NO: 9757735 NR Description: gb|AAD25612.1~gene_id:MCL19.21~similar to unknown
  misc_feature (23)..(341): Homolog of NCBI NO: 19570056 NR Description: similar to membrane protein common family; id: At3g12740.1, supported by cDNA: 37019., supported by cDNA: supported by cDNA: gi_15294235, supported by cDNA: gi_20258910
MDSHAAGSSSGGSGDGGAQPRRSSRKPKYSKFTQQELPACKPILTPKWVISVFVLVGVIFVPIGIVSLQASRQVVEIVDRYDDACVPAGVTDKLAYIRNDSIPKSCTRNLTITKDMKQPIFVYYQLDDFYQNHRRYVKSRNDAQLRDKSKATDFTNCDPEAKTVDGKPIVPCGLIAWSLFNDTYKLIHNNVTLRVEKKDISWKSDRDHKFGSDVFPTNFQKGPLKGGKTLDPSIPLSKQEDLIVWMRTAALPTFRKLYGRIYVDLKENDTITVQLDNNYNTYSFGGKKKLVLSTATWLGGKNDFLGLAYLTVGGLCFFLAFAFTLLYLIKPRKMGDNSYLSWNRPPSGR

SEQ ID NO: 9279 - protein, 234 aa, Zea mays subsp. mays
  peptide (1)..(234): Ceres Seq. ID no. 13493272
  misc_feature (1)..(223): Pfam Name: LEM3 (ligand-effect modulator 3) family / CDC50 family Pfam Description: LEM3 (ligand-effect modulator 3) family / CDC50
  misc_feature (1)..(234): Homolog of NCBI NO: 18404877 NR Description: membrane protein common family [Arabidopsis
  misc_feature (1)..(234): Homolog of NCBI NO: 18399730 NR Description: membrane protein common family [Arabidopsis >gi|11994416|dbj|BAB02418.1| similarity to unknown protein [Arabidopsis thaliana]
  misc_feature (1)..(233): Homolog of NCBI NO: 18412377 NR Description: membrane protein common family [Arabidopsis
  misc_feature (1)..(233): Homolog of NCBI NO: 25347303 NR Description: protein F3O9.16 [imported] - Arabidopsis thaliana
  misc_feature (1)..(233): Homolog of NCBI NO: 25347301 NR Description: T8K14.13 [imported] - Arabidopsis thaliana
  misc_feature (1)..(233): Homolog of NCBI NO: 15219220 NR Description: membrane protein common family [Arabidopsis
  misc_feature (1)..(229): Homolog of NCBI NO: 18422638 NR Description: membrane protein common family [Arabidopsis >gi|30694892|ref|NP_851139.1| membrane protein common family
  misc_feature (1)..(229): Homolog of NCBI NO: 21554054 NR Description: unknown [Arabidopsis thaliana]
  misc_feature (1)..(217): Homolog of NCBI NO: 9757735 NR Description: gb|AAD25612.1~gene_id:MCL19.21~similar to unknown
  misc_feature (1)..(226): Homolog of NCBI NO: 19570056 NR Description: similar to membrane protein common family; id: At3g12740.1, supported by cDNA: 37019., supported by cDNA: supported by cDNA: gi_15294235, supported by cDNA: gi_20258910
MKQPIFVYYQLDDFYQNHRRYVKSRNDAQLRDKSKATDFTNCDPEAKTVDGKPIVPCGLIAWSLFNDTYKLIHNNVTLRVEKKDISWKSDRDHKFGSDVFPTNFQKGPLKGGKTLDPSIPLSKQEDLIVWMRTAALPTFRKLYGRIYVDLKENDTITVQLDNNYNTYSFGGKKKLVLSTATWLGGKNDFLGLAYLTVGGLCFFLAFAFTLLYLIKPRKMGDNSYLSWNRPPSGR

SEQ ID NO: 9280 - DNA, 1578 bp, Zea mays subsp. mays; identical to SEQ ID NO: 4661
  misc_feature (1)..(1578): Ceres Seq. ID no. 13492685
  misc_feature: MA Experiment ID: 20000108 Result: Up-regulated in Transcription
  misc_feature: MA Experiment 20000108 PARAMETER Experiment Name: Zm_Root-Tips_P Parameter: Age (day) Value: 12
  misc_feature: MA Experiment 20000108 PARAMETER Experiment Name: Zm_Root-Tips_P Parameter: Organism Value: Zea mays
  misc_feature: MA Experiment 20000108 PARAMETER Experiment Name: Zm_Root-Tips_P Parameter: Tissue Value: Root tips vs. Root mid region    35
  misc_feature: MA Experiment 20000108 PARAMETER Experiment Name: Zm_Root-Tips_P Parameter: Tissue Value: Root tips vs. Root mid region   Sequence Listing-Misc Features (4)
  misc_feature: MA Experiment ID: 20000492 Result: Up-regulated in Transcription
  misc_feature: MA Experiment 20000492 PARAMETER Experiment Name: Zm_Hybrid_Seed_Dev_P Parameter: DAP Value: 12
  misc_feature: MA Experiment 20000492 PARAMETER Experiment Name: Zm_Hybrid_Seed_Dev_P Parameter: Organism Value: Zea mays
  misc_feature: MA Experiment 20000492 PARAMETER Experiment Name: Zm_Hybrid_Seed_Dev_P Parameter: Plant Line Value: 35A19
  misc_feature: MA Experiment 20000492 PARAMETER Experiment Name: Zm_Hybrid_Seed_Dev_P Parameter: Tissue Value: Fert Kernel vs. Unfert Floret

SEQ ID NO: 9281 - protein, 436 aa, Zea mays subsp. mays; identical to SEQ ID NO: 4662
  peptide (1)..(436): Ceres Seq. ID no. 13492686
  misc_feature (37)..(436): Pfam Name: Phosphoglycerate kinase Pfam Description: Phosphoglycerate kinase
  misc_feature (37)..(436): Pfam Name: Phosphoglycerate kinase Pfam Description: Phosphoglycerate kinase
  misc_feature (35)..(436): Homolog of NCBI NO: 129916 NR Description: Phosphoglycerate kinase, cytosolic
  misc_feature (35)..(436): Homolog of NCBI NO: 21536853 NR Description: phosphoglycerate kinase, putative [Arabidopsis
  misc_feature (35)..(436): Homolog of NCBI NO: 15219412 NR Description: phosphoglycerate kinase -related [Arabidopsis
  misc_feature (35)..(436): Homolog of NCBI NO: 3738257 NR Description: cytosolic phosphoglycerate kinase 1 [Populus
  misc_feature (35)..(436): Homolog of NCBI NO: 2499498 NR Description: Phosphoglycerate kinase, cytosolic
  misc_feature (35)..(436): Homolog of NCBI NO: 21536853 NR Description: phosphoglycerate kinase, putative [Arabidopsis
  misc_feature (35)..(436): Homolog of NCBI NO: 3738257 NR Description: cytosolic phosphoglycerate kinase 1 [Populus
  misc_feature (24)..(435): Homolog of NCBI NO: 3738261 NR Description: chloroplast phosphoglycerate kinase [Populus
  misc_feature (28)..(436): Homolog of NCBI NO: 7434544 NR Description: phosphoglycerate kinase (EC 2.7.2.3) precursor,
  misc_feature (35)..(436): Homolog of NCBI NO: 3738259 NR Description: cytosolic phosphoglycerate kinase 1 [Populus
  misc_feature (35)..(436): Homolog of NCBI NO: 29124969 NR Description: 3-phosphoglycerate kinase [Populus tremuloides]
  misc_feature (35)..(436): Homolog of NCBI NO: 9230771 NR Description: cytosolic phosphoglycerate kinase [Pisum sativum]
  misc_feature (35)..(436): Homolog of NCBI NO: 2499498 NR Description: Phosphoglycerate kinase, cytosolic
  misc_feature (35)..(436): Homolog of NCBI NO: 15219412 NR Description: phosphoglycerate kinase -related [Arabidopsis
  misc_feature (35)..(436): Homolog of NCBI NO: 129916 NR Description: Phosphoglycerate kinase, cytosolic
  misc_feature (35)..(436): Homolog of NCBI NO: 9230771 NR Description: cytosolic phosphoglycerate kinase [Pisum sativum]
  misc_feature (35)..(436): Homolog of NCBI NO: 29124969 NR Description: 3-phosphoglycerate kinase [Populus tremuloides]
  misc_feature (35)..(436): Homolog of NCBI NO: 3738259 NR Description: cytosolic phosphoglycerate kinase 1 [Populus
  misc_feature (28)..(436): Homolog of NCBI NO: 7434544 NR Description: phosphoglycerate kinase (EC 2.7.2.3) precursor,
  misc_feature (24)..(435): Homolog of NCBI NO: 3738261 NR Description: chloroplast phosphoglycerate kinase [Populus

SEQ ID NO: 9282 - protein, 402 aa, Zea mays subsp. mays; identical to SEQ ID NO: 4663
  peptide (1)..(402): Ceres Seq. ID no. 13492687
  misc_feature (3)..(402): Pfam Name: Phosphoglycerate kinase Pfam Description: Phosphoglycerate kinase
  misc_feature (3)..(402): Pfam Name: Phosphoglycerate kinase Pfam Description: Phosphoglycerate kinase
  misc_feature (1)..(402): Homolog of NCBI NO: 129916 NR Description: Phosphoglycerate kinase, cytosolic
  misc_feature (1)..(402): Homolog of NCBI NO: 21536853 NR Description: phosphoglycerate kinase, putative [Arabidopsis
  misc_feature (1)..(402): Homolog of NCBI NO: 15219412 NR Description: phosphoglycerate kinase -related [Arabidopsis
  misc_feature (1)..(402): Homolog of NCBI NO: 3738257 NR Description: cytosolic phosphoglycerate kinase 1 [Populus
  misc_feature (1)..(402): Homolog of NCBI NO: 2499498 NR Description: Phosphoglycerate kinase, cytosolic
  misc_feature (1)..(402): Homolog of NCBI NO: 21536853 NR Description: phosphoglycerate kinase, putative [Arabidopsis
  misc_feature (1)..(402): Homolog of NCBI NO: 3738257 NR Description: cytosolic phosphoglycerate kinase 1 [Populus
  misc_feature (1)..(401): Homolog of NCBI NO: 3738261 NR Description: chloroplast phosphoglycerate kinase [Populus
  misc_feature (1)..(402): Homolog of NCBI NO: 7434544 NR Description: phosphoglycerate kinase (EC 2.7.2.3) precursor,
  misc_feature (1)..(402): Homolog of NCBI NO: 3738259 NR Description: cytosolic phosphoglycerate kinase 1 [Populus
  misc_feature (1)..(402): Homolog of NCBI NO: 29124969 NR Description: 3-phosphoglycerate kinase [Populus tremuloides]
  misc_feature (1)..(402): Homolog of NCBI NO: 9230771 NR Description: cytosolic phosphoglycerate kinase [Pisum sativum]
  misc_feature (1)..(402): Homolog of NCBI NO: 2499498 NR Description: Phosphoglycerate kinase, cytosolic
  misc_feature (1)..(402): Homolog of NCBI NO: 15219412 NR Description: phosphoglycerate kinase -related [Arabidopsis
  misc_feature (1)..(402): Homolog of NCBI NO: 129916 NR Description: Phosphoglycerate kinase, cytosolic
  misc_feature (1)..(402): Homolog of NCBI NO: 9230771 NR Description: cytosolic phosphoglycerate kinase [Pisum sativum]
  misc_feature (1)..(402): Homolog of NCBI NO: 29124969 NR Description: 3-phosphoglycerate kinase [Populus tremuloides]
  misc_feature (1)..(402): Homolog of NCBI NO: 3738259 NR Description: cytosolic phosphoglycerate kinase 1 [Populus
  misc_feature (1)..(402): Homolog of NCBI NO: 7434544 NR Description: phosphoglycerate kinase (EC 2.7.2.3) precursor,
  misc_feature (1)..(401): Homolog of NCBI NO: 3738261 NR Description: chloroplast phosphoglycerate kinase [Populus

SEQ ID NO: 9283 - protein, 309 aa, Zea mays subsp. mays; identical to SEQ ID NO: 4664
  peptide (1)..(309): Ceres Seq. ID no. 13492688
  misc_feature (1)..(309): Pfam Name: Phosphoglycerate kinase Pfam Description: Phosphoglycerate kinase
  misc_feature (1)..(309): Pfam Name: Phosphoglycerate kinase Pfam Description: Phosphoglycerate kinase
  misc_feature (1)..(309): Homolog of NCBI NO: 129916 NR Description: Phosphoglycerate kinase, cytosolic
  misc_feature (1)..(309): Homolog of NCBI NO: 21536853 NR Description: phosphoglycerate kinase, putative [Arabidopsis
  misc_feature (1)..(309): Homolog of NCBI NO: 15219412 NR Description: phosphoglycerate kinase -related [Arabidopsis
  misc_feature (1)..(309): Homolog of NCBI NO: 3738257 NR Description: cytosolic phosphoglycerate kinase 1 [Populus
  misc_feature (1)..(309): Homolog of NCBI NO: 2499498 NR Description: Phosphoglycerate kinase, cytosolic
  misc_feature (1)..(309): Homolog of NCBI NO: 21536853 NR Description: phosphoglycerate kinase, putative [Arabidopsis
  misc_feature (1)..(309): Homolog of NCBI NO: 3738257 NR Description: cytosolic phosphoglycerate kinase 1 [Populus
  misc_feature (1)..(308): Homolog of NCBI NO: 3738261 NR Description: chloroplast phosphoglycerate kinase [Populus
  misc_feature (1)..(309): Homolog of NCBI NO: 7434544 NR Description: phosphoglycerate kinase (EC 2.7.2.3) precursor,
  misc_feature (1)..(309): Homolog of NCBI NO: 3738259 NR Description: cytosolic phosphoglycerate kinase 1 [Populus
  misc_feature (1)..(309): Homolog of NCBI NO: 29124969 NR Description: 3-phosphoglycerate kinase [Populus tremuloides]
  misc_feature (1)..(309): Homolog of NCBI NO: 9230771 NR Description: cytosolic phosphoglycerate kinase [Pisum sativum]
  misc_feature (1)..(309): Homolog of NCBI NO: 2499498 NR Description: Phosphoglycerate kinase, cytosolic
  misc_feature (1)..(309): Homolog of NCBI NO: 15219412 NR Description: phosphoglycerate kinase -related [Arabidopsis
  misc_feature (1)..(309): Homolog of NCBI NO: 129916 NR Description: Phosphoglycerate kinase, cytosolic
  misc_feature (1)..(309): Homolog of NCBI NO: 9230771 NR Description: cytosolic phosphoglycerate kinase [Pisum sativum]
  misc_feature (1)..(309): Homolog of NCBI NO: 29124969 NR Description: 3-phosphoglycerate kinase [Populus tremuloides]
  misc_feature (1)..(309): Homolog of NCBI NO: 3738259 NR Description: cytosolic phosphoglycerate kinase 1 [Populus
  misc_feature (1)..(309): Homolog of NCBI NO: 7434544 NR Description: phosphoglycerate kinase (EC 2.7.2.3) precursor,
  misc_feature (1)..(308): Homolog of NCBI NO: 3738261 NR Description: chloroplast phosphoglycerate kinase [Populus

SEQ ID NO: 9284 - DNA, 1504 bp, Zea mays subsp. mays
  misc_feature (1)..(1504): Ceres Seq. ID no. 12365889
  misc_feature: MA Experiment ID: 108689 Result: Down-regulated in Transcription
  misc_feature: MA Experiment 108689 PARAMETER Experiment Name: Zm_Drought_Roots_P Parameter: Age (day) Value: 9
  misc_feature: MA Experiment 108689 PARAMETER Experiment Name: Zm_Drought_Roots_P Parameter: Organism Value: Zea mays
  misc_feature: MA Experiment 108689 PARAMETER Experiment Name: Zm_Drought_Roots_P Parameter: Plant Line Value: 35A19
  misc_feature: MA Experiment 108689 PARAMETER Experiment Name: Zm_Drought_Roots_P Parameter: Timepoint (hr) Value: 24
  misc_feature: MA Experiment 108689 PARAMETER Experiment Name: Zm_Drought_Roots_P Parameter: Tissue Value: Roots
  misc_feature: MA Experiment 108689 PARAMETER Experiment Name: Zm_Drought_Roots_P Parameter: Treatment Value: Drought vs. No Drought
gatgagctagctagcaagcctccgatggcgccgcctcgttggccttggccggcaccggctcaacattgccggcagaggccgcccctgcccgggtccgcgccttctctgcctcggccgcccagtccatgcgcacgatgaccgtcaccagcaccgccaagctgacggcggcgcccaccaggaagccggccaggaggccctccagcccgaggccggccttgaagccgagcgcgacgcccaccggcagcgccaccacgtagaagccgcccacgacggcgtacatgcccagcagcggccgcgccgtgcccccgcacgatgccgccgcacacgttgagcgggaagttgaccacctccagcagcgccatcaccttcatggcccgccccacgccgtcccgcacctccgggctgcgcgtgtatatgcgcgcccacggccggcgcgccgccagcatgagcaggcctccggcgaggcccgccaccgcgccgcccgccaccgacaccctggcggcgcggcgcgccgtggcggcgtccccggcgcccagctcgttggacacgcgcaccgacgcgctgacggacagcgacagcatggccgcgaacagcaggtagtcgaagttgagcgtgacggcgaccacgcccaccgtgcggcgcgcgtcggggaggcgccccgtgaggagcaccaggatctcgtaggaccaccactcgaggcaggtgttgaggcagcaggggacggccaggcggaggagcagcagccacgccccggacgcccatcctggcggagagcgagacggtgagcgggatgtggagcgccagcgccagggcagcggcgaacagagtgggcagcgtggcctcctgcgcgctgaggtacgccttgagcgggttgagcacggaggtgacggcgaggtccgggaggaggcagagcacgtaggtcctggccgtggccgcgatgtcgggctgctggccgaagcgcagcagcacggcgtcgacgcgcgtccagaggagcgcgatggggacggaggcggccaggagcatgagggtggccctgagcagcgtcccgcgcaggagggcgacgtttccggcgccgtgcgcctggccgcagatgggctccatggcgccgcagaggccgctgaggacggcgaagccggtgacgttggcgaagctgtagccgagcgtgccggcggccagctccaggtcgccgaggcggccgaggaaggccgtggtcacggcctgcttggcgaaccaggtgaggttcatgccgatgagagggagcgcgatgccgcgctgcgcgcgcacctcggacgcaacagcggccaggccatgctgctgccttggcggtggtgtcgtcatggtcatggctgctgcgtgagcgagcgagcagatggagatggagtttggtttgctttggtttgttggggttacaggcagcacatatccacatactagtatacatactttacttaggctgcctgctttatttctgctttcttccatgaatggatcgtaacggttctgc

SEQ ID NO: 9285 - protein, 168 aa, Zea mays subsp. mays
  peptide (1)..(168): Ceres Seq. ID no. 12365890
MPSSGRAVPPHDAAAHVEREVDHLQQRHHLHGPPHAVPHLRAARVYARPRPARRQHEQASGEARHRAARHRHPGGAARRGGVPGAQLVGHAHRRADGQRQHGREQQVVEVERDGDHAHRAARVGEAPREEHQDLVGPPLEAGVEAAGDGQAEEQQPRPGRPSWRRARR

SEQ ID NO: 9286 - protein, 95 aa, Zea mays subsp. mays
  peptide (1)..(95): Ceres Seq. ID no. 12365891
  misc_feature (1)..(13): Homolog of NCBI NO: 14253159 NR Description: VMP3 protein [Volvox carteri f. nagariensis]
  misc_feature (1)..(76): Homolog of NCBI NO: 20138131 NR Description: Vegetative cell wall protein gp1 precursor rich glycoprotein 1) >gi|12018147|gb|AAG45420.1|AF309494_1
  misc_feature (1)..(72): Homolog of NCBI NO: 22962211 NR Description: hypothetical protein [Rhodopseudomonas palustris]
  misc_feature (1)..(76): Homolog of NCBI NO: 27375632 NR Description: blr0521 [Bradyrhizobium japonicum]
  misc_feature (1)..(76): Homolog of NCBI NO: 22962211 NR Description: hypothetical protein [Rhodopseudomonas palustris]
  misc_feature (1)..(81): Homolog of NCBI NO: 27375632 NR Description: blr0521 [Bradyrhizobium japonicum]
  misc_feature (1)..(18): Homolog of NCBI NO: 38345019 NR Description: OSJNBa0029H02.3 [Oryza sativa (japonica
  misc_feature (1)..(76): Homolog of NCBI NO: 20138131 NR Description: Vegetative cell wall protein gp1 precursor rich glycoprotein 1) >gi|12018147|gb|AAG45420.1|AF309494_1
  misc_feature (1)..(92): Homolog of NCBI NO: 15419013 NR Description: subtilisin-like protein [Toxoplasma gondii]
  misc_feature (1)..(74): Homolog of NCBI NO: 6523547 NR Description: hydroxyproline-rich glycoprotein DZ-HRGP [Volvox
MPPHTLSGKLTTSSSAITFMARPTPSRTSGLRVYMRAHGRRAASMSRPPARPATAPPATDTLAARRAVAASPAPSSLDTRTDALTDSDSMAANSR

SEQ ID NO: 9287 - DNA, 1529 bp, Zea mays subsp. mays
  misc_feature (1)..(1529): Ceres Seq. ID no. 12373122
  misc_feature: MA Experiment ID: 108543 Result: Up-regulated in Transcription
agtaagccacacacagacagtcagacacaggcacacagcgagggagtcctctcctcccccagaaaaggaaaagacgcattccgcacacgcgcggctgggtgtcgaggccgggagacgcggtgaagctagctgctagcgtagccgcgcgcggcgggcgggctcgagctgcgctgtcgctccatgtcggccaccgccgagagcggtggggatctgtcggcggcgcgccgccggtgggatctcaccaacaagggggccgagagcaccccaattttgaaagatgctgtggaaatatctacagatgaagaatcagatggtgttgttacatgccatccgaatggtaacactgatggatgcgaagaaactattagtggcagtcacgatgatgatagcccagaaggccaggaaactagttccattaaggaacctgatgtagaaggtgacacacaggaagacaaacgtgtaaatcaagattcactcaagttgattgatgaagagtctgctcctcccaagtccccagcaaaatccgcgactgcaagttctagatcggagaggcctaaacgtgttgttccccgaccattttctctttctaatcaaagaagtttgtttggagtaaatggtggtgtggccaatccattggccaataaggataaatctggtgataaaagtagcatctctccagcaagcatgacaaagaagagtacgcagatggcacttaggaagactttgcagcctgagaaggtatttcatcctctggaagaggactcttgttctgtgacatcctctacaacatcaacaagagctggcagaactaagatgactgttcccgtcgctccttcatttgtgtgtgctaaccgtgctgacaagaggaaggagttctacacaaaattagaggagaaacataaagctttggaagcagagaaggacgaggctgaggccaggaaaaaggatgagcaagacgttgctttaaaacaactaaggaagtcattggtgattagagcgaaacccatgccgagcttctatcaagaagggcccccaccaaaggctgaactgaagaaggtgcctcctacccgtgccaaatcgccaaagtttacaagttcaaggagaaggagctgcagtgatacaccattgacacctggcggggaaaataccaacgcaacatctacccggccacatcgtcacagcatcgggagtcctagagacgctaacagagtacaacaatgctcgccaaagagcggtgtggcaaccaaaacaagatctgtcaaggctgagctgaaggccctctgaagagcatggagcagccgagtgatgtgtttctctgtacaaaccgaattgtctaaccgtttccatttccatgcatttttgcttctattttatacccaacatctccagcaaaagaaggctgtagggccaatgacgttgttcagcgccgctggaccttatccattttcttacattcgccttgtactcgtaagaactcttggtggcaccatgtgacattccatgtaaattacttgaggatccttgtaggt

SEQ ID NO: 9288 - protein, 367 aa, Zea mays subsp. mays
  peptide (1)..(367): Ceres Seq. ID no. 12373123
  misc_feature (1)..(361): Homolog of NCBI NO: 34897180 NR Description: unknown protein [Oryza sativa (japonica
  misc_feature (201)..(367): Homolog of NCBI NO: 34393229 NR Description: putative seed specific protein [Oryza sativa
  misc_feature (46)..(361): Homolog of NCBI NO: 21553401 NR Description: unknown [Arabidopsis thaliana]
  misc_feature (46)..(361): Homolog of NCBI NO: 18404945 NR Description: expressed protein; protein id: At1g54460.1, by cDNA: 142094., supported by cDNA: gi_13605600, supported by gi_15777864 [Arabidopsis thaliana]
  misc_feature (15)..(302): Homolog of NCBI NO: 9294199 NR Description: gb|AAF04893.1~gene_id:MXC7.13~similar to unknown
  misc_feature (35)..(302): Homolog of NCBI NO: 15228950 NR Description: unknown protein; protein id: At3g23090.1 thaliana] >gi|27765054|gb|AAO23648.1| At3g23090 [Arabidopsis
  misc_feature (145)..(337): Homolog of NCBI NO: 6175167 NR Description: unknown protein [Arabidopsis thaliana]
  misc_feature (145)..(337): Homolog of NCBI NO: 18396961 NR Description: expressed protein; protein id: At3g04630.1,
  misc_feature (145)..(337): Homolog of NCBI NO: 21618286 NR Description: unknown [Arabidopsis thaliana]
  misc_feature (167)..(337): Homolog of NCBI NO: 30679219 NR Description: expressed protein [Arabidopsis thaliana]
MSATAESGGDLSAARRRWDLTNKGAESTPILKDAVEISTDEESDGVVTCHPNGNTDGCEETISGSHDDDSPEGQETSSIKEPDVEGDTQEDKRVNQDSLKLIDEESAPPKSPAKSATASSRSERPKRVVPRPFSLSNQRSLFGVNGGVANPLANKDKSGDKSSISPASMTKKSTQMALRKTLQPEKVFHPLEEDSCSVTSSTTSTRAGRTKMTVPVAPSFVCANRADKRKEFYTKLEEKHKALEAEKDEAEARKKDEQDVALKQLRKSLVIRAKPMPSFYQEGPPPKAELKKVPPTRAKSPKFTSSRRRSCSDTPLTPGGENTNATSTRPHRHSIGSPRDANRVQQCSPKSGVATKTRSVKAELKAL

SEQ ID NO: 9289 - protein, 199 aa, Zea mays subsp. mays
  peptide (1)..(199): Ceres Seq. ID no. 12373124
  misc_feature (1)..(193): Homolog of NCBI NO: 34897180 NR Description: unknown protein [Oryza sativa (japonica
  misc_feature (33)..(199): Homolog of NCBI NO: 34393229 NR Description: putative seed specific protein [Oryza sativa
  misc_feature (1)..(193): Homolog of NCBI NO: 21553401 NR Description: unknown [Arabidopsis thaliana]
  misc_feature (1)..(193): Homolog of NCBI NO: 18404945 NR Description: expressed protein; protein id: At1g54460.1, by cDNA: 142094., supported by cDNA: gi_13605600, supported by gi_15777864 [Arabidopsis thaliana]
  misc_feature (1)..(134): Homolog of NCBI NO: 9294199 NR Description: gb|AAF04893.1~gene_id:MXC7.13~similar to unknown
  misc_feature (1)..(134): Homolog of NCBI NO: 15228950 NR Description: unknown protein; protein id: At3g23090.1 thaliana] >gi|27765054|gb|AAO23648.1| At3g23090 [Arabidopsis
  misc_feature (1)..(169): Homolog of NCBI NO: 6175167 NR Description: unknown protein [Arabidopsis thaliana]
  misc_feature (1)..(169): Homolog of NCBI NO: 21618286 NR Description: unknown [Arabidopsis thaliana]
  misc_feature (1)..(169): Homolog of NCBI NO: 18396961 NR Description: expressed protein; protein id: At3g04630.1,
  misc_feature (1)..(169): Homolog of NCBI NO: 30679219 NR Description: expressed protein [Arabidopsis thaliana]
MTKKSTQMALRKTLQPEKVFHPLEEDSCSVTSSTTSTRAGRTKMTVPVAPSFVCANRADKRKEFYTKLEEKHKALEAEKDEAEARKKDEQDVALKQLRKSLVIRAKPMPSFYQEGPPPKAELKKVPPTRAKSPKFTSSRRRSCSDTPLTPGGENTNATSTRPHRHSIGSPRDANRVQQCSPKSGVATKTRSVKAELKAL

SEQ ID NO: 9290 - protein, 192 aa, Zea mays subsp. mays
  peptide (1)..(192): Ceres Seq. ID no. 12373125
  misc_feature (1)..(127): Homolog of NCBI NO: 15228950 NR Description: unknown protein; protein id: At3g23090.1 thaliana] >gi|27765054|gb|AAO23648.1| At3g23090 [Arabidopsis
  misc_feature (1)..(162): Homolog of NCBI NO: 6175167 NR Description: unknown protein [Arabidopsis thaliana]
  misc_feature (1)..(162): Homolog of NCBI NO: 18396961 NR Description: expressed protein; protein id: At3g04630.1,
  misc_feature (1)..(162): Homolog of NCBI NO: 21618286 NR Description: unknown [Arabidopsis thaliana]
  misc_feature (1)..(162): Homolog of NCBI NO: 30679219 NR Description: expressed protein [Arabidopsis thaliana]
  misc_feature (1)..(186): Homolog of NCBI NO: 34897180 NR Description: unknown protein [Oryza sativa (japonica
  misc_feature (26)..(192): Homolog of NCBI NO: 34393229 NR Description: putative seed specific protein [Oryza sativa
  misc_feature (1)..(186): Homolog of NCBI NO: 21553401 NR Description: unknown [Arabidopsis thaliana]
  misc_feature (1)..(186): Homolog of NCBI NO: 18404945 NR Description: expressed protein; protein id: At1g54460.1, by cDNA: 142094., supported by cDNA: gi_13605600, supported by gi_15777864 [Arabidopsis thaliana]
  misc_feature (1)..(127): Homolog of NCBI NO: 9294199 NR Description: gb|AAF04893.1~gene_id:MXC7.13~similar to unknown
MALRKTLQPEKVFHPLEEDSCSVTSSTTSTRAGRTKMTVPVAPSFVCANRADKRKEFYTKLEEKHKALEAEKDEAEARKKDEQDVALKQLRKSLVIRAKPMPSFYQEGPPPKAELKKVPPTRAKSPKFTSSRRRSCSDTPLTPGGENTNATSTRPHRHSIGSPRDANRVQQCSPKSGVATKTRSVKAELKAL

SEQ ID NO: 9291 - DNA, 1400 bp, Zea mays subsp. mays
  misc_feature (1)..(1400): Ceres Seq. ID no. 12359514
  misc_feature: MA Experiment ID: 108528 Result: Up-regulated in Transcription
  misc_feature: MA Experiment 108528 PARAMETER Experiment Name: Zm_Imbibed_Seeds_P Parameter: Age (day) Value: 5 vs. 2
  misc_feature: MA Experiment 108528 PARAMETER Experiment Name: Zm_Imbibed_Seeds_P Parameter: Organism Value: Zea mays
  misc_feature: MA Experiment 108528 PARAMETER Experiment Name: Zm_Imbibed_Seeds_P Parameter: Plant Line Value: 35A19
  misc_feature: MA Experiment 108528 PARAMETER Experiment Name: Zm_Imbibed_Seeds_P Parameter: Tissue Value: Aerial vs. Embryo
  misc_feature: MA Experiment ID: 108530 Result: Up-regulated in Transcription
  misc_feature: MA Experiment 108530 PARAMETER Experiment Name: Zm_Imbibed_Seeds_P Parameter: Age (day) Value: 6 vs. 2
  misc_feature: MA Experiment 108530 PARAMETER Experiment Name: Zm_Imbibed_Seeds_P Parameter: Organism Value: Zea mays
  misc_feature: MA Experiment 108530 PARAMETER Experiment Name: Zm_Imbibed_Seeds_P Parameter: Plant Line Value: 35A19
  misc_feature: MA Experiment 108530 PARAMETER Experiment Name: Zm_Imbibed_Seeds_P Parameter: Tissue Value: Aerial vs. Embryo
  misc_feature: MA Experiment ID: 108535 Result: Down-regulated in Transcription
  misc_feature: MA Experiment 108535 PARAMETER Experiment Name: Zm_Meristem_P Parameter: Age (day) Value: 8
  misc_feature: MA Experiment 108535 PARAMETER Experiment Name: Zm_Meristem_P Parameter: Organism Value: Zea mays
  misc_feature: MA Experiment 108535 PARAMETER Experiment Name: Zm_Meristem_P Parameter: Plant Line Value: 35A19
  misc_feature: MA Experiment 108535 PARAMETER Experiment Name: Zm_Meristem_P Parameter: Tissue Value: Root Meristem vs. Above Root Meristem
  misc_feature: MA Experiment ID: 108547 Result: Up-regulated in Transcription
  misc_feature: MA Experiment 108547 PARAMETER Experiment Name: Zm_Imbibed_Seeds_P Parameter: Age (day) Value: 4 vs. 2
  misc_feature: MA Experiment 108547 PARAMETER Experiment Name: Zm_Imbibed_Seeds_P Parameter: Organism Value: Zea mays
  misc_feature: MA Experiment 108547 PARAMETER Experiment Name: Zm_Imbibed_Seeds_P Parameter: Plant Line Value: 35A19
  misc_feature: MA Experiment 108547 PARAMETER Experiment Name: Zm_Imbibed_Seeds_P Parameter: Tissue Value: Aerial vs. Embryo
  misc_feature: MA Experiment ID: 20000108 Result: Down-regulated in Transcription
  misc_feature: MA Experiment 20000108 PARAMETER Experiment Name: Zm_Root-Tips_P Parameter: Age (day) Value: 12
  misc_feature: MA Experiment 20000108 PARAMETER Experiment Name: Zm_Root-Tips_P Parameter: Organism Value: Zea mays
  misc_feature: MA Experiment 20000108 PARAMETER Experiment Name: Zm_Root-Tips_P Parameter: Tissue Value: Root tips vs. Root mid region    35
  misc_feature: MA Experiment 20000108 PARAMETER Experiment Name: Zm_Root-Tips_P Parameter: Tissue Value: Root tips vs. Root mid region   Sequence Listing-Misc Features (4)
gtagccttccaaccaaaccaacccacgccatcatcttccgtcaatccatccatccgcttgtccctaccacctccaccaaccaaaacccccaaccgccgaggtcaccggcgactccgtcctcgccgcgccgcgccgcgccgtgaggatgtcgttccactaccacgaccacgggctgtccatggacgccgcggcgncggcggccgccgccgccgcgtcgtcgccgaaccctagcggcttctcccccggcatcggcggggagagggagaaggcggccatcgcggcgcacccgctgtacgagcgcctcctggaggcgcacgtcgcctgcctacgcgtcgccacccccgtcgaccagctcccccgcatcgacgcgcagatcgccgcgcgccccccgccgctcgccgcggccnnnnggnncgcggcngccggggccgcggccgcgggaggcccgtccggcggggaggagctcgacctcttcatgacgcactatgtattgctcctttgctcattcaaggaacagctgcagcagcatgtacgtgttcatgcaatggaagcagtgatgggttgctgggagcttgaacaatccttacaaagcctaacaggggcatctccgggtgaaggcactggaggaaccatgtctgacgatgaagataaccaggtggatagtgaagccaacatgttcgatggaaatgatggatcagacggtatgggctttggccccctgatactaacagagggtgaacggtccttagttgagcgtgtacggaaggagctgaagaacgagcttaagcagggttacaaggaaaagcttgtcgatatcagggaagagatcatgcgcaaacgcagggctgggaagcttcctggagataccgcatctgtactgaaagcttggtggcaagctcattccaagtggccgtacccaactgaagacgacaaggccagactggtgcaggaaacggggttgcagctaaagcaaatcaacaactggttcattaaccaacgcaagcggaactggcacagcaacccaacatcctcggctgaaaagaccaagaagaaaaggtgatgatggcccagagcaatcttggcaaaaagctagagatgtccactatactttattatggcgaagtacattctccctcacttcgtaggcaagagggaaaggtatcttgggtgacttgagtggccacctaatgcgcaagtttgacgacgtggtggggctggagttggtagtgacctcagcagtatagcattcgctaacgtgatgtgggtgaatcacgtgttgcagtagaaccggcgagcgggaggggggtaatttatgttgtattgtaattgtgttttttattaccttgtaatgatattttagggagaatcccaagattcatattcgcatgttttgtcgtccg

SEQ ID NO: 9292 - protein, 304 aa, Zea mays subsp. mays
  peptide (1)..(304): Ceres Seq. ID no. 12359515
  misc_feature (97)..(152): Pfam Name: KNOX2 domain Pfam Description: KNOX2 domain
  misc_feature (1)..(304): Homolog of NCBI NO: 14149139 NR Description: KNOX family class 2 homeodomain protein [Oryza
  misc_feature (3)..(304): Homolog of NCBI NO: 33333542 NR Description: knotted 7 [Hordeum vulgare]
  misc_feature (9)..(304): Homolog of NCBI NO: 7446253 NR Description: probable homeobox protein OSH45, splice form OSH44
  misc_feature (9)..(303): Homolog of NCBI NO: 7446252 NR Description: probable homeobox protein OSH45, splice form OSH45
  misc_feature (39)..(303): Homolog of NCBI NO: 15238743 NR Description: KNAT3 homeodomain protein; protein id:
  misc_feature (39)..(303): Homolog of NCBI NO: 21554222 NR Description: KNAT3 homeodomain protein [Arabidopsis thaliana]
  misc_feature (39)..(303): Homolog of NCBI NO: 21539535 NR Description: KNAT3 homeodomain protein [Arabidopsis thaliana]
  misc_feature (9)..(304): Homolog of NCBI NO: 3023961 NR Description: Homeobox protein knotted-1 like 3 (KNAP3)
  misc_feature (39)..(304): Homolog of NCBI NO: 20141566 NR Description: Homeobox protein knotted-1 like 4 (KNAT4)
  misc_feature (39)..(304): Homolog of NCBI NO: 1045044 NR Description: KNAT4 homeobox protein [Arabidopsis thaliana]
  misc_feature (17)..(17): Xaa is any aa, unknown or other
  misc_feature (88)..(88): Xaa is any aa, unknown or other
  misc_feature (89)..(89): Xaa is any aa, unknown or other
  misc_feature (90)..(90): Xaa is any aa, unknown or other
  misc_feature (92)..(92): Xaa is any aa, unknown or other
MSFHYHDHGLSMDAAAXAAAAAASSPNPSGFSPGIGGEREKAAIAAHPLYERLLEAHVACLRVATPVDQLPRIDAQIAARPPPLAAAXXXAXAGAAAAGGPSGGEELDLFMTHYVLLLCSFKEQLQQHVRVHAMEAVMGCWELEQSLQSLTGASPGEGTGGTMSDDEDNQVDSEANMFDGNDGSDGMGFGPLILTEGERSLVERVRKELKNELKQGYKEKLVDIREEIMRKRRAGKLPGDTASVLKAWWQAHSKWPYPTEDDKARLVQETGLQLKQINNWFINQRKRNWHSNPTSSAEKTKKKR

SEQ ID NO: 9293 - protein, 293 aa, Zea mays subsp. mays
  peptide (1)..(293): Ceres Seq. ID no. 12359516
  misc_feature (86)..(141): Pfam Name: KNOX2 domain Pfam Description: KNOX2 domain
  misc_feature (1)..(293): Homolog of NCBI NO: 14149139 NR Description: KNOX family class 2 homeodomain protein [Oryza
  misc_feature (1)..(293): Homolog of NCBI NO: 33333542 NR Description: knotted 7 [Hordeum vulgare]
  misc_feature (1)..(293): Homolog of NCBI NO: 7446253 NR Description: probable homeobox protein OSH45, splice form OSH44
  misc_feature (1)..(292): Homolog of NCBI NO: 7446252 NR Description: probable homeobox protein OSH45, splice form OSH45
  misc_feature (28)..(292): Homolog of NCBI NO: 15238743 NR Description: KNAT3 homeodomain protein; protein id:
  misc_feature (28)..(292): Homolog of NCBI NO: 21539535 NR Description: KNAT3 homeodomain protein [Arabidopsis thaliana]
  misc_feature (28)..(292): Homolog of NCBI NO: 21554222 NR Description: KNAT3 homeodomain protein [Arabidopsis thaliana]
  misc_feature (1)..(293): Homolog of NCBI NO: 3023961 NR Description: Homeobox protein knotted-1 like 3 (KNAP3)
  misc_feature (28)..(293): Homolog of NCBI NO: 20141566 NR Description: Homeobox protein knotted-1 like 4 (KNAT4)
  misc_feature (28)..(293): Homolog of NCBI NO: 1045044 NR Description: KNAT4 homeobox protein [Arabidopsis thaliana]
  misc_feature (6)..(6): Xaa is any aa, unknown or other
  misc_feature (77)..(77): Xaa is any aa, unknown or other
  misc_feature (78)..(78): Xaa is any aa, unknown or other
  misc_feature (79)..(79): Xaa is any aa, unknown or other
  misc_feature (81)..(81): Xaa is any aa, unknown or other
MDAAAXAAAAAASSPNPSGFSPGIGGEREKAAIAAHPLYERLLEAHVACLRVATPVDQLPRIDAQIAARPPPLAAAXXXAXAGAAAAGGPSGGEELDLFMTHYVLLLCSFKEQLQQHVRVHAMEAVMGCWELEQSLQSLTGASPGEGTGGTMSDDEDNQVDSEANMFDGNDGSDGMGFGPLILTEGERSLVERVRKELKNELKQGYKEKLVDIREEIMRKRRAGKLPGDTASVLKAWWQAHSKWPYPTEDDKARLVQETGLQLKQINNWFINQRKRNWHSNPTSSAEKTKKKR

SEQ ID NO: 9294 - protein, 194 aa, Zea mays subsp. mays
  peptide (1)..(194): Ceres Seq. ID no. 12359517
  misc_feature (1)..(42): Pfam Name: KNOX2 domain Pfam Description: KNOX2 domain
  misc_feature (1)..(194): Homolog of NCBI NO: 14149139 NR Description: KNOX family class 2 homeodomain protein [Oryza
  misc_feature (1)..(194): Homolog of NCBI NO: 33333542 NR Description: knotted 7 [Hordeum vulgare]
  misc_feature (1)..(194): Homolog of NCBI NO: 7446253 NR Description: probable homeobox protein OSH45, splice form OSH44
  misc_feature (1)..(193): Homolog of NCBI NO: 7446252 NR Description: probable homeobox protein OSH45, splice form OSH45
  misc_feature (1)..(193): Homolog of NCBI NO: 15238743 NR Description: KNAT3 homeodomain protein; protein id:
  misc_feature (1)..(193): Homolog of NCBI NO: 21554222 NR Description: KNAT3 homeodomain protein [Arabidopsis thaliana]
  misc_feature (1)..(193): Homolog of NCBI NO: 21539535 NR Description: KNAT3 homeodomain protein [Arabidopsis thaliana]
  misc_feature (1)..(194): Homolog of NCBI NO: 3023961 NR Description: Homeobox protein knotted-1 like 3 (KNAP3)
  misc_feature (1)..(194): Homolog of NCBI NO: 20141566 NR Description: Homeobox protein knotted-1 like 4 (KNAT4)
  misc_feature (1)..(194): Homolog of NCBI NO: 1045044 NR Description: KNAT4 homeobox protein [Arabidopsis thaliana]
MTHYVLLLCSFKEQLQQHVRVHAMEAVMGCWELEQSLQSLTGASPGEGTGGTMSDDEDNQVDSEANMFDGNDGSDGMGFGPLILTEGERSLVERVRKELKNELKQGYKEKLVDIREEIMRKRRAGKLPGDTASVLKAWWQAHSKWPYPTEDDKARLVQETGLQLKQINNWFINQRKRNWHSNPTSSAEKTKKKR

SEQ ID NO: 9295 - DNA, 1611 bp, Zea mays subsp. mays
  misc_feature (1)..(1611): Ceres Seq. ID no. 12372832
  misc_feature: MA Experiment ID: 108522 Result: Up-regulated in Transcription
  misc_feature: MA Experiment 108522 PARAMETER Experiment Name: Zm_42deg_Heat_P Parameter: Age (day) Value: 8
  misc_feature: MA Experiment 108522 PARAMETER Experiment Name: Zm_42deg_Heat_P Parameter: Organism Value: Zea mays
  misc_feature: MA Experiment 108522 PARAMETER Experiment Name: Zm_42deg_Heat_P Parameter: Plant Line Value: 35A19
  misc_feature: MA Experiment 108522 PARAMETER Experiment Name: Zm_42deg_Heat_P Parameter: Temperature (deg C) Value: 42 vs. 22
  misc_feature: MA Experiment 108522 PARAMETER Experiment Name: Zm_42deg_Heat_P Parameter: Timepoint (hr) Value: 1
  misc_feature: MA Experiment 108522 PARAMETER Experiment Name: Zm_42deg_Heat_P Parameter: Tissue Value: Aerial
  misc_feature: MA Experiment ID: 108523 Result: Up-regulated in Transcription
  misc_feature: MA Experiment 108523 PARAMETER Experiment Name: Zm_42deg_Heat_P Parameter: Age (day) Value: 8
  misc_feature: MA Experiment 108523 PARAMETER Experiment Name: Zm_42deg_Heat_P Parameter: Organism Value: Zea mays
  misc_feature: MA Experiment 108523 PARAMETER Experiment Name: Zm_42deg_Heat_P Parameter: Plant Line Value: 35A19
  misc_feature: MA Experiment 108523 PARAMETER Experiment Name: Zm_42deg_Heat_P Parameter: Temperature (deg C) Value: 42 vs. 22
  misc_feature: MA Experiment 108523 PARAMETER Experiment Name: Zm_42deg_Heat_P Parameter: Timepoint (hr) Value: 6
  misc_feature: MA Experiment 108523 PARAMETER Experiment Name: Zm_42deg_Heat_P Parameter: Tissue Value: Aerial
agcgtccgtttcctcgaggctcgaccagtcgagcttgagaaaaatcaaagctcccacctacctcgagacccaggacgcgtggagagcggtgccaaaccaccatggcgatcctgctcctcttgctcttcgttttgtcctcagcttcagctgatgagtacggggaagagctgctgcagcgcgcgtggggggagcgggagtggatggtgagcgtgcggcggcgcatccacgcgcatccggagctcgcgttccgggagcaccgcaccgcagccctcgtccgcgaggagctcgagcacctcggccttcccgcccgcgccgtcgccggaacgggcgtcgtcgctgatgtaggttccggggcgccccccttcgtggcgctccgcgccgacatggacgcgctcccgctccaggaattagtggagtgggagcataagagcaaggtggacggagtgatgcacgcctgcgggcacgatgtccacacagcgatgcttctgggagcagcaaagttactcagccagcgtaaggatcagctcaagggaacagtgagactcctttttcaacctgccgaggaaagtggtgcaggtgcatctcatatgataagagaaggggttctggacggtgttgaagccatatttgcaatgcatgttgactatcgtataccaactggtgtaatagcagctcacccaggacctacacaagcggctgtatgtttcttcgaagcaaaaattgaaggtaaaactgggatggctgaaaccccacacttaaatgtggaccctgttgtcgtcacatcattggccatcctgtccctgcagcagcttatttccagagaagatgatcctcttcacagccaagtggtctcggttacctatgtgaaagctggaaaagcccttgatgctacccctaaccttgttgaatttggaggtactttgaggagcctcaccactgaaggcctttactgtctgcaaagaagggttaaagaggtggtagaagggcaggcggctgtgcataggtgcaagggagctgtcgaaataaaggttgaggactacccggtgtaccctgccgttgtgaacgacgagaagctgcatcgacatgtagaggatgtcggcagaggcttgcttggcccgggcaaggtgagaccaggggaaaagatcatggccggcgaagacttcgctttctaccagcagcttgttcccggcgttatgtttggcatcggcattagaaacgaggaagctggttctgttcactcggctcacaacccctatttcttcgtcgatgaggacgtcattcctgttggggctgctttgcatgctgccattgcagaactgtacttcactgacggccccctctttcgacaaagaagactagtggtttctcgttcgtgcgtattttgtctggatcagtccgaacagatggcttcagctggccaatcagatctgaacatctggtccaccatgctgatcagccgcgctccgcggccagtatcaacctccaactatttttccctctgtaaccagaaacactacacatgtttctcaaccctacagtggtctagctattttattctctctttaaacagaaacactgcaaggttcctaaccttatagtgggatttagaac

SEQ ID NO: 9296 - protein, 498 aa, Zea mays subsp. mays
  peptide (1)..(498): Ceres Seq. ID no. 12372833
  misc_feature (31)..(407): Pfam Name: Peptidase family M20/M25/M40 Pfam Description: Peptidase family M20/M25/M40
  misc_feature (3)..(410): Homolog of NCBI NO: 15239551 NR Description: IAA-amino acid hydrolase homolog ILL3
  misc_feature (3)..(409): Homolog of NCBI NO: 34900784 NR Description: IAA amidohydrolase-like protein~contains ESTs
  misc_feature (11)..(407): Homolog of NCBI NO: 28376718 NR Description: putative IAA amidohydrolase [Oryza sativa
  misc_feature (20)..(407): Homolog of NCBI NO: 34900780 NR Description: putative IAA amidohydrolase [Oryza sativa
  misc_feature (12)..(407): Homolog of NCBI NO: 34900782 NR Description: putative IAA amidohydrolase [Oryza sativa
  misc_feature (20)..(407): Homolog of NCBI NO: 28376716 NR Description: putative IAA amidohydrolase [Oryza sativa
  misc_feature (1)..(410): Homolog of NCBI NO: 34910396 NR Description: putative IAA-Ala hydrolase [Oryza sativa
  misc_feature (1)..(410): Homolog of NCBI NO: 27948556 NR Description: IAA-amino acid hydrolase [Oryza sativa (indica
  misc_feature (1)..(410): Homolog of NCBI NO: 34914096 NR Description: putative IAA-Ala hydrolase [Oryza sativa
  misc_feature (32)..(410): Homolog of NCBI NO: 18129692 NR Description: IAA amidohydrolase [Arabidopsis suecica]
MAILLLLLFVLSSASADEYGEELLQRAWGEREWMVSVRRRIHAHPELAFREHRTAALVREELEHLGLPARAVAGTGVVADVGSGAPPFVALRADMDALPLQELVEWEHKSKVDGVMHACGHDVHTAMLLGAAKLLSQRKDQLKGTVRLLFQPAEESGAGASHMIREGVLDGVEAIFAMHVDYRIPTGVIAAHPGPTQAAVCFFEAKIEGKTGMAETPHLNVDPVVVTSLAILSLQQLISREDDPLHSQVVSVTYVKAGKALDATPNLVEFGGTLRSLTTEGLYCLQRRVKEVVEGQAAVHRCKGAVEIKVEDYPVYPAVVNDEKLHRHVEDVGRGLLGPGKVRPGEKIMAGEDFAFYQQLVPGVMFGIGIRNEEAGSVHSAHNPYFFVDEDVIPVGAALHAAIAELYFTDGPLFRQRRLVVSRSCVFCLDQSEQMASAGQSDLNIWSTMLISRAPRPVSTSNYFSLCNQKHYTCFSTLQWSSYFILSLNRNTARFLTL

SEQ ID NO: 9297 - protein, 465 aa, Zea mays subsp. mays
  peptide (1)..(465): Ceres Seq. ID no. 12372834
  misc_feature (1)..(374): Pfam Name: Peptidase family M20/M25/M40 Pfam Description: Peptidase family M20/M25/M40
  misc_feature (1)..(377): Homolog of NCBI NO: 15239551 NR Description: IAA-amino acid hydrolase homolog ILL3
  misc_feature (1)..(376): Homolog of NCBI NO: 34900784 NR Description: IAA amidohydrolase-like protein~contains ESTs
  misc_feature (1)..(374): Homolog of NCBI NO: 28376718 NR Description: putative IAA amidohydrolase [Oryza sativa
  misc_feature (1)..(374): Homolog of NCBI NO: 34900780 NR Description: putative IAA amidohydrolase [Oryza sativa
  misc_feature (1)..(374): Homolog of NCBI NO: 34900782 NR Description: putative IAA amidohydrolase [Oryza sativa
  misc_feature (1)..(374): Homolog of NCBI NO: 28376716 NR Description: putative IAA amidohydrolase [Oryza sativa
  misc_feature (1)..(377): Homolog of NCBI NO: 34910396 NR Description: putative IAA-Ala hydrolase [Oryza sativa
  misc_feature (1)..(377): Homolog of NCBI NO: 27948556 NR Description: IAA-amino acid hydrolase [Oryza sativa (indica
  misc_feature (1)..(377): Homolog of NCBI NO: 34914096 NR Description: putative IAA-Ala hydrolase [Oryza sativa
  misc_feature (1)..(377): Homolog of NCBI NO: 18129692 NR Description: IAA amidohydrolase [Arabidopsis suecica]
MVSVRRRIHAHPELAFREHRTAALVREELEHLGLPARAVAGTGVVADVGSGAPPFVALRADMDALPLQELVEWEHKSKVDGVMHACGHDVHTAMLLGAAKLLSQRKDQLKGTVRLLFQPAEESGAGASHMIREGVLDGVEAIFAMHVDYRIPTGVIAAHPGPTQAAVCFFEAKIEGKTGMAETPHLNVDPVVVTSLAILSLQQLISREDDPLHSQVVSVTYVKAGKALDATPNLVEFGGTLRSLTTEGLYCLQRRVKEVVEGQAAVHRCKGAVEIKVEDYPVYPAVVNDEKLHRHVEDVGRGLLGPGKVRPGEKIMAGEDFAFYQQLVPGVMFGIGIRNEEAGSVHSAHNPYFFVDEDVIPVGAALHAAIAELYFTDGPLFRQRRLVVSRSCVFCLDQSEQMASAGQSDLNIWSTMLISRAPRPVSTSNYFSLCNQKHYTCFSTLQWSSYFILSLNRNTARFLTL

SEQ ID NO: 9298 - protein, 404 aa, Zea mays subsp. mays
  peptide (1)..(404): Ceres Seq. ID no. 12372835
  misc_feature (1)..(313): Pfam Name: Peptidase family M20/M25/M40 Pfam Description: Peptidase family M20/M25/M40
  misc_feature (1)..(316): Homolog of NCBI NO: 15239551 NR Description: IAA-amino acid hydrolase homolog ILL3
  misc_feature (1)..(315): Homolog of NCBI NO: 34900784 NR Description: IAA amidohydrolase-like protein~contains ESTs
  misc_feature (1)..(313): Homolog of NCBI NO: 28376718 NR Description: putative IAA amidohydrolase [Oryza sativa
  misc_feature (1)..(313): Homolog of NCBI NO: 34900780 NR Description: putative IAA amidohydrolase [Oryza sativa
  misc_feature (1)..(313): Homolog of NCBI NO: 34900782 NR Description: putative IAA amidohydrolase [Oryza sativa
  misc_feature (1)..(313): Homolog of NCBI NO: 28376716 NR Description: putative IAA amidohydrolase [Oryza sativa
  misc_feature (1)..(316): Homolog of NCBI NO: 34910396 NR Description: putative IAA-Ala hydrolase [Oryza sativa
  misc_feature (1)..(316): Homolog of NCBI NO: 27948556 NR Description: IAA-amino acid hydrolase [Oryza sativa (indica
  misc_feature (1)..(316): Homolog of NCBI NO: 34914096 NR Description: putative IAA-Ala hydrolase [Oryza sativa
  misc_feature (1)..(316): Homolog of NCBI NO: 18129692 NR Description: IAA amidohydrolase [Arabidopsis suecica]
MDALPLQELVEWEHKSKVDGVMHACGHDVHTAMLLGAAKLLSQRKDQLKGTVRLLFQPAEESGAGASHMIREGVLDGVEAIFAMHVDYRIPTGVIAAHPGPTQAAVCFFEAKIEGKTGMAETPHLNVDPVVVTSLAILSLQQLISREDDPLHSQVVSVTYVKAGKALDATPNLVEFGGTLRSLTTEGLYCLQRRVKEVVEGQAAVHRCKGAVEIKVEDYPVYPAVVNDEKLHRHVEDVGRGLLGPGKVRPGEKIMAGEDFAFYQQLVPGVMFGIGIRNEEAGSVHSAHNPYFFVDEDVIPVGAALHAAIAELYFTDGPLFRQRRLVVSRSCVFCLDQSEQMASAGQSDLNIWSTMLISRAPRPVSTSNYFSLCNQKHYTCFSTLQWSSYFILSLNRNTARFLTL

SEQ ID NO: 9299 - DNA, 1283 bp, Zea mays subsp. mays
  misc_feature (1)..(1283): Ceres Seq. ID no. 12407025
  misc_feature: MA Experiment ID: 108528 Result: Up-regulated in Transcription
  misc_feature: MA Experiment 108528 PARAMETER Experiment Name: Zm_Imbibed_Seeds_P Parameter: Age (day) Value: 5 vs. 2
  misc_feature: MA Experiment 108528 PARAMETER Experiment Name: Zm_Imbibed_Seeds_P Parameter: Organism Value: Zea mays
  misc_feature: MA Experiment 108528 PARAMETER Experiment Name: Zm_Imbibed_Seeds_P Parameter: Plant Line Value: 35A19
  misc_feature: MA Experiment 108528 PARAMETER Experiment Name: Zm_Imbibed_Seeds_P Parameter: Tissue Value: Aerial vs. Embryo
  misc_feature: MA Experiment ID: 108530 Result: Up-regulated in Transcription
  misc_feature: MA Experiment 108530 PARAMETER Experiment Name: Zm_Imbibed_Seeds_P Parameter: Age (day) Value: 6 vs. 2
  misc_feature: MA Experiment 108530 PARAMETER Experiment Name: Zm_Imbibed_Seeds_P Parameter: Organism Value: Zea mays
  misc_feature: MA Experiment 108530 PARAMETER Experiment Name: Zm_Imbibed_Seeds_P Parameter: Plant Line Value: 35A19
  misc_feature: MA Experiment 108530 PARAMETER Experiment Name: Zm_Imbibed_Seeds_P Parameter: Tissue Value: Aerial vs. Embryo
  misc_feature: MA Experiment ID: 108534 Result: Up-regulated in Transcription
  misc_feature: MA Experiment 108534 PARAMETER Experiment Name: Zm_4deg_Cold_P Parameter: Age (hr) Value: 8
  misc_feature: MA Experiment 108534 PARAMETER Experiment Name: Zm_4deg_Cold_P Parameter: Organism Value: Zea mays
  misc_feature: MA Experiment 108534 PARAMETER Experiment Name: Zm_4deg_Cold_P Parameter: Plant Line Value: 35A19
  misc_feature: MA Experiment 108534 PARAMETER Experiment Name: Zm_4deg_Cold_P Parameter: Temperature (deg C) Value: 4 vs. 22
  misc_feature: MA Experiment 108534 PARAMETER Experiment Name: Zm_4deg_Cold_P Parameter: Timepoint (hr) Value: 6
  misc_feature: MA Experiment 108534 PARAMETER Experiment Name: Zm_4deg_Cold_P Parameter: Tissue Value: Aerial
  misc_feature: MA Experiment ID: 108536 Result: Down-regulated in Transcription
  misc_feature: MA Experiment 108536 PARAMETER Experiment Name: Zm_Meristem_P Parameter: Age (day) Value: 8
  misc_feature: MA Experiment 108536 PARAMETER Experiment Name: Zm_Meristem_P Parameter: Organism Value: Zea mays
  misc_feature: MA Experiment 108536 PARAMETER Experiment Name: Zm_Meristem_P Parameter: Plant Line Value: 35A19
  misc_feature: MA Experiment 108536 PARAMETER Experiment Name: Zm_Meristem_P Parameter: Tissue Value: Shoot Meristem vs. Above Shoot Meristem
  misc_feature: MA Experiment ID: 108545 Result: Up-regulated in Transcription
  misc_feature: MA Experiment 108545 PARAMETER Experiment Name: Zm_Imbibed_Seeds_P Parameter: Age (day) Value: 3 vs. 2
  misc_feature: MA Experiment 108545 PARAMETER Experiment Name: Zm_Imbibed_Seeds_P Parameter: Organism Value: Zea mays
  misc_feature: MA Experiment 108545 PARAMETER Experiment Name: Zm_Imbibed_Seeds_P Parameter: Plant Line Value: 35A19
  misc_feature: MA Experiment 108545 PARAMETER Experiment Name: Zm_Imbibed_Seeds_P Parameter: Tissue Value: Aerial vs. Embryo
  misc_feature: MA Experiment ID: 108547 Result: Up-regulated in Transcription
  misc_feature: MA Experiment 108547 PARAMETER Experiment Name: Zm_Imbibed_Seeds_P Parameter: Age (day) Value: 4 vs. 2
  misc_feature: MA Experiment 108547 PARAMETER Experiment Name: Zm_Imbibed_Seeds_P Parameter: Organism Value: Zea mays
  misc_feature: MA Experiment 108547 PARAMETER Experiment Name: Zm_Imbibed_Seeds_P Parameter: Plant Line Value: 35A19
  misc_feature: MA Experiment 108547 PARAMETER Experiment Name: Zm_Imbibed_Seeds_P Parameter: Tissue Value: Aerial vs. Embryo
  misc_feature: MA Experiment ID: 108687 Result: Down-regulated in Transcription
  misc_feature: MA Experiment 108687 PARAMETER Experiment Name: Zm_Embryos-Flowers__P Parameter: Tissue Value: Embryo vs. Aerial+
  misc_feature: MA Experiment ID: 108688 Result: Down-regulated in Transcription
  misc_feature: MA Experiment 108688 PARAMETER Experiment Name: Zm_Embryos-Flowers__P Parameter: Tissue Value: Immature Flowers vs. Aerial+
acaggaggcgcggagcaggaggagacacatggcagatgaaggcgaggaggcggtgccgccggccgcgatggtgggggaggcgccaacagaggactttgggctgcccgctgagctgatggccgtgctaccatcggacccgttcgctcagctggacgtggcgcgcaagatcacctccatcgcgctctcgcaccgcctcggccgcctcgaggccgaggcggcgcgcctgcgctcgcagctcgccgagcgtgacgccgaggccgaggagctccgcgagcgcgtcgagcagctcgactccgcgctcgccgtcgccaccgggccgcctccgccgcgctgaggaggaaaaggagacactgctgcgggacaactctgcgctgtccaacaccgttaggaagctgaacagagatgtcgccaagttggaagttttcaaaaagacacttgtgcagtcgctccaggaagatgacagcagtgataatactgctcccagggcaagcgttgcagcaacttcaaacttctctgcgccatcagatgaagattctgcatttccaacttccaaatcatcacagatttcagaaactgcgagttcagtctcagaggaaaatagccaagttgaaccagatgcacctaggccaccaccccgtccacatgtatttttgccgtcatacaacagcacaccaaggagaactcccccagactcacctccaaggcgttatgcatcggtatcaccgccgaggcgacattcaatctccgttacgtcgatgaatatgtttaatgacaggtcctcaggcttttctagtcagcatagctctccatttgaccctccaagtcaaacaggacgaacaagagttgatggaaaggagttctttcgtcatgtcagaaatcggttgtcgtatgagcagtttggtgcattcctggctaatgtgaaggagctgaacgcacacaggcagaccagagaggataccttaagaaaggctgatgagatctttggtcctgaaaacaaggacctgtacaccgtttttgagagcctaataactcgcaacattcgctaatctcctcaagggttgaagcattaccaatgattactagtgattcatgttttaccggtatattttggttacaatgttcaacactttttttgtatttgaagtctgtagtctgttgtggattcttggtatatagtctatagttctttcttttttttttcatgctaatgtccatgtagagtcctctgtttctatgtaagctacaacttatattctaatacaaatgttgtctgatatttcttg

SEQ ID NO: 9300 - protein, 118 aa, Zea mays subsp. mays
  peptide (1)..(118): Ceres Seq. ID no. 12407026
MSPSWKFSKRHLCSRSRKMTAVIILLPGQALQQLQTSLRHQMKILHFQLPNHHRFQKLRVQSQRKIAKLNQMHLGHHPVHMYFCRHTTAHQGELPQTHLQGVMHRYHRRGDIQSPLRR

SEQ ID NO: 9301 - protein, 110 aa, Zea mays subsp. mays
  peptide (1)..(110): Ceres Seq. ID no. 12407027
  misc_feature (12)..(103): Homolog of NCBI NO: 18414476 NR Description: Expressed protein; protein id: At4g15545.1, by cDNA: 307., supported by cDNA: gi_14517355, supported by cDNA: supported by cDNA: gi_16323275 [Arabidopsis thaliana] thaliana]
  misc_feature (29)..(103): Homolog of NCBI NO: 7485048 NR Description: hypothetical protein - Arabidopsis thaliana hypothetical protein [Arabidopsis thaliana]
  misc_feature (31)..(97): Homolog of NCBI NO: 30684901 NR Description: expressed protein [Arabidopsis thaliana] ESTs gb|N38586 and gb|N38613 come from this gene. [Arabidopsis >gi|26452357|dbj|BAC43264.1| unknown protein [Arabidopsis
  misc_feature (31)..(97): Homolog of NCBI NO: 15222835 NR Description: hypothetical protein; protein id: At1g56080.1
  misc_feature (42)..(104): Homolog of NCBI NO: 23613663 NR Description: hypothetical protein, conserved [Plasmodium
  misc_feature (42)..(104): Homolog of NCBI NO: 23489944 NR Description: hypothetical protein [Plasmodium yoelii yoelii]
  misc_feature (31)..(103): Homolog of NCBI NO: 38344261 NR Description: OSJNBa0008M17.14 [Oryza sativa (japonica
  misc_feature (17)..(100): Homolog of NCBI NO: 34909876 NR Description: B1143G03.2 [Oryza sativa (japonica
  misc_feature (31)..(97): Homolog of NCBI NO: 25404089 NR Description: hypothetical protein T6H22.12 [imported] - thaliana >gi|6056378|gb|AAF02842.1|AC009894_13 Hypothetical
QEARSRRRHMADEGEEAVPPAAMVGEAPTEDFGLPAELMAVLPSDPFAQLDVARKITSIALSHRLGRLEAEAARLRSQLAERDAEAEELRERVEQLDSALAVATGPPPPR

SEQ ID NO: 9302 - protein, 101 aa, Zea mays subsp. mays
  peptide (1)..(101): Ceres Seq. ID no. 12407028
  misc_feature (3)..(94): Homolog of NCBI NO: 18414476 NR Description: Expressed protein; protein id: At4g15545.1, by cDNA: 307., supported by cDNA: gi_14517355, supported by cDNA: supported by cDNA: gi_16323275 [Arabidopsis thaliana] thaliana]
  misc_feature (20)..(94): Homolog of NCBI NO: 7485048 NR Description: hypothetical protein - Arabidopsis thaliana hypothetical protein [Arabidopsis thaliana]
  misc_feature (22)..(88): Homolog of NCBI NO: 30684901 NR Description: expressed protein [Arabidopsis thaliana] ESTs gb|N38586 and gb|N38613 come from this gene. [Arabidopsis >gi|26452357|dbj|BAC43264.1| unknown protein [Arabidopsis
  misc_feature (22)..(88): Homolog of NCBI NO: 15222835 NR Description: hypothetical protein; protein id: At1g56080.1
  misc_feature (33)..(95): Homolog of NCBI NO: 23613663 NR Description: hypothetical protein, conserved [Plasmodium
  misc_feature (33)..(95): Homolog of NCBI NO: 23489944 NR Description: hypothetical protein [Plasmodium yoelii yoelii]
  misc_feature (22)..(94): Homolog of NCBI NO: 38344261 NR Description: OSJNBa0008M17.14 [Oryza sativa (japonica
  misc_feature (8)..(91): Homolog of NCBI NO: 34909876 NR Description: B1143G03.2 [Oryza sativa (japonica
  misc_feature (22)..(88): Homolog of NCBI NO: 25404089 NR Description: hypothetical protein T6H22.12 [imported] - thaliana >gi|6056378|gb|AAF02842.1|AC009894_13 Hypothetical
MADEGEEAVPPAAMVGEAPTEDFGLPAELMAVLPSDPFAQLDVARKITSIALSHRLGRLEAEAARLRSQLAERDAEAEELRERVEQLDSALAVATGPPPPR

SEQ ID NO: 9303 - DNA, 1355 bp, Zea mays subsp. mays
  misc_feature (1)..(1355): Ceres Seq. ID no. 13500460
  misc_feature: MA Experiment ID: 108528 Result: Down-regulated in Transcription
  misc_feature: MA Experiment 108528 PARAMETER Experiment Name: Zm_Imbibed_Seeds_P Parameter: Age (day) Value: 5 vs. 2
  misc_feature: MA Experiment 108528 PARAMETER Experiment Name: Zm_Imbibed_Seeds_P Parameter: Organism Value: Zea mays
  misc_feature: MA Experiment 108528 PARAMETER Experiment Name: Zm_Imbibed_Seeds_P Parameter: Plant Line Value: 35A19
  misc_feature: MA Experiment 108528 PARAMETER Experiment Name: Zm_Imbibed_Seeds_P Parameter: Tissue Value: Aerial vs. Embryo
  misc_feature: MA Experiment ID: 108529 Result: Up-regulated in Transcription
  misc_feature: MA Experiment 108529 PARAMETER Experiment Name: Zm_Imbibed_Seeds_P Parameter: Age (day) Value: 5 vs. 2
  misc_feature: MA Experiment 108529 PARAMETER Experiment Name: Zm_Imbibed_Seeds_P Parameter: Organism Value: Zea mays
  misc_feature: MA Experiment 108529 PARAMETER Experiment Name: Zm_Imbibed_Seeds_P Parameter: Plant Line Value: 35A19
  misc_feature: MA Experiment 108529 PARAMETER Experiment Name: Zm_Imbibed_Seeds_P Parameter: Tissue Value: Roots vs. Embryo
  misc_feature: MA Experiment ID: 108530 Result: Down-regulated in Transcription
  misc_feature: MA Experiment 108530 PARAMETER Experiment Name: Zm_Imbibed_Seeds_P Parameter: Age (day) Value: 6 vs. 2
  misc_feature: MA Experiment 108530 PARAMETER Experiment Name: Zm_Imbibed_Seeds_P Parameter: Organism Value: Zea mays
  misc_feature: MA Experiment 108530 PARAMETER Experiment Name: Zm_Imbibed_Seeds_P Parameter: Plant Line Value: 35A19
  misc_feature: MA Experiment 108530 PARAMETER Experiment Name: Zm_Imbibed_Seeds_P Parameter: Tissue Value: Aerial vs. Embryo
  misc_feature: MA Experiment ID: 108535 Result: Down-regulated in Transcription
  misc_feature: MA Experiment 108535 PARAMETER Experiment Name: Zm_Meristem_P Parameter: Age (day) Value: 8
  misc_feature: MA Experiment 108535 PARAMETER Experiment Name: Zm_Meristem_P Parameter: Organism Value: Zea mays
  misc_feature: MA Experiment 108535 PARAMETER Experiment Name: Zm_Meristem_P Parameter: Plant Line Value: 35A19
  misc_feature: MA Experiment 108535 PARAMETER Experiment Name: Zm_Meristem_P Parameter: Tissue Value: Root Meristem vs. Above Root Meristem
  misc_feature: MA Experiment ID: 108543 Result: Up-regulated in Transcription
  misc_feature: MA Experiment ID: 108546 Result: Up-regulated in Transcription
  misc_feature: MA Experiment 108546 PARAMETER Experiment Name: Zm_Imbibed_Seeds_P Parameter: Age (day) Value: 3 vs. 2
  misc_feature: MA Experiment 108546 PARAMETER Experiment Name: Zm_Imbibed_Seeds_P Parameter: Organism Value: Zea mays
  misc_feature: MA Experiment 108546 PARAMETER Experiment Name: Zm_Imbibed_Seeds_P Parameter: Plant Line Value: 35A19
  misc_feature: MA Experiment 108546 PARAMETER Experiment Name: Zm_Imbibed_Seeds_P Parameter: Tissue Value: Roots vs. Embryo
  misc_feature: MA Experiment ID: 108547 Result: Down-regulated in Transcription
  misc_feature: MA Experiment 108547 PARAMETER Experiment Name: Zm_Imbibed_Seeds_P Parameter: Age (day) Value: 4 vs. 2
  misc_feature: MA Experiment 108547 PARAMETER Experiment Name: Zm_Imbibed_Seeds_P Parameter: Organism Value: Zea mays
  misc_feature: MA Experiment 108547 PARAMETER Experiment Name: Zm_Imbibed_Seeds_P Parameter: Plant Line Value: 35A19
  misc_feature: MA Experiment 108547 PARAMETER Experiment Name: Zm_Imbibed_Seeds_P Parameter: Tissue Value: Aerial vs. Embryo
  misc_feature: MA Experiment ID: 20000492 Result: Down-regulated in Transcription
  misc_feature: MA Experiment 20000492 PARAMETER Experiment Name: Zm_Hybrid_Seed_Dev_P Parameter: DAP Value: 12
  misc_feature: MA Experiment 20000492 PARAMETER Experiment Name: Zm_Hybrid_Seed_Dev_P Parameter: Organism Value: Zea mays
  misc_feature: MA Experiment 20000492 PARAMETER Experiment Name: Zm_Hybrid_Seed_Dev_P Parameter: Plant Line Value: 35A19
  misc_feature: MA Experiment 20000492 PARAMETER Experiment Name: Zm_Hybrid_Seed_Dev_P Parameter: Tissue Value: Fert Kernel vs. Unfert Floret
  misc_feature: MA Experiment ID: 20000535 Result: Down-regulated in Transcription
  misc_feature: MA Experiment 20000535 PARAMETER Experiment Name: Zm_Hybrid_Seed_Dev_P Parameter: DAP Value: 30 vs. 12
  misc_feature: MA Experiment 20000535 PARAMETER Experiment Name: Zm_Hybrid_Seed_Dev_P Parameter: Organism Value: Zea mays
  misc_feature: MA Experiment 20000535 PARAMETER Experiment Name: Zm_Hybrid_Seed_Dev_P Parameter: Plant Line Value: 35A19
  misc_feature: MA Experiment 20000535 PARAMETER Experiment Name: Zm_Hybrid_Seed_Dev_P Parameter: Tissue Value: Embryo vs. Unfert Floret
aaaatcaggcagatcgcagtcgcagcaccgaagatggtgagcaggcgcactctcctcgtcatgatggcgacggtagtggttctgcatcggagtcggactctctgcgctgctgcctcggcggctgcagcgccgccggcgacgacgaagcaggcgcggaccccggccctgttcgtgttcggggactccatcgtggacccgggcaacaacaacgccctcaccaccacggtgcgctgcaacttcccgccctacggccaggacttccccggccacaacgccaccggcaggttcagcaacggcagggtgcccagcgacatcgtcgccagccggctgggcatcaaggagcacctgccggcgtacctcggcacggagctcagcgacttcgacctcctcaccggcgtcagcttcgcgtccggcggctgcggcttcgaccccctcaccgccgagctcgtgtccgtgctcaccatggacaaccagctggacctgttcaaggagtacaaggagaagctggagcgcgtcgccagcggcgcccaccgggccgccgacatcgtgtccaggagcctgtacatggtggtcacgggcaccgacgacctcgccaacacctacttcaccacgccgttccgccgcgactacgacctcgagtcctacatcgagttcgtcgtgcagtgcgcctccgacttcatcaagaagctgtacggtctgggcgcgcggcgcatcaacatcgccggcgcgccgcccatcgggtgcgtgccgtcgcagcggaccaacgccggcgggctggagcgggagtgcgtgccgctgtacaaccaggcggccgtcgtgttcaacgcggcgctggagaaggagatcaagcggctcaacggcagcgacgcgctcccggcctccgtgctccagtacatcgacctctacacgccgctgctcgacatgattcagcgccctgacgcctacggattcaacgtcacgaaccgggggtgctgcggcacgggggtgttcgaggtgacgctgacgtgcaaccggtacacggcggaaccctgcagggaccccagcaagttcctcttntgggacacctaccacctcacggagaggggctacgacctcctcatggcgcagatcataaaccgatacggggtctgagatggatgccatgacagcgcagcgctggagatctcggcgctatgacagcgcggtccatgctttcagaggcttttgctgaacttgatcttgtagctgaactacagctccagaaatcaccggtccaatatcatatcccagtttgtgatgggtacatgtcagcggggcacaattgcttgcttgtattgcataaatgaaaactgaatcaggacaggcagtgacagttg

SEQ ID NO: 9304 - protein, 376 aa, Zea mays subsp. mays
  peptide (1)..(376): Ceres Seq. ID no. 13500461
  misc_feature (56)..(368): Pfam Name: GDSL-like Lipase/Acylhydrolase Pfam Description: GDSL-like Lipase/Acylhydrolase
  misc_feature (12)..(375): Homolog of NCBI NO: 37534726 NR Description: putative anter-specific proline-rich protein
  misc_feature (54)..(374): Homolog of NCBI NO: 15222901 NR Description: family II extracellular lipase 3 (EXL3) thaliana] >gi|15054386|gb|AAK30018.1| family II lipase EXL3
  misc_feature (54)..(374): Homolog of NCBI NO: 26449364 NR Description: putative family II lipase EXL3 [Arabidopsis
  misc_feature (54)..(376): Homolog of NCBI NO: 25404994 NR Description: protein T4O12.13 [imported] - Arabidopsis >gi|8778808|gb|AAF79815.1|AC007396_8 T4O12.13 [Arabidopsis
  misc_feature (34)..(374): Homolog of NCBI NO: 28393626 NR Description: putative family II extracellular lipase 1 (EXL1) thaliana] >gi|28827430|gb|AAO50559.1| putative family II
  misc_feature (34)..(374): Homolog of NCBI NO: 18410954 NR Description: family II extracellular lipase 1 (EXL1) thaliana] >gi|15054382|gb|AAK30016.1| family II lipase EXL1
  misc_feature (11)..(374): Homolog of NCBI NO: 30102970 NR Description: putative lipase/acylhydrolase [Oryza sativa
  misc_feature (45)..(371): Homolog of NCBI NO: 18394825 NR Description: lipase, putative [Arabidopsis thaliana]
  misc_feature (45)..(371): Homolog of NCBI NO: 21592372 NR Description: anter-specific proline-rich protein APG
  misc_feature (49)..(374): Homolog of NCBI NO: 18406327 NR Description: lipase, putative [Arabidopsis thaliana]
  misc_feature (352)..(352): Xaa is any aa, unknown or other
KIRQIAVAAPKMVSRRTLLVMMATVVVLHRSRTLCAAASAAAAPPATTKQARTPALFVFGDSIVDPGNNNALTTTVRCNFPPYGQDFPGHNATGRFSNGRVPSDIVASRLGIKEHLPAYLGTELSDFDLLTGVSFASGGCGFDPLTAELVSVLTMDNQLDLFKEYKEKLERVASGAHRAADIVSRSLYMVVTGTDDLANTYFTTPFRRDYDLESYIEFVVQCASDFIKKLYGLGARRINIAGAPPIGCVPSQRTNAGGLERECVPLYNQAAVVFNAALEKEIKRLNGSDALPASVLQYIDLYTPLLDMIQRPDAYGFNVTNRGCCGTGVFEVTLTCNRYTAEPCRDPSKFLXWDTYHLTERGYDLLMAQIINRYGV

SEQ ID NO: 9305 - protein, 365 aa, Zea mays subsp. mays
  peptide (1)..(365): Ceres Seq. ID no. 13500462
  misc_feature (45)..(357): Pfam Name: GDSL-like Lipase/Acylhydrolase Pfam Description: GDSL-like Lipase/Acylhydrolase
  misc_feature (1)..(364): Homolog of NCBI NO: 37534726 NR Description: putative anter-specific proline-rich protein
  misc_feature (43)..(363): Homolog of NCBI NO: 15222901 NR Description: family II extracellular lipase 3 (EXL3) thaliana] >gi|15054386|gb|AAK30018.1| family II lipase EXL3
  misc_feature (43)..(363): Homolog of NCBI NO: 26449364 NR Description: putative family II lipase EXL3 [Arabidopsis
  misc_feature (43)..(365): Homolog of NCBI NO: 25404994 NR Description: protein T4O12.13 [imported] - Arabidopsis >gi|8778808|gb|AAF79815.1|AC007396_8 T4O12.13 [Arabidopsis
  misc_feature (23)..(363): Homolog of NCBI NO: 28393626 NR Description: putative family II extracellular lipase 1 (EXL1) thaliana] >gi|28827430|gb|AAO50559.1| putative family II
  misc_feature (23)..(363): Homolog of NCBI NO: 18410954 NR Description: family II extracellular lipase 1 (EXL1) thaliana] >gi|15054382|gb|AAK30016.1| family II lipase EXL1
  misc_feature (1)..(363): Homolog of NCBI NO: 30102970 NR Description: putative lipase/acylhydrolase [Oryza sativa
  misc_feature (34)..(360): Homolog of NCBI NO: 18394825 NR Description: lipase, putative [Arabidopsis thaliana]
  misc_feature (34)..(360): Homolog of NCBI NO: 21592372 NR Description: anter-specific proline-rich protein APG
  misc_feature (38)..(363): Homolog of NCBI NO: 18406327 NR Description: lipase, putative [Arabidopsis thaliana]
  misc_feature (341)..(341): Xaa is any aa, unknown or other
MVSRRTLLVMMATVVVLHRSRTLCAAASAAAAPPATTKQARTPALFVFGDSIVDPGNNNALTTTVRCNFPPYGQDFPGHNATGRFSNGRVPSDIVASRLGIKEHLPAYLGTELSDFDLLTGVSFASGGCGFDPLTAELVSVLTMDNQLDLFKEYKEKLERVASGAHRAADIVSRSLYMVVTGTDDLANTYFTTPFRRDYDLESYIEFVVQCASDFIKKLYGLGARRINIAGAPPIGCVPSQRTNAGGLERECVPLYNQAAVVFNAALEKEIKRLNGSDALPASVLQYIDLYTPLLDMIQRPDAYGFNVTNRGCCGTGVFEVTLTCNRYTAEPCRDPSKFLXWDTYHLTERGYDLLMAQIINRYGV

SEQ ID NO: 9306 - protein, 356 aa, Zea mays subsp. mays
  peptide (1)..(356): Ceres Seq. ID no. 13500463
  misc_feature (36)..(348): Pfam Name: GDSL-like Lipase/Acylhydrolase Pfam Description: GDSL-like Lipase/Acylhydrolase
  misc_feature (1)..(355): Homolog of NCBI NO: 37534726 NR Description: putative anter-specific proline-rich protein
  misc_feature (34)..(354): Homolog of NCBI NO: 15222901 NR Description: family II extracellular lipase 3 (EXL3) thaliana] >gi|15054386|gb|AAK30018.1| family II lipase EXL3
  misc_feature (34)..(354): Homolog of NCBI NO: 26449364 NR Description: putative family II lipase EXL3 [Arabidopsis
  misc_feature (34)..(356): Homolog of NCBI NO: 25404994 NR Description: protein T4O12.13 [imported] - Arabidopsis >gi|8778808|gb|AAF79815.1|AC007396_8 T4O12.13 [Arabidopsis
  misc_feature (14)..(354): Homolog of NCBI NO: 28393626 NR Description: putative family II extracellular lipase 1 (EXL1) thaliana] >gi|28827430|gb|AAO50559.1| putative family II
  misc_feature (14)..(354): Homolog of NCBI NO: 18410954 NR Description: family II extracellular lipase 1 (EXL1) thaliana] >gi|15054382|gb|AAK30016.1| family II lipase EXL1
  misc_feature (1)..(354): Homolog of NCBI NO: 30102970 NR Description: putative lipase/acylhydrolase [Oryza sativa
  misc_feature (25)..(351): Homolog of NCBI NO: 18394825 NR Description: lipase, putative [Arabidopsis thaliana]
  misc_feature (25)..(351): Homolog of NCBI NO: 21592372 NR Description: anter-specific proline-rich protein APG
  misc_feature (29)..(354): Homolog of NCBI NO: 18406327 NR Description: lipase, putative [Arabidopsis thaliana]
  misc_feature (332)..(332): Xaa is any aa, unknown or other
MMATVVVLHRSRTLCAAASAAAAPPATTKQARTPALFVFGDSIVDPGNNNALTTTVRCNFPPYGQDFPGHNATGRFSNGRVPSDIVASRLGIKEHLPAYLGTELSDFDLLTGVSFASGGCGFDPLTAELVSVLTMDNQLDLFKEYKEKLERVASGAHRAADIVSRSLYMVVTGTDDLANTYFTTPFRRDYDLESYIEFVVQCASDFIKKLYGLGARRINIAGAPPIGCVPSQRTNAGGLERECVPLYNQAAVVFNAALEKEIKRLNGSDALPASVLQYIDLYTPLLDMIQRPDAYGFNVTNRGCCGTGVFEVTLTCNRYTAEPCRDPSKFLXWDTYHLTERGYDLLMAQIINRYGV

SEQ ID NO: 9307 - DNA, 1261 bp, Zea mays subsp. mays
  misc_feature (1)..(1261): Ceres Seq. ID no. 12355390
  misc_feature: MA Experiment ID: 108528 Result: Up-regulated in Transcription
  misc_feature: MA Experiment 108528 PARAMETER Experiment Name: Zm_Imbibed_Seeds_P Parameter: Age (day) Value: 5 vs. 2
  misc_feature: MA Experiment 108528 PARAMETER Experiment Name: Zm_Imbibed_Seeds_P Parameter: Organism Value: Zea mays
  misc_feature: MA Experiment 108528 PARAMETER Experiment Name: Zm_Imbibed_Seeds_P Parameter: Plant Line Value: 35A19
  misc_feature: MA Experiment 108528 PARAMETER Experiment Name: Zm_Imbibed_Seeds_P Parameter: Tissue Value: Aerial vs. Embryo
  misc_feature: MA Experiment ID: 108530 Result: Up-regulated in Transcription
  misc_feature: MA Experiment 108530 PARAMETER Experiment Name: Zm_Imbibed_Seeds_P Parameter: Age (day) Value: 6 vs. 2
  misc_feature: MA Experiment 108530 PARAMETER Experiment Name: Zm_Imbibed_Seeds_P Parameter: Organism Value: Zea mays
  misc_feature: MA Experiment 108530 PARAMETER Experiment Name: Zm_Imbibed_Seeds_P Parameter: Plant Line Value: 35A19
  misc_feature: MA Experiment 108530 PARAMETER Experiment Name: Zm_Imbibed_Seeds_P Parameter: Tissue Value: Aerial vs. Embryo
  misc_feature: MA Experiment ID: 108543 Result: Down-regulated in Transcription
  misc_feature: MA Experiment ID: 108547 Result: Up-regulated in Transcription
  misc_feature: MA Experiment 108547 PARAMETER Experiment Name: Zm_Imbibed_Seeds_P Parameter: Age (day) Value: 4 vs. 2
  misc_feature: MA Experiment 108547 PARAMETER Experiment Name: Zm_Imbibed_Seeds_P Parameter: Organism Value: Zea mays
  misc_feature: MA Experiment 108547 PARAMETER Experiment Name: Zm_Imbibed_Seeds_P Parameter: Plant Line Value: 35A19
  misc_feature: MA Experiment 108547 PARAMETER Experiment Name: Zm_Imbibed_Seeds_P Parameter: Tissue Value: Aerial vs. Embryo
  misc_feature: MA Experiment ID: 20000108 Result: Down-regulated in Transcription
  misc_feature: MA Experiment 20000108 PARAMETER Experiment Name: Zm_Root-Tips_P Parameter: Age (day) Value: 12
  misc_feature: MA Experiment 20000108 PARAMETER Experiment Name: Zm_Root-Tips_P Parameter: Organism Value: Zea mays
  misc_feature: MA Experiment 20000108 PARAMETER Experiment Name: Zm_Root-Tips_P Parameter: Tissue Value: Root tips vs. Root mid region    35
  misc_feature: MA Experiment 20000108 PARAMETER Experiment Name: Zm_Root-Tips_P Parameter: Tissue Value: Root tips vs. Root mid region   Sequence Listing-Misc Features (4)
  misc_feature: MA Experiment ID: 20000492 Result: Down-regulated in Transcription
  misc_feature: MA Experiment 20000492 PARAMETER Experiment Name: Zm_Hybrid_Seed_Dev_P Parameter: DAP Value: 12
  misc_feature: MA Experiment 20000492 PARAMETER Experiment Name: Zm_Hybrid_Seed_Dev_P Parameter: Organism Value: Zea mays
  misc_feature: MA Experiment 20000492 PARAMETER Experiment Name: Zm_Hybrid_Seed_Dev_P Parameter: Plant Line Value: 35A19
  misc_feature: MA Experiment 20000492 PARAMETER Experiment Name: Zm_Hybrid_Seed_Dev_P Parameter: Tissue Value: Fert Kernel vs. Unfert Floret
  misc_feature: MA Experiment ID: 20000535 Result: Down-regulated in Transcription
  misc_feature: MA Experiment 20000535 PARAMETER Experiment Name: Zm_Hybrid_Seed_Dev_P Parameter: DAP Value: 30 vs. 12
  misc_feature: MA Experiment 20000535 PARAMETER Experiment Name: Zm_Hybrid_Seed_Dev_P Parameter: Organism Value: Zea mays
  misc_feature: MA Experiment 20000535 PARAMETER Experiment Name: Zm_Hybrid_Seed_Dev_P Parameter: Plant Line Value: 35A19
  misc_feature: MA Experiment 20000535 PARAMETER Experiment Name: Zm_Hybrid_Seed_Dev_P Parameter: Tissue Value: Embryo vs. Unfert Floret
gacgccactcccacctctcttcttctctttcccttcgcattaatggccgctctctccctatcccctttcgtctcgctctcggagtaggacactcgcccgcttccggcttaaccttcaagattctccctcctcctcctacttcttcccgcttgggcgggcgcggcaccttccggttctgggcctcctatatatatacgcgcgcgaccgtcccccttccatactccctagcatgctcggctcgcaccccggattgatcgagctcgcccgtcgccgcgatggattcggtgccttccccctcctcttctacccgggccaccgctgctcccggtccctgctgccgctttgacgcgctgcggagggcgtgcgccaggcacgccgccgccgccgcgcgggccgccgggtgggcgctcggcgcgctgctcacctgcgtcttcgccgtcgtgggctcactcgtcggaatcttcattggtgccttcatggggatgtctacagaaagcggcatgttccgcggggctggtgtcggagcagtctcgggagcagtcttctccattgaggctgttgagtcctgcatcgagatttggaggtccagccattcgggaaaatacagcattctctatgtgctggacatcatctctagcctcttcagcggaagaattgtgtgggagaaagtcagtccagcgctacagcgtgcagtgcaaagccagatgagtctaatgagcacaccgttcatcgacaacaatgaccttttcgaaactggcagtacaggaggcatgtcaagggctctgattgataggatcccaaagatgaggttcagtgctgcaagcaattgtgacaaggaaactgatagcagctgctgctcagtctgcctgcaggattttggagcacagcaatttgtgagggccctgcctcagtgccaacacatattccatgtgcggtgcatcgacaactggctccttcggcacgcatcctgcccactatgccgggccggcgttcatattgaccatatacatatgtaaataaactcgcagggtggcacctggtgtattttcatagtgaatacccgtgctcctgttggatatcacaagtatagctggctgtatacataggttttctcctttttttttttgttacttctccggtcttatgtggggctatgctttcagctgcacgtttttgtcgaagtaatacctggattggctggatatgtacatcttgagaacggattgactaacaagctccctgaattatggtcctgtgtgct

SEQ ID NO: 9308 - protein, 246 aa, Zea mays subsp. mays
  peptide (1)..(246): Ceres Seq. ID no. 12355391
  misc_feature (24)..(239): Homolog of NCBI NO: 30680091 NR Description: expressed protein [Arabidopsis thaliana]
  misc_feature (24)..(239): Homolog of NCBI NO: 26452210 NR Description: unknown protein [Arabidopsis thaliana]
  misc_feature (24)..(234): Homolog of NCBI NO: 25411815 NR Description: hypothetical protein At2g17730 [imported] -
  misc_feature (24)..(236): Homolog of NCBI NO: 26451101 NR Description: unknown protein [Arabidopsis thaliana]
  misc_feature (1)..(246): Homolog of NCBI NO: 33146606 NR Description: putative NEP1-interacting protein 2 [Oryza sativa
  misc_feature (46)..(239): Homolog of NCBI NO: 34901682 NR Description: P0434A03.5 [Oryza sativa (japonica
  misc_feature (1)..(64): Homolog of NCBI NO: 34901682 NR Description: P0434A03.5 [Oryza sativa (japonica
  misc_feature (68)..(246): Homolog of NCBI NO: 33146607 NR Description: putative NEP1-interacting protein 2 [Oryza sativa
  misc_feature (70)..(246): Homolog of NCBI NO: 29367571 NR Description: unknown [Oryza sativa (japonica cultivar-group)]
  misc_feature (1)..(239): Homolog of NCBI NO: 37536572 NR Description: hypothetical protein [Oryza sativa (japonica group)] >gi|13357247|gb|AAK20044.1| hypothetical protein [Oryza
MDSVPSPSSSTRATAAPGPCCRFDALRRACARHAAAAARAAGWALGALLTCVFAVVGSLVGIFIGAFMGMSTESGMFRGAGVGAVSGAVFSIEAVESCIEIWRSSHSGKYSILYVLDIISSLFSGRIVWEKVSPALQRAVQSQMSLMSTPFIDNNDLFETGSTGGMSRALIDRIPKMRFSAASNCDKETDSSCCSVCLQDFGAQQFVRALPQCQHIFHVRCIDNWLLRHASCPLCRAGVHIDHIHM

SEQ ID NO: 9309 - protein, 179 aa, Zea mays subsp. mays
  peptide (1)..(179): Ceres Seq. ID no. 12355392
  misc_feature (1)..(179): Homolog of NCBI NO: 33146606 NR Description: putative NEP1-interacting protein 2 [Oryza sativa
  misc_feature (1)..(172): Homolog of NCBI NO: 34901682 NR Description: P0434A03.5 [Oryza sativa (japonica
  misc_feature (1)..(179): Homolog of NCBI NO: 33146607 NR Description: putative NEP1-interacting protein 2 [Oryza sativa
  misc_feature (3)..(179): Homolog of NCBI NO: 29367571 NR Description: unknown [Oryza sativa (japonica cultivar-group)]
  misc_feature (1)..(172): Homolog of NCBI NO: 37536572 NR Description: hypothetical protein [Oryza sativa (japonica group)] >gi|13357247|gb|AAK20044.1| hypothetical protein [Oryza
  misc_feature (1)..(172): Homolog of NCBI NO: 30680091 NR Description: expressed protein [Arabidopsis thaliana]
  misc_feature (1)..(172): Homolog of NCBI NO: 26452210 NR Description: unknown protein [Arabidopsis thaliana]
  misc_feature (1)..(167): Homolog of NCBI NO: 25411815 NR Description: hypothetical protein At2g17730 [imported] -
  misc_feature (1)..(169): Homolog of NCBI NO: 26451101 NR Description: unknown protein [Arabidopsis thaliana]
  misc_feature (1)..(169): Homolog of NCBI NO: 18855037 NR Description: putative zinc finger protein [Oryza sativa]
MGMSTESGMFRGAGVGAVSGAVFSIEAVESCIEIWRSSHSGKYSILYVLDIISSLFSGRIVWEKVSPALQRAVQSQMSLMSTPFIDNNDLFETGSTGGMSRALIDRIPKMRFSAASNCDKETDSSCCSVCLQDFGAQQFVRALPQCQHIFHVRCIDNWLLRHASCPLCRAGVHIDHIHM

SEQ ID NO: 9310 - protein, 177 aa, Zea mays subsp. mays
  peptide (1)..(177): Ceres Seq. ID no. 12355393
  misc_feature (1)..(177): Homolog of NCBI NO: 33146606 NR Description: putative NEP1-interacting protein 2 [Oryza sativa
  misc_feature (1)..(170): Homolog of NCBI NO: 34901682 NR Description: P0434A03.5 [Oryza sativa (japonica
  misc_feature (1)..(177): Homolog of NCBI NO: 33146607 NR Description: putative NEP1-interacting protein 2 [Oryza sativa
  misc_feature (1)..(177): Homolog of NCBI NO: 29367571 NR Description: unknown [Oryza sativa (japonica cultivar-group)]
  misc_feature (1)..(170): Homolog of NCBI NO: 37536572 NR Description: hypothetical protein [Oryza sativa (japonica group)] >gi|13357247|gb|AAK20044.1| hypothetical protein [Oryza
  misc_feature (1)..(170): Homolog of NCBI NO: 30680091 NR Description: expressed protein [Arabidopsis thaliana]
  misc_feature (1)..(170): Homolog of NCBI NO: 26452210 NR Description: unknown protein [Arabidopsis thaliana]
  misc_feature (1)..(165): Homolog of NCBI NO: 25411815 NR Description: hypothetical protein At2g17730 [imported] -
  misc_feature (1)..(167): Homolog of NCBI NO: 26451101 NR Description: unknown protein [Arabidopsis thaliana]
  misc_feature (1)..(167): Homolog of NCBI NO: 18855037 NR Description: putative zinc finger protein [Oryza sativa]
MSTESGMFRGAGVGAVSGAVFSIEAVESCIEIWRSSHSGKYSILYVLDIISSLFSGRIVWEKVSPALQRAVQSQMSLMSTPFIDNNDLFETGSTGGMSRALIDRIPKMRFSAASNCDKETDSSCCSVCLQDFGAQQFVRALPQCQHIFHVRCIDNWLLRHASCPLCRAGVHIDHIHM

SEQ ID NO: 9311 - DNA, 1085 bp, Zea mays subsp. mays
  misc_feature (1)..(1085): Ceres Seq. ID no. 12346342
  misc_feature: MA Experiment ID: 108528 Result: Up-regulated in Transcription
  misc_feature: MA Experiment 108528 PARAMETER Experiment Name: Zm_Imbibed_Seeds_P Parameter: Age (day) Value: 5 vs. 2
  misc_feature: MA Experiment 108528 PARAMETER Experiment Name: Zm_Imbibed_Seeds_P Parameter: Organism Value: Zea mays
  misc_feature: MA Experiment 108528 PARAMETER Experiment Name: Zm_Imbibed_Seeds_P Parameter: Plant Line Value: 35A19
  misc_feature: MA Experiment 108528 PARAMETER Experiment Name: Zm_Imbibed_Seeds_P Parameter: Tissue Value: Aerial vs. Embryo
  misc_feature: MA Experiment ID: 108535 Result: Down-regulated in Transcription
  misc_feature: MA Experiment 108535 PARAMETER Experiment Name: Zm_Meristem_P Parameter: Age (day) Value: 8
  misc_feature: MA Experiment 108535 PARAMETER Experiment Name: Zm_Meristem_P Parameter: Organism Value: Zea mays
  misc_feature: MA Experiment 108535 PARAMETER Experiment Name: Zm_Meristem_P Parameter: Plant Line Value: 35A19
  misc_feature: MA Experiment 108535 PARAMETER Experiment Name: Zm_Meristem_P Parameter: Tissue Value: Root Meristem vs. Above Root Meristem
  misc_feature: MA Experiment ID: 108543 Result: Down-regulated in Transcription
  misc_feature: MA Experiment ID: 20000535 Result: Down-regulated in Transcription
  misc_feature: MA Experiment 20000535 PARAMETER Experiment Name: Zm_Hybrid_Seed_Dev_P Parameter: DAP Value: 30 vs. 12
  misc_feature: MA Experiment 20000535 PARAMETER Experiment Name: Zm_Hybrid_Seed_Dev_P Parameter: Organism Value: Zea mays
  misc_feature: MA Experiment 20000535 PARAMETER Experiment Name: Zm_Hybrid_Seed_Dev_P Parameter: Plant Line Value: 35A19
  misc_feature: MA Experiment 20000535 PARAMETER Experiment Name: Zm_Hybrid_Seed_Dev_P Parameter: Tissue Value: Embryo vs. Unfert Floret
  misc_feature: MA Experiment ID: 20000626 Result: Up-regulated in Transcription
  misc_feature: MA Experiment 20000626 PARAMETER Experiment Name: Zm_Herbicide-Treatments_P Parameter: Timepoint (hr) Value: 12
  misc_feature: MA Experiment 20000626 PARAMETER Experiment Name: Zm_Herbicide-Treatments_P Parameter: Tissue Value: Aerial
  misc_feature: MA Experiment 20000626 PARAMETER Experiment Name: Zm_Herbicide-Treatments_P Parameter: Treatment Value: Roundup vs. No Treatment
  misc_feature: MA Experiment ID: 20000629 Result: Up-regulated in Transcription
  misc_feature: MA Experiment 20000629 PARAMETER Experiment Name: Zm_Herbicide-Treatments_P Parameter: Timepoint (hr) Value: 12
  misc_feature: MA Experiment 20000629 PARAMETER Experiment Name: Zm_Herbicide-Treatments_P Parameter: Tissue Value: Aerial
  misc_feature: MA Experiment 20000629 PARAMETER Experiment Name: Zm_Herbicide-Treatments_P Parameter: Treatment Value: Trimec vs. No Treatment
acacatcctcctccccccttcgtctctctctccctctctctctctgcctgcgcgcctgagagctgccaccgccaaggcgaaacggccgtcgccgcatgctgcggctgagctagagacgagaggcgagatggcggccgaggcgctggggttcatggcgcggggagccaccggcgggagggcggcggagctcgtcaccagggacttcctcggcgggtgcgccgccgccgaagacgacgccagggacgcgtccgccaggaatgacgccgtgcccgcgagggtgcaccagcagaagcacgcgtgcccggcggcgccgagggacctgaacctgttcccggtagccgccaccacgaagccctgcgccgcgacggcggcagcggcagcggcaccagcggtcgcgggcggcgccacggctacgtaccacagcgtgtgcacgatcgagaaggtgaagacggccctggagcggttcgagcgcggcaggcagcaccagtccccgcacccgcaccagcagcagcagcacagcggcgcgggcgcgtccccgtcgtcgtcttccgtgaccacgtcctccgtgaagcgccgcggcggcggcggcggcggcggcggcggcgtggagcagggcgacggctgcgactcgccctccggcggcgggatggtggccgcggcgtgccccaggtgcttcctgtacgtgctaatctcccggagcgacccgcggtgcccgcgctgcgagtcccacgtcccggccccgcngcgccagcgccggccgcgagcaagaagccgcggatcgacctcaacgtcggctacctgggcacatagcttgtggtttaggcatatggggcgatggcgtagcctcctagatggagcggctgccgtctcctaccgtaccgtacgtgacgccataaattttgcttaggctcgtgtaatgtgatgacccacggaccgagtcgggtacgtaggagtacgtagacaggggaggggggcgccgttttttgaactgaaacagaaatgcatgccctcccctgtcaggaaatttatggccgatcagacaccgcatacaagaacatgaatgaatggtgacactgctttctgtt

SEQ ID NO: 9312 - protein, 301 aa, Zea mays subsp. mays
  peptide (1)..(301): Ceres Seq. ID no. 12346343
  misc_feature (54)..(260): Homolog of NCBI NO: 38345608 NR Description: OSJNBa0093O08.10 [Oryza sativa (japonica
  misc_feature (130)..(260): Homolog of NCBI NO: 5852085 NR Description: zwh0008.1 [Oryza sativa (indica cultivar-group)]
  misc_feature (173)..(256): Homolog of NCBI NO: 34908532 NR Description: P0423B08.15 [Oryza sativa (japonica
  misc_feature (209)..(266): Homolog of NCBI NO: 32479729 NR Description: OJ991214_12.5 [Oryza sativa (japonica
  misc_feature (129)..(241): Homolog of NCBI NO: 38605781 NR Description: OSJNBa0044K18.24 [Oryza sativa (japonica
  misc_feature (248)..(248): Xaa is any aa, unknown or other
HILLPPSSLSPSLSLPARLRAATAKAKRPSPHAAAELETRGEMAAEALGFMARGATGGRAAELVTRDFLGGCAAAEDDARDASARNDAVPARVHQQKHACPAAPRDLNLFPVAATTKPCAATAAAAAAPAVAGGATATYHSVCTIEKVKTALERFERGRQHQSPHPHQQQQHSGAGASPSSSSVTTSSVKRRGGGGGGGGGVEQGDGCDSPSGGGMVAAACPRCFLYVLISRSDPRCPRCESHVPAPXRQRRPRARSRGSTSTSATWAHSLWFRHMGRWRSLLDGAAAVSYRTVRDAINFA

SEQ ID NO: 9313 - protein, 259 aa, Zea mays subsp. mays
  peptide (1)..(259): Ceres Seq. ID no. 12346344
  misc_feature (12)..(218): Homolog of NCBI NO: 38345608 NR Description: OSJNBa0093O08.10 [Oryza sativa (japonica
  misc_feature (88)..(218): Homolog of NCBI NO: 5852085 NR Description: zwh0008.1 [Oryza sativa (indica cultivar-group)]
  misc_feature (131)..(214): Homolog of NCBI NO: 34908532 NR Description: P0423B08.15 [Oryza sativa (japonica
  misc_feature (167)..(224): Homolog of NCBI NO: 32479729 NR Description: OJ991214_12.5 [Oryza sativa (japonica
  misc_feature (87)..(199): Homolog of NCBI NO: 38605781 NR Description: OSJNBa0044K18.24 [Oryza sativa (japonica
  misc_feature (206)..(206): Xaa is any aa, unknown or other
MAAEALGFMARGATGGRAAELVTRDFLGGCAAAEDDARDASARNDAVPARVHQQKHACPAAPRDLNLFPVAATTKPCAATAAAAAAPAVAGGATATYHSVCTIEKVKTALERFERGRQHQSPHPHQQQQHSGAGASPSSSSVTTSSVKRRGGGGGGGGGVEQGDGCDSPSGGGMVAAACPRCFLYVLISRSDPRCPRCESHVPAPXRQRRPRARSRGSTSTSATWAHSLWFRHMGRWRSLLDGAAAVSYRTVRDAINFA

SEQ ID NO: 9314 - protein, 251 aa, Zea mays subsp. mays
  peptide (1)..(251): Ceres Seq. ID no. 12346345
  misc_feature (4)..(210): Homolog of NCBI NO: 38345608 NR Description: OSJNBa0093O08.10 [Oryza sativa (japonica
  misc_feature (80)..(210): Homolog of NCBI NO: 5852085 NR Description: zwh0008.1 [Oryza sativa (indica cultivar-group)]
  misc_feature (123)..(206): Homolog of NCBI NO: 34908532 NR Description: P0423B08.15 [Oryza sativa (japonica
  misc_feature (159)..(216): Homolog of NCBI NO: 32479729 NR Description: OJ991214_12.5 [Oryza sativa (japonica
  misc_feature (79)..(191): Homolog of NCBI NO: 38605781 NR Description: OSJNBa0044K18.24 [Oryza sativa (japonica
  misc_feature (198)..(198): Xaa is any aa, unknown or other
MARGATGGRAAELVTRDFLGGCAAAEDDARDASARNDAVPARVHQQKHACPAAPRDLNLFPVAATTKPCAATAAAAAAPAVAGGATATYHSVCTIEKVKTALERFERGRQHQSPHPHQQQQHSGAGASPSSSSVTTSSVKRRGGGGGGGGGVEQGDGCDSPSGGGMVAAACPRCFLYVLISRSDPRCPRCESHVPAPXRQRRPRARSRGSTSTSATWAHSLWFRHMGRWRSLLDGAAAVSYRTVRDAINFA

SEQ ID NO: 9315 - DNA, 1174 bp, Zea mays subsp. mays
  misc_feature (1)..(1174): Ceres Seq. ID no. 12355225
  misc_feature: MA Experiment ID: 108529 Result: Up-regulated in Transcription
  misc_feature: MA Experiment 108529 PARAMETER Experiment Name: Zm_Imbibed_Seeds_P Parameter: Age (day) Value: 5 vs. 2
  misc_feature: MA Experiment 108529 PARAMETER Experiment Name: Zm_Imbibed_Seeds_P Parameter: Organism Value: Zea mays
  misc_feature: MA Experiment 108529 PARAMETER Experiment Name: Zm_Imbibed_Seeds_P Parameter: Plant Line Value: 35A19
  misc_feature: MA Experiment 108529 PARAMETER Experiment Name: Zm_Imbibed_Seeds_P Parameter: Tissue Value: Roots vs. Embryo
  misc_feature: MA Experiment ID: 108535 Result: Down-regulated in Transcription
  misc_feature: MA Experiment 108535 PARAMETER Experiment Name: Zm_Meristem_P Parameter: Age (day) Value: 8
  misc_feature: MA Experiment 108535 PARAMETER Experiment Name: Zm_Meristem_P Parameter: Organism Value: Zea mays
  misc_feature: MA Experiment 108535 PARAMETER Experiment Name: Zm_Meristem_P Parameter: Plant Line Value: 35A19
  misc_feature: MA Experiment 108535 PARAMETER Experiment Name: Zm_Meristem_P Parameter: Tissue Value: Root Meristem vs. Above Root Meristem
  misc_feature: MA Experiment ID: 108543 Result: Up-regulated in Transcription
  misc_feature: MA Experiment ID: 108546 Result: Up-regulated in Transcription
  misc_feature: MA Experiment 108546 PARAMETER Experiment Name: Zm_Imbibed_Seeds_P Parameter: Age (day) Value: 3 vs. 2
  misc_feature: MA Experiment 108546 PARAMETER Experiment Name: Zm_Imbibed_Seeds_P Parameter: Organism Value: Zea mays
  misc_feature: MA Experiment 108546 PARAMETER Experiment Name: Zm_Imbibed_Seeds_P Parameter: Plant Line Value: 35A19
  misc_feature: MA Experiment 108546 PARAMETER Experiment Name: Zm_Imbibed_Seeds_P Parameter: Tissue Value: Roots vs. Embryo
  misc_feature: MA Experiment ID: 108689 Result: Up-regulated in Transcription
  misc_feature: MA Experiment 108689 PARAMETER Experiment Name: Zm_Drought_Roots_P Parameter: Age (day) Value: 9
  misc_feature: MA Experiment 108689 PARAMETER Experiment Name: Zm_Drought_Roots_P Parameter: Organism Value: Zea mays
  misc_feature: MA Experiment 108689 PARAMETER Experiment Name: Zm_Drought_Roots_P Parameter: Plant Line Value: 35A19
  misc_feature: MA Experiment 108689 PARAMETER Experiment Name: Zm_Drought_Roots_P Parameter: Timepoint (hr) Value: 24
  misc_feature: MA Experiment 108689 PARAMETER Experiment Name: Zm_Drought_Roots_P Parameter: Tissue Value: Roots
  misc_feature: MA Experiment 108689 PARAMETER Experiment Name: Zm_Drought_Roots_P Parameter: Treatment Value: Drought vs. No Drought
  misc_feature: MA Experiment ID: 20000480 Result: Down-regulated in Transcription
  misc_feature: MA Experiment 20000480 PARAMETER Experiment Name: Zm_Drought_P Parameter: Age (day) Value: 11
  misc_feature: MA Experiment 20000480 PARAMETER Experiment Name: Zm_Drought_P Parameter: Organism Value: Zea mays
  misc_feature: MA Experiment 20000480 PARAMETER Experiment Name: Zm_Drought_P Parameter: Plant Line Value: 35A19
  misc_feature: MA Experiment 20000480 PARAMETER Experiment Name: Zm_Drought_P Parameter: Timepoint (hr) Value: 72
  misc_feature: MA Experiment 20000480 PARAMETER Experiment Name: Zm_Drought_P Parameter: Tissue Value: Aerial
  misc_feature: MA Experiment 20000480 PARAMETER Experiment Name: Zm_Drought_P Parameter: Treatment Value: Drought vs. No Drought
  misc_feature: MA Experiment ID: 20000535 Result: Down-regulated in Transcription
  misc_feature: MA Experiment 20000535 PARAMETER Experiment Name: Zm_Hybrid_Seed_Dev_P Parameter: DAP Value: 30 vs. 12
  misc_feature: MA Experiment 20000535 PARAMETER Experiment Name: Zm_Hybrid_Seed_Dev_P Parameter: Organism Value: Zea mays
  misc_feature: MA Experiment 20000535 PARAMETER Experiment Name: Zm_Hybrid_Seed_Dev_P Parameter: Plant Line Value: 35A19
  misc_feature: MA Experiment 20000535 PARAMETER Experiment Name: Zm_Hybrid_Seed_Dev_P Parameter: Tissue Value: Embryo vs. Unfert Floret
aaaggatagcctttcttcctgtgcagccactccagtgcacgccgccgcagcttgctacacgtgccgggcaagggcaatggattccagcagcagagtgatcgccttcgattgcagctccttcaaactctacatggacggccaagtcgagcgtgcggcccaacgcatgggaaaccgtgcccgccggcttcgacgcggacacgggcgtggcatccaaagacgtcgtcatcgacgtcgccaccggcgccaccgtgcggctctacctaccaccagtccagggagccacgacgaagctcccagtcgtcgtcttcttccatggcggctacttcatcgtcggctcagcccgcgagcctatgtaccatcgctatgtcaactcgctggtcgccagagcacgcgtcgtcgctgtctccgccgactaccgcctcgcgccagagcacccgctcccggcagcctacgacgactcctgggccgcgctcaagtgggcggtctccggcgcggaccagtggctgtccgaccacggcgacctcggccgcgtcttcctggtcggcatcagcgccggcggtaacattgcccacaacatggccatctctgtgggcgtgagcggcttgccggccgctgaaccaccgcgcatagaaggcgtgatcctgctccacccttccttttccggcgaacagaagatggatgtagaagaagaggagttctggcgatctaacaatagcaggtgggcggtcatcttcccgggcgcgaccggcggggcggacgatccaaggattaacccgatggcggacggcgcgccgagcctggagaagctagtgggtgaaaggctgctcgtctgcacggcgtctttggacccgagggcgccgagggggcccggatactgcgaggccgtacgggccagcgggtggcgcgggaaggtggagtggttcgagacggaaggtgaggaccacggtttcttcgtcctcaaccccggcagccacaaggcggttgaggtcatggatcgagtggttgctttccttgcggaccagtgatgacctcctcagggcacagcaaggtctagcagctcgccgcaaaaccggacgtcctagctacggcgcagccgttctcaggcgattgtttactgtctgtactcccaagagtgtcctagatgagttattggaataaacactacagtcaattc

SEQ ID NO: 9316 - protein, 224 aa, Zea mays subsp. mays
  peptide (1)..(224): Ceres Seq. ID no. 12355226
  misc_feature (1)..(222): Homolog of NCBI NO: 38344841 NR Description: OSJNBa0064H22.22 [Oryza sativa (japonica
  misc_feature (1)..(221): Homolog of NCBI NO: 18086341 NR Description: AT3g48690/T8P19_200 [Arabidopsis thaliana]
  misc_feature (1)..(224): Homolog of NCBI NO: 21536771 NR Description: unknown [Arabidopsis thaliana]
  misc_feature (1)..(222): Homolog of NCBI NO: 34393323 NR Description: putative cell death associated protein [Oryza
  misc_feature (1)..(221): Homolog of NCBI NO: 15228425 NR Description: putative protein; protein id: At3g48690.1, by cDNA: gi_18086340 [Arabidopsis thaliana]
  misc_feature (1)..(224): Homolog of NCBI NO: 18401743 NR Description: expressed protein; protein id: At1g47480.1, by cDNA: 111056. [Arabidopsis thaliana] >gi|25405208|pir||A96515
  misc_feature (1)..(221): Homolog of NCBI NO: 21537287 NR Description: putative esterase [Arabidopsis thaliana]
  misc_feature (1)..(221): Homolog of NCBI NO: 18402731 NR Description: expressed protein; protein id: At1g49650.1, by cDNA: 12638. [Arabidopsis thaliana]
  misc_feature (1)..(221): Homolog of NCBI NO: 15228426 NR Description: putative protein; protein id: At3g48700.1
  misc_feature (1)..(221): Homolog of NCBI NO: 15222791 NR Description: hypothetical protein; protein id: At1g49640.1
MYHRYVNSLVARARVVAVSADYRLAPEHPLPAAYDDSWAALKWAVSGADQWLSDHGDLGRVFLVGISAGGNIAHNMAISVGVSGLPAAEPPRIEGVILLHPSFSGEQKMDVEEEEFWRSNNSRWAVIFPGATGGADDPRINPMADGAPSLEKLVGERLLVCTASLDPRAPRGPGYCEAVRASGWRGKVEWFETEGEDHGFFVLNPGSHKAVEVMDRVVAFLADQ

SEQ ID NO: 9317 - protein, 186 aa, Zea mays subsp. mays
  peptide (1)..(186): Ceres Seq. ID no. 12355227
KDSLSSCAATPVHAAAACYTCRARAMDSSSRVIAFDCSSFKLYMDGQVERAAQRMGNRARRLRRGHGRGIQRRRHRRRHRRHRAALPTTSPGSHDEAPSRRLLPWRLLHRRLSPRAYVPSLCQLAGRQSTRRRCLRRLPPRARAPAPGSLRRLLGRAQVGGLRRGPVAVRPRRPRPRLPGRHQRRR

SEQ ID NO: 9318 - protein, 161 aa, Zea mays subsp. mays
  peptide (1)..(161): Ceres Seq. ID no. 12355228
MDSSSRVIAFDCSSFKLYMDGQVERAAQRMGNRARRLRRGHGRGIQRRRHRRRHRRHRAALPTTSPGSHDEAPSRRLLPWRLLHRRLSPRAYVPSLCQLAGRQSTRRRCLRRLPPRARAPAPGSLRRLLGRAQVGGLRRGPVAVRPRRPRPRLPGRHQRRR

SEQ ID NO: 9319 - DNA, 1663 bp, Zea mays subsp. mays
  misc_feature (1)..(1663): Ceres Seq. ID no. 12361889
  misc_feature: MA Experiment ID: 108522 Result: Up-regulated in Transcription
  misc_feature: MA Experiment 108522 PARAMETER Experiment Name: Zm_42deg_Heat_P Parameter: Age (day) Value: 8
  misc_feature: MA Experiment 108522 PARAMETER Experiment Name: Zm_42deg_Heat_P Parameter: Organism Value: Zea mays
  misc_feature: MA Experiment 108522 PARAMETER Experiment Name: Zm_42deg_Heat_P Parameter: Plant Line Value: 35A19
  misc_feature: MA Experiment 108522 PARAMETER Experiment Name: Zm_42deg_Heat_P Parameter: Temperature (deg C) Value: 42 vs. 22
  misc_feature: MA Experiment 108522 PARAMETER Experiment Name: Zm_42deg_Heat_P Parameter: Timepoint (hr) Value: 1
  misc_feature: MA Experiment 108522 PARAMETER Experiment Name: Zm_42deg_Heat_P Parameter: Tissue Value: Aerial
  misc_feature: MA Experiment ID: 108523 Result: Up-regulated in Transcription
  misc_feature: MA Experiment 108523 PARAMETER Experiment Name: Zm_42deg_Heat_P Parameter: Age (day) Value: 8
  misc_feature: MA Experiment 108523 PARAMETER Experiment Name: Zm_42deg_Heat_P Parameter: Organism Value: Zea mays
  misc_feature: MA Experiment 108523 PARAMETER Experiment Name: Zm_42deg_Heat_P Parameter: Plant Line Value: 35A19
  misc_feature: MA Experiment 108523 PARAMETER Experiment Name: Zm_42deg_Heat_P Parameter: Temperature (deg C) Value: 42 vs. 22
  misc_feature: MA Experiment 108523 PARAMETER Experiment Name: Zm_42deg_Heat_P Parameter: Timepoint (hr) Value: 6
  misc_feature: MA Experiment 108523 PARAMETER Experiment Name: Zm_42deg_Heat_P Parameter: Tissue Value: Aerial
  misc_feature: MA Experiment ID: 108535 Result: Down-regulated in Transcription
  misc_feature: MA Experiment 108535 PARAMETER Experiment Name: Zm_Meristem_P Parameter: Age (day) Value: 8
  misc_feature: MA Experiment 108535 PARAMETER Experiment Name: Zm_Meristem_P Parameter: Organism Value: Zea mays
  misc_feature: MA Experiment 108535 PARAMETER Experiment Name: Zm_Meristem_P Parameter: Plant Line Value: 35A19
  misc_feature: MA Experiment 108535 PARAMETER Experiment Name: Zm_Meristem_P Parameter: Tissue Value: Root Meristem vs. Above Root Meristem
attagaataaagaagcacccagccccgcctgtgactgtgagaggccggcgcggagggagtttcatcagatcgtgccgtgcgtgccctctgtgtgtctgattacgcgtgcgtgcgagggtcagagaggagggagggaggggctctggagatgacggggagaagggagcttctgctgcttgcgctcttgggagtccttcagctagctcttcgtctaccttccgcagcgtcgcagtccttcatcggcatcaactacggcgaagtggccgacaacctcccgccgccgtcgtccaccgcgcgcctcgtccagtccacgaccatcaccaaggtgcgcctctacgggaccgacccggccatcatctccgccttctccggcacgggcgtctccctcctcctgggcgccaccaacggcgacatcgccaacctcgcgtcctcgcccgcggccgcggcggcctgggtcgccgcgcacctcccggcctcgtcgccggccgtctccaccgtctccgtcggcaacgaggtcctctttgccgacgcctcgctcgcgtcgcagctcgtcccggccatgcagaacctgcacgacgcgctgccgcccaactccagcgtcaaggtgtccaccgtgaacgccatggacgtgctggcgagctccgacccgccctcctccggcgcgttcaagccggagctcgcggcggcgctcgacccgctgctggcgttcctgagcaagaccggctcgccgttcctcgtcaacccgtacccctacttcgcgtacctcagcgacccgcggcccgagacgctggccttctgcctgttccagcccaacgccggccgcccggacgccgggtccggcctcacgtacaccaacatgttcgacgcgcaggtcgacgccgtgcgcgccgcgctggacgccaaggggtacaaggacgtggacatcgtggtggccgagaccggctggccgcacaagggtgaccccgacgaggccggcgccacggtggagaacgcgcgcgccttcgtgtcgggcctcgtgtcccacctccgctccctgtccggcacgccgcgcgcgcccggcaagtcggtggagacgtacatcttcgccatgtacgacgaggacctcaagcccggcaaggcgtcggagcggtacttcgggctgttccagaccagcctcgccgagacgtacccgacggggttgctcaggaacggcacggccggacggataccagccacggcgccggctccggcgccaaccacgtccgccgcgacgctgaagccaacgccagggcagcagacacaggtgactccagcgcagcagggctcgacggcggcagctgggccttccggcatctgcaggccggggccagggacggctacgtcgagagggaccactaccgcttgcgcccaacctagtgctgctgaatcgtctcgcgcttcctcgatgctccctatcattgccggttttccggtcatagctttgctgatgtttacatgacctttttttttctttatgcttttttctgcctaatgtattgcgccacctctcgtattctagtacgtgtttcacgatccaagcacagcgtcgagatttaaagtacgataacagcatttgccattgtcactttgttaaaggaatctgaaaagagactcgaaaaaagcaagcgtccaaatgaatacaaat

SEQ ID NO: 9320 - protein, 442 aa, Zea mays subsp. mays
  peptide (1)..(442): Ceres Seq. ID no. 12361890
  misc_feature (31)..(344): Pfam Name: Glycosyl hydrolases family 17 Pfam Description: Glycosyl hydrolases family 17
  misc_feature (26)..(440): Homolog of NCBI NO: 34902328 NR Description: Putative glycosyl hydrolase [Oryza sativa
  misc_feature (1)..(359): Homolog of NCBI NO: 31126737 NR Description: putative beta 1,3-glucanase [Oryza sativa
  misc_feature (8)..(353): Homolog of NCBI NO: 30690053 NR Description: glycosyl hydrolase family 17 [Arabidopsis
  misc_feature (27)..(393): Homolog of NCBI NO: 22327528 NR Description: glycosyl hydrolase family 17; protein id:
  misc_feature (27)..(353): Homolog of NCBI NO: 7447982 NR Description: hypothetical protein T4L20.60 - Arabidopsis (fragment) >gi|3641838|emb|CAA18827.1| putative protein
  misc_feature (11)..(403): Homolog of NCBI NO: 14279169 NR Description: beta-1,3-glucanase-like protein [Olea europaea]
  misc_feature (27)..(348): Homolog of NCBI NO: 10177275 NR Description: beta-1,3-glucanase-like protein [Arabidopsis
  misc_feature (7)..(396): Homolog of NCBI NO: 15226720 NR Description: glycosyl hydrolase family 17; protein id:
  misc_feature (15)..(344): Homolog of NCBI NO: 6006371 NR Description: Similar to hypothetical protein - potato (S31196)
  misc_feature (11)..(421): Homolog of NCBI NO: 34395169 NR Description: putative glucan endo-1,3-beta-glucosidase
MTGRRELLLLALLGVLQLALRLPSAASQSFIGINYGEVADNLPPPSSTARLVQSTTITKVRLYGTDPAIISAFSGTGVSLLLGATNGDIANLASSPAAAAAWVAAHLPASSPAVSTVSVGNEVLFADASLASQLVPAMQNLHDALPPNSSVKVSTVNAMDVLASSDPPSSGAFKPELAAALDPLLAFLSKTGSPFLVNPYPYFAYLSDPRPETLAFCLFQPNAGRPDAGSGLTYTNMFDAQVDAVRAALDAKGYKDVDIVVAETGWPHKGDPDEAGATVENARAFVSGLVSHLRSLSGTPRAPGKSVETYIFAMYDEDLKPGKASERYFGLFQTSLAETYPTGLLRNGTAGRIPATAPAPAPTTSAATLKPTPGQQTQVTPAQQGSTAAAGPSGICRPGPGTATSRGTTTACAQPSAAESSRASSMLPIIAGFPVIALLMFT

SEQ ID NO: 9321 - protein, 305 aa, Zea mays subsp. mays
  peptide (1)..(305): Ceres Seq. ID no. 12361891
  misc_feature (1)..(207): Pfam Name: Glycosyl hydrolases family 17 Pfam Description: Glycosyl hydrolases family 17
  misc_feature (1)..(303): Homolog of NCBI NO: 34902328 NR Description: Putative glycosyl hydrolase [Oryza sativa
  misc_feature (1)..(222): Homolog of NCBI NO: 31126737 NR Description: putative beta 1,3-glucanase [Oryza sativa
  misc_feature (1)..(216): Homolog of NCBI NO: 30690053 NR Description: glycosyl hydrolase family 17 [Arabidopsis
  misc_feature (1)..(256): Homolog of NCBI NO: 22327528 NR Description: glycosyl hydrolase family 17; protein id:
  misc_feature (1)..(216): Homolog of NCBI NO: 7447982 NR Description: hypothetical protein T4L20.60 - Arabidopsis (fragment) >gi|3641838|emb|CAA18827.1| putative protein
  misc_feature (1)..(266): Homolog of NCBI NO: 14279169 NR Description: beta-1,3-glucanase-like protein [Olea europaea]
  misc_feature (1)..(211): Homolog of NCBI NO: 10177275 NR Description: beta-1,3-glucanase-like protein [Arabidopsis
  misc_feature (1)..(259): Homolog of NCBI NO: 15226720 NR Description: glycosyl hydrolase family 17; protein id:
  misc_feature (1)..(207): Homolog of NCBI NO: 6006371 NR Description: Similar to hypothetical protein - potato (S31196)
  misc_feature (1)..(284): Homolog of NCBI NO: 34395169 NR Description: putative glucan endo-1,3-beta-glucosidase
MQNLHDALPPNSSVKVSTVNAMDVLASSDPPSSGAFKPELAAALDPLLAFLSKTGSPFLVNPYPYFAYLSDPRPETLAFCLFQPNAGRPDAGSGLTYTNMFDAQVDAVRAALDAKGYKDVDIVVAETGWPHKGDPDEAGATVENARAFVSGLVSHLRSLSGTPRAPGKSVETYIFAMYDEDLKPGKASERYFGLFQTSLAETYPTGLLRNGTAGRIPATAPAPAPTTSAATLKPTPGQQTQVTPAQQGSTAAAGPSGICRPGPGTATSRGTTTACAQPSAAESSRASSMLPIIAGFPVIALLMFT

SEQ ID NO: 9322 - protein, 284 aa, Zea mays subsp. mays
  peptide (1)..(284): Ceres Seq. ID no. 12361892
  misc_feature (1)..(186): Pfam Name: Glycosyl hydrolases family 17 Pfam Description: Glycosyl hydrolases family 17
  misc_feature (1)..(282): Homolog of NCBI NO: 34902328 NR Description: Putative glycosyl hydrolase [Oryza sativa
  misc_feature (1)..(201): Homolog of NCBI NO: 31126737 NR Description: putative beta 1,3-glucanase [Oryza sativa
  misc_feature (1)..(195): Homolog of NCBI NO: 30690053 NR Description: glycosyl hydrolase family 17 [Arabidopsis
  misc_feature (1)..(235): Homolog of NCBI NO: 22327528 NR Description: glycosyl hydrolase family 17; protein id:
  misc_feature (1)..(195): Homolog of NCBI NO: 7447982 NR Description: hypothetical protein T4L20.60 - Arabidopsis (fragment) >gi|3641838|emb|CAA18827.1| putative protein
  misc_feature (1)..(245): Homolog of NCBI NO: 14279169 NR Description: beta-1,3-glucanase-like protein [Olea europaea]
  misc_feature (1)..(190): Homolog of NCBI NO: 10177275 NR Description: beta-1,3-glucanase-like protein [Arabidopsis
  misc_feature (1)..(238): Homolog of NCBI NO: 15226720 NR Description: glycosyl hydrolase family 17; protein id:
  misc_feature (1)..(186): Homolog of NCBI NO: 6006371 NR Description: Similar to hypothetical protein - potato (S31196)
  misc_feature (1)..(263): Homolog of NCBI NO: 34395169 NR Description: putative glucan endo-1,3-beta-glucosidase
MDVLASSDPPSSGAFKPELAAALDPLLAFLSKTGSPFLVNPYPYFAYLSDPRPETLAFCLFQPNAGRPDAGSGLTYTNMFDAQVDAVRAALDAKGYKDVDIVVAETGWPHKGDPDEAGATVENARAFVSGLVSHLRSLSGTPRAPGKSVETYIFAMYDEDLKPGKASERYFGLFQTSLAETYPTGLLRNGTAGRIPATAPAPAPTTSAATLKPTPGQQTQVTPAQQGSTAAAGPSGICRPGPGTATSRGTTTACAQPSAAESSRASSMLPIIAGFPVIALLMFT

SEQ ID NO: 9323 - DNA, 1726 bp, Zea mays subsp. mays
  misc_feature (1)..(1726): Ceres Seq. ID no. 12406596
  misc_feature: MA Experiment ID: 108534 Result: Up-regulated in Transcription
  misc_feature: MA Experiment 108534 PARAMETER Experiment Name: Zm_4deg_Cold_P Parameter: Age (hr) Value: 8
  misc_feature: MA Experiment 108534 PARAMETER Experiment Name: Zm_4deg_Cold_P Parameter: Organism Value: Zea mays
  misc_feature: MA Experiment 108534 PARAMETER Experiment Name: Zm_4deg_Cold_P Parameter: Plant Line Value: 35A19
  misc_feature: MA Experiment 108534 PARAMETER Experiment Name: Zm_4deg_Cold_P Parameter: Temperature (deg C) Value: 4 vs. 22
  misc_feature: MA Experiment 108534 PARAMETER Experiment Name: Zm_4deg_Cold_P Parameter: Timepoint (hr) Value: 6
  misc_feature: MA Experiment 108534 PARAMETER Experiment Name: Zm_4deg_Cold_P Parameter: Tissue Value: Aerial
  misc_feature: MA Experiment ID: 108535 Result: Down-regulated in Transcription
  misc_feature: MA Experiment 108535 PARAMETER Experiment Name: Zm_Meristem_P Parameter: Age (day) Value: 8
  misc_feature: MA Experiment 108535 PARAMETER Experiment Name: Zm_Meristem_P Parameter: Organism Value: Zea mays
  misc_feature: MA Experiment 108535 PARAMETER Experiment Name: Zm_Meristem_P Parameter: Plant Line Value: 35A19
  misc_feature: MA Experiment 108535 PARAMETER Experiment Name: Zm_Meristem_P Parameter: Tissue Value: Root Meristem vs. Above Root Meristem
  misc_feature: MA Experiment ID: 108543 Result: Up-regulated in Transcription
  misc_feature: MA Experiment ID: 108545 Result: Down-regulated in Transcription
  misc_feature: MA Experiment 108545 PARAMETER Experiment Name: Zm_Imbibed_Seeds_P Parameter: Age (day) Value: 3 vs. 2
  misc_feature: MA Experiment 108545 PARAMETER Experiment Name: Zm_Imbibed_Seeds_P Parameter: Organism Value: Zea mays
  misc_feature: MA Experiment 108545 PARAMETER Experiment Name: Zm_Imbibed_Seeds_P Parameter: Plant Line Value: 35A19
  misc_feature: MA Experiment 108545 PARAMETER Experiment Name: Zm_Imbibed_Seeds_P Parameter: Tissue Value: Aerial vs. Embryo
  misc_feature: MA Experiment ID: 108559 Result: Down-regulated in Transcription
  misc_feature: MA Experiment 108559 PARAMETER Experiment Name: Zm_5mM_NO_P Parameter: Age (day) Value: 8
  misc_feature: MA Experiment 108559 PARAMETER Experiment Name: Zm_5mM_NO_P Parameter: Organism Value: Zea mays
  misc_feature: MA Experiment 108559 PARAMETER Experiment Name: Zm_5mM_NO_P Parameter: Plant Line Value: 35A19
  misc_feature: MA Experiment 108559 PARAMETER Experiment Name: Zm_5mM_NO_P Parameter: Timepoint (hr) Value: 12
  misc_feature: MA Experiment 108559 PARAMETER Experiment Name: Zm_5mM_NO_P Parameter: Tissue Value: Aerial
  misc_feature: MA Experiment 108559 PARAMETER Experiment Name: Zm_5mM_NO_P Parameter: Treatment Value: 5mM NO vs. No Treatment
  misc_feature: MA Experiment ID: 20000492 Result: Down-regulated in Transcription
  misc_feature: MA Experiment 20000492 PARAMETER Experiment Name: Zm_Hybrid_Seed_Dev_P Parameter: DAP Value: 12
  misc_feature: MA Experiment 20000492 PARAMETER Experiment Name: Zm_Hybrid_Seed_Dev_P Parameter: Organism Value: Zea mays
  misc_feature: MA Experiment 20000492 PARAMETER Experiment Name: Zm_Hybrid_Seed_Dev_P Parameter: Plant Line Value: 35A19
  misc_feature: MA Experiment 20000492 PARAMETER Experiment Name: Zm_Hybrid_Seed_Dev_P Parameter: Tissue Value: Fert Kernel vs. Unfert Floret
atggtatggcagatcatcgcgacggcgatcgcgctgggcatctgcctgcacgcggggaaccacctggcgtgcgacttcccgcggctgatcgcgtcggcgcccgaggagtaccgtctggtggcgcgcttcttcgggcgggacaggcccagctaccgcgggctcctggcgggcgcggagggcgtgacggggatcgtcatggtcacgctcatggccgtctccttcaccctggccacgcggccgttccggaagcgggaggaggccagcagggacaagaagaaggcggcggcctgcaggggcgtcccgctcgccggcttcaacgccttctggtactcgcaccacctgctcatcgtcgtctacctcctgctcctcgtccacggctggttcatgttcctcgtcgacaagtggtaccagaggacgacgtggatgtacatttctgtgccgctggcgctttacgtcggggaacggacgctacgggccttccgatccaaggcctacgcagtcaagattctcaaggtgtgcctcctgccggggaacgtcctgaccgtaaccatgtcgaagccctacgggttccgctacaggagcgggcagtacatattcctgcagtgtccaacaatctccccgttcgagtggcaccctttctccatcacctcagctcccggagacgactgcgtcagcgtccacgtccagaccaggggcgactggacacaggagctcaagcgcatcttcgtcgacaactacttcacgccgtgcgtgcccagacgggctgccttcggggacctaggcgcggtggaccacaagaccaagagcccgccgaggttgctggtcgacggcccctacggcgcccccgcgcaggacttcaggaactacgacgtgctgctcctcgtcggcctcgggatcggcgccacgcccttcatcagcatcctcagagacctcctcaacaacatcaagctggccgacgaactgatggacctggcaatggagaccggccgggccgaggacagcgccagcaacctgagcgcgtcgacggcgagcggcggcaacaagaggagggcgtaccgaacgacctgcgcccacttctactgggtcacgagggagcctgggtcgttcgagtggttcaagggggtcatgaacgaggtcgccgagatggacaagaagggtgtcattgagctgcacaactacctgacaagcgtgtacgaggagcgagacgcgaggacgactctgctgtccatggtgcaggccctcaaccacgccaagcatggcgtcgacattgtgtcagggacaagggtcaggacacattttgcaaggcctaactggaaagaagtatttacgaggatagcgtccaagcacccaaattctacagtcggggtattttactgtgggagacctacacttgccaaagaactgaagaaactgtcacttgacatgagccacagaacgggaacccgatttgatttccacaaggagtacttctgatggaaaatacaagtgcccctgatttcttttagtactagaagatacagataaaaaaaattcacaaatttttgcgtagaagcgaactgatcctctttcacagtatgtaaatgtacatggtataaagcagagagtagttagaaacgttttttctttctttcttaaccaaatgggagggtgaaaatatgtcctgcgctttcagacagccattggtaactgcagatataaatgtaatagatcatatcattgtatgctg

SEQ ID NO: 9324 - protein, 490 aa, Zea mays subsp. mays
  peptide (1)..(490): Ceres Seq. ID no. 12406597
  misc_feature (9)..(489): Pfam Name: Ferric reductase like transmembrane component Pfam Description: Ferric reductase like transmembrane component
  misc_feature (4)..(490): Homolog of NCBI NO: 15221979 NR Description: respiratory burst oxidase protein, putative;
  misc_feature (9)..(490): Homolog of NCBI NO: 3242787 NR Description: respiratory burst oxidase protein E [Arabidopsis
  misc_feature (6)..(490): Homolog of NCBI NO: 17384016 NR Description: NADPH oxidase [Nicotiana tabacum]
  misc_feature (6)..(490): Homolog of NCBI NO: 28268678 NR Description: respiratory burst oxidase homolog [Nicotiana
  misc_feature (6)..(490): Homolog of NCBI NO: 4585142 NR Description: NADPH oxidase; gp91; phox homolog [Lycopersicon
  misc_feature (6)..(490): Homolog of NCBI NO: 16549087 NR Description: respiratory burst oxidase homolog [Solanum
  misc_feature (6)..(490): Homolog of NCBI NO: 7489460 NR Description: cytochrome b245 beta chain homolog rbohA - rice
  misc_feature (6)..(490): Homolog of NCBI NO: 7489461 NR Description: cytochrome b245 beta chain homolog rbohA - rice
  misc_feature (6)..(490): Homolog of NCBI NO: 18407959 NR Description: cytochrome b245 beta chain homolog RbohAp108, protein id: At1g64060.1, supported by cDNA: gi_2654867, supported
  misc_feature (6)..(490): Homolog of NCBI NO: 3242456 NR Description: Atrboh F [Arabidopsis thaliana]
MVWQIIATAIALGICLHAGNHLACDFPRLIASAPEEYRLVARFFGRDRPSYRGLLAGAEGVTGIVMVTLMAVSFTLATRPFRKREEASRDKKKAAACRGVPLAGFNAFWYSHHLLIVVYLLLLVHGWFMFLVDKWYQRTTWMYISVPLALYVGERTLRAFRSKAYAVKILKVCLLPGNVLTVTMSKPYGFRYRSGQYIFLQCPTISPFEWHPFSITSAPGDDCVSVHVQTRGDWTQELKRIFVDNYFTPCVPRRAAFGDLGAVDHKTKSPPRLLVDGPYGAPAQDFRNYDVLLLVGLGIGATPFISILRDLLNNIKLADELMDLAMETGRAEDSASNLSASTASGGNKRRAYRTTCAHFYWVTREPGSFEWFKGVMNEVAEMDKKGVIELHNYLTSVYEERDARTTLLSMVQALNHAKHGVDIVSGTRVRTHFARPNWKEVFTRIASKHPNSTVGVFYCGRPTLAKELKKLSLDMSHRTGTRFDFHKEYF

SEQ ID NO: 9325 - protein, 425 aa, Zea mays subsp. mays
  peptide (1)..(425): Ceres Seq. ID no. 12406598
  misc_feature (1)..(424): Pfam Name: Ferric reductase like transmembrane component Pfam Description: Ferric reductase like transmembrane component
  misc_feature (1)..(425): Homolog of NCBI NO: 15221979 NR Description: respiratory burst oxidase protein, putative;
  misc_feature (1)..(425): Homolog of NCBI NO: 3242787 NR Description: respiratory burst oxidase protein E [Arabidopsis
  misc_feature (1)..(425): Homolog of NCBI NO: 17384016 NR Description: NADPH oxidase [Nicotiana tabacum]
  misc_feature (1)..(425): Homolog of NCBI NO: 28268678 NR Description: respiratory burst oxidase homolog [Nicotiana
  misc_feature (1)..(425): Homolog of NCBI NO: 4585142 NR Description: NADPH oxidase; gp91; phox homolog [Lycopersicon
  misc_feature (1)..(425): Homolog of NCBI NO: 16549087 NR Description: respiratory burst oxidase homolog [Solanum
  misc_feature (1)..(425): Homolog of NCBI NO: 7489460 NR Description: cytochrome b245 beta chain homolog rbohA - rice
  misc_feature (1)..(425): Homolog of NCBI NO: 7489461 NR Description: cytochrome b245 beta chain homolog rbohA - rice
  misc_feature (1)..(425): Homolog of NCBI NO: 18407959 NR Description: cytochrome b245 beta chain homolog RbohAp108, protein id: At1g64060.1, supported by cDNA: gi_2654867, supported
  misc_feature (1)..(425): Homolog of NCBI NO: 3242456 NR Description: Atrboh F [Arabidopsis thaliana]
MVTLMAVSFTLATRPFRKREEASRDKKKAAACRGVPLAGFNAFWYSHHLLIVVYLLLLVHGWFMFLVDKWYQRTTWMYISVPLALYVGERTLRAFRSKAYAVKILKVCLLPGNVLTVTMSKPYGFRYRSGQYIFLQCPTISPFEWHPFSITSAPGDDCVSVHVQTRGDWTQELKRIFVDNYFTPCVPRRAAFGDLGAVDHKTKSPPRLLVDGPYGAPAQDFRNYDVLLLVGLGIGATPFISILRDLLNNIKLADELMDLAMETGRAEDSASNLSASTASGGNKRRAYRTTCAHFYWVTREPGSFEWFKGVMNEVAEMDKKGVIELHNYLTSVYEERDARTTLLSMVQALNHAKHGVDIVSGTRVRTHFARPNWKEVFTRIASKHPNSTVGVFYCGRPTLAKELKKLSLDMSHRTGTRFDFHKEYF

SEQ ID NO: 9326 - protein, 421 aa, Zea mays subsp. mays
  peptide (1)..(421): Ceres Seq. ID no. 12406599
  misc_feature (1)..(420): Pfam Name: Ferric reductase like transmembrane component Pfam Description: Ferric reductase like transmembrane component
  misc_feature (1)..(421): Homolog of NCBI NO: 15221979 NR Description: respiratory burst oxidase protein, putative;
  misc_feature (1)..(421): Homolog of NCBI NO: 3242787 NR Description: respiratory burst oxidase protein E [Arabidopsis
  misc_feature (1)..(421): Homolog of NCBI NO: 17384016 NR Description: NADPH oxidase [Nicotiana tabacum]
  misc_feature (1)..(421): Homolog of NCBI NO: 28268678 NR Description: respiratory burst oxidase homolog [Nicotiana
  misc_feature (1)..(421): Homolog of NCBI NO: 4585142 NR Description: NADPH oxidase; gp91; phox homolog [Lycopersicon
  misc_feature (1)..(421): Homolog of NCBI NO: 16549087 NR Description: respiratory burst oxidase homolog [Solanum
  misc_feature (1)..(421): Homolog of NCBI NO: 7489460 NR Description: cytochrome b245 beta chain homolog rbohA - rice
  misc_feature (1)..(421): Homolog of NCBI NO: 7489461 NR Description: cytochrome b245 beta chain homolog rbohA - rice
  misc_feature (1)..(421): Homolog of NCBI NO: 18407959 NR Description: cytochrome b245 beta chain homolog RbohAp108, protein id: At1g64060.1, supported by cDNA: gi_2654867, supported
  misc_feature (1)..(421): Homolog of NCBI NO: 3242456 NR Description: Atrboh F [Arabidopsis thaliana]
MAVSFTLATRPFRKREEASRDKKKAAACRGVPLAGFNAFWYSHHLLIVVYLLLLVHGWFMFLVDKWYQRTTWMYISVPLALYVGERTLRAFRSKAYAVKILKVCLLPGNVLTVTMSKPYGFRYRSGQYIFLQCPTISPFEWHPFSITSAPGDDCVSVHVQTRGDWTQELKRIFVDNYFTPCVPRRAAFGDLGAVDHKTKSPPRLLVDGPYGAPAQDFRNYDVLLLVGLGIGATPFISILRDLLNNIKLADELMDLAMETGRAEDSASNLSASTASGGNKRRAYRTTCAHFYWVTREPGSFEWFKGVMNEVAEMDKKGVIELHNYLTSVYEERDARTTLLSMVQALNHAKHGVDIVSGTRVRTHFARPNWKEVFTRIASKHPNSTVGVFYCGRPTLAKELKKLSLDMSHRTGTRFDFHKEYF

SEQ ID NO: 9327 - DNA, 1841 bp, Zea mays subsp. mays
  misc_feature (1)..(1841): Ceres Seq. ID no. 12384170
  misc_feature: MA Experiment ID: 108504 Result: Down-regulated in Transcription
  misc_feature: MA Experiment 108504 PARAMETER Experiment Name: Zm_Drought_P Parameter: Age (day) Value: 8
  misc_feature: MA Experiment 108504 PARAMETER Experiment Name: Zm_Drought_P Parameter: Organism Value: Zea mays
  misc_feature: MA Experiment 108504 PARAMETER Experiment Name: Zm_Drought_P Parameter: Plant Line Value: 35A19
  misc_feature: MA Experiment 108504 PARAMETER Experiment Name: Zm_Drought_P Parameter: Timepoint (hr) Value: 12
  misc_feature: MA Experiment 108504 PARAMETER Experiment Name: Zm_Drought_P Parameter: Tissue Value: Aerial
  misc_feature: MA Experiment 108504 PARAMETER Experiment Name: Zm_Drought_P Parameter: Treatment Value: Drought vs. No Drought
  misc_feature: MA Experiment ID: 108539 Result: Down-regulated in Transcription
  misc_feature: MA Experiment 108539 PARAMETER Experiment Name: Zm_20percent_PEG_P Parameter: Age (day) Value: 8
  misc_feature: MA Experiment 108539 PARAMETER Experiment Name: Zm_20percent_PEG_P Parameter: Organism Value: Zea mays
  misc_feature: MA Experiment 108539 PARAMETER Experiment Name: Zm_20percent_PEG_P Parameter: Plant Line Value: 35A19
  misc_feature: MA Experiment 108539 PARAMETER Experiment Name: Zm_20percent_PEG_P Parameter: Timepoint (hr) Value: 1
  misc_feature: MA Experiment 108539 PARAMETER Experiment Name: Zm_20percent_PEG_P Parameter: Tissue Value: Aerial
  misc_feature: MA Experiment 108539 PARAMETER Experiment Name: Zm_20percent_PEG_P Parameter: Treatment Value: 20percent PEG vs. No Treatment
  misc_feature: MA Experiment ID: 108540 Result: Down-regulated in Transcription
  misc_feature: MA Experiment 108540 PARAMETER Experiment Name: Zm_20percent_PEG_P Parameter: Age (day) Value: 8
  misc_feature: MA Experiment 108540 PARAMETER Experiment Name: Zm_20percent_PEG_P Parameter: Organism Value: Zea mays
  misc_feature: MA Experiment 108540 PARAMETER Experiment Name: Zm_20percent_PEG_P Parameter: Plant Line Value: 35A19
  misc_feature: MA Experiment 108540 PARAMETER Experiment Name: Zm_20percent_PEG_P Parameter: Timepoint (hr) Value: 6
  misc_feature: MA Experiment 108540 PARAMETER Experiment Name: Zm_20percent_PEG_P Parameter: Tissue Value: Aerial
  misc_feature: MA Experiment 108540 PARAMETER Experiment Name: Zm_20percent_PEG_P Parameter: Treatment Value: 20percent PEG vs. No Treatment
  misc_feature: MA Experiment ID: 108543 Result: Up-regulated in Transcription
  misc_feature: MA Experiment ID: 108544 Result: Up-regulated in Transcription
  misc_feature: MA Experiment ID: 20000479 Result: Down-regulated in Transcription
  misc_feature: MA Experiment 20000479 PARAMETER Experiment Name: Zm_Drought_P Parameter: Age (day) Value: 10
  misc_feature: MA Experiment 20000479 PARAMETER Experiment Name: Zm_Drought_P Parameter: Organism Value: Zea mays
  misc_feature: MA Experiment 20000479 PARAMETER Experiment Name: Zm_Drought_P Parameter: Plant Line Value: 35A19
  misc_feature: MA Experiment 20000479 PARAMETER Experiment Name: Zm_Drought_P Parameter: Timepoint (hr) Value: 48
  misc_feature: MA Experiment 20000479 PARAMETER Experiment Name: Zm_Drought_P Parameter: Tissue Value: Aerial
  misc_feature: MA Experiment 20000479 PARAMETER Experiment Name: Zm_Drought_P Parameter: Treatment Value: Drought vs. No Drought
  misc_feature: MA Experiment ID: 20000480 Result: Down-regulated in Transcription
  misc_feature: MA Experiment 20000480 PARAMETER Experiment Name: Zm_Drought_P Parameter: Age (day) Value: 11
  misc_feature: MA Experiment 20000480 PARAMETER Experiment Name: Zm_Drought_P Parameter: Organism Value: Zea mays
  misc_feature: MA Experiment 20000480 PARAMETER Experiment Name: Zm_Drought_P Parameter: Plant Line Value: 35A19
  misc_feature: MA Experiment 20000480 PARAMETER Experiment Name: Zm_Drought_P Parameter: Timepoint (hr) Value: 72
  misc_feature: MA Experiment 20000480 PARAMETER Experiment Name: Zm_Drought_P Parameter: Tissue Value: Aerial
  misc_feature: MA Experiment 20000480 PARAMETER Experiment Name: Zm_Drought_P Parameter: Treatment Value: Drought vs. No Drought
  misc_feature: MA Experiment ID: 20000626 Result: Up-regulated in Transcription
  misc_feature: MA Experiment 20000626 PARAMETER Experiment Name: Zm_Herbicide-Treatments_P Parameter: Timepoint (hr) Value: 12
  misc_feature: MA Experiment 20000626 PARAMETER Experiment Name: Zm_Herbicide-Treatments_P Parameter: Tissue Value: Aerial
  misc_feature: MA Experiment 20000626 PARAMETER Experiment Name: Zm_Herbicide-Treatments_P Parameter: Treatment Value: Roundup vs. No Treatment
aagttgcaacggccagaaagccacgttagcctagccgagctcctctgctcctctcgtggccgaacaggcagagcgaccagtctccagagcgctccccatggcgtcaggagctgcggcccctgtcgttcagaccctggtgctgaaggtggccatccactgccatggctgcaagaagaaggtccggaaggtgctcaggagcgtcgaaggcgtgcagaacgtgacggtggacgcctcgcagaacaaggtgactgtggtcggcaccgtggacgccgacacgctcatccagaggttgtacaagtccggcaagaagggagagccctggcagtgccacccgcccatcaagaagagcgagcccgcgccggaggccccgccgactccgcagcctgccggtggcggcggcaaggacgccgctactgctgcggccgcggtggacaagaagccggaggagccggtgaagaagccgcagggcgacagctccgaggagaagaagaagaagccggaggaggcggcgaaggagccgcagagcgagaagaagaagccggaggaggcggcgaaggagccatagcgagaagaagaagccggaggaggtggtgaaggcgccgcagaacgagaaggaggagccgcagagcgagaagaagaagaagccggaggaggcggccgagagctccaaggagaaggagaagaaaccagaggaggcagtgaaggagccaaaggccgagagctccaaggacgagaagaagaagaagccggaggaggccgtgaaggagccgcagggtgagagctccgaggagaagaagaagaagccggagcaggagggcggggccgcagagaagaagcccgaagcagagtcaaagaagaaggacggcggtgacagcaagggagctgagacgaaggccaagggctcagcagagccggcaaaggaagctgccgccgtccccgcccccgcccccgcccccgctgtcaatgacaaggccgaggcaaagaagagcgagaagcccaaggacgccggtaaggcggcggagccagccgccgtgacgacggagaggtcgctgcctgcgccgccggcgccggcgccaatgcccgcgtacgagcaggagttccgccacccctactacgccccgcagccggtggtgagctaccacgcgtcgcagccgagctcgagcgtgtcgtacacgtacttcgcgccgcagacgcagccggcgtactccattcaacagccacagccgcacccacaggcggcggtctcctactccgtgcagccgacaccgccggcgtactactccgcgcaggagctgcagccgcagcagccggcgaagcagtggtcgccgtcgtacctgtacatgccgtacccgcacgcgcaggcggcgccggagccttactaccagcagcaggactactacagcccgcccgggacgcacgcgtcgccgatgcacgacccataccgcatcttcgacgacgagaaccccaactcctgcagcgtcatgtgagaggcgcgagctggtcggcgcggcccggacgccgccggccgccgtgggcagcgagtagtttgggggggagacggcgccgcgcgctaccgcaacatcagagagagagacgtctctgtggctgtataggtagagtagcctgttactgtttaccacccctctaccctcttccttccatcctatttccacctagtatagaggtcaaacctcttctccgtgtagtgacggaaccttttcttaatttccatctttttactgttctgaatcaagtgattagaaagaacatgtaaattgtaacgagatacgttcatgttcaccgcgtctgtatatgccggctactagaactttgaatgagcg

SEQ ID NO: 9328 - protein, 197 aa, Zea mays subsp. mays
  peptide (1)..(197): Ceres Seq. ID no. 12384171
  misc_feature (15)..(197): Homolog of NCBI NO: 5821151 NR Description: RNA binding protein [Homo sapiens]
  misc_feature (6)..(197): Homolog of NCBI NO: 28972153 NR Description: mKIAA0324 protein [Mus musculus]
  misc_feature (15)..(197): Homolog of NCBI NO: 6634015 NR Description: KIAA0324 protein [Homo sapiens]
  misc_feature (15)..(197): Homolog of NCBI NO: 7512967 NR Description: hypothetical protein KIAA0324 - human (fragment)
  misc_feature (59)..(197): Homolog of NCBI NO: 5821145 NR Description: RNA binding protein [Homo sapiens]
  misc_feature (6)..(197): Homolog of NCBI NO: 30424862 NR Description: RIKEN cDNA 5033413A03 [Mus musculus]
  misc_feature (59)..(197): Homolog of NCBI NO: 5821143 NR Description: RNA binding protein [Homo sapiens]
  misc_feature (167)..(197): Homolog of NCBI NO: 25143299 NR Description: pre-mRNA splicing SR protein related RSR-1 (68.2
  misc_feature (59)..(197): Homolog of NCBI NO: 6649242 NR Description: splicing coactivator subunit SRm300 [Homo sapiens]
  misc_feature (59)..(197): Homolog of NCBI NO: 19923466 NR Description: splicing coactivator subunit SRm300; RNA binding
KLQRPESHVSLAELLCSSRGRTGRATSLQSAPHGVRSCGPCRSDPGAEGGHPLPWLQEEGPEGAQERRRRAERDGGRLAEQGDCGRHRGRRHAHPEVVQVRQEGRALAVPPAHQEERARAGGPADSAACRWRRQGRRYCCGRGGQEAGGAGEEAAGRQLRGEEEEAGGGGEGAAEREEEAGGGGEGAIARRRSRRRW

SEQ ID NO: 9329 - protein, 155 aa, Zea mays subsp. mays
  peptide (1)..(155): Ceres Seq. ID no. 12384172
  misc_feature (101)..(155): Pfam Name: Caldesmon Pfam Description: Caldesmon
  misc_feature (76)..(155): Homolog of NCBI NO: 30685162 NR Description: leucine-rich repeat extensin family [Arabidopsis
  misc_feature (76)..(155): Homolog of NCBI NO: 20259488 NR Description: unknown protein [Arabidopsis thaliana]
  misc_feature (11)..(155): Homolog of NCBI NO: 12083536 NR Description: hypothetical protein [Oryza sativa]
  misc_feature (1)..(119): Homolog of NCBI NO: 18404283 NR Description: expressed protein; protein id: At2g36950.1, by cDNA: 19570. [Arabidopsis thaliana]
  misc_feature (10)..(75): Homolog of NCBI NO: 18397481 NR Description: expressed protein; protein id: At3g06130.1, by cDNA: gi_11908103, supported by cDNA: gi_13194807, supported cDNA: gi_15010767 [Arabidopsis thaliana]
  misc_feature (1)..(147): Homolog of NCBI NO: 18404283 NR Description: expressed protein; protein id: At2g36950.1, by cDNA: 19570. [Arabidopsis thaliana]
  misc_feature (1)..(155): Homolog of NCBI NO: 33146848 NR Description: copper chaperone (CCH)-related protein-like
MASGAAAPVVQTLVLKVAIHCHGCKKKVRKVLRSVEGVQNVTVDASQNKVTVVGTVDADTLIQRLYKSGKKGEPWQCHPPIKKSEPAPEAPPTPQPAGGGGKDAATAAAAVDKKPEEPVKKPQGDSSEEKKKKPEEAAKEPQSEKKKPEEAAKEP

SEQ ID NO: 9330 - protein, 136 aa, Zea mays subsp. mays
  peptide (1)..(136): Ceres Seq. ID no. 12384173
  misc_feature (1)..(54): Pfam Name: Protein of unknown function, DUF612 Pfam Description: Protein of unknown function, DUF612
  misc_feature (1)..(121): Homolog of NCBI NO: 5821143 NR Description: RNA binding protein [Homo sapiens]
  misc_feature (1)..(85): Homolog of NCBI NO: 15889177 NR Description: AGR_C_3445p [Agrobacterium tumefaciens] OmpA family protein [Agrobacterium tumefaciens str. C58 (U.
  misc_feature (1)..(98): Homolog of NCBI NO: 33146848 NR Description: copper chaperone (CCH)-related protein-like
  misc_feature (1)..(115): Homolog of NCBI NO: 20259488 NR Description: unknown protein [Arabidopsis thaliana]
  misc_feature (1)..(120): Homolog of NCBI NO: 2133786 NR Description: NF-180 - sea lamprey >gi|632549|gb|AAA80106.1|
  misc_feature (1)..(121): Homolog of NCBI NO: 5821145 NR Description: RNA binding protein [Homo sapiens]
  misc_feature (1)..(100): Homolog of NCBI NO: 24020878 NR Description: heavy neurofilament protein [Canis familiaris]
  misc_feature (1)..(121): Homolog of NCBI NO: 30685162 NR Description: leucine-rich repeat extensin family [Arabidopsis
  misc_feature (1)..(121): Homolog of NCBI NO: 6649242 NR Description: splicing coactivator subunit SRm300 [Homo sapiens]
  misc_feature (1)..(121): Homolog of NCBI NO: 19923466 NR Description: splicing coactivator subunit SRm300; RNA binding
MPAYEQEFRHPYYAPQPVVSYHASQPSSSVSYTYFAPQTQPAYSIQQPQPHPQAAVSYSVQPTPPAYYSAQELQPQQPAKQWSPSYLYMPYPHAQAAPEPYYQQQDYYSPPGTHASPMHDPYRIFDDENPNSCSVM

SEQ ID NO: 9331 - DNA, 1306 bp, Zea mays subsp. mays
  misc_feature (1)..(1306): Ceres Seq. ID no. 12412486
  misc_feature: MA Experiment ID: 108523 Result: Down-regulated in Transcription
  misc_feature: MA Experiment 108523 PARAMETER Experiment Name: Zm_42deg_Heat_P Parameter: Age (day) Value: 8
  misc_feature: MA Experiment 108523 PARAMETER Experiment Name: Zm_42deg_Heat_P Parameter: Organism Value: Zea mays
  misc_feature: MA Experiment 108523 PARAMETER Experiment Name: Zm_42deg_Heat_P Parameter: Plant Line Value: 35A19
  misc_feature: MA Experiment 108523 PARAMETER Experiment Name: Zm_42deg_Heat_P Parameter: Temperature (deg C) Value: 42 vs. 22
  misc_feature: MA Experiment 108523 PARAMETER Experiment Name: Zm_42deg_Heat_P Parameter: Timepoint (hr) Value: 6
  misc_feature: MA Experiment 108523 PARAMETER Experiment Name: Zm_42deg_Heat_P Parameter: Tissue Value: Aerial
  misc_feature: MA Experiment ID: 108559 Result: Down-regulated in Transcription
  misc_feature: MA Experiment 108559 PARAMETER Experiment Name: Zm_5mM_NO_P Parameter: Age (day) Value: 8
  misc_feature: MA Experiment 108559 PARAMETER Experiment Name: Zm_5mM_NO_P Parameter: Organism Value: Zea mays
  misc_feature: MA Experiment 108559 PARAMETER Experiment Name: Zm_5mM_NO_P Parameter: Plant Line Value: 35A19
  misc_feature: MA Experiment 108559 PARAMETER Experiment Name: Zm_5mM_NO_P Parameter: Timepoint (hr) Value: 12
  misc_feature: MA Experiment 108559 PARAMETER Experiment Name: Zm_5mM_NO_P Parameter: Tissue Value: Aerial
  misc_feature: MA Experiment 108559 PARAMETER Experiment Name: Zm_5mM_NO_P Parameter: Treatment Value: 5mM NO vs. No Treatment
  misc_feature: MA Experiment ID: 20000477 Result: Up-regulated in Transcription
  misc_feature: MA Experiment 20000477 PARAMETER Experiment Name: Zm_5mM_SA_P Parameter: Age (day) Value: 10
  misc_feature: MA Experiment 20000477 PARAMETER Experiment Name: Zm_5mM_SA_P Parameter: Organism Value: Zea mays
  misc_feature: MA Experiment 20000477 PARAMETER Experiment Name: Zm_5mM_SA_P Parameter: Plant Line Value: 35A19
  misc_feature: MA Experiment 20000477 PARAMETER Experiment Name: Zm_5mM_SA_P Parameter: Timepoint (hr) Value: 48
  misc_feature: MA Experiment 20000477 PARAMETER Experiment Name: Zm_5mM_SA_P Parameter: Tissue Value: Aerial
  misc_feature: MA Experiment 20000477 PARAMETER Experiment Name: Zm_5mM_SA_P Parameter: Treatment Value: 5mM SA vs. No Treatment
  misc_feature: MA Experiment ID: 20000479 Result: Up-regulated in Transcription
  misc_feature: MA Experiment 20000479 PARAMETER Experiment Name: Zm_Drought_P Parameter: Age (day) Value: 10
  misc_feature: MA Experiment 20000479 PARAMETER Experiment Name: Zm_Drought_P Parameter: Organism Value: Zea mays
  misc_feature: MA Experiment 20000479 PARAMETER Experiment Name: Zm_Drought_P Parameter: Plant Line Value: 35A19
  misc_feature: MA Experiment 20000479 PARAMETER Experiment Name: Zm_Drought_P Parameter: Timepoint (hr) Value: 48
  misc_feature: MA Experiment 20000479 PARAMETER Experiment Name: Zm_Drought_P Parameter: Tissue Value: Aerial
  misc_feature: MA Experiment 20000479 PARAMETER Experiment Name: Zm_Drought_P Parameter: Treatment Value: Drought vs. No Drought
  misc_feature: MA Experiment ID: 20000480 Result: Up-regulated in Transcription
  misc_feature: MA Experiment 20000480 PARAMETER Experiment Name: Zm_Drought_P Parameter: Age (day) Value: 11
  misc_feature: MA Experiment 20000480 PARAMETER Experiment Name: Zm_Drought_P Parameter: Organism Value: Zea mays
  misc_feature: MA Experiment 20000480 PARAMETER Experiment Name: Zm_Drought_P Parameter: Plant Line Value: 35A19
  misc_feature: MA Experiment 20000480 PARAMETER Experiment Name: Zm_Drought_P Parameter: Timepoint (hr) Value: 72
  misc_feature: MA Experiment 20000480 PARAMETER Experiment Name: Zm_Drought_P Parameter: Tissue Value: Aerial
  misc_feature: MA Experiment 20000480 PARAMETER Experiment Name: Zm_Drought_P Parameter: Treatment Value: Drought vs. No Drought
  misc_feature: MA Experiment ID: 20000488 Result: Down-regulated in Transcription
  misc_feature: MA Experiment 20000488 PARAMETER Experiment Name: Zm_50mM_NH4NO3_L_to_H_P Parameter: Organism Value: Zea mays
  misc_feature: MA Experiment 20000488 PARAMETER Experiment Name: Zm_50mM_NH4NO3_L_to_H_P Parameter: Timepoint (hr) Value: 8
  misc_feature: MA Experiment 20000488 PARAMETER Experiment Name: Zm_50mM_NH4NO3_L_to_H_P Parameter: Tissue Value: Leaves
  misc_feature: MA Experiment 20000488 PARAMETER Experiment Name: Zm_50mM_NH4NO3_L_to_H_P Parameter: Treatment Value: 50mM NH4NO3 vs. 100mM Mannitol
  misc_feature: MA Experiment ID: 20000534 Result: Down-regulated in Transcription
  misc_feature: MA Experiment 20000534 PARAMETER Experiment Name: Zm_Hybrid_Pollen_P Parameter: Age (day) Value: 8
  misc_feature: MA Experiment 20000534 PARAMETER Experiment Name: Zm_Hybrid_Pollen_P Parameter: Organism Value: Zea mays
  misc_feature: MA Experiment 20000534 PARAMETER Experiment Name: Zm_Hybrid_Pollen_P Parameter: Plant Line Value: 35A19
  misc_feature: MA Experiment 20000534 PARAMETER Experiment Name: Zm_Hybrid_Pollen_P Parameter: Tissue Value: Pollen vs. Aerial
  misc_feature: MA Experiment ID: 20000535 Result: Down-regulated in Transcription
  misc_feature: MA Experiment 20000535 PARAMETER Experiment Name: Zm_Hybrid_Seed_Dev_P Parameter: DAP Value: 30 vs. 12
  misc_feature: MA Experiment 20000535 PARAMETER Experiment Name: Zm_Hybrid_Seed_Dev_P Parameter: Organism Value: Zea mays
  misc_feature: MA Experiment 20000535 PARAMETER Experiment Name: Zm_Hybrid_Seed_Dev_P Parameter: Plant Line Value: 35A19
  misc_feature: MA Experiment 20000535 PARAMETER Experiment Name: Zm_Hybrid_Seed_Dev_P Parameter: Tissue Value: Embryo vs. Unfert Floret
  misc_feature: MA Experiment ID: 20000626 Result: Up-regulated in Transcription
  misc_feature: MA Experiment 20000626 PARAMETER Experiment Name: Zm_Herbicide-Treatments_P Parameter: Timepoint (hr) Value: 12
  misc_feature: MA Experiment 20000626 PARAMETER Experiment Name: Zm_Herbicide-Treatments_P Parameter: Tissue Value: Aerial
  misc_feature: MA Experiment 20000626 PARAMETER Experiment Name: Zm_Herbicide-Treatments_P Parameter: Treatment Value: Roundup vs. No Treatment
gcacgagaccattacctagaacatcctaatcgaaaacttcttttcgtttttgtttgtttttggaagaacagacagacttgaaagttgagatatctcactaatctccaaaatgtccctataaaactgatgatctgctgataagacatcccactcgccggccgtccttgaagagcgagcagcaatggcgcaggagatcgagcacacccacatccccatccgcggcctcaacctccacgtcgcacaagtaggcacaggtgaactgggcacggtggtgttcctgcacggcttcccggagatatggtactcgtggcgccaccagatgcgggccgtggccgcggcggggtaccgcgccatcgcgccggactgccgcgggtacggcctgtcggagcagccgccggagcacgaggaggtgtcccttgacgacctcatcgccgacgtgctcggcatcctcgacgccctcagcgtcccgaaggcgttcttggtgggcaaggacttcggcgccatgccgggcgtacgagttcgcgctgcagcacccgggccgcaccctcggcgtggtgtgcctgggcatccccttcaacccggcccccatgtccttcgacgccatcatgcccgaaggattctacatcctgcgctggcgcgagccgggcagggcggaggccgacttcggccggttcgacgtgaggcgtggtgcgcaccatctacgtgctcttcgccggcgccgagatcccgattgccaaggaagggcaggagatcatggacctggccgacctgtccacgcccctcccggagtggttcaccgaggaggacctggacgcctacgccaagctctacgagaagtccggcttcgggtacccgctcaagatgccgtacagatctatgcacaagctcccgaaccggctggacgccaagttccaggtgccggtgttcatggtgatgggggagaaggactacgcgttcaagttcccggggttcgagaccgccatgcgcggcggggtcatggacaacttcatgccggacctcaagatcacctacatccctgaggggagccacttcgtgcaggagcagctcccagagcaggtcaacgacctgctcctcggcttcctcagggaccatccctccgccgcataagcagtgggtgagaccgtcagaataatggaatgcttcctgagcaacggtttctctactctattgccgttgcctggatccatgaccgtgttaattaattaattagtgcatatacttcctactcaaatcagatgtacgttttttttatctgcaataaaaatcatcgtcgctgcattactcg

SEQ ID NO: 9332 - protein, 250 aa, Zea mays subsp. mays
  peptide (1)..(250): Ceres Seq. ID no. 12412487
  misc_feature (55)..(109): Pfam Name: alpha/beta hydrolase fold Pfam Description: alpha/beta hydrolase fold
  misc_feature (1)..(109): Homolog of NCBI NO: 37535728 NR Description: putative epoxide hydrolase [Oryza sativa cultivar- group)] >gi|18071422|gb|AAL58281.1| putative epoxide
  misc_feature (1)..(135): Homolog of NCBI NO: 37535724 NR Description: putative epoxide hydrolase [Oryza sativa cultivar- group)] >gi|18071405|gb|AAL58264.1| putative epoxide
  misc_feature (1)..(128): Homolog of NCBI NO: 37535732 NR Description: putative epoxide hydrolase [Oryza sativa cultivar- group)] >gi|18071416|gb|AAL58275.1| putative epoxide
  misc_feature (1)..(118): Homolog of NCBI NO: 37535722 NR Description: putative epoxide hydrolase [Oryza sativa cultivar- group)] >gi|18071407|gb|AAL58266.1| putative epoxide
  misc_feature (3)..(107): Homolog of NCBI NO: 1354849 NR Description: epoxide hydrolase [Nicotiana tabacum]
  misc_feature (1)..(110): Homolog of NCBI NO: 15230367 NR Description: epoxide hydrolase-like protein; protein id: supported by cDNA: gi_13937212, supported by cDNA: gi_18491128
  misc_feature (5)..(107): Homolog of NCBI NO: 25044843 NR Description: epoxide hydrolase [Ananas comosus]
  misc_feature (3)..(108): Homolog of NCBI NO: 18411917 NR Description: coded for by A. thaliana cDNA T04215; protein id:
  misc_feature (5)..(108): Homolog of NCBI NO: 30683476 NR Description: epoxide hydrolase, putative [Arabidopsis thaliana]
  misc_feature (5)..(108): Homolog of NCBI NO: 25407540 NR Description: probable epoxide hydrolase [imported] - thaliana >gi|5302785|emb|CAB46034.1| putative epoxide hydrolase thaliana] >gi|7268344|emb|CAB78638.1| putative epoxide hydrolase
MAQEIEHTHIPIRGLNLHVAQVGTGELGTVVFLHGFPEIWYSWRHQMRAVAAAGYRAIAPDCRGYGLSEQPPEHEEVSLDDLIADVLGILDALSVPKAFLVGKDFGAMPGVRVRAAAPGPHPRRGVPGHPLQPGPHVLRRHHARRILHPALARAGQGGGRLRPVRREAWCAPSTCSSPAPRSRLPRKGRRSWTWPTCPRPSRSGSPRRTWTPTPSSTRSPASGTRSRCRTDLCTSSRTGWTPSSRCRCSW

SEQ ID NO: 9333 - protein, 204 aa, Zea mays subsp. mays
  peptide (1)..(204): Ceres Seq. ID no. 12412488
  misc_feature (9)..(63): Pfam Name: alpha/beta hydrolase fold Pfam Description: alpha/beta hydrolase fold
  misc_feature (1)..(63): Homolog of NCBI NO: 37535728 NR Description: putative epoxide hydrolase [Oryza sativa cultivar- group)] >gi|18071422|gb|AAL58281.1| putative epoxide
  misc_feature (1)..(89): Homolog of NCBI NO: 37535724 NR Description: putative epoxide hydrolase [Oryza sativa cultivar- group)] >gi|18071405|gb|AAL58264.1| putative epoxide
  misc_feature (1)..(82): Homolog of NCBI NO: 37535732 NR Description: putative epoxide hydrolase [Oryza sativa cultivar- group)] >gi|18071416|gb|AAL58275.1| putative epoxide
  misc_feature (1)..(72): Homolog of NCBI NO: 37535722 NR Description: putative epoxide hydrolase [Oryza sativa cultivar- group)] >gi|18071407|gb|AAL58266.1| putative epoxide
  misc_feature (1)..(61): Homolog of NCBI NO: 1354849 NR Description: epoxide hydrolase [Nicotiana tabacum]
  misc_feature (1)..(64): Homolog of NCBI NO: 15230367 NR Description: epoxide hydrolase-like protein; protein id: supported by cDNA: gi_13937212, supported by cDNA: gi_18491128
  misc_feature (1)..(61): Homolog of NCBI NO: 25044843 NR Description: epoxide hydrolase [Ananas comosus]
  misc_feature (1)..(62): Homolog of NCBI NO: 18411917 NR Description: coded for by A. thaliana cDNA T04215; protein id:
  misc_feature (1)..(62): Homolog of NCBI NO: 30683476 NR Description: epoxide hydrolase, putative [Arabidopsis thaliana]
  misc_feature (1)..(62): Homolog of NCBI NO: 25407540 NR Description: probable epoxide hydrolase [imported] - thaliana >gi|5302785|emb|CAB46034.1| putative epoxide hydrolase thaliana] >gi|7268344|emb|CAB78638.1| putative epoxide hydrolase
MRAVAAAGYRAIAPDCRGYGLSEQPPEHEEVSLDDLIADVLGILDALSVPKAFLVGKDFGAMPGVRVRAAAPGPHPRRGVPGHPLQPGPHVLRRHHARRILHPALARAGQGGGRLRPVRREAWCAPSTCSSPAPRSRLPRKGRRSWTWPTCPRPSRSGSPRRTWTPTPSSTRSPASGTRSRCRTDLCTSSRTGWTPSSRCRCSW

SEQ ID NO: 9334 - protein, 150 aa, Zea mays subsp. mays
  peptide (1)..(150): Ceres Seq. ID no. 12412489
  misc_feature (1)..(33): Homolog of NCBI NO: 37535728 NR Description: putative epoxide hydrolase [Oryza sativa cultivar- group)] >gi|18071422|gb|AAL58281.1| putative epoxide
  misc_feature (1)..(33): Homolog of NCBI NO: 37535722 NR Description: putative epoxide hydrolase [Oryza sativa cultivar- group)] >gi|18071407|gb|AAL58266.1| putative epoxide
  misc_feature (1)..(32): Homolog of NCBI NO: 1354849 NR Description: epoxide hydrolase [Nicotiana tabacum]
  misc_feature (1)..(33): Homolog of NCBI NO: 37535724 NR Description: putative epoxide hydrolase [Oryza sativa cultivar- group)] >gi|18071405|gb|AAL58264.1| putative epoxide
  misc_feature (1)..(33): Homolog of NCBI NO: 37535732 NR Description: putative epoxide hydrolase [Oryza sativa cultivar- group)] >gi|18071416|gb|AAL58275.1| putative epoxide
  misc_feature (1)..(30): Homolog of NCBI NO: 15230367 NR Description: epoxide hydrolase-like protein; protein id: supported by cDNA: gi_13937212, supported by cDNA: gi_18491128
  misc_feature (1)..(65): Homolog of NCBI NO: 18411917 NR Description: coded for by A. thaliana cDNA T04215; protein id:
MSFDAIMPEGFYILRWREPGRAEADFGRFDVRRGAHHLRALRRRRDPDCQGRAGDHGPGRPVHAPPGVVHRGGPGRLRQALREVRLRVPAQDAVQIYAQAPEPAGRQVPGAGVHGDGGEGLRVQVPGVRDRHARRGHGQLHAGPQDHLHP

SEQ ID NO: 9335 - DNA, 1462 bp, Zea mays subsp. mays
  misc_feature (1)..(1462): Ceres Seq. ID no. 12566755
  misc_feature: MA Experiment ID: 108515 Result: Up-regulated in Transcription
  misc_feature: MA Experiment 108515 PARAMETER Experiment Name: Zm_2mM_SA_P Parameter: Age (day) Value: 8
  misc_feature: MA Experiment 108515 PARAMETER Experiment Name: Zm_2mM_SA_P Parameter: Organism Value: Zea mays
  misc_feature: MA Experiment 108515 PARAMETER Experiment Name: Zm_2mM_SA_P Parameter: Plant Line Value: 35A19
  misc_feature: MA Experiment 108515 PARAMETER Experiment Name: Zm_2mM_SA_P Parameter: Timepoint (hr) Value: 12
  misc_feature: MA Experiment 108515 PARAMETER Experiment Name: Zm_2mM_SA_P Parameter: Tissue Value: Aerial
  misc_feature: MA Experiment 108515 PARAMETER Experiment Name: Zm_2mM_SA_P Parameter: Treatment Value: 2mM SA vs. No Treatment
  misc_feature: MA Experiment ID: 108527 Result: Up-regulated in Transcription
  misc_feature: MA Experiment 108527 PARAMETER Experiment Name: Zm_5mM_NO_P Parameter: Age (day) Value: 8
  misc_feature: MA Experiment 108527 PARAMETER Experiment Name: Zm_5mM_NO_P Parameter: Organism Value: Zea mays
  misc_feature: MA Experiment 108527 PARAMETER Experiment Name: Zm_5mM_NO_P Parameter: Plant Line Value: 35A19
  misc_feature: MA Experiment 108527 PARAMETER Experiment Name: Zm_5mM_NO_P Parameter: Timepoint (hr) Value: 6
  misc_feature: MA Experiment 108527 PARAMETER Experiment Name: Zm_5mM_NO_P Parameter: Tissue Value: Aerial
  misc_feature: MA Experiment 108527 PARAMETER Experiment Name: Zm_5mM_NO_P Parameter: Treatment Value: 5mM NO vs. No Treatment
  misc_feature: MA Experiment ID: 108529 Result: Up-regulated in Transcription
  misc_feature: MA Experiment 108529 PARAMETER Experiment Name: Zm_Imbibed_Seeds_P Parameter: Age (day) Value: 5 vs. 2
  misc_feature: MA Experiment 108529 PARAMETER Experiment Name: Zm_Imbibed_Seeds_P Parameter: Organism Value: Zea mays
  misc_feature: MA Experiment 108529 PARAMETER Experiment Name: Zm_Imbibed_Seeds_P Parameter: Plant Line Value: 35A19
  misc_feature: MA Experiment 108529 PARAMETER Experiment Name: Zm_Imbibed_Seeds_P Parameter: Tissue Value: Roots vs. Embryo
  misc_feature: MA Experiment ID: 108534 Result: Up-regulated in Transcription
  misc_feature: MA Experiment 108534 PARAMETER Experiment Name: Zm_4deg_Cold_P Parameter: Age (hr) Value: 8
  misc_feature: MA Experiment 108534 PARAMETER Experiment Name: Zm_4deg_Cold_P Parameter: Organism Value: Zea mays
  misc_feature: MA Experiment 108534 PARAMETER Experiment Name: Zm_4deg_Cold_P Parameter: Plant Line Value: 35A19
  misc_feature: MA Experiment 108534 PARAMETER Experiment Name: Zm_4deg_Cold_P Parameter: Temperature (deg C) Value: 4 vs. 22
  misc_feature: MA Experiment 108534 PARAMETER Experiment Name: Zm_4deg_Cold_P Parameter: Timepoint (hr) Value: 6
  misc_feature: MA Experiment 108534 PARAMETER Experiment Name: Zm_4deg_Cold_P Parameter: Tissue Value: Aerial
  misc_feature: MA Experiment ID: 108535 Result: Down-regulated in Transcription
  misc_feature: MA Experiment 108535 PARAMETER Experiment Name: Zm_Meristem_P Parameter: Age (day) Value: 8
  misc_feature: MA Experiment 108535 PARAMETER Experiment Name: Zm_Meristem_P Parameter: Organism Value: Zea mays
  misc_feature: MA Experiment 108535 PARAMETER Experiment Name: Zm_Meristem_P Parameter: Plant Line Value: 35A19
  misc_feature: MA Experiment 108535 PARAMETER Experiment Name: Zm_Meristem_P Parameter: Tissue Value: Root Meristem vs. Above Root Meristem
  misc_feature: MA Experiment ID: 108548 Result: Up-regulated in Transcription
  misc_feature: MA Experiment 108548 PARAMETER Experiment Name: Zm_20uM_KNO3_H-to-L_P Parameter: Age (day) Value: 11
  misc_feature: MA Experiment 108548 PARAMETER Experiment Name: Zm_20uM_KNO3_H-to-L_P Parameter: Organism Value: Zea mays
  misc_feature: MA Experiment 108548 PARAMETER Experiment Name: Zm_20uM_KNO3_H-to-L_P Parameter: Plant Line Value: 35A19
  misc_feature: MA Experiment 108548 PARAMETER Experiment Name: Zm_20uM_KNO3_H-to-L_P Parameter: Timepoint (hr) Value: 4
  misc_feature: MA Experiment 108548 PARAMETER Experiment Name: Zm_20uM_KNO3_H-to-L_P Parameter: Tissue Value: Roots
  misc_feature: MA Experiment 108548 PARAMETER Experiment Name: Zm_20uM_KNO3_H-to-L_P Parameter: Treatment Value: 20uM KNO3 vs. 60mM KNO3
  misc_feature: MA Experiment ID: 20000477 Result: Up-regulated in Transcription
  misc_feature: MA Experiment 20000477 PARAMETER Experiment Name: Zm_5mM_SA_P Parameter: Age (day) Value: 10
  misc_feature: MA Experiment 20000477 PARAMETER Experiment Name: Zm_5mM_SA_P Parameter: Organism Value: Zea mays
  misc_feature: MA Experiment 20000477 PARAMETER Experiment Name: Zm_5mM_SA_P Parameter: Plant Line Value: 35A19
  misc_feature: MA Experiment 20000477 PARAMETER Experiment Name: Zm_5mM_SA_P Parameter: Timepoint (hr) Value: 48
  misc_feature: MA Experiment 20000477 PARAMETER Experiment Name: Zm_5mM_SA_P Parameter: Tissue Value: Aerial
  misc_feature: MA Experiment 20000477 PARAMETER Experiment Name: Zm_5mM_SA_P Parameter: Treatment Value: 5mM SA vs. No Treatment
  misc_feature: MA Experiment ID: 20000478 Result: Up-regulated in Transcription
  misc_feature: MA Experiment 20000478 PARAMETER Experiment Name: Zm_5mM_SA_P Parameter: Age (day) Value: 11
  misc_feature: MA Experiment 20000478 PARAMETER Experiment Name: Zm_5mM_SA_P Parameter: Organism Value: Zea mays
  misc_feature: MA Experiment 20000478 PARAMETER Experiment Name: Zm_5mM_SA_P Parameter: Plant Line Value: 35A19
  misc_feature: MA Experiment 20000478 PARAMETER Experiment Name: Zm_5mM_SA_P Parameter: Timepoint (hr) Value: 72
  misc_feature: MA Experiment 20000478 PARAMETER Experiment Name: Zm_5mM_SA_P Parameter: Tissue Value: Aerial
  misc_feature: MA Experiment 20000478 PARAMETER Experiment Name: Zm_5mM_SA_P Parameter: Treatment Value: 5mM SA vs. No Treatment
  misc_feature: MA Experiment ID: 20000479 Result: Up-regulated in Transcription
  misc_feature: MA Experiment 20000479 PARAMETER Experiment Name: Zm_Drought_P Parameter: Age (day) Value: 10
  misc_feature: MA Experiment 20000479 PARAMETER Experiment Name: Zm_Drought_P Parameter: Organism Value: Zea mays
  misc_feature: MA Experiment 20000479 PARAMETER Experiment Name: Zm_Drought_P Parameter: Plant Line Value: 35A19
  misc_feature: MA Experiment 20000479 PARAMETER Experiment Name: Zm_Drought_P Parameter: Timepoint (hr) Value: 48
  misc_feature: MA Experiment 20000479 PARAMETER Experiment Name: Zm_Drought_P Parameter: Tissue Value: Aerial
  misc_feature: MA Experiment 20000479 PARAMETER Experiment Name: Zm_Drought_P Parameter: Treatment Value: Drought vs. No Drought
  misc_feature: MA Experiment ID: 20000480 Result: Up-regulated in Transcription
  misc_feature: MA Experiment 20000480 PARAMETER Experiment Name: Zm_Drought_P Parameter: Age (day) Value: 11
  misc_feature: MA Experiment 20000480 PARAMETER Experiment Name: Zm_Drought_P Parameter: Organism Value: Zea mays
  misc_feature: MA Experiment 20000480 PARAMETER Experiment Name: Zm_Drought_P Parameter: Plant Line Value: 35A19
  misc_feature: MA Experiment 20000480 PARAMETER Experiment Name: Zm_Drought_P Parameter: Timepoint (hr) Value: 72
  misc_feature: MA Experiment 20000480 PARAMETER Experiment Name: Zm_Drought_P Parameter: Tissue Value: Aerial
  misc_feature: MA Experiment 20000480 PARAMETER Experiment Name: Zm_Drought_P Parameter: Treatment Value: Drought vs. No Drought
  misc_feature: MA Experiment ID: 20000533 Result: Up-regulated in Transcription
  misc_feature: MA Experiment 20000533 PARAMETER Experiment Name: Zm_0.001percent_MeJA_P Parameter: Age (day) Value: 11
  misc_feature: MA Experiment 20000533 PARAMETER Experiment Name: Zm_0.001percent_MeJA_P Parameter: Organism Value: Zea mays
  misc_feature: MA Experiment 20000533 PARAMETER Experiment Name: Zm_0.001percent_MeJA_P Parameter: Plant Line Value: 35A19
  misc_feature: MA Experiment 20000533 PARAMETER Experiment Name: Zm_0.001percent_MeJA_P Parameter: Timepoint (hr) Value: 72
  misc_feature: MA Experiment 20000533 PARAMETER Experiment Name: Zm_0.001percent_MeJA_P Parameter: Tissue Value: Aerial
  misc_feature: MA Experiment 20000533 PARAMETER Experiment Name: Zm_0.001percent_MeJA_P Parameter: Treatment Value: 0.001percent MeJA vs. No Treatment
  misc_feature: MA Experiment ID: 20000626 Result: Up-regulated in Transcription
  misc_feature: MA Experiment 20000626 PARAMETER Experiment Name: Zm_Herbicide-Treatments_P Parameter: Timepoint (hr) Value: 12
  misc_feature: MA Experiment 20000626 PARAMETER Experiment Name: Zm_Herbicide-Treatments_P Parameter: Tissue Value: Aerial
  misc_feature: MA Experiment 20000626 PARAMETER Experiment Name: Zm_Herbicide-Treatments_P Parameter: Treatment Value: Roundup vs. No Treatment
  misc_feature: MA Experiment ID: 20001610 Result: Down-regulated in Transcription
  misc_feature: MA Experiment 20001610 PARAMETER Experiment Name: Zm_50ppm_KNO3_L-to-H_P Parameter: Age (day) Value: 19
  misc_feature: MA Experiment 20001610 PARAMETER Experiment Name: Zm_50ppm_KNO3_L-to-H_P Parameter: Organism Value: Zea mays
  misc_feature: MA Experiment 20001610 PARAMETER Experiment Name: Zm_50ppm_KNO3_L-to-H_P Parameter: Plant Line Value: 35A19
  misc_feature: MA Experiment 20001610 PARAMETER Experiment Name: Zm_50ppm_KNO3_L-to-H_P Parameter: Timepoint (hr) Value: 2
  misc_feature: MA Experiment 20001610 PARAMETER Experiment Name: Zm_50ppm_KNO3_L-to-H_P Parameter: Tissue Value: Roots
  misc_feature: MA Experiment 20001610 PARAMETER Experiment Name: Zm_50ppm_KNO3_L-to-H_P Parameter: Treatment Value: 50ppm KNO3 vs. 50ppm KCl
  misc_feature: MA Experiment ID: 20001613 Result: Down-regulated in Transcription
  misc_feature: MA Experiment 20001613 PARAMETER Experiment Name: Zm_50ppm_KNO3_L-to-H_P Parameter: Age (day) Value: 20
  misc_feature: MA Experiment 20001613 PARAMETER Experiment Name: Zm_50ppm_KNO3_L-to-H_P Parameter: Organism Value: Zea mays
  misc_feature: MA Experiment 20001613 PARAMETER Experiment Name: Zm_50ppm_KNO3_L-to-H_P Parameter: Plant Line Value: 35A19
  misc_feature: MA Experiment 20001613 PARAMETER Experiment Name: Zm_50ppm_KNO3_L-to-H_P Parameter: Timepoint (hr) Value: 24
  misc_feature: MA Experiment 20001613 PARAMETER Experiment Name: Zm_50ppm_KNO3_L-to-H_P Parameter: Tissue Value: Roots
  misc_feature: MA Experiment 20001613 PARAMETER Experiment Name: Zm_50ppm_KNO3_L-to-H_P Parameter: Treatment Value: 50ppm KNO3 vs. 50ppm KCl
aaaaagttcagcaacaacaacaacacaaatcatcggttccgttccgtcgcagaaatagaaaaaaggctttcttgtcccacagggcagggagaccgagagagcagtctagtgattagttgatcaccagacgtccagacaccatgagctcccgcatggctggagcagcgcttctgcgccacctaggcccgcgcctgttcgcggccgggcctgcggtgtccgggctcaccgcgaggggcggcatgcccgcggccgcgaggcttctccccgcgcggatggccagcaccgccgcggaggctgccagagaggacgccggtgcaaataaacggcacggcggcaccgagaagcatgagggaggaggcagcaggcgggcagagcaagaaggccgtcgtcagctactggggcatcgacacgcccaagctcgtgaaggaagacggcacggagtggaagtggaccagcttccggccgtgggacgcgtacacgtcggacacgtccatcgacatagggaagcaccacgcgccgacgacgctgcccgacaaggcggcgtacctgatcgtcaagtcgctgcacgtgccccatggacctcttcttccagcgccggcacgccagccacgcgctgctgctcgagacggtggcggccgtgccgggcatggtgggcggcatgctcctccacctgcgctcgctccgccgcttcgagcacagcggcggctggatccgcgcgctgctcgaggaggccgagaacgagcgcatgcacctcatgacgttcctcgaggtcacgcagccgcgctggtgggagcgcgcgctcgtgctcaccgcgcagggcgtcttcttcaacgcctacttcgtcggctacctcctctcccccaagttcgcgcaccgcgtcgtcggctacctccgaggaggaggcagtgcactcgtacaccgagtacctcaaggacctcgaggccggcatcatcgacaacaccccggcgccggccatcgccatcgactactggcgcctccccgccgacgccaagctcaaggacgtcgtcaccgtcgtgcgcgccgacgaggcgcaccaccgcgacgtcaaccacttcgcgtcggtacgcactctgcaccttgcaacaggattcattgctgtgagcaatctccagcagttctagctaattcattggtttatgtttgcttaatggagtacattattttgcaggacatccattaccaggggatgaagctcaaggacacgcccgcaccgctcagttatcactgacaagtaggcgttgcctgcctgctgctcaattcagagttcttacacgttagactgtcattggtcttaatatgttgttgtgctagccaaagttgcttagcagatcaagactggtttgctactcggaggtgaactagttgcctatatggtttgtacgtaccagtatattgtagatatttgaaataacaaatataagaatccggtgtgatgttactt

SEQ ID NO: 9336 - protein, 258 aa, Zea mays subsp. mays
  peptide (1)..(258): Ceres Seq. ID no. 12566756
  misc_feature (3)..(76): Pfam Name: Alternative oxidase Pfam Description: Alternative oxidase
  misc_feature (1)..(76): Homolog of NCBI NO: 25989201 NR Description: alternative oxidase AOX3 precursor [Zea mays]
  misc_feature (5)..(76): Homolog of NCBI NO: 3218543 NR Description: alternative oxidase [Oryza sativa (japonica >gi|3218548|dbj|BAA28774.1| alternative oxidase [Oryza sativa
  misc_feature (1)..(76): Homolog of NCBI NO: 19912727 NR Description: alternative oxidase [Triticum aestivum]
  misc_feature (1)..(76): Homolog of NCBI NO: 25989199 NR Description: alternative oxidase AOX2 precursor [Zea mays]
  misc_feature (1)..(76): Homolog of NCBI NO: 3218544 NR Description: alternative oxidase [Oryza sativa (japonica >gi|3218546|dbj|BAA28773.1| alternative oxidase [Oryza sativa
  misc_feature (1)..(76): Homolog of NCBI NO: 19912725 NR Description: alternative oxidase [Triticum aestivum]
  misc_feature (2)..(76): Homolog of NCBI NO: 5802557 NR Description: alternative oxidase [Triticum aestivum]
  misc_feature (1)..(76): Homolog of NCBI NO: 113982 NR Description: Alternative oxidase, mitochondrial precursor
  misc_feature (1)..(76): Homolog of NCBI NO: 25989197 NR Description: alternative oxidase AOX1 precursor [Zea mays]
  misc_feature (1)..(76): Homolog of NCBI NO: 419792 NR Description: alternative respiratory pathway oxidase (EC
MREEAAGGQSKKAVVSYWGIDTPKLVKEDGTEWKWTSFRPWDAYTSDTSIDIGKHHAPTTLPDKAAYLIVKSLHVPHGPLLPAPARQPRAAARDGGGRAGHGGRHAPPPALAPPLRAQRRLDPRAARGGRERAHAPHDVPRGHAAALVGARARAHRAGRLLQRLLRRLPPLPQVRAPRRRLPPRRRQCTRTPSTSRTSRPASSTTPRRRPSPSTTGASPPTPSSRTSSPSCAPTRRTTATSTTSRRYALCTLQQDSLL

SEQ ID NO: 9337 - protein, 224 aa, Zea mays subsp. mays
  peptide (1)..(224): Ceres Seq. ID no. 12566757
  misc_feature (1)..(106): Pfam Name: Alternative oxidase Pfam Description: Alternative oxidase
  misc_feature (1)..(106): Homolog of NCBI NO: 25989201 NR Description: alternative oxidase AOX3 precursor [Zea mays]
  misc_feature (206)..(224): Homolog of NCBI NO: 25989201 NR Description: alternative oxidase AOX3 precursor [Zea mays]
  misc_feature (1)..(106): Homolog of NCBI NO: 3218543 NR Description: alternative oxidase [Oryza sativa (japonica >gi|3218548|dbj|BAA28774.1| alternative oxidase [Oryza sativa
  misc_feature (206)..(224): Homolog of NCBI NO: 3218543 NR Description: alternative oxidase [Oryza sativa (japonica >gi|3218548|dbj|BAA28774.1| alternative oxidase [Oryza sativa
  misc_feature (1)..(106): Homolog of NCBI NO: 19912727 NR Description: alternative oxidase [Triticum aestivum]
  misc_feature (206)..(224): Homolog of NCBI NO: 19912727 NR Description: alternative oxidase [Triticum aestivum]
  misc_feature (1)..(106): Homolog of NCBI NO: 25989199 NR Description: alternative oxidase AOX2 precursor [Zea mays]
  misc_feature (206)..(224): Homolog of NCBI NO: 25989199 NR Description: alternative oxidase AOX2 precursor [Zea mays]
  misc_feature (1)..(106): Homolog of NCBI NO: 3218544 NR Description: alternative oxidase [Oryza sativa (japonica >gi|3218546|dbj|BAA28773.1| alternative oxidase [Oryza sativa
  misc_feature (206)..(224): Homolog of NCBI NO: 3218544 NR Description: alternative oxidase [Oryza sativa (japonica >gi|3218546|dbj|BAA28773.1| alternative oxidase [Oryza sativa
MDLFFQRRHASHALLLETVAAVPGMVGGMLLHLRSLRRFEHSGGWIRALLEEAENERMHLMTFLEVTQPRWWERALVLTAQGVFFNAYFVGYLLSPKFAHRVVGYLRGGGSALVHRVPQGPRGRHHRQHPGAGHRHRLLAPPRRRQAQGRRHRRARRRGAPPRRQPLRVGTHSAPCNRIHCCEQSPAVLANSLVYVCLMEYIILQDIHYQGMKLKDTPAPLSYH

SEQ ID NO: 9338 - protein, 205 aa, Zea mays subsp. mays
  peptide (1)..(205): Ceres Seq. ID no. 12566758
  misc_feature (1)..(68): Homolog of NCBI NO: 3218543 NR Description: alternative oxidase [Oryza sativa (japonica >gi|3218548|dbj|BAA28774.1| alternative oxidase [Oryza sativa
  misc_feature (1)..(77): Homolog of NCBI NO: 25989201 NR Description: alternative oxidase AOX3 precursor [Zea mays]
  misc_feature (1)..(61): Homolog of NCBI NO: 19912727 NR Description: alternative oxidase [Triticum aestivum]
  misc_feature (1)..(81): Homolog of NCBI NO: 25989197 NR Description: alternative oxidase AOX1 precursor [Zea mays]
MSSRMAGAALLRHLGPRLFAAGPAVSGLTARGGMPAAARLLPARMASTAAEAAREDAGANKRHGGTEKHEGGGSRRAEQEGRRQLLGHRHAQAREGRRHGVEVDQLPAVGRVHVGHVHRHREAPRADDAARQGGVPDRQVAARAPWTSSSSAGTPATRCCSRRWRPCRAWWAACSSTCARSAASSTAAAGSARCSRRPRTSACTS

SEQ ID NO: 9339 - DNA, 1610 bp, Zea mays subsp. mays
  misc_feature (1)..(1610): Ceres Seq. ID no. 12413404
  misc_feature: MA Experiment ID: 108504 Result: Down-regulated in Transcription
  misc_feature: MA Experiment 108504 PARAMETER Experiment Name: Zm_Drought_P Parameter: Age (day) Value: 8
  misc_feature: MA Experiment 108504 PARAMETER Experiment Name: Zm_Drought_P Parameter: Organism Value: Zea mays
  misc_feature: MA Experiment 108504 PARAMETER Experiment Name: Zm_Drought_P Parameter: Plant Line Value: 35A19
  misc_feature: MA Experiment 108504 PARAMETER Experiment Name: Zm_Drought_P Parameter: Timepoint (hr) Value: 12
  misc_feature: MA Experiment 108504 PARAMETER Experiment Name: Zm_Drought_P Parameter: Tissue Value: Aerial
  misc_feature: MA Experiment 108504 PARAMETER Experiment Name: Zm_Drought_P Parameter: Treatment Value: Drought vs. No Drought
  misc_feature: MA Experiment ID: 108522 Result: Down-regulated in Transcription
  misc_feature: MA Experiment 108522 PARAMETER Experiment Name: Zm_42deg_Heat_P Parameter: Age (day) Value: 8
  misc_feature: MA Experiment 108522 PARAMETER Experiment Name: Zm_42deg_Heat_P Parameter: Organism Value: Zea mays
  misc_feature: MA Experiment 108522 PARAMETER Experiment Name: Zm_42deg_Heat_P Parameter: Plant Line Value: 35A19
  misc_feature: MA Experiment 108522 PARAMETER Experiment Name: Zm_42deg_Heat_P Parameter: Temperature (deg C) Value: 42 vs. 22
  misc_feature: MA Experiment 108522 PARAMETER Experiment Name: Zm_42deg_Heat_P Parameter: Timepoint (hr) Value: 1
  misc_feature: MA Experiment 108522 PARAMETER Experiment Name: Zm_42deg_Heat_P Parameter: Tissue Value: Aerial
  misc_feature: MA Experiment ID: 108523 Result: Up-regulated in Transcription
  misc_feature: MA Experiment 108523 PARAMETER Experiment Name: Zm_42deg_Heat_P Parameter: Age (day) Value: 8
  misc_feature: MA Experiment 108523 PARAMETER Experiment Name: Zm_42deg_Heat_P Parameter: Organism Value: Zea mays
  misc_feature: MA Experiment 108523 PARAMETER Experiment Name: Zm_42deg_Heat_P Parameter: Plant Line Value: 35A19
  misc_feature: MA Experiment 108523 PARAMETER Experiment Name: Zm_42deg_Heat_P Parameter: Temperature (deg C) Value: 42 vs. 22
  misc_feature: MA Experiment 108523 PARAMETER Experiment Name: Zm_42deg_Heat_P Parameter: Timepoint (hr) Value: 6
  misc_feature: MA Experiment 108523 PARAMETER Experiment Name: Zm_42deg_Heat_P Parameter: Tissue Value: Aerial
  misc_feature: MA Experiment ID: 108528 Result: Up-regulated in Transcription
  misc_feature: MA Experiment 108528 PARAMETER Experiment Name: Zm_Imbibed_Seeds_P Parameter: Age (day) Value: 5 vs. 2
  misc_feature: MA Experiment 108528 PARAMETER Experiment Name: Zm_Imbibed_Seeds_P Parameter: Organism Value: Zea mays
  misc_feature: MA Experiment 108528 PARAMETER Experiment Name: Zm_Imbibed_Seeds_P Parameter: Plant Line Value: 35A19
  misc_feature: MA Experiment 108528 PARAMETER Experiment Name: Zm_Imbibed_Seeds_P Parameter: Tissue Value: Aerial vs. Embryo
  misc_feature: MA Experiment ID: 108530 Result: Up-regulated in Transcription
  misc_feature: MA Experiment 108530 PARAMETER Experiment Name: Zm_Imbibed_Seeds_P Parameter: Age (day) Value: 6 vs. 2
  misc_feature: MA Experiment 108530 PARAMETER Experiment Name: Zm_Imbibed_Seeds_P Parameter: Organism Value: Zea mays
  misc_feature: MA Experiment 108530 PARAMETER Experiment Name: Zm_Imbibed_Seeds_P Parameter: Plant Line Value: 35A19
  misc_feature: MA Experiment 108530 PARAMETER Experiment Name: Zm_Imbibed_Seeds_P Parameter: Tissue Value: Aerial vs. Embryo
  misc_feature: MA Experiment ID: 108534 Result: Up-regulated in Transcription
  misc_feature: MA Experiment 108534 PARAMETER Experiment Name: Zm_4deg_Cold_P Parameter: Age (hr) Value: 8
  misc_feature: MA Experiment 108534 PARAMETER Experiment Name: Zm_4deg_Cold_P Parameter: Organism Value: Zea mays
  misc_feature: MA Experiment 108534 PARAMETER Experiment Name: Zm_4deg_Cold_P Parameter: Plant Line Value: 35A19
  misc_feature: MA Experiment 108534 PARAMETER Experiment Name: Zm_4deg_Cold_P Parameter: Temperature (deg C) Value: 4 vs. 22
  misc_feature: MA Experiment 108534 PARAMETER Experiment Name: Zm_4deg_Cold_P Parameter: Timepoint (hr) Value: 6
  misc_feature: MA Experiment 108534 PARAMETER Experiment Name: Zm_4deg_Cold_P Parameter: Tissue Value: Aerial
  misc_feature: MA Experiment ID: 108536 Result: Down-regulated in Transcription
  misc_feature: MA Experiment 108536 PARAMETER Experiment Name: Zm_Meristem_P Parameter: Age (day) Value: 8
  misc_feature: MA Experiment 108536 PARAMETER Experiment Name: Zm_Meristem_P Parameter: Organism Value: Zea mays
  misc_feature: MA Experiment 108536 PARAMETER Experiment Name: Zm_Meristem_P Parameter: Plant Line Value: 35A19
  misc_feature: MA Experiment 108536 PARAMETER Experiment Name: Zm_Meristem_P Parameter: Tissue Value: Shoot Meristem vs. Above Shoot Meristem
  misc_feature: MA Experiment ID: 108540 Result: Down-regulated in Transcription
  misc_feature: MA Experiment 108540 PARAMETER Experiment Name: Zm_20percent_PEG_P Parameter: Age (day) Value: 8
  misc_feature: MA Experiment 108540 PARAMETER Experiment Name: Zm_20percent_PEG_P Parameter: Organism Value: Zea mays
  misc_feature: MA Experiment 108540 PARAMETER Experiment Name: Zm_20percent_PEG_P Parameter: Plant Line Value: 35A19
  misc_feature: MA Experiment 108540 PARAMETER Experiment Name: Zm_20percent_PEG_P Parameter: Timepoint (hr) Value: 6
  misc_feature: MA Experiment 108540 PARAMETER Experiment Name: Zm_20percent_PEG_P Parameter: Tissue Value: Aerial
  misc_feature: MA Experiment 108540 PARAMETER Experiment Name: Zm_20percent_PEG_P Parameter: Treatment Value: 20percent PEG vs. No Treatment
  misc_feature: MA Experiment ID: 108543 Result: Down-regulated in Transcription
  misc_feature: MA Experiment ID: 108544 Result: Down-regulated in Transcription
  misc_feature: MA Experiment ID: 108545 Result: Up-regulated in Transcription
  misc_feature: MA Experiment 108545 PARAMETER Experiment Name: Zm_Imbibed_Seeds_P Parameter: Age (day) Value: 3 vs. 2
  misc_feature: MA Experiment 108545 PARAMETER Experiment Name: Zm_Imbibed_Seeds_P Parameter: Organism Value: Zea mays
  misc_feature: MA Experiment 108545 PARAMETER Experiment Name: Zm_Imbibed_Seeds_P Parameter: Plant Line Value: 35A19
  misc_feature: MA Experiment 108545 PARAMETER Experiment Name: Zm_Imbibed_Seeds_P Parameter: Tissue Value: Aerial vs. Embryo
  misc_feature: MA Experiment ID: 108547 Result: Up-regulated in Transcription
  misc_feature: MA Experiment 108547 PARAMETER Experiment Name: Zm_Imbibed_Seeds_P Parameter: Age (day) Value: 4 vs. 2
  misc_feature: MA Experiment 108547 PARAMETER Experiment Name: Zm_Imbibed_Seeds_P Parameter: Organism Value: Zea mays
  misc_feature: MA Experiment 108547 PARAMETER Experiment Name: Zm_Imbibed_Seeds_P Parameter: Plant Line Value: 35A19
  misc_feature: MA Experiment 108547 PARAMETER Experiment Name: Zm_Imbibed_Seeds_P Parameter: Tissue Value: Aerial vs. Embryo
  misc_feature: MA Experiment ID: 108556 Result: Down-regulated in Transcription
  misc_feature: MA Experiment 108556 PARAMETER Experiment Name: Zm_Drought_P Parameter: Age (day) Value: 9
  misc_feature: MA Experiment 108556 PARAMETER Experiment Name: Zm_Drought_P Parameter: Organism Value: Zea mays
  misc_feature: MA Experiment 108556 PARAMETER Experiment Name: Zm_Drought_P Parameter: Plant Line Value: 35A19
  misc_feature: MA Experiment 108556 PARAMETER Experiment Name: Zm_Drought_P Parameter: Timepoint (hr) Value: 24
  misc_feature: MA Experiment 108556 PARAMETER Experiment Name: Zm_Drought_P Parameter: Tissue Value: Aerial
  misc_feature: MA Experiment 108556 PARAMETER Experiment Name: Zm_Drought_P Parameter: Treatment Value: Drought vs. No Drought
  misc_feature: MA Experiment ID: 108559 Result: Down-regulated in Transcription
  misc_feature: MA Experiment 108559 PARAMETER Experiment Name: Zm_5mM_NO_P Parameter: Age (day) Value: 8
  misc_feature: MA Experiment 108559 PARAMETER Experiment Name: Zm_5mM_NO_P Parameter: Organism Value: Zea mays
  misc_feature: MA Experiment 108559 PARAMETER Experiment Name: Zm_5mM_NO_P Parameter: Plant Line Value: 35A19
  misc_feature: MA Experiment 108559 PARAMETER Experiment Name: Zm_5mM_NO_P Parameter: Timepoint (hr) Value: 12
  misc_feature: MA Experiment 108559 PARAMETER Experiment Name: Zm_5mM_NO_P Parameter: Tissue Value: Aerial
  misc_feature: MA Experiment 108559 PARAMETER Experiment Name: Zm_5mM_NO_P Parameter: Treatment Value: 5mM NO vs. No Treatment
  misc_feature: MA Experiment ID: 20000478 Result: Down-regulated in Transcription
  misc_feature: MA Experiment 20000478 PARAMETER Experiment Name: Zm_5mM_SA_P Parameter: Age (day) Value: 11
  misc_feature: MA Experiment 20000478 PARAMETER Experiment Name: Zm_5mM_SA_P Parameter: Organism Value: Zea mays
  misc_feature: MA Experiment 20000478 PARAMETER Experiment Name: Zm_5mM_SA_P Parameter: Plant Line Value: 35A19
  misc_feature: MA Experiment 20000478 PARAMETER Experiment Name: Zm_5mM_SA_P Parameter: Timepoint (hr) Value: 72
  misc_feature: MA Experiment 20000478 PARAMETER Experiment Name: Zm_5mM_SA_P Parameter: Tissue Value: Aerial
  misc_feature: MA Experiment 20000478 PARAMETER Experiment Name: Zm_5mM_SA_P Parameter: Treatment Value: 5mM SA vs. No Treatment
  misc_feature: MA Experiment ID: 20000479 Result: Down-regulated in Transcription
  misc_feature: MA Experiment 20000479 PARAMETER Experiment Name: Zm_Drought_P Parameter: Age (day) Value: 10
  misc_feature: MA Experiment 20000479 PARAMETER Experiment Name: Zm_Drought_P Parameter: Organism Value: Zea mays
  misc_feature: MA Experiment 20000479 PARAMETER Experiment Name: Zm_Drought_P Parameter: Plant Line Value: 35A19
  misc_feature: MA Experiment 20000479 PARAMETER Experiment Name: Zm_Drought_P Parameter: Timepoint (hr) Value: 48
  misc_feature: MA Experiment 20000479 PARAMETER Experiment Name: Zm_Drought_P Parameter: Tissue Value: Aerial
  misc_feature: MA Experiment 20000479 PARAMETER Experiment Name: Zm_Drought_P Parameter: Treatment Value: Drought vs. No Drought
  misc_feature: MA Experiment ID: 20000492 Result: Up-regulated in Transcription
  misc_feature: MA Experiment 20000492 PARAMETER Experiment Name: Zm_Hybrid_Seed_Dev_P Parameter: DAP Value: 12
  misc_feature: MA Experiment 20000492 PARAMETER Experiment Name: Zm_Hybrid_Seed_Dev_P Parameter: Organism Value: Zea mays
  misc_feature: MA Experiment 20000492 PARAMETER Experiment Name: Zm_Hybrid_Seed_Dev_P Parameter: Plant Line Value: 35A19
  misc_feature: MA Experiment 20000492 PARAMETER Experiment Name: Zm_Hybrid_Seed_Dev_P Parameter: Tissue Value: Fert Kernel vs. Unfert Floret
atcagacaagagacacacacacaccacacgcagtcacgcacagcctcggcctccgcagctgcaggcgcctgctgctcttcgacaagaccccaagaactcgccaacctaacctaggtcagccacccttccttctaccttctgcgacaatgcaggccgccgccgcctccgtcaagtcctccaccaccgcggccgcggccgcggccacctgcaaggcgggcttcaagcccctgcacctccctcccctccccgccgccggctccaggccgctgtccctctccgtctccgcgcgtccgctgtaccgccaagaccatgtcctcgcgacaaccgtggcgatggcggcggcgggccgcagcgaccgcgccgcgtcccccgcgcctccgtccgccacagcggacggcgcccggccggtggtggaggtcgccgcgccggcggagaccgcgcgccgcgccaagatcggggtgtacttcgccacgtggtgggcgctgaacgtgatcttcaacatctacaacaagaaggtgctgaacgcgttcccgtacccgtggctcacgtcgacgctgtccctcgccgccggctccgccatcatgctcgcgtcctgggccaccaggatcgccgaggcgccccagacggacctcgacttctggaaggcgctcactcccgttgcgatcgcgcacacgatcgggcacgtcgcggcgacggtgagcatggccaaggtggccgtgtcgttcacgcacatcatcaagagcggggagccggcattcagcgtgctcgtctccaggttcttcctcggcgagcacttcccggcgccggtctacttctccctcctcccgatcatcggtgggtgcgcgctcgccgccgtcaccgagctcaacttcaacatggttgggttcatgggggcaatgatctcgaacctggcgttcgtcgtccggaccatcttctccaagaaggggatgaagggcaagtccgtgagcgggatgaactactacgcctgcctctccatcatgtcgctggtgatcctcctccccttcgccgtcgccatggagggacccaagctctgggcggcgggctggcagcaagcagtcgccgagatcggccccaacttcgtctggtgggtggctgcgcagagcgtgttctaccacctgtacaaccaggtgtcgtacatgtcgctggacgagatctcgccgctcacgttctccatcggcaacaccatgaagaggatctccgtcatcgtcgcctccatcatcatcttccagacgcccgtccagcccatcaacgcgctcggagccgccatcgccatcctcggaaccttcatctactcccaggcaaagcagtaacgccttgcattaattggcgtctagatggcctgccctcatcagttcaccgcggatcagctcggtgctcgaagatgacagcttatgacctttgagaatgtctactaagaatcgccctttgtataatactactagatcctctcttttttgtattttctttcctaggactagcttccagtgttactgggctcatttcgtggtgtttctattatgactaagattagagagagaatgagagatggatccatctaaataaaggttccagattttttttcccctccc

SEQ ID NO: 9340 - protein, 442 aa, Zea mays subsp. mays
  peptide (1)..(442): Ceres Seq. ID no. 12413405
  misc_feature (160)..(285): Pfam Name: Integral membrane protein DUF6 Pfam Description: Integral membrane protein DUF6
  misc_feature (49)..(442): Homolog of NCBI NO: 28564755 NR Description: putative glucose-6-phosphate/phosphate-transloca
  misc_feature (78)..(441): Homolog of NCBI NO: 7489744 NR Description: glucose-6-phosphate/phosphate-translocator
  misc_feature (130)..(442): Homolog of NCBI NO: 18407336 NR Description: glucose-6-phosphate/phosphate-translocator putative; protein id: At1g61800.1, supported by cDNA:
  misc_feature (87)..(442): Homolog of NCBI NO: 14150753 NR Description: glucose-6-phosphate/phosphate translocator [Oryza
  misc_feature (142)..(442): Homolog of NCBI NO: 7488807 NR Description: glucose-6-phosphate/phosphate-translocator
  misc_feature (130)..(442): Homolog of NCBI NO: 14596173 NR Description: Similar to
  misc_feature (130)..(442): Homolog of NCBI NO: 9295277 NR Description: glucose-6P/phosphate translocator precursor
  misc_feature (130)..(442): Homolog of NCBI NO: 7484980 NR Description: glucose-6-phosphate/phosphate translocator
  misc_feature (80)..(441): Homolog of NCBI NO: 18423670 NR Description: glucose-6-phosphate/phosphate translocator; id: At5g54800.1, supported by cDNA: 26107., supported by cDNA: supported by cDNA: gi_7229674 [Arabidopsis thaliana]
  misc_feature (141)..(442): Homolog of NCBI NO: 7489258 NR Description: probable
QTRDTHTPHAVTHSLGLRSCRRLLLFDKTPRTRQPNLGQPPFLLPSATMQAAAASVKSSTTAAAAAATCKAGFKPLHLPPLPAAGSRPLSLSVSARPLYRQDHVLATTVAMAAAGRSDRAASPAPPSATADGARPVVEVAAPAETARRAKIGVYFATWWALNVIFNIYNKKVLNAFPYPWLTSTLSLAAGSAIMLASWATRIAEAPQTDLDFWKALTPVAIAHTIGHVAATVSMAKVAVSFTHIIKSGEPAFSVLVSRFFLGEHFPAPVYFSLLPIIGGCALAAVTELNFNMVGFMGAMISNLAFVVRTIFSKKGMKGKSVSGMNYYACLSIMSLVILLPFAVAMEGPKLWAAGWQQAVAEIGPNFVWWVAAQSVFYHLYNQVSYMSLDEISPLTFSIGNTMKRISVIVASIIIFQTPVQPINALGAAIAILGTFIYSQAKQ

SEQ ID NO: 9341 - protein, 394 aa, Zea mays subsp. mays
  peptide (1)..(394): Ceres Seq. ID no. 12413406
  misc_feature (112)..(237): Pfam Name: Integral membrane protein DUF6 Pfam Description: Integral membrane protein DUF6
  misc_feature (1)..(394): Homolog of NCBI NO: 28564755 NR Description: putative glucose-6-phosphate/phosphate-transloca
  misc_feature (30)..(393): Homolog of NCBI NO: 7489744 NR Description: glucose-6-phosphate/phosphate-translocator
  misc_feature (82)..(394): Homolog of NCBI NO: 18407336 NR Description: glucose-6-phosphate/phosphate-translocator putative; protein id: At1g61800.1, supported by cDNA:
  misc_feature (39)..(394): Homolog of NCBI NO: 14150753 NR Description: glucose-6-phosphate/phosphate translocator [Oryza
  misc_feature (94)..(394): Homolog of NCBI NO: 7488807 NR Description: glucose-6-phosphate/phosphate-translocator
  misc_feature (82)..(394): Homolog of NCBI NO: 14596173 NR Description: Similar to
  misc_feature (82)..(394): Homolog of NCBI NO: 9295277 NR Description: glucose-6P/phosphate translocator precursor
  misc_feature (82)..(394): Homolog of NCBI NO: 7484980 NR Description: glucose-6-phosphate/phosphate translocator
  misc_feature (32)..(393): Homolog of NCBI NO: 18423670 NR Description: glucose-6-phosphate/phosphate translocator; id: At5g54800.1, supported by cDNA: 26107., supported by cDNA: supported by cDNA: gi_7229674 [Arabidopsis thaliana]
  misc_feature (93)..(394): Homolog of NCBI NO: 7489258 NR Description: probable
MQAAAASVKSSTTAAAAAATCKAGFKPLHLPPLPAAGSRPLSLSVSARPLYRQDHVLATTVAMAAAGRSDRAASPAPPSATADGARPVVEVAAPAETARRAKIGVYFATWWALNVIFNIYNKKVLNAFPYPWLTSTLSLAAGSAIMLASWATRIAEAPQTDLDFWKALTPVAIAHTIGHVAATVSMAKVAVSFTHIIKSGEPAFSVLVSRFFLGEHFPAPVYFSLLPIIGGCALAAVTELNFNMVGFMGAMISNLAFVVRTIFSKKGMKGKSVSGMNYYACLSIMSLVILLPFAVAMEGPKLWAAGWQQAVAEIGPNFVWWVAAQSVFYHLYNQVSYMSLDEISPLTFSIGNTMKRISVIVASIIIFQTPVQPINALGAAIAILGTFIYSQAKQ

SEQ ID NO: 9342 - protein, 332 aa, Zea mays subsp. mays
  peptide (1)..(332): Ceres Seq. ID no. 12413407
  misc_feature (50)..(175): Pfam Name: Integral membrane protein DUF6 Pfam Description: Integral membrane protein DUF6
  misc_feature (1)..(332): Homolog of NCBI NO: 28564755 NR Description: putative glucose-6-phosphate/phosphate-transloca
  misc_feature (1)..(331): Homolog of NCBI NO: 7489744 NR Description: glucose-6-phosphate/phosphate-translocator
  misc_feature (20)..(332): Homolog of NCBI NO: 18407336 NR Description: glucose-6-phosphate/phosphate-translocator putative; protein id: At1g61800.1, supported by cDNA:
  misc_feature (1)..(332): Homolog of NCBI NO: 14150753 NR Description: glucose-6-phosphate/phosphate translocator [Oryza
  misc_feature (32)..(332): Homolog of NCBI NO: 7488807 NR Description: glucose-6-phosphate/phosphate-translocator
  misc_feature (20)..(332): Homolog of NCBI NO: 14596173 NR Description: Similar to
  misc_feature (20)..(332): Homolog of NCBI NO: 9295277 NR Description: glucose-6P/phosphate translocator precursor
  misc_feature (20)..(332): Homolog of NCBI NO: 7484980 NR Description: glucose-6-phosphate/phosphate translocator
  misc_feature (1)..(331): Homolog of NCBI NO: 18423670 NR Description: glucose-6-phosphate/phosphate translocator; id: At5g54800.1, supported by cDNA: 26107., supported by cDNA: supported by cDNA: gi_7229674 [Arabidopsis thaliana]
  misc_feature (31)..(332): Homolog of NCBI NO: 7489258 NR Description: probable
MAAAGRSDRAASPAPPSATADGARPVVEVAAPAETARRAKIGVYFATWWALNVIFNIYNKKVLNAFPYPWLTSTLSLAAGSAIMLASWATRIAEAPQTDLDFWKALTPVAIAHTIGHVAATVSMAKVAVSFTHIIKSGEPAFSVLVSRFFLGEHFPAPVYFSLLPIIGGCALAAVTELNFNMVGFMGAMISNLAFVVRTIFSKKGMKGKSVSGMNYYACLSIMSLVILLPFAVAMEGPKLWAAGWQQAVAEIGPNFVWWVAAQSVFYHLYNQVSYMSLDEISPLTFSIGNTMKRISVIVASIIIFQTPVQPINALGAAIAILGTFIYSQAKQ

SEQ ID NO: 9343 - DNA, 1154 bp, Zea mays subsp. mays
  misc_feature (1)..(1154): Ceres Seq. ID no. 12362323
  misc_feature: MA Experiment ID: 108504 Result: Up-regulated in Transcription
  misc_feature: MA Experiment 108504 PARAMETER Experiment Name: Zm_Drought_P Parameter: Age (day) Value: 8
  misc_feature: MA Experiment 108504 PARAMETER Experiment Name: Zm_Drought_P Parameter: Organism Value: Zea mays
  misc_feature: MA Experiment 108504 PARAMETER Experiment Name: Zm_Drought_P Parameter: Plant Line Value: 35A19
  misc_feature: MA Experiment 108504 PARAMETER Experiment Name: Zm_Drought_P Parameter: Timepoint (hr) Value: 12
  misc_feature: MA Experiment 108504 PARAMETER Experiment Name: Zm_Drought_P Parameter: Tissue Value: Aerial
  misc_feature: MA Experiment 108504 PARAMETER Experiment Name: Zm_Drought_P Parameter: Treatment Value: Drought vs. No Drought
  misc_feature: MA Experiment ID: 108522 Result: Up-regulated in Transcription
  misc_feature: MA Experiment 108522 PARAMETER Experiment Name: Zm_42deg_Heat_P Parameter: Age (day) Value: 8
  misc_feature: MA Experiment 108522 PARAMETER Experiment Name: Zm_42deg_Heat_P Parameter: Organism Value: Zea mays
  misc_feature: MA Experiment 108522 PARAMETER Experiment Name: Zm_42deg_Heat_P Parameter: Plant Line Value: 35A19
  misc_feature: MA Experiment 108522 PARAMETER Experiment Name: Zm_42deg_Heat_P Parameter: Temperature (deg C) Value: 42 vs. 22
  misc_feature: MA Experiment 108522 PARAMETER Experiment Name: Zm_42deg_Heat_P Parameter: Timepoint (hr) Value: 1
  misc_feature: MA Experiment 108522 PARAMETER Experiment Name: Zm_42deg_Heat_P Parameter: Tissue Value: Aerial
  misc_feature: MA Experiment ID: 108523 Result: Up-regulated in Transcription
  misc_feature: MA Experiment 108523 PARAMETER Experiment Name: Zm_42deg_Heat_P Parameter: Age (day) Value: 8
  misc_feature: MA Experiment 108523 PARAMETER Experiment Name: Zm_42deg_Heat_P Parameter: Organism Value: Zea mays
  misc_feature: MA Experiment 108523 PARAMETER Experiment Name: Zm_42deg_Heat_P Parameter: Plant Line Value: 35A19
  misc_feature: MA Experiment 108523 PARAMETER Experiment Name: Zm_42deg_Heat_P Parameter: Temperature (deg C) Value: 42 vs. 22
  misc_feature: MA Experiment 108523 PARAMETER Experiment Name: Zm_42deg_Heat_P Parameter: Timepoint (hr) Value: 6
  misc_feature: MA Experiment 108523 PARAMETER Experiment Name: Zm_42deg_Heat_P Parameter: Tissue Value: Aerial
  misc_feature: MA Experiment ID: 108527 Result: Up-regulated in Transcription
  misc_feature: MA Experiment 108527 PARAMETER Experiment Name: Zm_5mM_NO_P Parameter: Age (day) Value: 8
  misc_feature: MA Experiment 108527 PARAMETER Experiment Name: Zm_5mM_NO_P Parameter: Organism Value: Zea mays
  misc_feature: MA Experiment 108527 PARAMETER Experiment Name: Zm_5mM_NO_P Parameter: Plant Line Value: 35A19
  misc_feature: MA Experiment 108527 PARAMETER Experiment Name: Zm_5mM_NO_P Parameter: Timepoint (hr) Value: 6
  misc_feature: MA Experiment 108527 PARAMETER Experiment Name: Zm_5mM_NO_P Parameter: Tissue Value: Aerial
  misc_feature: MA Experiment 108527 PARAMETER Experiment Name: Zm_5mM_NO_P Parameter: Treatment Value: 5mM NO vs. No Treatment
  misc_feature: MA Experiment ID: 108535 Result: Down-regulated in Transcription
  misc_feature: MA Experiment 108535 PARAMETER Experiment Name: Zm_Meristem_P Parameter: Age (day) Value: 8
  misc_feature: MA Experiment 108535 PARAMETER Experiment Name: Zm_Meristem_P Parameter: Organism Value: Zea mays
  misc_feature: MA Experiment 108535 PARAMETER Experiment Name: Zm_Meristem_P Parameter: Plant Line Value: 35A19
  misc_feature: MA Experiment 108535 PARAMETER Experiment Name: Zm_Meristem_P Parameter: Tissue Value: Root Meristem vs. Above Root Meristem
  misc_feature: MA Experiment ID: 108556 Result: Up-regulated in Transcription
  misc_feature: MA Experiment 108556 PARAMETER Experiment Name: Zm_Drought_P Parameter: Age (day) Value: 9
  misc_feature: MA Experiment 108556 PARAMETER Experiment Name: Zm_Drought_P Parameter: Organism Value: Zea mays
  misc_feature: MA Experiment 108556 PARAMETER Experiment Name: Zm_Drought_P Parameter: Plant Line Value: 35A19
  misc_feature: MA Experiment 108556 PARAMETER Experiment Name: Zm_Drought_P Parameter: Timepoint (hr) Value: 24
  misc_feature: MA Experiment 108556 PARAMETER Experiment Name: Zm_Drought_P Parameter: Tissue Value: Aerial
  misc_feature: MA Experiment 108556 PARAMETER Experiment Name: Zm_Drought_P Parameter: Treatment Value: Drought vs. No Drought
  misc_feature: MA Experiment ID: 108559 Result: Up-regulated in Transcription
  misc_feature: MA Experiment 108559 PARAMETER Experiment Name: Zm_5mM_NO_P Parameter: Age (day) Value: 8
  misc_feature: MA Experiment 108559 PARAMETER Experiment Name: Zm_5mM_NO_P Parameter: Organism Value: Zea mays
  misc_feature: MA Experiment 108559 PARAMETER Experiment Name: Zm_5mM_NO_P Parameter: Plant Line Value: 35A19
  misc_feature: MA Experiment 108559 PARAMETER Experiment Name: Zm_5mM_NO_P Parameter: Timepoint (hr) Value: 12
  misc_feature: MA Experiment 108559 PARAMETER Experiment Name: Zm_5mM_NO_P Parameter: Tissue Value: Aerial
  misc_feature: MA Experiment 108559 PARAMETER Experiment Name: Zm_5mM_NO_P Parameter: Treatment Value: 5mM NO vs. No Treatment
  misc_feature: MA Experiment ID: 108597 Result: Up-regulated in Transcription
  misc_feature: MA Experiment 108597 PARAMETER Experiment Name: Zm_100uM_ABA_P Parameter: Age (day) Value: 9
  misc_feature: MA Experiment 108597 PARAMETER Experiment Name: Zm_100uM_ABA_P Parameter: Organism Value: Zea mays
  misc_feature: MA Experiment 108597 PARAMETER Experiment Name: Zm_100uM_ABA_P Parameter: Plant Line Value: 35A19
  misc_feature: MA Experiment 108597 PARAMETER Experiment Name: Zm_100uM_ABA_P Parameter: Timepoint (hr) Value: 24
  misc_feature: MA Experiment 108597 PARAMETER Experiment Name: Zm_100uM_ABA_P Parameter: Tissue Value: Aerial
  misc_feature: MA Experiment 108597 PARAMETER Experiment Name: Zm_100uM_ABA_P Parameter: Treatment Value: 100uM ABA vs. No Treatment
  misc_feature: MA Experiment ID: 20000478 Result: Up-regulated in Transcription
  misc_feature: MA Experiment 20000478 PARAMETER Experiment Name: Zm_5mM_SA_P Parameter: Age (day) Value: 11
  misc_feature: MA Experiment 20000478 PARAMETER Experiment Name: Zm_5mM_SA_P Parameter: Organism Value: Zea mays
  misc_feature: MA Experiment 20000478 PARAMETER Experiment Name: Zm_5mM_SA_P Parameter: Plant Line Value: 35A19
  misc_feature: MA Experiment 20000478 PARAMETER Experiment Name: Zm_5mM_SA_P Parameter: Timepoint (hr) Value: 72
  misc_feature: MA Experiment 20000478 PARAMETER Experiment Name: Zm_5mM_SA_P Parameter: Tissue Value: Aerial
  misc_feature: MA Experiment 20000478 PARAMETER Experiment Name: Zm_5mM_SA_P Parameter: Treatment Value: 5mM SA vs. No Treatment
  misc_feature: MA Experiment ID: 20000479 Result: Up-regulated in Transcription
  misc_feature: MA Experiment 20000479 PARAMETER Experiment Name: Zm_Drought_P Parameter: Age (day) Value: 10
  misc_feature: MA Experiment 20000479 PARAMETER Experiment Name: Zm_Drought_P Parameter: Organism Value: Zea mays
  misc_feature: MA Experiment 20000479 PARAMETER Experiment Name: Zm_Drought_P Parameter: Plant Line Value: 35A19
  misc_feature: MA Experiment 20000479 PARAMETER Experiment Name: Zm_Drought_P Parameter: Timepoint (hr) Value: 48
  misc_feature: MA Experiment 20000479 PARAMETER Experiment Name: Zm_Drought_P Parameter: Tissue Value: Aerial
  misc_feature: MA Experiment 20000479 PARAMETER Experiment Name: Zm_Drought_P Parameter: Treatment Value: Drought vs. No Drought
  misc_feature: MA Experiment ID: 20000480 Result: Up-regulated in Transcription
  misc_feature: MA Experiment 20000480 PARAMETER Experiment Name: Zm_Drought_P Parameter: Age (day) Value: 11
  misc_feature: MA Experiment 20000480 PARAMETER Experiment Name: Zm_Drought_P Parameter: Organism Value: Zea mays
  misc_feature: MA Experiment 20000480 PARAMETER Experiment Name: Zm_Drought_P Parameter: Plant Line Value: 35A19
  misc_feature: MA Experiment 20000480 PARAMETER Experiment Name: Zm_Drought_P Parameter: Timepoint (hr) Value: 72
  misc_feature: MA Experiment 20000480 PARAMETER Experiment Name: Zm_Drought_P Parameter: Tissue Value: Aerial
  misc_feature: MA Experiment 20000480 PARAMETER Experiment Name: Zm_Drought_P Parameter: Treatment Value: Drought vs. No Drought
  misc_feature: MA Experiment ID: 20000535 Result: Up-regulated in Transcription
  misc_feature: MA Experiment 20000535 PARAMETER Experiment Name: Zm_Hybrid_Seed_Dev_P Parameter: DAP Value: 30 vs. 12
  misc_feature: MA Experiment 20000535 PARAMETER Experiment Name: Zm_Hybrid_Seed_Dev_P Parameter: Organism Value: Zea mays
  misc_feature: MA Experiment 20000535 PARAMETER Experiment Name: Zm_Hybrid_Seed_Dev_P Parameter: Plant Line Value: 35A19
  misc_feature: MA Experiment 20000535 PARAMETER Experiment Name: Zm_Hybrid_Seed_Dev_P Parameter: Tissue Value: Embryo vs. Unfert Floret
  misc_feature: MA Experiment ID: 20000627 Result: Up-regulated in Transcription
  misc_feature: MA Experiment 20000627 PARAMETER Experiment Name: Zm_Herbicide-Treatments_P Parameter: Timepoint (hr) Value: 12
  misc_feature: MA Experiment 20000627 PARAMETER Experiment Name: Zm_Herbicide-Treatments_P Parameter: Tissue Value: Aerial
  misc_feature: MA Experiment 20000627 PARAMETER Experiment Name: Zm_Herbicide-Treatments_P Parameter: Treatment Value: Finale vs. No Treatment
atcatcccgattcccgacacgcttgtgttgtcgcgattggcaagctcggcggctcgtggcagcgggaacttacgaggcgaaggagagcgagggcgaccgcgcggatcgcatcgcagctctgggcggaggtggggccttgcgcggagatgctagcggtgttcgatcgggctgtggcgccgagcccggaggggctgcggcagccgggcgccgcggggggcggctgcgcggcgggcctcgcggaccggttcagagaggcgcggcccgacgcggtcaccgtcaaccttggcgggtccggcgccctggcgtactcctcgagcaaccagaaccccctcctccccaggttgtttggcgcggtggacggcgtattctgcatgttccagggaacaattgcgaacgttgctgtgctgaagcagcagtatgggttgagcaaaggcgctaatgaggtcagcatcatcatcgaggcttacaggaccttgagggacaggggcccttatcctgcagatcaggttgtgagggacataagtgggaaatttgcatttgtcctgtatgattgctccactaagtcggtcttcatggctgctatgcagctgttcagttattcccgaagacatatatctgatcacaggctactgctacgacgtacaatggtaccactggtattgaccggcaactgataggtagctcagctcgtgttcgtaacctcataacaggacaccgatggaaatgttccgttctactggggcgtggacaccgacgggcgtcttgtggtctctgacgacgccgaactcgtgaagagtgcctgtgggaaatcctgtgccccgttccccaaaggcttcttcttcacgacgtccggagggctgaggagctacgagcaccccatgcacgaggtgaagccggtgccgagggtggacagcaagggcgaggtgtgcggcacgacgtacacggtcgacgcaagcgccaggaaggagaccaccatcccaagggtcggcagcgccgccgactggtcttcgcagtactaaaattcgttatctttctctgtgtgtgttgaacgggttcgagcgcaggtagcagggcgtcgcacgggcgtggcccgtgtttgttcgcatggaaaccctagctgtctggtgtttatctgaatgaatagactgttctct

SEQ ID NO: 9344 - protein, 223 aa, Zea mays subsp. mays
  peptide (1)..(223): Ceres Seq. ID no. 12362324
  misc_feature (18)..(193): Homolog of NCBI NO: 30017570 NR Description: unknown protein [Oryza sativa (japonica
  misc_feature (49)..(193): Homolog of NCBI NO: 32352176 NR Description: hypothetical protein [Oryza sativa (japonica
  misc_feature (49)..(192): Homolog of NCBI NO: 15228883 NR Description: unknown protein; protein id: At3g22850.1, by cDNA: gi_18252900 [Arabidopsis thaliana] contains similarity to unknown
  misc_feature (49)..(193): Homolog of NCBI NO: 20340249 NR Description: aluminum-induced protein-like protein
  misc_feature (49)..(193): Homolog of NCBI NO: 15239993 NR Description: aluminum-induced protein-like; protein id: supported by cDNA: 12484., supported by cDNA: gi_15028024
  misc_feature (49)..(192): Homolog of NCBI NO: 542200 NR Description: hypothetical protein - garden asparagus
  misc_feature (49)..(192): Homolog of NCBI NO: 18400774 NR Description: expressed protein; protein id: At3g15450.1, by cDNA: gi_14335087 [Arabidopsis thaliana] unknown protein [Arabidopsis thaliana]
  misc_feature (49)..(196): Homolog of NCBI NO: 15239658 NR Description: aluminium-induced protein - like; protein id: supported by cDNA: gi_14532643, supported by cDNA: gi_21280808
  misc_feature (49)..(202): Homolog of NCBI NO: 7486256 NR Description: hypothetical protein F27G19.50 - Arabidopsis >gi|4972070|emb|CAB43877.1| putative protein [Arabidopsis >gi|7269599|emb|CAB81395.1| putative protein [Arabidopsis
  misc_feature (49)..(192): Homolog of NCBI NO: 18416995 NR Description: putative protein; protein id: At4g27450.1, by cDNA: 35207., supported by cDNA: gi_14030722, supported by gi_15028056, supported by cDNA: gi_20259058 [Arabidopsis
HPDSRHACVVAIGKLGGSWQRELTRRRRARATARIASQLWAEVGPCAEMLAVFDRAVAPSPEGLRQPGAAGGGCAAGLADRFREARPDAVTVNLGGSGALAYSSSNQNPLLPRLFGAVDGVFCMFQGTIANVAVLKQQYGLSKGANEVSIIIEAYRTLRDRGPYPADQVVRDISGKFAFVLYDCSTKSVFMAAMQLFSYSRRHISDHRLLLRRTMVPLVLTGN

SEQ ID NO: 9345 - protein, 175 aa, Zea mays subsp. mays
  peptide (1)..(175): Ceres Seq. ID no. 12362325
  misc_feature (1)..(154): Homolog of NCBI NO: 7486256 NR Description: hypothetical protein F27G19.50 - Arabidopsis >gi|4972070|emb|CAB43877.1| putative protein [Arabidopsis >gi|7269599|emb|CAB81395.1| putative protein [Arabidopsis
  misc_feature (1)..(144): Homolog of NCBI NO: 18416995 NR Description: putative protein; protein id: At4g27450.1, by cDNA: 35207., supported by cDNA: gi_14030722, supported by gi_15028056, supported by cDNA: gi_20259058 [Arabidopsis
  misc_feature (1)..(145): Homolog of NCBI NO: 30017570 NR Description: unknown protein [Oryza sativa (japonica
  misc_feature (1)..(145): Homolog of NCBI NO: 32352176 NR Description: hypothetical protein [Oryza sativa (japonica
  misc_feature (1)..(144): Homolog of NCBI NO: 15228883 NR Description: unknown protein; protein id: At3g22850.1, by cDNA: gi_18252900 [Arabidopsis thaliana] contains similarity to unknown
  misc_feature (1)..(145): Homolog of NCBI NO: 20340249 NR Description: aluminum-induced protein-like protein
  misc_feature (1)..(145): Homolog of NCBI NO: 15239993 NR Description: aluminum-induced protein-like; protein id: supported by cDNA: 12484., supported by cDNA: gi_15028024
  misc_feature (1)..(144): Homolog of NCBI NO: 542200 NR Description: hypothetical protein - garden asparagus
  misc_feature (1)..(144): Homolog of NCBI NO: 18400774 NR Description: expressed protein; protein id: At3g15450.1, by cDNA: gi_14335087 [Arabidopsis thaliana] unknown protein [Arabidopsis thaliana]
  misc_feature (1)..(148): Homolog of NCBI NO: 15239658 NR Description: aluminium-induced protein - like; protein id: supported by cDNA: gi_14532643, supported by cDNA: gi_21280808
MLAVFDRAVAPSPEGLRQPGAAGGGCAAGLADRFREARPDAVTVNLGGSGALAYSSSNQNPLLPRLFGAVDGVFCMFQGTIANVAVLKQQYGLSKGANEVSIIIEAYRTLRDRGPYPADQVVRDISGKFAFVLYDCSTKSVFMAAMQLFSYSRRHISDHRLLLRRTMVPLVLTGN

SEQ ID NO: 9346 - protein, 145 aa, Zea mays subsp. mays
  peptide (1)..(145): Ceres Seq. ID no. 12362326
SSRFPTRLCCRDWQARRLVAAGTYEAKESEGDRADRIAALGGGGALRGDASGVRSGCGAEPGGAAAAGRRGGRLRGGPRGPVQRGAARRGHRQPWRVRRPGVLLEQPEPPPPQVVWRGGRRILHVPGNNCERCCAEAAVWVEQRR

SEQ ID NO: 9347 - DNA, 779 bp, Zea mays subsp. mays
  misc_feature (1)..(779): Ceres Seq. ID no. 12348111
  misc_feature: MA Experiment ID: 108522 Result: Up-regulated in Transcription
  misc_feature: MA Experiment 108522 PARAMETER Experiment Name: Zm_42deg_Heat_P Parameter: Age (day) Value: 8
  misc_feature: MA Experiment 108522 PARAMETER Experiment Name: Zm_42deg_Heat_P Parameter: Organism Value: Zea mays
  misc_feature: MA Experiment 108522 PARAMETER Experiment Name: Zm_42deg_Heat_P Parameter: Plant Line Value: 35A19
  misc_feature: MA Experiment 108522 PARAMETER Experiment Name: Zm_42deg_Heat_P Parameter: Temperature (deg C) Value: 42 vs. 22
  misc_feature: MA Experiment 108522 PARAMETER Experiment Name: Zm_42deg_Heat_P Parameter: Timepoint (hr) Value: 1
  misc_feature: MA Experiment 108522 PARAMETER Experiment Name: Zm_42deg_Heat_P Parameter: Tissue Value: Aerial
  misc_feature: MA Experiment ID: 108523 Result: Up-regulated in Transcription
  misc_feature: MA Experiment 108523 PARAMETER Experiment Name: Zm_42deg_Heat_P Parameter: Age (day) Value: 8
  misc_feature: MA Experiment 108523 PARAMETER Experiment Name: Zm_42deg_Heat_P Parameter: Organism Value: Zea mays
  misc_feature: MA Experiment 108523 PARAMETER Experiment Name: Zm_42deg_Heat_P Parameter: Plant Line Value: 35A19
  misc_feature: MA Experiment 108523 PARAMETER Experiment Name: Zm_42deg_Heat_P Parameter: Temperature (deg C) Value: 42 vs. 22
  misc_feature: MA Experiment 108523 PARAMETER Experiment Name: Zm_42deg_Heat_P Parameter: Timepoint (hr) Value: 6
  misc_feature: MA Experiment 108523 PARAMETER Experiment Name: Zm_42deg_Heat_P Parameter: Tissue Value: Aerial
  misc_feature: MA Experiment ID: 108597 Result: Up-regulated in Transcription
  misc_feature: MA Experiment 108597 PARAMETER Experiment Name: Zm_100uM_ABA_P Parameter: Age (day) Value: 9
  misc_feature: MA Experiment 108597 PARAMETER Experiment Name: Zm_100uM_ABA_P Parameter: Organism Value: Zea mays
  misc_feature: MA Experiment 108597 PARAMETER Experiment Name: Zm_100uM_ABA_P Parameter: Plant Line Value: 35A19
  misc_feature: MA Experiment 108597 PARAMETER Experiment Name: Zm_100uM_ABA_P Parameter: Timepoint (hr) Value: 24
  misc_feature: MA Experiment 108597 PARAMETER Experiment Name: Zm_100uM_ABA_P Parameter: Tissue Value: Aerial
  misc_feature: MA Experiment 108597 PARAMETER Experiment Name: Zm_100uM_ABA_P Parameter: Treatment Value: 100uM ABA vs. No Treatment
cagagccatctcctttgcttgctgtccacttggttgacattctgtacagttactgcttcacacttcggctctacaacggtgattggcactcagatcctttgggtgcttgcactgtcgccctgtcgatgtcgaaagtcatgggccaggatgctaaacctgagactgtacctgaagcactcgcagcctgcatcgaggagacatgctcaccagcttacaggcatactggtggtttcaggtttgctattggactcgtggacgatatcatcgccattctctccttgggacagaacgcacttatttgtgccttatgcgacttccatcgactcattgaagttggtaagagcatgctcaaggtggagaaagtgggcaagacggagagggcacagaactctccgaagcttcgtagtgcagctaggaagctattcttcatgacttgttgggtccatgagcagccagatgaggcgtggccatctttagctcacatcgtccaggtgcagaaagcatctatggaggagttggagaccgggaattggaaggcggatagaaagagcaaaccacaatccgcggttcttatcgaggagctgtaggcatatggatgtaccactggaaattggatcgcgaggctatgtacccttgtgtatcgctcaggatgaatccaacgagagaccgtccttgtaatgcagttagttgcttctgtgtacacttttttttgaaaaaaattgtatttgtatacgagtttgaaatcctagttgaagcgatcctgctttactttgcttgtc

SEQ ID NO: 9348 - protein, 194 aa, Zea mays subsp. mays
  peptide (1)..(194): Ceres Seq. ID no. 12348112
  misc_feature (2)..(194): Homolog of NCBI NO: 15237537 NR Description: unknown protein; protein id: At5g63830.1 thaliana] >gi|10177671|dbj|BAB11031.1| gene_id:MGI19.3~unknown
  misc_feature (53)..(194): Homolog of NCBI NO: 37536148 NR Description: hypothetical protein [Oryza sativa (japonica group)] >gi|10122047|gb|AAG13436.1| hypothetical protein [Oryza
EPSPLLAVHLVDILYSYCFTLRLYNGDWHSDPLGACTVALSMSKVMGQDAKPETVPEALAACIEETCSPAYRHTGGFRFAIGLVDDIIAILSLGQNALICALCDFHRLIEVGKSMLKVEKVGKTERAQNSPKLRSAARKLFFMTCWVHEQPDEAWPSLAHIVQVQKASMEELETGNWKADRKSKPQSAVLIEEL

SEQ ID NO: 9349 - protein, 153 aa, Zea mays subsp. mays
  peptide (1)..(153): Ceres Seq. ID no. 12348113
  misc_feature (1)..(153): Homolog of NCBI NO: 15237537 NR Description: unknown protein; protein id: At5g63830.1 thaliana] >gi|10177671|dbj|BAB11031.1| gene_id:MGI19.3~unknown
  misc_feature (12)..(153): Homolog of NCBI NO: 37536148 NR Description: hypothetical protein [Oryza sativa (japonica group)] >gi|10122047|gb|AAG13436.1| hypothetical protein [Oryza
MSKVMGQDAKPETVPEALAACIEETCSPAYRHTGGFRFAIGLVDDIIAILSLGQNALICALCDFHRLIEVGKSMLKVEKVGKTERAQNSPKLRSAARKLFFMTCWVHEQPDEAWPSLAHIVQVQKASMEELETGNWKADRKSKPQSAVLIEEL

SEQ ID NO: 9350 - protein, 149 aa, Zea mays subsp. mays
  peptide (1)..(149): Ceres Seq. ID no. 12348114
  misc_feature (1)..(149): Homolog of NCBI NO: 15237537 NR Description: unknown protein; protein id: At5g63830.1 thaliana] >gi|10177671|dbj|BAB11031.1| gene_id:MGI19.3~unknown
  misc_feature (8)..(149): Homolog of NCBI NO: 37536148 NR Description: hypothetical protein [Oryza sativa (japonica group)] >gi|10122047|gb|AAG13436.1| hypothetical protein [Oryza
MGQDAKPETVPEALAACIEETCSPAYRHTGGFRFAIGLVDDIIAILSLGQNALICALCDFHRLIEVGKSMLKVEKVGKTERAQNSPKLRSAARKLFFMTCWVHEQPDEAWPSLAHIVQVQKASMEELETGNWKADRKSKPQSAVLIEEL

SEQ ID NO: 9351 - DNA, 991 bp, Zea mays subsp. mays
  misc_feature (1)..(991): Ceres Seq. ID no. 12407059
  misc_feature: MA Experiment ID: 108504 Result: Up-regulated in Transcription
  misc_feature: MA Experiment 108504 PARAMETER Experiment Name: Zm_Drought_P Parameter: Age (day) Value: 8
  misc_feature: MA Experiment 108504 PARAMETER Experiment Name: Zm_Drought_P Parameter: Organism Value: Zea mays
  misc_feature: MA Experiment 108504 PARAMETER Experiment Name: Zm_Drought_P Parameter: Plant Line Value: 35A19
  misc_feature: MA Experiment 108504 PARAMETER Experiment Name: Zm_Drought_P Parameter: Timepoint (hr) Value: 12
  misc_feature: MA Experiment 108504 PARAMETER Experiment Name: Zm_Drought_P Parameter: Tissue Value: Aerial
  misc_feature: MA Experiment 108504 PARAMETER Experiment Name: Zm_Drought_P Parameter: Treatment Value: Drought vs. No Drought
  misc_feature: MA Experiment ID: 108689 Result: Up-regulated in Transcription
  misc_feature: MA Experiment 108689 PARAMETER Experiment Name: Zm_Drought_Roots_P Parameter: Age (day) Value: 9
  misc_feature: MA Experiment 108689 PARAMETER Experiment Name: Zm_Drought_Roots_P Parameter: Organism Value: Zea mays
  misc_feature: MA Experiment 108689 PARAMETER Experiment Name: Zm_Drought_Roots_P Parameter: Plant Line Value: 35A19
  misc_feature: MA Experiment 108689 PARAMETER Experiment Name: Zm_Drought_Roots_P Parameter: Timepoint (hr) Value: 24
  misc_feature: MA Experiment 108689 PARAMETER Experiment Name: Zm_Drought_Roots_P Parameter: Tissue Value: Roots
  misc_feature: MA Experiment 108689 PARAMETER Experiment Name: Zm_Drought_Roots_P Parameter: Treatment Value: Drought vs. No Drought
  misc_feature: MA Experiment ID: 20000479 Result: Up-regulated in Transcription
  misc_feature: MA Experiment 20000479 PARAMETER Experiment Name: Zm_Drought_P Parameter: Age (day) Value: 10
  misc_feature: MA Experiment 20000479 PARAMETER Experiment Name: Zm_Drought_P Parameter: Organism Value: Zea mays
  misc_feature: MA Experiment 20000479 PARAMETER Experiment Name: Zm_Drought_P Parameter: Plant Line Value: 35A19
  misc_feature: MA Experiment 20000479 PARAMETER Experiment Name: Zm_Drought_P Parameter: Timepoint (hr) Value: 48
  misc_feature: MA Experiment 20000479 PARAMETER Experiment Name: Zm_Drought_P Parameter: Tissue Value: Aerial
  misc_feature: MA Experiment 20000479 PARAMETER Experiment Name: Zm_Drought_P Parameter: Treatment Value: Drought vs. No Drought
  misc_feature: MA Experiment ID: 20000492 Result: Down-regulated in Transcription
  misc_feature: MA Experiment 20000492 PARAMETER Experiment Name: Zm_Hybrid_Seed_Dev_P Parameter: DAP Value: 12
  misc_feature: MA Experiment 20000492 PARAMETER Experiment Name: Zm_Hybrid_Seed_Dev_P Parameter: Organism Value: Zea mays
  misc_feature: MA Experiment 20000492 PARAMETER Experiment Name: Zm_Hybrid_Seed_Dev_P Parameter: Plant Line Value: 35A19
  misc_feature: MA Experiment 20000492 PARAMETER Experiment Name: Zm_Hybrid_Seed_Dev_P Parameter: Tissue Value: Fert Kernel vs. Unfert Floret
ccccctcctccactcgcctgtgtgtgtctgtctgtccatccatccatcccgctgccagtcctcgcgccgcccaccccgaaataaccggaaattgcaacccggtccacgggtcggatcccccaaaccgaaccctcccgagctcgcccggcgatggggatctcgagcatgccggagccgcgggacagcctgctggggtacctggtgtacaacgcggtggtgtcgatcgcggcgctggcggggctggtgcgggcggcgctggtgttcctggacctgcaggccgcgcagctgcccgggggcgcgggcgcgggtgcggacgacgacggcggggaccgtctcgcggcgtcgggcccgggcctgggcctggcggagcggttcctgagggccttccggccggcgctgtacggggtgctggtgtccacggcgtgcggcgcggcggaggcggccgcgggcgacgacgactgcagcgtgtgcctggccgggttcgaggcggaggccgtggtgaaccggctcccctgcggccacctcttccaccgcgcctgcctcgagacctggctccggtacgagcgcgccacgtgcccgctctgccgcgcccacgtgcccctccccgccgacgagacgccggtgctccgctacccggagctcgagtgatccgggcctcggcggccgtcgcgcgcctcggctgtgtgctgcaagctccgtgtggccttccgtgtgcgcgtagcaaaaggaaaaaaggagtataggagctgtagtagtagagttgctgttgctttccctttctcgttttgtgttttgcggttgccctgcccccatgctcttgttgtttccgcgctgtcgctgtagcgtgtaaatactccggttcgcccttggcagcagagagtagtagagtgctcccgtggctgggccgatggtgtagcaccttttacgagctcagctcgtgtgtgtacatttgcatgctttnnattcagtttcccgagccanaatatcgagg

SEQ ID NO: 9352 - protein, 246 aa, Zea mays subsp. mays
  peptide (1)..(246): Ceres Seq. ID no. 12407060
  misc_feature (14)..(214): Pfam Name: GATA-type transcription activator, N-terminal Pfam Description: GATA-type transcription activator, N-terminal
  misc_feature (18)..(195): Homolog of NCBI NO: 7494125 NR Description: myosin-IA - Acanthamoeba castellanii
  misc_feature (17)..(212): Homolog of NCBI NO: 21222037 NR Description: putative serine-threonine protein kinase
  misc_feature (56)..(166): Homolog of NCBI NO: 9625624 NR Description: nuclear antigen EBNA1 [Human herpesvirus 4]
  misc_feature (28)..(166): Homolog of NCBI NO: 7106228 NR Description: flagelliform silk protein [Nephila
  misc_feature (49)..(173): Homolog of NCBI NO: 9625624 NR Description: nuclear antigen EBNA1 [Human herpesvirus 4]
  misc_feature (22)..(204): Homolog of NCBI NO: 39594379 NR Description: Hypothetical protein CBG19026 [Caenorhabditis
  misc_feature (48)..(228): Homolog of NCBI NO: 320926 NR Description: antigen 5401 - Eimeria tenella (fragment)
  misc_feature (33)..(181): Homolog of NCBI NO: 71608 NR Description: myosin heavy chain IB - Acanthamoeba castellanii
  misc_feature (33)..(181): Homolog of NCBI NO: 1171093 NR Description: Myosin heavy chain IB (Myosin heavy chain IL)
  misc_feature (56)..(213): Homolog of NCBI NO: 775215 NR Description: EBNA1 [Herpesvirus papio]
PSSTRLCVSVCPSIHPAASPRAAHPEITGNCNPVHGSDPPNRTLPSSPGDGDLEHAGAAGQPAGVPGVQRGGVDRGAGGAGAGGAGVPGPAGRAAARGRGRGCGRRRRGPSRGVGPGPGPGGAVPEGLPAGAVRGAGVHGVRRGGGGRGRRRLQRVPGRVRGGGRGEPAPLRPPLPPRLPRDLAPVRARHVPALPRPRAPPRRRDAGAPLPGARVIRASAAVARLGCVLQAPCGLPCARSKRKKGV

SEQ ID NO: 9353 - protein, 165 aa, Zea mays subsp. mays
  peptide (1)..(165): Ceres Seq. ID no. 12407061
  misc_feature (104)..(145): Pfam Name: Zinc finger, C3HC4 type (RING finger) Pfam Description: Zinc finger, C3HC4 type (RING finger)
  misc_feature (1)..(146): Homolog of NCBI NO: 20340241 NR Description: putative RING zinc finger protein-like protein
  misc_feature (1)..(154): Homolog of NCBI NO: 15228108 NR Description: putative RING zinc finger protein; protein id: supported by cDNA: gi_11908039, supported by cDNA: gi_13265496 thaliana] >gi|25411066|pir||E84455 probable RING zinc finger
  misc_feature (14)..(158): Homolog of NCBI NO: 34899858 NR Description: OJ1714_H10.11 [Oryza sativa (japonica
  misc_feature (55)..(159): Homolog of NCBI NO: 34899852 NR Description: OJ1714_H10.8 [Oryza sativa (japonica >gi|22831072|dbj|BAC15934.1| hypothetical protein [Oryza sativa
  misc_feature (93)..(149): Homolog of NCBI NO: 37534730 NR Description: putative RING zinc finger protein [Oryza sativa
  misc_feature (1)..(157): Homolog of NCBI NO: 7489432 NR Description: probable ring finger protein - barley
  misc_feature (27)..(165): Homolog of NCBI NO: 34913258 NR Description: P0519E12.4 [Oryza sativa (japonica
  misc_feature (104)..(156): Homolog of NCBI NO: 15233696 NR Description: putative protein; protein id: At4g38140.1
  misc_feature (91)..(149): Homolog of NCBI NO: 22324426 NR Description: hypothetical protein~predicted by FGENESH etc.
  misc_feature (101)..(157): Homolog of NCBI NO: 15224210 NR Description: putative RING zinc finger protein; protein id: supported by cDNA: 92525., supported by cDNA: gi_15450662
MGISSMPEPRDSLLGYLVYNAVVSIAALAGLVRAALVFLDLQAAQLPGGAGAGADDDGGDRLAASGPGLGLAERFLRAFRPALYGVLVSTACGAAEAAAGDDDCSVCLAGFEAEAVVNRLPCGHLFHRACLETWLRYERATCPLCRAHVPLPADETPVLRYPELE

SEQ ID NO: 9354 - protein, 160 aa, Zea mays subsp. mays
  peptide (1)..(160): Ceres Seq. ID no. 12407062
  misc_feature (99)..(140): Pfam Name: Zinc finger, C3HC4 type (RING finger) Pfam Description: Zinc finger, C3HC4 type (RING finger)
  misc_feature (1)..(141): Homolog of NCBI NO: 20340241 NR Description: putative RING zinc finger protein-like protein
  misc_feature (1)..(149): Homolog of NCBI NO: 15228108 NR Description: putative RING zinc finger protein; protein id: supported by cDNA: gi_11908039, supported by cDNA: gi_13265496 thaliana] >gi|25411066|pir||E84455 probable RING zinc finger
  misc_feature (9)..(153): Homolog of NCBI NO: 34899858 NR Description: OJ1714_H10.11 [Oryza sativa (japonica
  misc_feature (50)..(154): Homolog of NCBI NO: 34899852 NR Description: OJ1714_H10.8 [Oryza sativa (japonica >gi|22831072|dbj|BAC15934.1| hypothetical protein [Oryza sativa
  misc_feature (88)..(144): Homolog of NCBI NO: 37534730 NR Description: putative RING zinc finger protein [Oryza sativa
  misc_feature (1)..(152): Homolog of NCBI NO: 7489432 NR Description: probable ring finger protein - barley
  misc_feature (22)..(160): Homolog of NCBI NO: 34913258 NR Description: P0519E12.4 [Oryza sativa (japonica
  misc_feature (99)..(151): Homolog of NCBI NO: 15233696 NR Description: putative protein; protein id: At4g38140.1
  misc_feature (86)..(144): Homolog of NCBI NO: 22324426 NR Description: hypothetical protein~predicted by FGENESH etc.
  misc_feature (96)..(152): Homolog of NCBI NO: 15224210 NR Description: putative RING zinc finger protein; protein id: supported by cDNA: 92525., supported by cDNA: gi_15450662
MPEPRDSLLGYLVYNAVVSIAALAGLVRAALVFLDLQAAQLPGGAGAGADDDGGDRLAASGPGLGLAERFLRAFRPALYGVLVSTACGAAEAAAGDDDCSVCLAGFEAEAVVNRLPCGHLFHRACLETWLRYERATCPLCRAHVPLPADETPVLRYPELE

SEQ ID NO: 9355 - DNA, 918 bp, Zea mays subsp. mays
  misc_feature (1)..(918): Ceres Seq. ID no. 12355344
  misc_feature: MA Experiment ID: 108504 Result: Down-regulated in Transcription
  misc_feature: MA Experiment 108504 PARAMETER Experiment Name: Zm_Drought_P Parameter: Age (day) Value: 8
  misc_feature: MA Experiment 108504 PARAMETER Experiment Name: Zm_Drought_P Parameter: Organism Value: Zea mays
  misc_feature: MA Experiment 108504 PARAMETER Experiment Name: Zm_Drought_P Parameter: Plant Line Value: 35A19
  misc_feature: MA Experiment 108504 PARAMETER Experiment Name: Zm_Drought_P Parameter: Timepoint (hr) Value: 12
  misc_feature: MA Experiment 108504 PARAMETER Experiment Name: Zm_Drought_P Parameter: Tissue Value: Aerial
  misc_feature: MA Experiment 108504 PARAMETER Experiment Name: Zm_Drought_P Parameter: Treatment Value: Drought vs. No Drought
  misc_feature: MA Experiment ID: 108515 Result: Down-regulated in Transcription
  misc_feature: MA Experiment 108515 PARAMETER Experiment Name: Zm_2mM_SA_P Parameter: Age (day) Value: 8
  misc_feature: MA Experiment 108515 PARAMETER Experiment Name: Zm_2mM_SA_P Parameter: Organism Value: Zea mays
  misc_feature: MA Experiment 108515 PARAMETER Experiment Name: Zm_2mM_SA_P Parameter: Plant Line Value: 35A19
  misc_feature: MA Experiment 108515 PARAMETER Experiment Name: Zm_2mM_SA_P Parameter: Timepoint (hr) Value: 12
  misc_feature: MA Experiment 108515 PARAMETER Experiment Name: Zm_2mM_SA_P Parameter: Tissue Value: Aerial
  misc_feature: MA Experiment 108515 PARAMETER Experiment Name: Zm_2mM_SA_P Parameter: Treatment Value: 2mM SA vs. No Treatment
  misc_feature: MA Experiment ID: 108523 Result: Down-regulated in Transcription
  misc_feature: MA Experiment 108523 PARAMETER Experiment Name: Zm_42deg_Heat_P Parameter: Age (day) Value: 8
  misc_feature: MA Experiment 108523 PARAMETER Experiment Name: Zm_42deg_Heat_P Parameter: Organism Value: Zea mays
  misc_feature: MA Experiment 108523 PARAMETER Experiment Name: Zm_42deg_Heat_P Parameter: Plant Line Value: 35A19
  misc_feature: MA Experiment 108523 PARAMETER Experiment Name: Zm_42deg_Heat_P Parameter: Temperature (deg C) Value: 42 vs. 22
  misc_feature: MA Experiment 108523 PARAMETER Experiment Name: Zm_42deg_Heat_P Parameter: Timepoint (hr) Value: 6
  misc_feature: MA Experiment 108523 PARAMETER Experiment Name: Zm_42deg_Heat_P Parameter: Tissue Value: Aerial
  misc_feature: MA Experiment ID: 108529 Result: Up-regulated in Transcription
  misc_feature: MA Experiment 108529 PARAMETER Experiment Name: Zm_Imbibed_Seeds_P Parameter: Age (day) Value: 5 vs. 2
  misc_feature: MA Experiment 108529 PARAMETER Experiment Name: Zm_Imbibed_Seeds_P Parameter: Organism Value: Zea mays
  misc_feature: MA Experiment 108529 PARAMETER Experiment Name: Zm_Imbibed_Seeds_P Parameter: Plant Line Value: 35A19
  misc_feature: MA Experiment 108529 PARAMETER Experiment Name: Zm_Imbibed_Seeds_P Parameter: Tissue Value: Roots vs. Embryo
  misc_feature: MA Experiment ID: 108536 Result: Down-regulated in Transcription
  misc_feature: MA Experiment 108536 PARAMETER Experiment Name: Zm_Meristem_P Parameter: Age (day) Value: 8
  misc_feature: MA Experiment 108536 PARAMETER Experiment Name: Zm_Meristem_P Parameter: Organism Value: Zea mays
  misc_feature: MA Experiment 108536 PARAMETER Experiment Name: Zm_Meristem_P Parameter: Plant Line Value: 35A19
  misc_feature: MA Experiment 108536 PARAMETER Experiment Name: Zm_Meristem_P Parameter: Tissue Value: Shoot Meristem vs. Above Shoot Meristem
  misc_feature: MA Experiment ID: 108540 Result: Down-regulated in Transcription
  misc_feature: MA Experiment 108540 PARAMETER Experiment Name: Zm_20percent_PEG_P Parameter: Age (day) Value: 8
  misc_feature: MA Experiment 108540 PARAMETER Experiment Name: Zm_20percent_PEG_P Parameter: Organism Value: Zea mays
  misc_feature: MA Experiment 108540 PARAMETER Experiment Name: Zm_20percent_PEG_P Parameter: Plant Line Value: 35A19
  misc_feature: MA Experiment 108540 PARAMETER Experiment Name: Zm_20percent_PEG_P Parameter: Timepoint (hr) Value: 6
  misc_feature: MA Experiment 108540 PARAMETER Experiment Name: Zm_20percent_PEG_P Parameter: Tissue Value: Aerial
  misc_feature: MA Experiment 108540 PARAMETER Experiment Name: Zm_20percent_PEG_P Parameter: Treatment Value: 20percent PEG vs. No Treatment
  misc_feature: MA Experiment ID: 108543 Result: Up-regulated in Transcription
  misc_feature: MA Experiment ID: 108545 Result: Down-regulated in Transcription
  misc_feature: MA Experiment 108545 PARAMETER Experiment Name: Zm_Imbibed_Seeds_P Parameter: Age (day) Value: 3 vs. 2
  misc_feature: MA Experiment 108545 PARAMETER Experiment Name: Zm_Imbibed_Seeds_P Parameter: Organism Value: Zea mays
  misc_feature: MA Experiment 108545 PARAMETER Experiment Name: Zm_Imbibed_Seeds_P Parameter: Plant Line Value: 35A19
  misc_feature: MA Experiment 108545 PARAMETER Experiment Name: Zm_Imbibed_Seeds_P Parameter: Tissue Value: Aerial vs. Embryo
  misc_feature: MA Experiment ID: 108546 Result: Up-regulated in Transcription
  misc_feature: MA Experiment 108546 PARAMETER Experiment Name: Zm_Imbibed_Seeds_P Parameter: Age (day) Value: 3 vs. 2
  misc_feature: MA Experiment 108546 PARAMETER Experiment Name: Zm_Imbibed_Seeds_P Parameter: Organism Value: Zea mays
  misc_feature: MA Experiment 108546 PARAMETER Experiment Name: Zm_Imbibed_Seeds_P Parameter: Plant Line Value: 35A19
  misc_feature: MA Experiment 108546 PARAMETER Experiment Name: Zm_Imbibed_Seeds_P Parameter: Tissue Value: Roots vs. Embryo
  misc_feature: MA Experiment ID: 108556 Result: Down-regulated in Transcription
  misc_feature: MA Experiment 108556 PARAMETER Experiment Name: Zm_Drought_P Parameter: Age (day) Value: 9
  misc_feature: MA Experiment 108556 PARAMETER Experiment Name: Zm_Drought_P Parameter: Organism Value: Zea mays
  misc_feature: MA Experiment 108556 PARAMETER Experiment Name: Zm_Drought_P Parameter: Plant Line Value: 35A19
  misc_feature: MA Experiment 108556 PARAMETER Experiment Name: Zm_Drought_P Parameter: Timepoint (hr) Value: 24
  misc_feature: MA Experiment 108556 PARAMETER Experiment Name: Zm_Drought_P Parameter: Tissue Value: Aerial
  misc_feature: MA Experiment 108556 PARAMETER Experiment Name: Zm_Drought_P Parameter: Treatment Value: Drought vs. No Drought
  misc_feature: MA Experiment ID: 108597 Result: Down-regulated in Transcription
  misc_feature: MA Experiment 108597 PARAMETER Experiment Name: Zm_100uM_ABA_P Parameter: Age (day) Value: 9
  misc_feature: MA Experiment 108597 PARAMETER Experiment Name: Zm_100uM_ABA_P Parameter: Organism Value: Zea mays
  misc_feature: MA Experiment 108597 PARAMETER Experiment Name: Zm_100uM_ABA_P Parameter: Plant Line Value: 35A19
  misc_feature: MA Experiment 108597 PARAMETER Experiment Name: Zm_100uM_ABA_P Parameter: Timepoint (hr) Value: 24
  misc_feature: MA Experiment 108597 PARAMETER Experiment Name: Zm_100uM_ABA_P Parameter: Tissue Value: Aerial
  misc_feature: MA Experiment 108597 PARAMETER Experiment Name: Zm_100uM_ABA_P Parameter: Treatment Value: 100uM ABA vs. No Treatment
  misc_feature: MA Experiment ID: 108687 Result: Down-regulated in Transcription
  misc_feature: MA Experiment 108687 PARAMETER Experiment Name: Zm_Embryos-Flowers__P Parameter: Tissue Value: Embryo vs. Aerial+
  misc_feature: MA Experiment ID: 108688 Result: Down-regulated in Transcription
  misc_feature: MA Experiment 108688 PARAMETER Experiment Name: Zm_Embryos-Flowers__P Parameter: Tissue Value: Immature Flowers vs. Aerial+
  misc_feature: MA Experiment ID: 20000477 Result: Down-regulated in Transcription
  misc_feature: MA Experiment 20000477 PARAMETER Experiment Name: Zm_5mM_SA_P Parameter: Age (day) Value: 10
  misc_feature: MA Experiment 20000477 PARAMETER Experiment Name: Zm_5mM_SA_P Parameter: Organism Value: Zea mays
  misc_feature: MA Experiment 20000477 PARAMETER Experiment Name: Zm_5mM_SA_P Parameter: Plant Line Value: 35A19
  misc_feature: MA Experiment 20000477 PARAMETER Experiment Name: Zm_5mM_SA_P Parameter: Timepoint (hr) Value: 48
  misc_feature: MA Experiment 20000477 PARAMETER Experiment Name: Zm_5mM_SA_P Parameter: Tissue Value: Aerial
  misc_feature: MA Experiment 20000477 PARAMETER Experiment Name: Zm_5mM_SA_P Parameter: Treatment Value: 5mM SA vs. No Treatment
  misc_feature: MA Experiment ID: 20000478 Result: Down-regulated in Transcription
  misc_feature: MA Experiment 20000478 PARAMETER Experiment Name: Zm_5mM_SA_P Parameter: Age (day) Value: 11
  misc_feature: MA Experiment 20000478 PARAMETER Experiment Name: Zm_5mM_SA_P Parameter: Organism Value: Zea mays
  misc_feature: MA Experiment 20000478 PARAMETER Experiment Name: Zm_5mM_SA_P Parameter: Plant Line Value: 35A19
  misc_feature: MA Experiment 20000478 PARAMETER Experiment Name: Zm_5mM_SA_P Parameter: Timepoint (hr) Value: 72
  misc_feature: MA Experiment 20000478 PARAMETER Experiment Name: Zm_5mM_SA_P Parameter: Tissue Value: Aerial
  misc_feature: MA Experiment 20000478 PARAMETER Experiment Name: Zm_5mM_SA_P Parameter: Treatment Value: 5mM SA vs. No Treatment
  misc_feature: MA Experiment ID: 20000480 Result: Down-regulated in Transcription
  misc_feature: MA Experiment 20000480 PARAMETER Experiment Name: Zm_Drought_P Parameter: Age (day) Value: 11
  misc_feature: MA Experiment 20000480 PARAMETER Experiment Name: Zm_Drought_P Parameter: Organism Value: Zea mays
  misc_feature: MA Experiment 20000480 PARAMETER Experiment Name: Zm_Drought_P Parameter: Plant Line Value: 35A19
  misc_feature: MA Experiment 20000480 PARAMETER Experiment Name: Zm_Drought_P Parameter: Timepoint (hr) Value: 72
  misc_feature: MA Experiment 20000480 PARAMETER Experiment Name: Zm_Drought_P Parameter: Tissue Value: Aerial
  misc_feature: MA Experiment 20000480 PARAMETER Experiment Name: Zm_Drought_P Parameter: Treatment Value: Drought vs. No Drought
  misc_feature: MA Experiment ID: 20000492 Result: Down-regulated in Transcription
  misc_feature: MA Experiment 20000492 PARAMETER Experiment Name: Zm_Hybrid_Seed_Dev_P Parameter: DAP Value: 12
  misc_feature: MA Experiment 20000492 PARAMETER Experiment Name: Zm_Hybrid_Seed_Dev_P Parameter: Organism Value: Zea mays
  misc_feature: MA Experiment 20000492 PARAMETER Experiment Name: Zm_Hybrid_Seed_Dev_P Parameter: Plant Line Value: 35A19
  misc_feature: MA Experiment 20000492 PARAMETER Experiment Name: Zm_Hybrid_Seed_Dev_P Parameter: Tissue Value: Fert Kernel vs. Unfert Floret
  misc_feature: MA Experiment ID: 20000533 Result: Down-regulated in Transcription
  misc_feature: MA Experiment 20000533 PARAMETER Experiment Name: Zm_0.001percent_MeJA_P Parameter: Age (day) Value: 11
  misc_feature: MA Experiment 20000533 PARAMETER Experiment Name: Zm_0.001percent_MeJA_P Parameter: Organism Value: Zea mays
  misc_feature: MA Experiment 20000533 PARAMETER Experiment Name: Zm_0.001percent_MeJA_P Parameter: Plant Line Value: 35A19
  misc_feature: MA Experiment 20000533 PARAMETER Experiment Name: Zm_0.001percent_MeJA_P Parameter: Timepoint (hr) Value: 72
  misc_feature: MA Experiment 20000533 PARAMETER Experiment Name: Zm_0.001percent_MeJA_P Parameter: Tissue Value: Aerial
  misc_feature: MA Experiment 20000533 PARAMETER Experiment Name: Zm_0.001percent_MeJA_P Parameter: Treatment Value: 0.001percent MeJA vs. No Treatment
  misc_feature: MA Experiment ID: 20000535 Result: Down-regulated in Transcription
  misc_feature: MA Experiment 20000535 PARAMETER Experiment Name: Zm_Hybrid_Seed_Dev_P Parameter: DAP Value: 30 vs. 12
  misc_feature: MA Experiment 20000535 PARAMETER Experiment Name: Zm_Hybrid_Seed_Dev_P Parameter: Organism Value: Zea mays
  misc_feature: MA Experiment 20000535 PARAMETER Experiment Name: Zm_Hybrid_Seed_Dev_P Parameter: Plant Line Value: 35A19
  misc_feature: MA Experiment 20000535 PARAMETER Experiment Name: Zm_Hybrid_Seed_Dev_P Parameter: Tissue Value: Embryo vs. Unfert Floret
  misc_feature: MA Experiment ID: 20000626 Result: Down-regulated in Transcription
  misc_feature: MA Experiment 20000626 PARAMETER Experiment Name: Zm_Herbicide-Treatments_P Parameter: Timepoint (hr) Value: 12
  misc_feature: MA Experiment 20000626 PARAMETER Experiment Name: Zm_Herbicide-Treatments_P Parameter: Tissue Value: Aerial
  misc_feature: MA Experiment 20000626 PARAMETER Experiment Name: Zm_Herbicide-Treatments_P Parameter: Treatment Value: Roundup vs. No Treatment
tacatttattctcttcttcttgagcccctggcctccccctcctgccaggctgcgcattctttctccagctctctgataagctagccagcgtcgtcgtcgtgtcttgttagttattagctctatctcgccgccctgcagctgctgatcgagtgagggaattcagcagcagcagcagcaggtagcatagcatagatatgacggcggcggaggtggaggccgccaaggacatcgccgaggagaaggccgtcgtgccgttgccaccgtcgcccgccaagccggccgacgacgactccaaggccatcgtcgctcttgtcgtcaaggacgctgctgctgggaaaccttctacagctattattggaggctcaactgaaagagatgcttacctcgccaagatcgtgtccgagaagaggctgagtctgatcaccgcctgggaggagagccagaaggcgagagccgacaacagggctgccaagaagcttgccttcatcacgtcctgggagaacgccaagaaagcggagatggaggcggagctcagaaagattgaggagcaactggagaagaagaaggcggcgtacgaggagaagctcaagaacaagctggcgatgctgcacaggacggcggaggagaggagggcgcagacggaggccaggcgcggcgaggagaccatcctggcggaggagatggccgccaagtaccgcgccaagggcgagggccccaccaagctctttggcctcttgaaagcgtgacctcttgctatggagaatgccctgtttcgtgcgtgtatttcgtattcccaattgcacttggtgtgtgtgtgtacgtgttgtttgttgttttctcttgtattcgatggcttgcttgacatctgttgtattgtatttgtatagaagtgcagtgcagtgcagtgctattctttct

SEQ ID NO: 9356 - protein, 183 aa, Zea mays subsp. mays
  peptide (1)..(183): Ceres Seq. ID no. 12355345
  misc_feature (70)..(178): Pfam Name: Remorin, C-terminal region Pfam Description: Remorin, C-terminal region
  misc_feature (1)..(180): Homolog of NCBI NO: 4731573 NR Description: remorin 1 [Lycopersicon esculentum]
  misc_feature (6)..(180): Homolog of NCBI NO: 34925093 NR Description: Remorin (pp34) >gi|7489271|pir||T07780 remorin -
  misc_feature (8)..(181): Homolog of NCBI NO: 15237822 NR Description: putative protein; protein id: At5g23750.1, by cDNA: 28686., supported by cDNA: gi_14423537 [Arabidopsis >gi|10176842|dbj|BAB10048.1| contains similarity to
  misc_feature (8)..(181): Homolog of NCBI NO: 21555669 NR Description: remorin [Arabidopsis thaliana]
  misc_feature (6)..(179): Homolog of NCBI NO: 15229057 NR Description: remorin -like protein; protein id: At3g48940.1
  misc_feature (2)..(179): Homolog of NCBI NO: 15233068 NR Description: putative DNA-binding protein; protein id: supported by cDNA: 40796., supported by cDNA: gi_17104524
  misc_feature (52)..(179): Homolog of NCBI NO: 22758339 NR Description: putative remorin protein [Oryza sativa (japonica
  misc_feature (7)..(177): Homolog of NCBI NO: 4883530 NR Description: remorin 2 [Lycopersicon esculentum]
  misc_feature (5)..(179): Homolog of NCBI NO: 15225899 NR Description: remorin; protein id: At2g45820.1, supported by gi_15028386, supported by cDNA: gi_19310658 [Arabidopsis
  misc_feature (5)..(179): Homolog of NCBI NO: 601843 NR Description: DNA-binding protein
MTAAEVEAAKDIAEEKAVVPLPPSPAKPADDDSKAIVALVVKDAAAGKPSTAIIGGSTERDAYLAKIVSEKRLSLITAWEESQKARADNRAAKKLAFITSWENAKKAEMEAELRKIEEQLEKKKAAYEEKLKNKLAMLHRTAEERRAQTEARRGEETILAEEMAAKYRAKGEGPTKLFGLLKA

SEQ ID NO: 9357 - DNA, 1877 bp, Zea mays subsp. mays
  misc_feature (1)..(1877): Ceres Seq. ID no. 12349351
  misc_feature: MA Experiment ID: 108556 Result: Up-regulated in Transcription
  misc_feature: MA Experiment 108556 PARAMETER Experiment Name: Zm_Drought_P Parameter: Age (day) Value: 9
  misc_feature: MA Experiment 108556 PARAMETER Experiment Name: Zm_Drought_P Parameter: Organism Value: Zea mays
  misc_feature: MA Experiment 108556 PARAMETER Experiment Name: Zm_Drought_P Parameter: Plant Line Value: 35A19
  misc_feature: MA Experiment 108556 PARAMETER Experiment Name: Zm_Drought_P Parameter: Timepoint (hr) Value: 24
  misc_feature: MA Experiment 108556 PARAMETER Experiment Name: Zm_Drought_P Parameter: Tissue Value: Aerial
  misc_feature: MA Experiment 108556 PARAMETER Experiment Name: Zm_Drought_P Parameter: Treatment Value: Drought vs. No Drought
  misc_feature: MA Experiment ID: 20000479 Result: Up-regulated in Transcription
  misc_feature: MA Experiment 20000479 PARAMETER Experiment Name: Zm_Drought_P Parameter: Age (day) Value: 10
  misc_feature: MA Experiment 20000479 PARAMETER Experiment Name: Zm_Drought_P Parameter: Organism Value: Zea mays
  misc_feature: MA Experiment 20000479 PARAMETER Experiment Name: Zm_Drought_P Parameter: Plant Line Value: 35A19
  misc_feature: MA Experiment 20000479 PARAMETER Experiment Name: Zm_Drought_P Parameter: Timepoint (hr) Value: 48
  misc_feature: MA Experiment 20000479 PARAMETER Experiment Name: Zm_Drought_P Parameter: Tissue Value: Aerial
  misc_feature: MA Experiment 20000479 PARAMETER Experiment Name: Zm_Drought_P Parameter: Treatment Value: Drought vs. No Drought
  misc_feature: MA Experiment ID: 20000480 Result: Up-regulated in Transcription
  misc_feature: MA Experiment 20000480 PARAMETER Experiment Name: Zm_Drought_P Parameter: Age (day) Value: 11
  misc_feature: MA Experiment 20000480 PARAMETER Experiment Name: Zm_Drought_P Parameter: Organism Value: Zea mays
  misc_feature: MA Experiment 20000480 PARAMETER Experiment Name: Zm_Drought_P Parameter: Plant Line Value: 35A19
  misc_feature: MA Experiment 20000480 PARAMETER Experiment Name: Zm_Drought_P Parameter: Timepoint (hr) Value: 72
  misc_feature: MA Experiment 20000480 PARAMETER Experiment Name: Zm_Drought_P Parameter: Tissue Value: Aerial
  misc_feature: MA Experiment 20000480 PARAMETER Experiment Name: Zm_Drought_P Parameter: Treatment Value: Drought vs. No Drought
  misc_feature: MA Experiment ID: 20000534 Result: Down-regulated in Transcription
  misc_feature: MA Experiment 20000534 PARAMETER Experiment Name: Zm_Hybrid_Pollen_P Parameter: Age (day) Value: 8
  misc_feature: MA Experiment 20000534 PARAMETER Experiment Name: Zm_Hybrid_Pollen_P Parameter: Organism Value: Zea mays
  misc_feature: MA Experiment 20000534 PARAMETER Experiment Name: Zm_Hybrid_Pollen_P Parameter: Plant Line Value: 35A19
  misc_feature: MA Experiment 20000534 PARAMETER Experiment Name: Zm_Hybrid_Pollen_P Parameter: Tissue Value: Pollen vs. Aerial
  misc_feature: MA Experiment ID: 20001608 Result: Down-regulated in Transcription
  misc_feature: MA Experiment 20001608 PARAMETER Experiment Name: Zm_50ppm_KNO3_L-to-H_P Parameter: Age (day) Value: 21
  misc_feature: MA Experiment 20001608 PARAMETER Experiment Name: Zm_50ppm_KNO3_L-to-H_P Parameter: Organism Value: Zea mays
  misc_feature: MA Experiment 20001608 PARAMETER Experiment Name: Zm_50ppm_KNO3_L-to-H_P Parameter: Plant Line Value: 35A19
  misc_feature: MA Experiment 20001608 PARAMETER Experiment Name: Zm_50ppm_KNO3_L-to-H_P Parameter: Timepoint (hr) Value: 48
  misc_feature: MA Experiment 20001608 PARAMETER Experiment Name: Zm_50ppm_KNO3_L-to-H_P Parameter: Tissue Value: Shoots
  misc_feature: MA Experiment 20001608 PARAMETER Experiment Name: Zm_50ppm_KNO3_L-to-H_P Parameter: Treatment Value: 50ppm KNO3 vs. 50ppm KCl
agcagaatttagttatggcccatggctcattaaccactgggccaccggccaaccgcccaccagcataccggctccagtgatcgacgccgggtcgccggcgaaggaagaacagtcaggacgaggaaagaaaaaacaacagaaacgaggaagaaaaacggaaaaaatagagcggcggggcgagatctacgacgcggccgcgggaaggagaggactgcctctacgcaatcccgctatcctggcgacatccacgactccgatatccggtctctcttctctggataaccacaccaccaatcatgagggaatcaccttcaacacagggggggccatctacatcttctgcggttgatgatagttactcagctgacggtgttgaagattcacaactattcctctccgtgccagctttaaaccaagctgcatcttatcttgcccagacagcttcattcctcactcaatgcctccctgtacctggttttgtgggtctatctgaggagggccaagagttattaacactgccacctgcatcggcttcaggcagactttctgttcagacttcttcagtagagccttccggtaccaattcatcccttggtcagtcagattgtggtggaaacccctctcaagaaaacgctggacagatggtgccttcgcatgtttttcagaatggagcttcactgttccaaggccttgttgaacgtgctcggaaaacggtccgtggttcagcagatgatattggctggctccagcgagatcaaagcttacctacaactgaggatgggacagccagattcttagagattttggattctgtgagaaaaaatgaacacaagctatctgattcattggtttacttgttggttccaggtctgtttagtaaccacggacctctttactttgtcaaaacaaaggcatatttctccaagatgggtctggcttgccatattgccaaaattcatagtgagtcttcagtgagtaaaaatgcacgagagataaaggaatacatagaagaaatatactggggatcaaggaaacgtgtgctcctccttggtcacagcaagggtggtgttgatgcggctgcagccctctccctctactgaccacaactcaaagacaaagtcgcaggtttagcattagcccaaagtccatatggaggaagccccgttgcttcagatatcctgcgagaggggcagcttggtgactatgtcaggctgcgtaagatcatggagatcttggtatccaaggtccttaagggtgatctgcaggctctagaagatctgacttatgaaaggcggaaagaattcctgcgacggcacccgctacctcaggatgttcctatcgtttcgttccacacggaggcaagcatcactcccagcgtgctcacagcgctctctcacgttgcacacctggagctcccgattgctggcgatggcaattccactaggatcccagttgtgatgccactttcagccgcgatggcagcatgctcgcagttgctggtggcgaggtatggcgagaagagtgacggtctcgtgacgaggaaagatgctgaggttcctggttcagtggcggtccggccggagcggaagctagaccacgcgtggatggtgtattcgtcgctgaaagaagagtctggggatcaggcggacacgtcgcaggtatgcgaagccctgctgactctacttgtcgaggttgcacagaagaggaggcatgagatggcaatgaaagacgagtgaaagtagcttttggtgttggctggcgatagtgggatgtatcctcctgtaatcgtagactggcctgttgctggctgtacagagttgtgctgctcaaagtgctttgggacctgtttttgtttggttgacagaaacttgtgttgt

SEQ ID NO: 9358 - protein, 267 aa, Zea mays subsp. mays
  peptide (1)..(267): Ceres Seq. ID no. 12349352
  misc_feature (1)..(267): Homolog of NCBI NO: 30689883 NR Description: expressed protein [Arabidopsis thaliana]
  misc_feature (1)..(267): Homolog of NCBI NO: 18377628 NR Description: unknown protein [Arabidopsis thaliana]
  misc_feature (1)..(267): Homolog of NCBI NO: 7486943 NR Description: hypothetical protein At2g44970 [imported] - thaliana >gi|20196918|gb|AAM14832.1| unknown protein [Arabidopsis
MRESPSTQGGPSTSSAVDDSYSADGVEDSQLFLSVPALNQAASYLAQTASFLTQCLPVPGFVGLSEEGQELLTLPPASASGRLSVQTSSVEPSGTNSSLGQSDCGGNPSQENAGQMVPSHVFQNGASLFQGLVERARKTVRGSADDIGWLQRDQSLPTTEDGTARFLEILDSVRKNEHKLSDSLVYLLVPGLFSNHGPLYFVKTKAYFSKMGLACHIAKIHSESSVSKNAREIKEYIEEIYWGSRKRVLLLGHSKGGVDAAAALSLY

SEQ ID NO: 9359 - protein, 170 aa, Zea mays subsp. mays
  peptide (1)..(170): Ceres Seq. ID no. 12349353
  misc_feature (1)..(168): Homolog of NCBI NO: 30689883 NR Description: expressed protein [Arabidopsis thaliana]
  misc_feature (1)..(168): Homolog of NCBI NO: 18377628 NR Description: unknown protein [Arabidopsis thaliana]
  misc_feature (1)..(168): Homolog of NCBI NO: 7486943 NR Description: hypothetical protein At2g44970 [imported] - thaliana >gi|20196918|gb|AAM14832.1| unknown protein [Arabidopsis
MEILVSKVLKGDLQALEDLTYERRKEFLRRHPLPQDVPIVSFHTEASITPSVLTALSHVAHLELPIAGDGNSTRIPVVMPLSAAMAACSQLLVARYGEKSDGLVTRKDAEVPGSVAVRPERKLDHAWMVYSSLKEESGDQADTSQVCEALLTLLVEVAQKRRHEMAMKDE

SEQ ID NO: 9360 - protein, 152 aa, Zea mays subsp. mays
  peptide (1)..(152): Ceres Seq. ID no. 12349354
  misc_feature (1)..(152): Homolog of NCBI NO: 30689883 NR Description: expressed protein [Arabidopsis thaliana]
  misc_feature (1)..(152): Homolog of NCBI NO: 18377628 NR Description: unknown protein [Arabidopsis thaliana]
  misc_feature (1)..(152): Homolog of NCBI NO: 7486943 NR Description: hypothetical protein At2g44970 [imported] - thaliana >gi|20196918|gb|AAM14832.1| unknown protein [Arabidopsis
MVPSHVFQNGASLFQGLVERARKTVRGSADDIGWLQRDQSLPTTEDGTARFLEILDSVRKNEHKLSDSLVYLLVPGLFSNHGPLYFVKTKAYFSKMGLACHIAKIHSESSVSKNAREIKEYIEEIYWGSRKRVLLLGHSKGGVDAAAALSLY

SEQ ID NO: 9361 - DNA, 1501 bp, Zea mays subsp. mays
  misc_feature (1)..(1501): Ceres Seq. ID no. 12362374
  misc_feature: MA Experiment ID: 108545 Result: Down-regulated in Transcription
  misc_feature: MA Experiment 108545 PARAMETER Experiment Name: Zm_Imbibed_Seeds_P Parameter: Age (day) Value: 3 vs. 2
  misc_feature: MA Experiment 108545 PARAMETER Experiment Name: Zm_Imbibed_Seeds_P Parameter: Organism Value: Zea mays
  misc_feature: MA Experiment 108545 PARAMETER Experiment Name: Zm_Imbibed_Seeds_P Parameter: Plant Line Value: 35A19
  misc_feature: MA Experiment 108545 PARAMETER Experiment Name: Zm_Imbibed_Seeds_P Parameter: Tissue Value: Aerial vs. Embryo
  misc_feature: MA Experiment ID: 108688 Result: Down-regulated in Transcription
  misc_feature: MA Experiment 108688 PARAMETER Experiment Name: Zm_Embryos-Flowers__P Parameter: Tissue Value: Immature Flowers vs. Aerial+
  misc_feature: MA Experiment ID: 20000492 Result: Down-regulated in Transcription
  misc_feature: MA Experiment 20000492 PARAMETER Experiment Name: Zm_Hybrid_Seed_Dev_P Parameter: DAP Value: 12
  misc_feature: MA Experiment 20000492 PARAMETER Experiment Name: Zm_Hybrid_Seed_Dev_P Parameter: Organism Value: Zea mays
  misc_feature: MA Experiment 20000492 PARAMETER Experiment Name: Zm_Hybrid_Seed_Dev_P Parameter: Plant Line Value: 35A19
  misc_feature: MA Experiment 20000492 PARAMETER Experiment Name: Zm_Hybrid_Seed_Dev_P Parameter: Tissue Value: Fert Kernel vs. Unfert Floret
  misc_feature: MA Experiment ID: 20000535 Result: Down-regulated in Transcription
  misc_feature: MA Experiment 20000535 PARAMETER Experiment Name: Zm_Hybrid_Seed_Dev_P Parameter: DAP Value: 30 vs. 12
  misc_feature: MA Experiment 20000535 PARAMETER Experiment Name: Zm_Hybrid_Seed_Dev_P Parameter: Organism Value: Zea mays
  misc_feature: MA Experiment 20000535 PARAMETER Experiment Name: Zm_Hybrid_Seed_Dev_P Parameter: Plant Line Value: 35A19
  misc_feature: MA Experiment 20000535 PARAMETER Experiment Name: Zm_Hybrid_Seed_Dev_P Parameter: Tissue Value: Embryo vs. Unfert Floret
gatgatgatgaataggccgcaaccgcagcaagccggcccgctgcagctcctccgttcgctaggactaggcgtaggcggaggcggaggcgcccggcggggggccatgaagtcggccacgtcgctcctgctcggcgctgcgctcgccaccgccttcttccttctctacacctccctctgccgcgacctcggcagcgccgctgccgccgcgcccaggtcgggatcgtcgccgccgccgacgccgcggcgggagcaggagaccggcgacacggccgccgctcggcaggaggccgccacgggagagggcggggaagaacgtgtggctgcgagcagcgacggcggccgcagaggcggcggcgccaccgccgccacagcggaggagaatggtcagagcaaggaggaggagcagcggcggattgtgatgcctgccacgtcaacaacccacgaggccacctcccaccatagaccgcagccgaagcaacagaagaagaagaggagcccaccagcagcgtcccaggatctggcggacctgctccggcgagcggcgacggcggacaagacggtgctgatgacggcgatcaacgaggcgtgggcagcgccagggtcgttcctggacctgttcctggagagcttccgccagggcgaggacaccgcgggcctgccgcggcacctgctggtcgtggccatggacggcagggccctggagcggtgcaacgccgtgcaccccttctgctacctgttccgcgtcgacggcatggacttcgccgccgagcagaagtacatggagggcgactacctggagatgatgtggcgccggaaccggttccagcagagcgtgctggagctgggctacagcttcctcttcacggacgtggacatcctgtggttccggagcccgttcccgcgcctgccccgcgccgcgcaggtcgtcatgtcggccgacttcttcgtcggcgacgccgactcgcccaacaactaccccaacggcggcctcctctacgtccgctcctcgcccgccacggtgggcttctaccgccactggcaggcgtcgcgcgcgaggttcccgggccaccacgagcagtacgtcttcgacaagatcgtcaaggaagggtacggccggcgcccgggtgcagttcctggacacggccgtcttcgggggtttctgccagcacggcgacgacctgggcagggtggccaccatgcacgccaactgctgcgtggggctggacaacaagctcttcgacctcaagaacgtgctgcaggactggaagacctacagagcacgcgccgccgccggcaacgcgcagggtttctcgtggcgggtgcccggaaaatgcatacactgactctagactctggaggggttgagctcatttttcgattgttcgccagatagtacaacttaacagctacatctcatttttccccctaatgtatacatacatatattgtttatatatatatatttgtaaagctttttatggaatgtaaaaaaattattatt

SEQ ID NO: 9362 - protein, 463 aa, Zea mays subsp. mays
  peptide (1)..(463): Ceres Seq. ID no. 12362375
  misc_feature (36)..(376): Homolog of NCBI NO: 34904674 NR Description: P0446G09.1 [Oryza sativa (japonica >gi|28564589|dbj|BAC57756.1| putative regulatory protein [Oryza
  misc_feature (155)..(368): Homolog of NCBI NO: 34897442 NR Description: putative regulatory protein [Oryza sativa
  misc_feature (24)..(96): Homolog of NCBI NO: 34897442 NR Description: putative regulatory protein [Oryza sativa
  misc_feature (107)..(373): Homolog of NCBI NO: 19386737 NR Description: P0678F11.26 [Oryza sativa (japonica
  misc_feature (36)..(368): Homolog of NCBI NO: 34897440 NR Description: putative regulatory protein [Oryza sativa
  misc_feature (173)..(375): Homolog of NCBI NO: 15223826 NR Description: hypothetical protein common family; protein id:
  misc_feature (145)..(365): Homolog of NCBI NO: 18395292 NR Description: unknown protein; protein id: At2g02060.1
  misc_feature (172)..(368): Homolog of NCBI NO: 19386795 NR Description: OJ1485_B09.3 [Oryza sativa (japonica
  misc_feature (172)..(368): Homolog of NCBI NO: 19386738 NR Description: P0678F11.28 [Oryza sativa (japonica
  misc_feature (172)..(368): Homolog of NCBI NO: 19386742 NR Description: P0678F11.32 [Oryza sativa (japonica
MMMNRPQPQQAGPLQLLRSLGLGVGGGGGARRGAMKSATSLLLGAALATAFFLLYTSLCRDLGSAAAAAPRSGSSPPPTPRREQETGDTAAARQEAATGEGGEERVAASSDGGRRGGGATAATAEENGQSKEEEQRRIVMPATSTTHEATSHHRPQPKQQKKKRSPPAASQDLADLLRRAATADKTVLMTAINEAWAAPGSFLDLFLESFRQGEDTAGLPRHLLVVAMDGRALERCNAVHPFCYLFRVDGMDFAAEQKYMEGDYLEMMWRRNRFQQSVLELGYSFLFTDVDILWFRSPFPRLPRAAQVVMSADFFVGDADSPNNYPNGGLLYVRSSPATVGFYRHWQASRARFPGHHEQYVFDKIVKEGYGRRPGAVPGHGRLRGFLPARRRPGQGGHHARQLLRGAGQQALRPQERAAGLEDLQSTRRRRQRAGFLVAGARKMHTLTLDSGGVELIFRLFAR

SEQ ID NO: 9363 - protein, 462 aa, Zea mays subsp. mays
  peptide (1)..(462): Ceres Seq. ID no. 12362376
  misc_feature (35)..(375): Homolog of NCBI NO: 34904674 NR Description: P0446G09.1 [Oryza sativa (japonica >gi|28564589|dbj|BAC57756.1| putative regulatory protein [Oryza
  misc_feature (154)..(367): Homolog of NCBI NO: 34897442 NR Description: putative regulatory protein [Oryza sativa
  misc_feature (23)..(95): Homolog of NCBI NO: 34897442 NR Description: putative regulatory protein [Oryza sativa
  misc_feature (106)..(372): Homolog of NCBI NO: 19386737 NR Description: P0678F11.26 [Oryza sativa (japonica
  misc_feature (35)..(367): Homolog of NCBI NO: 34897440 NR Description: putative regulatory protein [Oryza sativa
  misc_feature (172)..(374): Homolog of NCBI NO: 15223826 NR Description: hypothetical protein common family; protein id:
  misc_feature (144)..(364): Homolog of NCBI NO: 18395292 NR Description: unknown protein; protein id: At2g02060.1
  misc_feature (171)..(367): Homolog of NCBI NO: 19386795 NR Description: OJ1485_B09.3 [Oryza sativa (japonica
  misc_feature (171)..(367): Homolog of NCBI NO: 19386738 NR Description: P0678F11.28 [Oryza sativa (japonica
  misc_feature (171)..(367): Homolog of NCBI NO: 19386742 NR Description: P0678F11.32 [Oryza sativa (japonica
MMNRPQPQQAGPLQLLRSLGLGVGGGGGARRGAMKSATSLLLGAALATAFFLLYTSLCRDLGSAAAAAPRSGSSPPPTPRREQETGDTAAARQEAATGEGGEERVAASSDGGRRGGGATAATAEENGQSKEEEQRRIVMPATSTTHEATSHHRPQPKQQKKKRSPPAASQDLADLLRRAATADKTVLMTAINEAWAAPGSFLDLFLESFRQGEDTAGLPRHLLVVAMDGRALERCNAVHPFCYLFRVDGMDFAAEQKYMEGDYLEMMWRRNRFQQSVLELGYSFLFTDVDILWFRSPFPRLPRAAQVVMSADFFVGDADSPNNYPNGGLLYVRSSPATVGFYRHWQASRARFPGHHEQYVFDKIVKEGYGRRPGAVPGHGRLRGFLPARRRPGQGGHHARQLLRGAGQQALRPQERAAGLEDLQSTRRRRQRAGFLVAGARKMHTLTLDSGGVELIFRLFAR

SEQ ID NO: 9364 - protein, 461 aa, Zea mays subsp. mays
  peptide (1)..(461): Ceres Seq. ID no. 12362377
  misc_feature (34)..(374): Homolog of NCBI NO: 34904674 NR Description: P0446G09.1 [Oryza sativa (japonica >gi|28564589|dbj|BAC57756.1| putative regulatory protein [Oryza
  misc_feature (153)..(366): Homolog of NCBI NO: 34897442 NR Description: putative regulatory protein [Oryza sativa
  misc_feature (22)..(94): Homolog of NCBI NO: 34897442 NR Description: putative regulatory protein [Oryza sativa
  misc_feature (105)..(371): Homolog of NCBI NO: 19386737 NR Description: P0678F11.26 [Oryza sativa (japonica
  misc_feature (34)..(366): Homolog of NCBI NO: 34897440 NR Description: putative regulatory protein [Oryza sativa
  misc_feature (171)..(373): Homolog of NCBI NO: 15223826 NR Description: hypothetical protein common family; protein id:
  misc_feature (143)..(363): Homolog of NCBI NO: 18395292 NR Description: unknown protein; protein id: At2g02060.1
  misc_feature (170)..(366): Homolog of NCBI NO: 19386795 NR Description: OJ1485_B09.3 [Oryza sativa (japonica
  misc_feature (170)..(366): Homolog of NCBI NO: 19386738 NR Description: P0678F11.28 [Oryza sativa (japonica
  misc_feature (170)..(366): Homolog of NCBI NO: 19386742 NR Description: P0678F11.32 [Oryza sativa (japonica
MNRPQPQQAGPLQLLRSLGLGVGGGGGARRGAMKSATSLLLGAALATAFFLLYTSLCRDLGSAAAAAPRSGSSPPPTPRREQETGDTAAARQEAATGEGGEERVAASSDGGRRGGGATAATAEENGQSKEEEQRRIVMPATSTTHEATSHHRPQPKQQKKKRSPPAASQDLADLLRRAATADKTVLMTAINEAWAAPGSFLDLFLESFRQGEDTAGLPRHLLVVAMDGRALERCNAVHPFCYLFRVDGMDFAAEQKYMEGDYLEMMWRRNRFQQSVLELGYSFLFTDVDILWFRSPFPRLPRAAQVVMSADFFVGDADSPNNYPNGGLLYVRSSPATVGFYRHWQASRARFPGHHEQYVFDKIVKEGYGRRPGAVPGHGRLRGFLPARRRPGQGGHHARQLLRGAGQQALRPQERAAGLEDLQSTRRRRQRAGFLVAGARKMHTLTLDSGGVELIFRLFAR

SEQ ID NO: 9365 - DNA, 1523 bp, Zea mays subsp. mays
  misc_feature (1)..(1523): Ceres Seq. ID no. 12367639
  misc_feature: MA Experiment ID: 108515 Result: Up-regulated in Transcription
  misc_feature: MA Experiment 108515 PARAMETER Experiment Name: Zm_2mM_SA_P Parameter: Age (day) Value: 8
  misc_feature: MA Experiment 108515 PARAMETER Experiment Name: Zm_2mM_SA_P Parameter: Organism Value: Zea mays
  misc_feature: MA Experiment 108515 PARAMETER Experiment Name: Zm_2mM_SA_P Parameter: Plant Line Value: 35A19
  misc_feature: MA Experiment 108515 PARAMETER Experiment Name: Zm_2mM_SA_P Parameter: Timepoint (hr) Value: 12
  misc_feature: MA Experiment 108515 PARAMETER Experiment Name: Zm_2mM_SA_P Parameter: Tissue Value: Aerial
  misc_feature: MA Experiment 108515 PARAMETER Experiment Name: Zm_2mM_SA_P Parameter: Treatment Value: 2mM SA vs. No Treatment
  misc_feature: MA Experiment ID: 20000478 Result: Up-regulated in Transcription
  misc_feature: MA Experiment 20000478 PARAMETER Experiment Name: Zm_5mM_SA_P Parameter: Age (day) Value: 11
  misc_feature: MA Experiment 20000478 PARAMETER Experiment Name: Zm_5mM_SA_P Parameter: Organism Value: Zea mays
  misc_feature: MA Experiment 20000478 PARAMETER Experiment Name: Zm_5mM_SA_P Parameter: Plant Line Value: 35A19
  misc_feature: MA Experiment 20000478 PARAMETER Experiment Name: Zm_5mM_SA_P Parameter: Timepoint (hr) Value: 72
  misc_feature: MA Experiment 20000478 PARAMETER Experiment Name: Zm_5mM_SA_P Parameter: Tissue Value: Aerial
  misc_feature: MA Experiment 20000478 PARAMETER Experiment Name: Zm_5mM_SA_P Parameter: Treatment Value: 5mM SA vs. No Treatment
gatctgccatggcctcgctccagtcctttctcgccgtcaaaccggccgccggctgggccgctccgtcccgccgcgcgcgcgtcgcggccttcctcgctccgccgcccccgaccaccgcggccgccgtgggggcggcgcggcgggagctgtcggccgcgagcctggccgtcgtggacggcgaggcgcggtacctcgtcggcacctacaagcggtcccgcgtcgtcttcgagcacggccgcgggtgcaagctctacgataccgacggccgcgagtacctcgacatggccgccggcatcgccgtcacggcgctcgggccacgcggacccagacgtgtgcgccaccatcgcggagcaggccggtaaggtcgtccacgtcagcaacgtcttctacaccaaaccccaggtggagctagccaagcggctcgttgaggtgtcgttcgcggaccgcgccttcttcgccagcactggcacggaggccaacgaggcggccatcaaattctcccgcaagttccagcgggccgcacacccggagagcggcgacccgcccacggagttcctggcgttcagcagcagcttccacggccggaccatgggcgccgtcgcgctcaccagcaagtcgcagtaccgggagcccttcgcgcccgtcatgcctggggtgaccttcgtggattacggcgatctggaggcggccaagaagttcgtacggtccggcagggtcgctgctgtcttcgtcgagcccgtgcagggtgagggtggcattcacagtgccaccagggagttcttgcaggggctgcgggacgcctgtgacgaggcgggagccctcttggtctttgatgaggtgcagtgtggtttcgggcgcacaggccacctctgggcgcatgaggcgtacggagtggaaccagacataatgaccttagcgaagccactggccaacggcattcccatcggcgttgtcctggtgaaggagaagatcgccgcagccataaactacggcgaccacggcacgacgtttggcggcgggcctctcgcctgccagaccgcgataacggtgttcgacaagatcacgagacccggtttcctggccgaggtgtcgaggaaaggggagagcttcaagcagctgctccgcgccaagctgagcgggaacccgcacgtgagggaggtccgcggggtcggccttctcgtcggcgtcgagctggacgtgccagctggtcctctggtcgacgcgtgcttggacgccggcgtcgtcgtgctgactgccggtaagggcaatgtggtgaggctggtgccgccgctcatcgtctcggagaaggagctggagcatgccgcggatgtcataagggactgtctaccggcgctcgatgtcgttgctgctgccctatgtatatggtggtgcaataggtccggatatgaaacctgattccaaattttggaatcgaataaatttcatgtcgggccaatgttgttgtgttcattgaaacaaactcttttttttttggaatcgaataattattacatgtcagaccg

SEQ ID NO: 9366 - protein, 471 aa, Zea mays subsp. mays
  peptide (1)..(471): Ceres Seq. ID no. 12367640
  misc_feature (105)..(453): Pfam Name: Aminotransferase class-III Pfam Description: Aminotransferase class-III
  misc_feature (105)..(453): Homolog of NCBI NO: 2811029 NR Description: Acetylornithine aminotransferase, mitochondrial (ACOAT) (Acetylornithine transaminase) (AOTA)
  misc_feature (105)..(453): Homolog of NCBI NO: 15220176 NR Description: putative acetylornithine transaminase; protein At1g80600.1, supported by cDNA: 19586., supported by cDNA: [Arabidopsis thaliana] >gi|25406676|pir||B96838 hypothetical
  misc_feature (105)..(453): Homolog of NCBI NO: 21554043 NR Description: putative acetylornithine transaminase
  misc_feature (186)..(426): Homolog of NCBI NO: 34394063 NR Description: putative acetylornithine aminotransferase [Oryza
  misc_feature (105)..(451): Homolog of NCBI NO: 22972847 NR Description: hypothetical protein [Chloroflexus aurantiacus]
  misc_feature (105)..(437): Homolog of NCBI NO: 15668902 NR Description: acetylornithine aminotransferase (argD) jannaschii] >gi|2833557|sp|Q58131|ARGD_METJA Acetylornithine
  misc_feature (105)..(452): Homolog of NCBI NO: 15644529 NR Description: acetylornithine aminotransferase [Thermotoga >gi|9296961|sp|Q9X2A5|ARGD_THEMA Acetylornithine aminotransferase
  misc_feature (106)..(445): Homolog of NCBI NO: 23021780 NR Description: hypothetical protein [Clostridium thermocellum
  misc_feature (105)..(456): Homolog of NCBI NO: 27262344 NR Description: Acetylornithine aminotransferase [Heliobacillus
  misc_feature (105)..(445): Homolog of NCBI NO: 15679337 NR Description: N-acetylornithine aminotransferase thermautotrophicus] >gi|3913079|sp|O27392|ARGD_METTH
DLPWPRSSPFSPSNRPPAGPLRPAARASRPSSLRRPRPPRPPWGRRGGSCRPRAWPSWTARRGTSSAPTSGPASSSSTAAGASSTIPTAASTSTWPPASPSRRSGHADPDVCATIAEQAGKVVHVSNVFYTKPQVELAKRLVEVSFADRAFFASTGTEANEAAIKFSRKFQRAAHPESGDPPTEFLAFSSSFHGRTMGAVALTSKSQYREPFAPVMPGVTFVDYGDLEAAKKFVRSGRVAAVFVEPVQGEGGIHSATREFLQGLRDACDEAGALLVFDEVQCGFGRTGHLWAHEAYGVEPDIMTLAKPLANGIPIGVVLVKEKIAAAINYGDHGTTFGGGPLACQTAITVFDKITRPGFLAEVSRKGESFKQLLRAKLSGNPHVREVRGVGLLVGVELDVPAGPLVDACLDAGVVVLTAGKGNVVRLVPPLIVSEKELEHAADVIRDCLPALDVVAAALCIWWCNRSGYET

SEQ ID NO: 9367 - protein, 275 aa, Zea mays subsp. mays
  peptide (1)..(275): Ceres Seq. ID no. 12367641
  misc_feature (1)..(257): Pfam Name: Aminotransferase class-III Pfam Description: Aminotransferase class-III
  misc_feature (1)..(257): Homolog of NCBI NO: 2811029 NR Description: Acetylornithine aminotransferase, mitochondrial (ACOAT) (Acetylornithine transaminase) (AOTA)
  misc_feature (1)..(257): Homolog of NCBI NO: 15220176 NR Description: putative acetylornithine transaminase; protein At1g80600.1, supported by cDNA: 19586., supported by cDNA: [Arabidopsis thaliana] >gi|25406676|pir||B96838 hypothetical
  misc_feature (1)..(257): Homolog of NCBI NO: 21554043 NR Description: putative acetylornithine transaminase
  misc_feature (1)..(230): Homolog of NCBI NO: 34394063 NR Description: putative acetylornithine aminotransferase [Oryza
  misc_feature (1)..(255): Homolog of NCBI NO: 22972847 NR Description: hypothetical protein [Chloroflexus aurantiacus]
  misc_feature (1)..(241): Homolog of NCBI NO: 15668902 NR Description: acetylornithine aminotransferase (argD) jannaschii] >gi|2833557|sp|Q58131|ARGD_METJA Acetylornithine
  misc_feature (1)..(256): Homolog of NCBI NO: 15644529 NR Description: acetylornithine aminotransferase [Thermotoga >gi|9296961|sp|Q9X2A5|ARGD_THEMA Acetylornithine aminotransferase
  misc_feature (1)..(249): Homolog of NCBI NO: 23021780 NR Description: hypothetical protein [Clostridium thermocellum
  misc_feature (1)..(260): Homolog of NCBI NO: 27262344 NR Description: Acetylornithine aminotransferase [Heliobacillus
  misc_feature (1)..(249): Homolog of NCBI NO: 15679337 NR Description: N-acetylornithine aminotransferase thermautotrophicus] >gi|3913079|sp|O27392|ARGD_METTH
MGAVALTSKSQYREPFAPVMPGVTFVDYGDLEAAKKFVRSGRVAAVFVEPVQGEGGIHSATREFLQGLRDACDEAGALLVFDEVQCGFGRTGHLWAHEAYGVEPDIMTLAKPLANGIPIGVVLVKEKIAAAINYGDHGTTFGGGPLACQTAITVFDKITRPGFLAEVSRKGESFKQLLRAKLSGNPHVREVRGVGLLVGVELDVPAGPLVDACLDAGVVVLTAGKGNVVRLVPPLIVSEKELEHAADVIRDCLPALDVVAAALCIWWCNRSGYET

SEQ ID NO: 9368 - protein, 256 aa, Zea mays subsp. mays
  peptide (1)..(256): Ceres Seq. ID no. 12367642
  misc_feature (1)..(238): Pfam Name: Aminotransferase class-III Pfam Description: Aminotransferase class-III
  misc_feature (1)..(211): Homolog of NCBI NO: 34394063 NR Description: putative acetylornithine aminotransferase [Oryza
  misc_feature (1)..(236): Homolog of NCBI NO: 22972847 NR Description: hypothetical protein [Chloroflexus aurantiacus]
  misc_feature (1)..(222): Homolog of NCBI NO: 15668902 NR Description: acetylornithine aminotransferase (argD) jannaschii] >gi|2833557|sp|Q58131|ARGD_METJA Acetylornithine
  misc_feature (1)..(237): Homolog of NCBI NO: 15644529 NR Description: acetylornithine aminotransferase [Thermotoga >gi|9296961|sp|Q9X2A5|ARGD_THEMA Acetylornithine aminotransferase
  misc_feature (1)..(238): Homolog of NCBI NO: 15220176 NR Description: putative acetylornithine transaminase; protein At1g80600.1, supported by cDNA: 19586., supported by cDNA: [Arabidopsis thaliana] >gi|25406676|pir||B96838 hypothetical
  misc_feature (1)..(238): Homolog of NCBI NO: 21554043 NR Description: putative acetylornithine transaminase
  misc_feature (1)..(238): Homolog of NCBI NO: 2811029 NR Description: Acetylornithine aminotransferase, mitochondrial (ACOAT) (Acetylornithine transaminase) (AOTA)
  misc_feature (1)..(230): Homolog of NCBI NO: 23021780 NR Description: hypothetical protein [Clostridium thermocellum
  misc_feature (1)..(241): Homolog of NCBI NO: 27262344 NR Description: Acetylornithine aminotransferase [Heliobacillus
  misc_feature (1)..(230): Homolog of NCBI NO: 15679337 NR Description: N-acetylornithine aminotransferase thermautotrophicus] >gi|3913079|sp|O27392|ARGD_METTH
MPGVTFVDYGDLEAAKKFVRSGRVAAVFVEPVQGEGGIHSATREFLQGLRDACDEAGALLVFDEVQCGFGRTGHLWAHEAYGVEPDIMTLAKPLANGIPIGVVLVKEKIAAAINYGDHGTTFGGGPLACQTAITVFDKITRPGFLAEVSRKGESFKQLLRAKLSGNPHVREVRGVGLLVGVELDVPAGPLVDACLDAGVVVLTAGKGNVVRLVPPLIVSEKELEHAADVIRDCLPALDVVAAALCIWWCNRSGYET

SEQ ID NO: 9369 - DNA, 1997 bp, Zea mays subsp. mays
  misc_feature (1)..(1997): Ceres Seq. ID no. 12373118
  misc_feature: MA Experiment ID: 108527 Result: Up-regulated in Transcription
  misc_feature: MA Experiment 108527 PARAMETER Experiment Name: Zm_5mM_NO_P Parameter: Age (day) Value: 8
  misc_feature: MA Experiment 108527 PARAMETER Experiment Name: Zm_5mM_NO_P Parameter: Organism Value: Zea mays
  misc_feature: MA Experiment 108527 PARAMETER Experiment Name: Zm_5mM_NO_P Parameter: Plant Line Value: 35A19
  misc_feature: MA Experiment 108527 PARAMETER Experiment Name: Zm_5mM_NO_P Parameter: Timepoint (hr) Value: 6
  misc_feature: MA Experiment 108527 PARAMETER Experiment Name: Zm_5mM_NO_P Parameter: Tissue Value: Aerial
  misc_feature: MA Experiment 108527 PARAMETER Experiment Name: Zm_5mM_NO_P Parameter: Treatment Value: 5mM NO vs. No Treatment
  misc_feature: MA Experiment ID: 108534 Result: Up-regulated in Transcription
  misc_feature: MA Experiment 108534 PARAMETER Experiment Name: Zm_4deg_Cold_P Parameter: Age (hr) Value: 8
  misc_feature: MA Experiment 108534 PARAMETER Experiment Name: Zm_4deg_Cold_P Parameter: Organism Value: Zea mays
  misc_feature: MA Experiment 108534 PARAMETER Experiment Name: Zm_4deg_Cold_P Parameter: Plant Line Value: 35A19
  misc_feature: MA Experiment 108534 PARAMETER Experiment Name: Zm_4deg_Cold_P Parameter: Temperature (deg C) Value: 4 vs. 22
  misc_feature: MA Experiment 108534 PARAMETER Experiment Name: Zm_4deg_Cold_P Parameter: Timepoint (hr) Value: 6
  misc_feature: MA Experiment 108534 PARAMETER Experiment Name: Zm_4deg_Cold_P Parameter: Tissue Value: Aerial
  misc_feature: MA Experiment ID: 108535 Result: Down-regulated in Transcription
  misc_feature: MA Experiment 108535 PARAMETER Experiment Name: Zm_Meristem_P Parameter: Age (day) Value: 8
  misc_feature: MA Experiment 108535 PARAMETER Experiment Name: Zm_Meristem_P Parameter: Organism Value: Zea mays
  misc_feature: MA Experiment 108535 PARAMETER Experiment Name: Zm_Meristem_P Parameter: Plant Line Value: 35A19
  misc_feature: MA Experiment 108535 PARAMETER Experiment Name: Zm_Meristem_P Parameter: Tissue Value: Root Meristem vs. Above Root Meristem
  misc_feature: MA Experiment ID: 108689 Result: Down-regulated in Transcription
  misc_feature: MA Experiment 108689 PARAMETER Experiment Name: Zm_Drought_Roots_P Parameter: Age (day) Value: 9
  misc_feature: MA Experiment 108689 PARAMETER Experiment Name: Zm_Drought_Roots_P Parameter: Organism Value: Zea mays
  misc_feature: MA Experiment 108689 PARAMETER Experiment Name: Zm_Drought_Roots_P Parameter: Plant Line Value: 35A19
  misc_feature: MA Experiment 108689 PARAMETER Experiment Name: Zm_Drought_Roots_P Parameter: Timepoint (hr) Value: 24
  misc_feature: MA Experiment 108689 PARAMETER Experiment Name: Zm_Drought_Roots_P Parameter: Tissue Value: Roots
  misc_feature: MA Experiment 108689 PARAMETER Experiment Name: Zm_Drought_Roots_P Parameter: Treatment Value: Drought vs. No Drought
  misc_feature: MA Experiment ID: 20000626 Result: Up-regulated in Transcription
  misc_feature: MA Experiment 20000626 PARAMETER Experiment Name: Zm_Herbicide-Treatments_P Parameter: Timepoint (hr) Value: 12
  misc_feature: MA Experiment 20000626 PARAMETER Experiment Name: Zm_Herbicide-Treatments_P Parameter: Tissue Value: Aerial
  misc_feature: MA Experiment 20000626 PARAMETER Experiment Name: Zm_Herbicide-Treatments_P Parameter: Treatment Value: Roundup vs. No Treatment
  misc_feature: MA Experiment ID: 20001608 Result: Down-regulated in Transcription
  misc_feature: MA Experiment 20001608 PARAMETER Experiment Name: Zm_50ppm_KNO3_L-to-H_P Parameter: Age (day) Value: 21
  misc_feature: MA Experiment 20001608 PARAMETER Experiment Name: Zm_50ppm_KNO3_L-to-H_P Parameter: Organism Value: Zea mays
  misc_feature: MA Experiment 20001608 PARAMETER Experiment Name: Zm_50ppm_KNO3_L-to-H_P Parameter: Plant Line Value: 35A19
  misc_feature: MA Experiment 20001608 PARAMETER Experiment Name: Zm_50ppm_KNO3_L-to-H_P Parameter: Timepoint (hr) Value: 48
  misc_feature: MA Experiment 20001608 PARAMETER Experiment Name: Zm_50ppm_KNO3_L-to-H_P Parameter: Tissue Value: Shoots
  misc_feature: MA Experiment 20001608 PARAMETER Experiment Name: Zm_50ppm_KNO3_L-to-H_P Parameter: Treatment Value: 50ppm KNO3 vs. 50ppm KCl
agaggagagagtcgctctgcactgcacgactcctcccccatctaccactacctgtctacctacccagcccatcgactgcccctcgcaacgcaatggcgctcgccaccaactccgccgctgccgcagcagctgccgtatccggcggcgcggcatcccagccgcaccgcgcggccacgttcctcccgctgaagaggcgcaccatctccgccatccacgccgccgacccgtctaagaacaacgggcccgccgtccccgcggccgccgccgctaagtcatctgcctctgcggtggccacgccggagaagaatccggcggcgccggtaaagtgggcggtcgacagctggaagtcgaagaaggcgctgcagctcccagagtacccaaaccaggaggagctggacacggtgctcaagaccatcgagacgttcccgccggtggtgttcgccggagaggcgcgtcacctcgaggagcgcatggccgaggccgccatgggccgcgccttcatcctccagggcggcgactgcgccgagagcttcaaggagttccacgccaacaacatccgtgacaccttccgtattctgcttcagatgggcgccgtgctcatgttcggtggtcaggtgccggtcgtcaaggtggggaggatggctggccagtttgccaagccaaggtccgaaccgttggaggagagggacggcgtcaagctgccaagctacaggggcgacaacgtcaacggcgacgacttcaccgagaagagccgcgtgccagacccgcagaggatgatccgcgcctactcgcagtcggtggcgacgctcaacctgctccgcgcgttggcgaccggagggtacgctgccatgcagcgcgtcacacagtggaacctcgatttcatggatcacagcgagcaaggtgataggtaccgtgaattggcccatagggtggatgaggctcttgggttcatgactgcagcagggcttacagttgaccacccgataatgacgactactgacttctggacctcgcacgagtgccttctcttaccctacgagcagtctcttacccgtaaagactccaccagtggccttttctacgattgttcggcccacatgttgtgggttggtgagcgcactcgtcaactcgatggagcgcatgttgaattcctccgtggtgttgccaaccctcttggcataaaggtgagcgacaaaatgaaccccagtgacttggtgaagctgattgagattctgaacccttcaaacaaacctggaaggatcaccataattacaaggatgggggcagagaacatgagagtgaagttgcctcatctcatccgtgctgttcgcaatgctggattgattgtcacatggattactgatcctatgcatggaaacaccatcaaggccccttgtggcctgaagactcgtccattcgactcaattctggctgaagtgcgcgcattcttcgacgtgcatgatcaagaaggaagtcacccaggaggcatccaccttgaaatgactgggcagaacgtgaccgagtgcattggtggatcacggactgtgaccttcgatgaccttagcgaccgctaccacacccactgtgacccaaggctgaacgcctcccagtccctggagctcgccttcatcattgcagagaggctcaggaagaggaggatgcggtcggggctcaacaacagcctgcctctgccaccactggctttctaagtagccgaagctgaacagagaaggtagagggatagttgcagcgactcgaaagattacgcctgtttatttgttgatgcttggtgtggaggcctggtgggtgctcttggcacaagttacatgctggggagctataggagggtacctgttgcgttgtggaagacagtagctagtattatgtgttgtaattgtatgccttcgtttcatgttctgggtgcgtgacttgtcgactttgctgcttctggggttctgaccttggtaaggagagaataaagagataatataattgcg

SEQ ID NO: 9370 - protein, 568 aa, Zea mays subsp. mays
  peptide (1)..(568): Ceres Seq. ID no. 12373119
  misc_feature (108)..(545): Pfam Name: Class-II DAHP synthetase family Pfam Description: Class-II DAHP synthetase family
  misc_feature (31)..(568): Homolog of NCBI NO: 34906844 NR Description: putative phospho-2-dehydro-3-deoxyheptonate
  misc_feature (67)..(555): Homolog of NCBI NO: 2398679 NR Description: 3-deoxy-D-arabino-heptulosonate 7-phosphate
  misc_feature (67)..(555): Homolog of NCBI NO: 584777 NR Description: Phospho-2-dehydro-3-deoxyheptonate aldolase 1,
  misc_feature (67)..(555): Homolog of NCBI NO: 24745903 NR Description: 3-deoxy-D-arabino-heptulosonate 7-phosphate
  misc_feature (67)..(555): Homolog of NCBI NO: 584778 NR Description: Phospho-2-dehydro-3-deoxyheptonate aldolase 2,
  misc_feature (67)..(555): Homolog of NCBI NO: 114193 NR Description: Phospho-2-dehydro-3-deoxyheptonate aldolase 1,
  misc_feature (67)..(555): Homolog of NCBI NO: 7488957 NR Description: probable 2-dehydro-3-deoxy-phosphoheptonate
  misc_feature (31)..(555): Homolog of NCBI NO: 2546988 NR Description: 2-dehydro-3-deoxyphosphoheptonate aldolase;
  misc_feature (31)..(555): Homolog of NCBI NO: 15219878 NR Description: 3-deoxy-D-arabino-heptulosonate 7-phosphate, protein id: At1g22410.1 [Arabidopsis thaliana]
  misc_feature (92)..(553): Homolog of NCBI NO: 584779 NR Description: Phospho-2-dehydro-3-deoxyheptonate aldolase 2,
RRESLCTARLLPHLPLPVYLPSPSTAPRNAMALATNSAAAAAAAVSGGAASQPHRAATFLPLKRRTISAIHAADPSKNNGPAVPAAAAAKSSASAVATPEKNPAAPVKWAVDSWKSKKALQLPEYPNQEELDTVLKTIETFPPVVFAGEARHLEERMAEAAMGRAFILQGGDCAESFKEFHANNIRDTFRILLQMGAVLMFGGQVPVVKVGRMAGQFAKPRSEPLEERDGVKLPSYRGDNVNGDDFTEKSRVPDPQRMIRAYSQSVATLNLLRALATGGYAAMQRVTQWNLDFMDHSEQGDRYRELAHRVDEALGFMTAAGLTVDHPIMTTTDFWTSHECLLLPYEQSLTRKDSTSGLFYDCSAHMLWVGERTRQLDGAHVEFLRGVANPLGIKVSDKMNPSDLVKLIEILNPSNKPGRITIITRMGAENMRVKLPHLIRAVRNAGLIVTWITDPMHGNTIKAPCGLKTRPFDSILAEVRAFFDVHDQEGSHPGGIHLEMTGQNVTECIGGSRTVTFDDLSDRYHTHCDPRLNASQSLELAFIIAERLRKRRMRSGLNNSLPLPPLAF

SEQ ID NO: 9371 - protein, 538 aa, Zea mays subsp. mays
  peptide (1)..(538): Ceres Seq. ID no. 12373120
  misc_feature (78)..(515): Pfam Name: Class-II DAHP synthetase family Pfam Description: Class-II DAHP synthetase family
  misc_feature (1)..(538): Homolog of NCBI NO: 34906844 NR Description: putative phospho-2-dehydro-3-deoxyheptonate
  misc_feature (37)..(525): Homolog of NCBI NO: 2398679 NR Description: 3-deoxy-D-arabino-heptulosonate 7-phosphate
  misc_feature (37)..(525): Homolog of NCBI NO: 584777 NR Description: Phospho-2-dehydro-3-deoxyheptonate aldolase 1,
  misc_feature (37)..(525): Homolog of NCBI NO: 24745903 NR Description: 3-deoxy-D-arabino-heptulosonate 7-phosphate
  misc_feature (37)..(525): Homolog of NCBI NO: 584778 NR Description: Phospho-2-dehydro-3-deoxyheptonate aldolase 2,
  misc_feature (37)..(525): Homolog of NCBI NO: 114193 NR Description: Phospho-2-dehydro-3-deoxyheptonate aldolase 1,
  misc_feature (37)..(525): Homolog of NCBI NO: 7488957 NR Description: probable 2-dehydro-3-deoxy-phosphoheptonate
  misc_feature (1)..(525): Homolog of NCBI NO: 2546988 NR Description: 2-dehydro-3-deoxyphosphoheptonate aldolase;
  misc_feature (1)..(525): Homolog of NCBI NO: 15219878 NR Description: 3-deoxy-D-arabino-heptulosonate 7-phosphate, protein id: At1g22410.1 [Arabidopsis thaliana]
  misc_feature (62)..(523): Homolog of NCBI NO: 584779 NR Description: Phospho-2-dehydro-3-deoxyheptonate aldolase 2,
MALATNSAAAAAAAVSGGAASQPHRAATFLPLKRRTISAIHAADPSKNNGPAVPAAAAAKSSASAVATPEKNPAAPVKWAVDSWKSKKALQLPEYPNQEELDTVLKTIETFPPVVFAGEARHLEERMAEAAMGRAFILQGGDCAESFKEFHANNIRDTFRILLQMGAVLMFGGQVPVVKVGRMAGQFAKPRSEPLEERDGVKLPSYRGDNVNGDDFTEKSRVPDPQRMIRAYSQSVATLNLLRALATGGYAAMQRVTQWNLDFMDHSEQGDRYRELAHRVDEALGFMTAAGLTVDHPIMTTTDFWTSHECLLLPYEQSLTRKDSTSGLFYDCSAHMLWVGERTRQLDGAHVEFLRGVANPLGIKVSDKMNPSDLVKLIEILNPSNKPGRITIITRMGAENMRVKLPHLIRAVRNAGLIVTWITDPMHGNTIKAPCGLKTRPFDSILAEVRAFFDVHDQEGSHPGGIHLEMTGQNVTECIGGSRTVTFDDLSDRYHTHCDPRLNASQSLELAFIIAERLRKRRMRSGLNNSLPLPPLAF

SEQ ID NO: 9372 - protein, 412 aa, Zea mays subsp. mays
  peptide (1)..(412): Ceres Seq. ID no. 12373121
  misc_feature (1)..(389): Pfam Name: Class-II DAHP synthetase family Pfam Description: Class-II DAHP synthetase family
  misc_feature (1)..(412): Homolog of NCBI NO: 34906844 NR Description: putative phospho-2-dehydro-3-deoxyheptonate
  misc_feature (1)..(399): Homolog of NCBI NO: 2398679 NR Description: 3-deoxy-D-arabino-heptulosonate 7-phosphate
  misc_feature (1)..(399): Homolog of NCBI NO: 584777 NR Description: Phospho-2-dehydro-3-deoxyheptonate aldolase 1,
  misc_feature (1)..(399): Homolog of NCBI NO: 24745903 NR Description: 3-deoxy-D-arabino-heptulosonate 7-phosphate
  misc_feature (1)..(399): Homolog of NCBI NO: 584778 NR Description: Phospho-2-dehydro-3-deoxyheptonate aldolase 2,
  misc_feature (1)..(399): Homolog of NCBI NO: 114193 NR Description: Phospho-2-dehydro-3-deoxyheptonate aldolase 1,
  misc_feature (1)..(399): Homolog of NCBI NO: 7488957 NR Description: probable 2-dehydro-3-deoxy-phosphoheptonate
  misc_feature (1)..(399): Homolog of NCBI NO: 2546988 NR Description: 2-dehydro-3-deoxyphosphoheptonate aldolase;
  misc_feature (1)..(399): Homolog of NCBI NO: 15219878 NR Description: 3-deoxy-D-arabino-heptulosonate 7-phosphate, protein id: At1g22410.1 [Arabidopsis thaliana]
  misc_feature (1)..(397): Homolog of NCBI NO: 584779 NR Description: Phospho-2-dehydro-3-deoxyheptonate aldolase 2,
MAEAAMGRAFILQGGDCAESFKEFHANNIRDTFRILLQMGAVLMFGGQVPVVKVGRMAGQFAKPRSEPLEERDGVKLPSYRGDNVNGDDFTEKSRVPDPQRMIRAYSQSVATLNLLRALATGGYAAMQRVTQWNLDFMDHSEQGDRYRELAHRVDEALGFMTAAGLTVDHPIMTTTDFWTSHECLLLPYEQSLTRKDSTSGLFYDCSAHMLWVGERTRQLDGAHVEFLRGVANPLGIKVSDKMNPSDLVKLIEILNPSNKPGRITIITRMGAENMRVKLPHLIRAVRNAGLIVTWITDPMHGNTIKAPCGLKTRPFDSILAEVRAFFDVHDQEGSHPGGIHLEMTGQNVTECIGGSRTVTFDDLSDRYHTHCDPRLNASQSLELAFIIAERLRKRRMRSGLNNSLPLPPLAF

SEQ ID NO: 9373 - DNA, 1023 bp, Zea mays subsp. mays
  misc_feature (1)..(1023): Ceres Seq. ID no. 12407620
  misc_feature: MA Experiment ID: 108527 Result: Down-regulated in Transcription
  misc_feature: MA Experiment 108527 PARAMETER Experiment Name: Zm_5mM_NO_P Parameter: Age (day) Value: 8
  misc_feature: MA Experiment 108527 PARAMETER Experiment Name: Zm_5mM_NO_P Parameter: Organism Value: Zea mays
  misc_feature: MA Experiment 108527 PARAMETER Experiment Name: Zm_5mM_NO_P Parameter: Plant Line Value: 35A19
  misc_feature: MA Experiment 108527 PARAMETER Experiment Name: Zm_5mM_NO_P Parameter: Timepoint (hr) Value: 6
  misc_feature: MA Experiment 108527 PARAMETER Experiment Name: Zm_5mM_NO_P Parameter: Tissue Value: Aerial
  misc_feature: MA Experiment 108527 PARAMETER Experiment Name: Zm_5mM_NO_P Parameter: Treatment Value: 5mM NO vs. No Treatment
  misc_feature: MA Experiment ID: 108530 Result: Up-regulated in Transcription
  misc_feature: MA Experiment 108530 PARAMETER Experiment Name: Zm_Imbibed_Seeds_P Parameter: Age (day) Value: 6 vs. 2
  misc_feature: MA Experiment 108530 PARAMETER Experiment Name: Zm_Imbibed_Seeds_P Parameter: Organism Value: Zea mays
  misc_feature: MA Experiment 108530 PARAMETER Experiment Name: Zm_Imbibed_Seeds_P Parameter: Plant Line Value: 35A19
  misc_feature: MA Experiment 108530 PARAMETER Experiment Name: Zm_Imbibed_Seeds_P Parameter: Tissue Value: Aerial vs. Embryo
  misc_feature: MA Experiment ID: 108536 Result: Down-regulated in Transcription
  misc_feature: MA Experiment 108536 PARAMETER Experiment Name: Zm_Meristem_P Parameter: Age (day) Value: 8
  misc_feature: MA Experiment 108536 PARAMETER Experiment Name: Zm_Meristem_P Parameter: Organism Value: Zea mays
  misc_feature: MA Experiment 108536 PARAMETER Experiment Name: Zm_Meristem_P Parameter: Plant Line Value: 35A19
  misc_feature: MA Experiment 108536 PARAMETER Experiment Name: Zm_Meristem_P Parameter: Tissue Value: Shoot Meristem vs. Above Shoot Meristem
  misc_feature: MA Experiment ID: 108543 Result: Up-regulated in Transcription
  misc_feature: MA Experiment ID: 108545 Result: Up-regulated in Transcription
  misc_feature: MA Experiment 108545 PARAMETER Experiment Name: Zm_Imbibed_Seeds_P Parameter: Age (day) Value: 3 vs. 2
  misc_feature: MA Experiment 108545 PARAMETER Experiment Name: Zm_Imbibed_Seeds_P Parameter: Organism Value: Zea mays
  misc_feature: MA Experiment 108545 PARAMETER Experiment Name: Zm_Imbibed_Seeds_P Parameter: Plant Line Value: 35A19
  misc_feature: MA Experiment 108545 PARAMETER Experiment Name: Zm_Imbibed_Seeds_P Parameter: Tissue Value: Aerial vs. Embryo
  misc_feature: MA Experiment ID: 108546 Result: Down-regulated in Transcription
  misc_feature: MA Experiment 108546 PARAMETER Experiment Name: Zm_Imbibed_Seeds_P Parameter: Age (day) Value: 3 vs. 2
  misc_feature: MA Experiment 108546 PARAMETER Experiment Name: Zm_Imbibed_Seeds_P Parameter: Organism Value: Zea mays
  misc_feature: MA Experiment 108546 PARAMETER Experiment Name: Zm_Imbibed_Seeds_P Parameter: Plant Line Value: 35A19
  misc_feature: MA Experiment 108546 PARAMETER Experiment Name: Zm_Imbibed_Seeds_P Parameter: Tissue Value: Roots vs. Embryo
  misc_feature: MA Experiment ID: 108547 Result: Up-regulated in Transcription
  misc_feature: MA Experiment 108547 PARAMETER Experiment Name: Zm_Imbibed_Seeds_P Parameter: Age (day) Value: 4 vs. 2
  misc_feature: MA Experiment 108547 PARAMETER Experiment Name: Zm_Imbibed_Seeds_P Parameter: Organism Value: Zea mays
  misc_feature: MA Experiment 108547 PARAMETER Experiment Name: Zm_Imbibed_Seeds_P Parameter: Plant Line Value: 35A19
  misc_feature: MA Experiment 108547 PARAMETER Experiment Name: Zm_Imbibed_Seeds_P Parameter: Tissue Value: Aerial vs. Embryo
  misc_feature: MA Experiment ID: 108687 Result: Down-regulated in Transcription
  misc_feature: MA Experiment 108687 PARAMETER Experiment Name: Zm_Embryos-Flowers__P Parameter: Tissue Value: Embryo vs. Aerial+
  misc_feature: MA Experiment ID: 108688 Result: Down-regulated in Transcription
  misc_feature: MA Experiment 108688 PARAMETER Experiment Name: Zm_Embryos-Flowers__P Parameter: Tissue Value: Immature Flowers vs. Aerial+
  misc_feature: MA Experiment ID: 108689 Result: Down-regulated in Transcription
  misc_feature: MA Experiment 108689 PARAMETER Experiment Name: Zm_Drought_Roots_P Parameter: Age (day) Value: 9
  misc_feature: MA Experiment 108689 PARAMETER Experiment Name: Zm_Drought_Roots_P Parameter: Organism Value: Zea mays
  misc_feature: MA Experiment 108689 PARAMETER Experiment Name: Zm_Drought_Roots_P Parameter: Plant Line Value: 35A19
  misc_feature: MA Experiment 108689 PARAMETER Experiment Name: Zm_Drought_Roots_P Parameter: Timepoint (hr) Value: 24
  misc_feature: MA Experiment 108689 PARAMETER Experiment Name: Zm_Drought_Roots_P Parameter: Tissue Value: Roots
  misc_feature: MA Experiment 108689 PARAMETER Experiment Name: Zm_Drought_Roots_P Parameter: Treatment Value: Drought vs. No Drought
  misc_feature: MA Experiment ID: 20000477 Result: Down-regulated in Transcription
  misc_feature: MA Experiment 20000477 PARAMETER Experiment Name: Zm_5mM_SA_P Parameter: Age (day) Value: 10
  misc_feature: MA Experiment 20000477 PARAMETER Experiment Name: Zm_5mM_SA_P Parameter: Organism Value: Zea mays
  misc_feature: MA Experiment 20000477 PARAMETER Experiment Name: Zm_5mM_SA_P Parameter: Plant Line Value: 35A19
  misc_feature: MA Experiment 20000477 PARAMETER Experiment Name: Zm_5mM_SA_P Parameter: Timepoint (hr) Value: 48
  misc_feature: MA Experiment 20000477 PARAMETER Experiment Name: Zm_5mM_SA_P Parameter: Tissue Value: Aerial
  misc_feature: MA Experiment 20000477 PARAMETER Experiment Name: Zm_5mM_SA_P Parameter: Treatment Value: 5mM SA vs. No Treatment
  misc_feature: MA Experiment ID: 20000478 Result: Down-regulated in Transcription
  misc_feature: MA Experiment 20000478 PARAMETER Experiment Name: Zm_5mM_SA_P Parameter: Age (day) Value: 11
  misc_feature: MA Experiment 20000478 PARAMETER Experiment Name: Zm_5mM_SA_P Parameter: Organism Value: Zea mays
  misc_feature: MA Experiment 20000478 PARAMETER Experiment Name: Zm_5mM_SA_P Parameter: Plant Line Value: 35A19
  misc_feature: MA Experiment 20000478 PARAMETER Experiment Name: Zm_5mM_SA_P Parameter: Timepoint (hr) Value: 72
  misc_feature: MA Experiment 20000478 PARAMETER Experiment Name: Zm_5mM_SA_P Parameter: Tissue Value: Aerial
  misc_feature: MA Experiment 20000478 PARAMETER Experiment Name: Zm_5mM_SA_P Parameter: Treatment Value: 5mM SA vs. No Treatment
  misc_feature: MA Experiment ID: 20000479 Result: Down-regulated in Transcription
  misc_feature: MA Experiment 20000479 PARAMETER Experiment Name: Zm_Drought_P Parameter: Age (day) Value: 10
  misc_feature: MA Experiment 20000479 PARAMETER Experiment Name: Zm_Drought_P Parameter: Organism Value: Zea mays
  misc_feature: MA Experiment 20000479 PARAMETER Experiment Name: Zm_Drought_P Parameter: Plant Line Value: 35A19
  misc_feature: MA Experiment 20000479 PARAMETER Experiment Name: Zm_Drought_P Parameter: Timepoint (hr) Value: 48
  misc_feature: MA Experiment 20000479 PARAMETER Experiment Name: Zm_Drought_P Parameter: Tissue Value: Aerial
  misc_feature: MA Experiment 20000479 PARAMETER Experiment Name: Zm_Drought_P Parameter: Treatment Value: Drought vs. No Drought
  misc_feature: MA Experiment ID: 20000480 Result: Down-regulated in Transcription
  misc_feature: MA Experiment 20000480 PARAMETER Experiment Name: Zm_Drought_P Parameter: Age (day) Value: 11
  misc_feature: MA Experiment 20000480 PARAMETER Experiment Name: Zm_Drought_P Parameter: Organism Value: Zea mays
  misc_feature: MA Experiment 20000480 PARAMETER Experiment Name: Zm_Drought_P Parameter: Plant Line Value: 35A19
  misc_feature: MA Experiment 20000480 PARAMETER Experiment Name: Zm_Drought_P Parameter: Timepoint (hr) Value: 72
  misc_feature: MA Experiment 20000480 PARAMETER Experiment Name: Zm_Drought_P Parameter: Tissue Value: Aerial
  misc_feature: MA Experiment 20000480 PARAMETER Experiment Name: Zm_Drought_P Parameter: Treatment Value: Drought vs. No Drought
  misc_feature: MA Experiment ID: 20000492 Result: Down-regulated in Transcription
  misc_feature: MA Experiment 20000492 PARAMETER Experiment Name: Zm_Hybrid_Seed_Dev_P Parameter: DAP Value: 12
  misc_feature: MA Experiment 20000492 PARAMETER Experiment Name: Zm_Hybrid_Seed_Dev_P Parameter: Organism Value: Zea mays
  misc_feature: MA Experiment 20000492 PARAMETER Experiment Name: Zm_Hybrid_Seed_Dev_P Parameter: Plant Line Value: 35A19
  misc_feature: MA Experiment 20000492 PARAMETER Experiment Name: Zm_Hybrid_Seed_Dev_P Parameter: Tissue Value: Fert Kernel vs. Unfert Floret
  misc_feature: MA Experiment ID: 20000535 Result: Down-regulated in Transcription
  misc_feature: MA Experiment 20000535 PARAMETER Experiment Name: Zm_Hybrid_Seed_Dev_P Parameter: DAP Value: 30 vs. 12
  misc_feature: MA Experiment 20000535 PARAMETER Experiment Name: Zm_Hybrid_Seed_Dev_P Parameter: Organism Value: Zea mays
  misc_feature: MA Experiment 20000535 PARAMETER Experiment Name: Zm_Hybrid_Seed_Dev_P Parameter: Plant Line Value: 35A19
  misc_feature: MA Experiment 20000535 PARAMETER Experiment Name: Zm_Hybrid_Seed_Dev_P Parameter: Tissue Value: Embryo vs. Unfert Floret
  misc_feature: MA Experiment ID: 20000626 Result: Down-regulated in Transcription
  misc_feature: MA Experiment 20000626 PARAMETER Experiment Name: Zm_Herbicide-Treatments_P Parameter: Timepoint (hr) Value: 12
  misc_feature: MA Experiment 20000626 PARAMETER Experiment Name: Zm_Herbicide-Treatments_P Parameter: Tissue Value: Aerial
  misc_feature: MA Experiment 20000626 PARAMETER Experiment Name: Zm_Herbicide-Treatments_P Parameter: Treatment Value: Roundup vs. No Treatment
aaaacacgtcgcggcctcgctaacgcgcccgcgctagcgcgagtggtggcacccacgcatactcttctcccccccagtccggaccccggaggagccaagccatggcgtccacctcctgctgcctcctccaccagtcaaccgcccgcctcggcgcgtcgccgcgcctggccgccgccccgccgcgcagcgcccagctgctcgtctgcaaggcccggaagcaggaagccgccgcggaccagagcgacgtctcgcgccgcgccacgctcgcgctcctcgccggcgtcacggccgccgccggcgccaaggtgggtcccgccgccgcggcatacggagaagcagccaacgtgttcggcaagcccaaggcgagcacggagtacatcgcgtacagcggcgacggcttcaagctgctgatcccgtccaagtggaaccccagcaaggagcgggagttccccgggcaggtgctccgctacgaggacaacttcgacgccaacagcaacgtgtccgtcatcatccagcccacgtccaagaagaccatcgccgactacggctctcccgaggagttcctctcccaggtcgactacctgctcggcaggcaggcctacggcggcaagaccgactccgagggcgggttcgagaccggcgccgtggccaccgccaacgtcctggagagctccacccccgtgatcgacggcaagcagtactacgccgtgtccgtgctcaccaggacggcggacggcgacgagggcggcaagcaccagctcatcgcggccaccgtctccgacggcaagctctacatctgcaaggcgcaggccggcgacaagaggtggttcaagggcgccaggaagggagtcgagaaggccgcctcctccttcagcgtcgcatgatgatgtaattttatttcttcgatgggatgggatgcacgcactacgtagagagcttggctaggccaggcctggctgagcacgcttgtgtgttccttcgactgtacatgagaacaaagactaaggagagctccattcccgt

SEQ ID NO: 9374 - protein, 260 aa, Zea mays subsp. mays
  peptide (1)..(260): Ceres Seq. ID no. 12407621
  misc_feature (57)..(260): Pfam Name: PsbP Pfam Description: PsbP
  misc_feature (1)..(260): Homolog of NCBI NO: 34899580 NR Description: probable photosystem II oxygen-evolving complex
  misc_feature (1)..(260): Homolog of NCBI NO: 131394 NR Description: Oxygen-evolving enhancer protein 2, chloroplast (OEE2) (23 kDa subunit of oxygen evolving system of photosystem (OEC 23 kDa subunit) (23 kDa thylakoid membrane protein) evolving
  misc_feature (1)..(260): Homolog of NCBI NO: 7443218 NR Description: photosystem II oxygen-evolving complex protein - >gi|2570499|gb|AAB82135.1| 23kDa polypeptide of photosystem II
  misc_feature (1)..(260): Homolog of NCBI NO: 11134156 NR Description: Oxygen-evolving enhancer protein 2, chloroplast (OEE2) (23 kDa subunit of oxygen evolving system of photosystem (OEC 23 kDa subunit) (23 kDa thylakoid membrane protein) (OEC23)
  misc_feature (1)..(260): Homolog of NCBI NO: 131392 NR Description: Oxygen-evolving enhancer protein 2, chloroplast (OEE2) (23 kDa subunit of oxygen evolving system of photosystem (OEC 23 kDa subunit) (23 kDa thylakoid membrane protein)
  misc_feature (1)..(260): Homolog of NCBI NO: 11134035 NR Description: Oxygen-evolving enhancer protein 2, chloroplast (OEE2) (23 kDa subunit of oxygen evolving system of photosystem (OEC 23 kDa subunit) (23 kDa thylakoid membrane protein)
  misc_feature (1)..(260): Homolog of NCBI NO: 131390 NR Description: Oxygen-evolving enhancer protein 2, chloroplast (OEE2) (23 kDa subunit of oxygen evolving system of photosystem
  misc_feature (1)..(260): Homolog of NCBI NO: 266856 NR Description: Oxygen-evolving enhancer protein 2, chloroplast (OEE2) (23 kDa subunit of oxygen evolving system of photosystem (OEC 23 kDa subunit) (23 kDa thylakoid membrane protein)
  misc_feature (1)..(260): Homolog of NCBI NO: 20030 NR Description: 23-kDa polypeptide of photosystem II
  misc_feature (1)..(260): Homolog of NCBI NO: 131393 NR Description: Oxygen-evolving enhancer protein 2, chloroplast (OEE2) (23 kDa subunit of oxygen evolving system of photosystem (OEC 23 kDa subunit) (23 kDa thylakoid membrane protein)
MASTSCCLLHQSTARLGASPRLAAAPPRSAQLLVCKARKQEAAADQSDVSRRATLALLAGVTAAAGAKVGPAAAAYGEAANVFGKPKASTEYIAYSGDGFKLLIPSKWNPSKEREFPGQVLRYEDNFDANSNVSVIIQPTSKKTIADYGSPEEFLSQVDYLLGRQAYGGKTDSEGGFETGAVATANVLESSTPVIDGKQYYAVSVLTRTADGDEGGKHQLIAATVSDGKLYICKAQAGDKRWFKGARKGVEKAASSFSVA

SEQ ID NO: 9375 - protein, 136 aa, Zea mays subsp. mays
  peptide (1)..(136): Ceres Seq. ID no. 12407622
  misc_feature (80)..(136): Pfam Name: Equine herpesvirus glycoprotein gp2 Pfam Description: Equine herpesvirus glycoprotein gp2
  misc_feature (10)..(136): Homolog of NCBI NO: 27375632 NR Description: blr0521 [Bradyrhizobium japonicum]
  misc_feature (2)..(136): Homolog of NCBI NO: 27375632 NR Description: blr0521 [Bradyrhizobium japonicum]
  misc_feature (17)..(136): Homolog of NCBI NO: 25056007 NR Description: extensin-like protein [Zea mays]
  misc_feature (18)..(136): Homolog of NCBI NO: 23017082 NR Description: hypothetical protein [Thermobifida fusca]
  misc_feature (9)..(136): Homolog of NCBI NO: 27375632 NR Description: blr0521 [Bradyrhizobium japonicum]
  misc_feature (24)..(136): Homolog of NCBI NO: 20138131 NR Description: Vegetative cell wall protein gp1 precursor rich glycoprotein 1) >gi|12018147|gb|AAG45420.1|AF309494_1
  misc_feature (18)..(136): Homolog of NCBI NO: 188864 NR Description: mucin
  misc_feature (6)..(136): Homolog of NCBI NO: 22962211 NR Description: hypothetical protein [Rhodopseudomonas palustris]
  misc_feature (7)..(136): Homolog of NCBI NO: 13592175 NR Description: ppg3 [Leishmania major]
  misc_feature (7)..(136): Homolog of NCBI NO: 13592175 NR Description: ppg3 [Leishmania major]
KTRRGLANAPALARVVAPTHTLLPPSPDPGGAKPWRPPPAASSTSQPPASARRRAWPPPRRAAPSCSSARPGSRKPPRTRATSRAAPRSRSSPASRPPPAPRWVPPPRHTEKQPTCSASPRRARSTSRTAATASSC

SEQ ID NO: 9376 - DNA, 1504 bp, Zea mays subsp. mays
  misc_feature (1)..(1504): Ceres Seq. ID no. 13498552
  misc_feature: MA Experiment ID: 108556 Result: Down-regulated in Transcription
  misc_feature: MA Experiment 108556 PARAMETER Experiment Name: Zm_Drought_P Parameter: Age (day) Value: 9
  misc_feature: MA Experiment 108556 PARAMETER Experiment Name: Zm_Drought_P Parameter: Organism Value: Zea mays
  misc_feature: MA Experiment 108556 PARAMETER Experiment Name: Zm_Drought_P Parameter: Plant Line Value: 35A19
  misc_feature: MA Experiment 108556 PARAMETER Experiment Name: Zm_Drought_P Parameter: Timepoint (hr) Value: 24
  misc_feature: MA Experiment 108556 PARAMETER Experiment Name: Zm_Drought_P Parameter: Tissue Value: Aerial
  misc_feature: MA Experiment 108556 PARAMETER Experiment Name: Zm_Drought_P Parameter: Treatment Value: Drought vs. No Drought
  misc_feature: MA Experiment ID: 108689 Result: Down-regulated in Transcription
  misc_feature: MA Experiment 108689 PARAMETER Experiment Name: Zm_Drought_Roots_P Parameter: Age (day) Value: 9
  misc_feature: MA Experiment 108689 PARAMETER Experiment Name: Zm_Drought_Roots_P Parameter: Organism Value: Zea mays
  misc_feature: MA Experiment 108689 PARAMETER Experiment Name: Zm_Drought_Roots_P Parameter: Plant Line Value: 35A19
  misc_feature: MA Experiment 108689 PARAMETER Experiment Name: Zm_Drought_Roots_P Parameter: Timepoint (hr) Value: 24
  misc_feature: MA Experiment 108689 PARAMETER Experiment Name: Zm_Drought_Roots_P Parameter: Tissue Value: Roots
  misc_feature: MA Experiment 108689 PARAMETER Experiment Name: Zm_Drought_Roots_P Parameter: Treatment Value: Drought vs. No Drought
  misc_feature: MA Experiment ID: 20000479 Result: Down-regulated in Transcription
  misc_feature: MA Experiment 20000479 PARAMETER Experiment Name: Zm_Drought_P Parameter: Age (day) Value: 10
  misc_feature: MA Experiment 20000479 PARAMETER Experiment Name: Zm_Drought_P Parameter: Organism Value: Zea mays
  misc_feature: MA Experiment 20000479 PARAMETER Experiment Name: Zm_Drought_P Parameter: Plant Line Value: 35A19
  misc_feature: MA Experiment 20000479 PARAMETER Experiment Name: Zm_Drought_P Parameter: Timepoint (hr) Value: 48
  misc_feature: MA Experiment 20000479 PARAMETER Experiment Name: Zm_Drought_P Parameter: Tissue Value: Aerial
  misc_feature: MA Experiment 20000479 PARAMETER Experiment Name: Zm_Drought_P Parameter: Treatment Value: Drought vs. No Drought
  misc_feature: MA Experiment ID: 20000480 Result: Down-regulated in Transcription
  misc_feature: MA Experiment 20000480 PARAMETER Experiment Name: Zm_Drought_P Parameter: Age (day) Value: 11
  misc_feature: MA Experiment 20000480 PARAMETER Experiment Name: Zm_Drought_P Parameter: Organism Value: Zea mays
  misc_feature: MA Experiment 20000480 PARAMETER Experiment Name: Zm_Drought_P Parameter: Plant Line Value: 35A19
  misc_feature: MA Experiment 20000480 PARAMETER Experiment Name: Zm_Drought_P Parameter: Timepoint (hr) Value: 72
  misc_feature: MA Experiment 20000480 PARAMETER Experiment Name: Zm_Drought_P Parameter: Tissue Value: Aerial
  misc_feature: MA Experiment 20000480 PARAMETER Experiment Name: Zm_Drought_P Parameter: Treatment Value: Drought vs. No Drought
  misc_feature: MA Experiment ID: 20000492 Result: Down-regulated in Transcription
  misc_feature: MA Experiment 20000492 PARAMETER Experiment Name: Zm_Hybrid_Seed_Dev_P Parameter: DAP Value: 12
  misc_feature: MA Experiment 20000492 PARAMETER Experiment Name: Zm_Hybrid_Seed_Dev_P Parameter: Organism Value: Zea mays
  misc_feature: MA Experiment 20000492 PARAMETER Experiment Name: Zm_Hybrid_Seed_Dev_P Parameter: Plant Line Value: 35A19
  misc_feature: MA Experiment 20000492 PARAMETER Experiment Name: Zm_Hybrid_Seed_Dev_P Parameter: Tissue Value: Fert Kernel vs. Unfert Floret
  misc_feature: MA Experiment ID: 20000535 Result: Down-regulated in Transcription
  misc_feature: MA Experiment 20000535 PARAMETER Experiment Name: Zm_Hybrid_Seed_Dev_P Parameter: DAP Value: 30 vs. 12
  misc_feature: MA Experiment 20000535 PARAMETER Experiment Name: Zm_Hybrid_Seed_Dev_P Parameter: Organism Value: Zea mays
  misc_feature: MA Experiment 20000535 PARAMETER Experiment Name: Zm_Hybrid_Seed_Dev_P Parameter: Plant Line Value: 35A19
  misc_feature: MA Experiment 20000535 PARAMETER Experiment Name: Zm_Hybrid_Seed_Dev_P Parameter: Tissue Value: Embryo vs. Unfert Floret
gcccacggagatgaagcgccggcgcctgccgcccgtcctcttcctcctcgcgctcgcgctcttgtccctcgccttccgccgccacctctccctccccctcggcgttccccagttcgccgccggtggcgtcagcggcgacgcgctcctccgcctcctcgcggccaccgacgtcggcggggaccagatcctggcggaggcggccgcgctgctggccaacgcgtcggtgtccaccttccccagcatcggcaaccaccaccgcctcctctacctccgcgtcccctaccgcatcaacgccacctccgcgccgcggcagcggacagtgtcccgtctccgcattcccttccacgacgtccccaacgacgacgccctcctcgccgccttccgcgcatccctccgcggcttcctcctcgcgcgccaccgccaccgccaccgccgaggcggcgacgacgtcgcgggcgccatggccgacctccccgccctcctcctcggccagcgccggcgccggcgcgccccgacntgcgccgtcgtcgggaacagcggcacccttctcggctccggccggggcgcgcagatcgacgcgcacgacctcgtgatccggctcaacaacgcccgcgtcgcggggttcgcggccgacgtcggcgccacgaccggcgtctcgttcgtgaactccaacatcctccaccactgcgccgtccgctccgccatcaccgccccgggctgcgcctgccacccctacgggcgcgcggtcccgctggccatgtacgtctgccagccggcgcacctcctggacgcgctcatctgcaacgccacggcgacgccggagtccccgttcccgctcctcgtcaccgacgcgcgcatcgacgcgctgtgcgcgcgcatcgccaagtactactcgatgcggcggttcgtggcggccacggggcagccggccagcaactggacccggaggcacgacgagaggtacttccactactcgtcgggcctgcaggcggtggtcatggcgctaggggcgtgcgatgaggtgagcgtgttcggtttcgggaaggcgccgggggccaagcaccattaccacaccaaccagaagaaggagctcgacctgcacgactacgaggccgagtaccagttctaccgcgacctccaggaacggccagaggcggtgccattcctcgacgaggcgccgggcttcaaggtgccaccggtgaagctctactggtgaccactgacgtcagtaacgtctggttggtagtaacttgtactgtaatatgtttgttgtacaattttttttatttttacattttcacctaaagaggtgtttaggcagagagagataagcgtgtagagaatgtagcgattgacagggagggaatgtgtttaaggatagggaaaatggagatcaaatttgtgattgatcaaatggatcaaattggttgtagttgttcatgtattctgtctgtgtagggcaactgtacacttcatcgattcttgttcatatatagacactttc

SEQ ID NO: 9377 - protein, 404 aa, Zea mays subsp. mays
  peptide (1)..(404): Ceres Seq. ID no. 13498553
  misc_feature (115)..(391): Pfam Name: Glycosyltransferase family 29 (sialyltransferase) Pfam Description: Glycosyltransferase family 29
  misc_feature (115)..(403): Homolog of NCBI NO: 34908454 NR Description: P0683F02.18 [Oryza sativa (japonica
  misc_feature (172)..(403): Homolog of NCBI NO: 15223174 NR Description: sialyltransferase family [Arabidopsis thaliana]
  misc_feature (289)..(403): Homolog of NCBI NO: 28416597 NR Description: At1g08280 [Arabidopsis thaliana]
  misc_feature (172)..(172): Xaa is any aa, unknown or other
PTEMKRRRLPPVLFLLALALLSLAFRRHLSLPLGVPQFAAGGVSGDALLRLLAATDVGGDQILAEAAALLANASVSTFPSIGNHHRLLYLRVPYRINATSAPRQRTVSRLRIPFHDVPNDDALLAAFRASLRGFLLARHRHRHRRGGDDVAGAMADLPALLLGQRRRRRAPXCAVVGNSGTLLGSGRGAQIDAHDLVIRLNNARVAGFAADVGATTGVSFVNSNILHHCAVRSAITAPGCACHPYGRAVPLAMYVCQPAHLLDALICNATATPESPFPLLVTDARIDALCARIAKYYSMRRFVAATGQPASNWTRRHDERYFHYSSGLQAVVMALGACDEVSVFGFGKAPGAKHHYHTNQKKELDLHDYEAEYQFYRDLQERPEAVPFLDEAPGFKVPPVKLYW

SEQ ID NO: 9378 - protein, 401 aa, Zea mays subsp. mays
  peptide (1)..(401): Ceres Seq. ID no. 13498554
  misc_feature (112)..(388): Pfam Name: Glycosyltransferase family 29 (sialyltransferase) Pfam Description: Glycosyltransferase family 29
  misc_feature (112)..(400): Homolog of NCBI NO: 34908454 NR Description: P0683F02.18 [Oryza sativa (japonica
  misc_feature (169)..(400): Homolog of NCBI NO: 15223174 NR Description: sialyltransferase family [Arabidopsis thaliana]
  misc_feature (286)..(400): Homolog of NCBI NO: 28416597 NR Description: At1g08280 [Arabidopsis thaliana]
  misc_feature (169)..(169): Xaa is any aa, unknown or other
MKRRRLPPVLFLLALALLSLAFRRHLSLPLGVPQFAAGGVSGDALLRLLAATDVGGDQILAEAAALLANASVSTFPSIGNHHRLLYLRVPYRINATSAPRQRTVSRLRIPFHDVPNDDALLAAFRASLRGFLLARHRHRHRRGGDDVAGAMADLPALLLGQRRRRRAPXCAVVGNSGTLLGSGRGAQIDAHDLVIRLNNARVAGFAADVGATTGVSFVNSNILHHCAVRSAITAPGCACHPYGRAVPLAMYVCQPAHLLDALICNATATPESPFPLLVTDARIDALCARIAKYYSMRRFVAATGQPASNWTRRHDERYFHYSSGLQAVVMALGACDEVSVFGFGKAPGAKHHYHTNQKKELDLHDYEAEYQFYRDLQERPEAVPFLDEAPGFKVPPVKLYW

SEQ ID NO: 9379 - protein, 339 aa, Zea mays subsp. mays
  peptide (1)..(339): Ceres Seq. ID no. 13498555
  misc_feature (7)..(211): Pfam Name: Formin Homology 2 Domain Pfam Description: Formin Homology 2 Domain
  misc_feature (5)..(281): Homolog of NCBI NO: 22962211 NR Description: hypothetical protein [Rhodopseudomonas palustris]
  misc_feature (1)..(339): Homolog of NCBI NO: 29247944 NR Description: GLP_26_54603_52153 [Giardia lamblia ATCC 50803]
  misc_feature (1)..(339): Homolog of NCBI NO: 29247944 NR Description: GLP_26_54603_52153 [Giardia lamblia ATCC 50803]
  misc_feature (6)..(204): Homolog of NCBI NO: 20138131 NR Description: Vegetative cell wall protein gp1 precursor rich glycoprotein 1) >gi|12018147|gb|AAG45420.1|AF309494_1
  misc_feature (64)..(339): Homolog of NCBI NO: 22962211 NR Description: hypothetical protein [Rhodopseudomonas palustris]
  misc_feature (23)..(339): Homolog of NCBI NO: 27375632 NR Description: blr0521 [Bradyrhizobium japonicum]
  misc_feature (6)..(169): Homolog of NCBI NO: 20138131 NR Description: Vegetative cell wall protein gp1 precursor rich glycoprotein 1) >gi|12018147|gb|AAG45420.1|AF309494_1
  misc_feature (6)..(210): Homolog of NCBI NO: 20138131 NR Description: Vegetative cell wall protein gp1 precursor rich glycoprotein 1) >gi|12018147|gb|AAG45420.1|AF309494_1
  misc_feature (173)..(173): Xaa is any aa, unknown or other
AHGDEAPAPAARPLPPRARALVPRLPPPPLPPPRRSPVRRRWRQRRRAPPPPRGHRRRRGPDPGGGGRAAGQRVGVHLPQHRQPPPPPLPPRPLPHQRHLRAAAADSVPSPHSLPRRPQRRRPPRRLPRIPPRLPPRAPPPPPPPRRRRRRGRHGRPPRPPPRPAPAPARPDXRRRREQRHPSRLRPGRADRRARPRDPAQQRPRRGVRGRRRRHDRRLVRELQHPPPLRRPLRHHRPGLRLPPLRARGPAGHVRLPAGAPPGRAHLQRHGDAGVPVPAPRHRRAHRRAVRAHRQVLLDAAVRGGHGAAGQQLDPEARREVLPLLVGPAGGGHGARGVR

SEQ ID NO: 9380 - DNA, 2108 bp, Zea mays subsp. mays
  misc_feature (1)..(2108): Ceres Seq. ID no. 12358850
  misc_feature: MA Experiment ID: 108544 Result: Down-regulated in Transcription
gcccgcagaaaagaaggctggtggtcgccgctgcacgcggcccagtccacccacgagtacaaacagcggcagctcgcctccacgcgagccaagcgcccgcaaaaccctagccccgcccgccccaaaccctaggcggctacggtctccgatcccggggtcacgtcctaatggcatcttcgccggacttgttccccaacgttaccttctccgacgtctccgaagccgcagcagggcctgcggccgagggggccaccgccgcgttcggtctcggcgccgccactggagccccgcgcctcagcctcgtgaaggccgaggcggagcccacggtcgagatcgacctcgccgacgcgcaggtatttaagttgggaccgacggagtggctgtgtgtgtgcgacgagtcggaggctaaggatggcgtggaagagaagtcattttcaagagcaattaaggttgttcttaggacagaagctgagagcaaagccttctctttagcttttcaacgatggcaacaccaagttattagtggaaaagctggtgaacggctggagaatggatcaataattgcttcgaaaaacaaattcgatacaaaaattgaggcatcatcagcaaagatgtatttccactactatggccagctattacatcagcaaaacatgttacaagattttgtgcggacaggaacatactatgctgctgtgatggaaaaccgttctgacttcgagggtcgagttgtggttgatgttggggctggaagcggtattctttcgttatttgctgtccaggctggtgccagacatgtatatgcagttgaggcatctgaaatggctgaacatgctcaacgtctaatctctgggaacccatctcttggacaccggatcacggtcatcaagggcaaggttgaggaagtagtgcttccagagaaagctgacatactgatttctgaacctatgggaactcttttggttaatgagaggatgctagagtcttatgtcatagctagagacagattacttgctccagatggtaaaatgtttccaacaaccggaaggattcatatggctccattttctgacgaatacctttatgttgaaatggcaaacaaggctctcttttggcagcagcacaatttttttggtgttgatctcacacctttacatggttctgcattccagggatacttttcacagcctgttgtggatgcatttgacccaagattattaatttctccaccaacatatcatacacttgattttactagcatgaaggaagaggagctttacgagattaatattcctctgagctttgtagcttctgttggcactagagtacatggattagcttgttggtttgatgtattgtttaatgggagcactgtgcaaaggtggcttaccactgctccaggatcccctacaactcactggtaccaactacgatgtgtgctttcacagccattgtatgtcatggccggccaagaaataactggccatcttcgtctcgtagcccatagtgctcaaagctacacaatatacttgacaatgtcagctaaaatgtggggtgtgggtgcggagcaaggcggtatcctacagacatctactgggaaacttgaactgaaggagccatactacaggttgtctcagccacaatcatgcacgttgccacaagatcagcaacagcagcaattgccatctttgcaggcacagggatcggagcagcagatgcaggaagggctcagcccagccttcacgatagaccaagattgcctcaactagacagcctggagtcgcgtatgctaggattccagcaacgagctgaggtctgtacaagcacaagagtttagagtagccgatattgtcaggcgttagctgccaaaggctaatatcacgatcgaggtgtaccgtgtacgagaccattcctgagttgcgcagctggcagctaaactgcggtcgcgccttctccgagggaatcgagaaaaaggaaattataaagtgtatttggtttcaggtaaagtgaagagcgaagggcacccctaacaaggacgggtgtatgttgtttgatatattatattcttgctaggaattaattattttcatgttaagtatgtttaattc

SEQ ID NO: 9381 - protein, 533 aa, Zea mays subsp. mays
  peptide (1)..(533): Ceres Seq. ID no. 12358851
  misc_feature (177)..(437): Pfam Name: Skb1 methyltransferase Pfam Description: Skb1 methyltransferase
  misc_feature (3)..(511): Homolog of NCBI NO: 33146849 NR Description: putative protein arginine N-methyltransferase 4
  misc_feature (14)..(521): Homolog of NCBI NO: 30680069 NR Description: protein arginine N-methyltransferase family
  misc_feature (14)..(511): Homolog of NCBI NO: 30680066 NR Description: protein arginine N-methyltransferase family
  misc_feature (14)..(521): Homolog of NCBI NO: 28393408 NR Description: putative arginine methyltransferase [Arabidopsis
  misc_feature (8)..(504): Homolog of NCBI NO: 30695591 NR Description: protein arginine N-methyltransferase family
  misc_feature (93)..(504): Homolog of NCBI NO: 27754675 NR Description: putative arginine methyltransferase [Arabidopsis
  misc_feature (149)..(511): Homolog of NCBI NO: 6729000 NR Description: putative arginine methyltransferase [Arabidopsis
  misc_feature (8)..(419): Homolog of NCBI NO: 10177192 NR Description: arginine methyltransferase-like protein
  misc_feature (108)..(513): Homolog of NCBI NO: 24645553 NR Description: CG5358-PA [Drosophila melanogaster]
  misc_feature (135)..(513): Homolog of NCBI NO: 28557603 NR Description: RE68504p [Drosophila melanogaster]
MASSPDLFPNVTFSDVSEAAAGPAAEGATAAFGLGAATGAPRLSLVKAEAEPTVEIDLADAQVFKLGPTEWLCVCDESEAKDGVEEKSFSRAIKVVLRTEAESKAFSLAFQRWQHQVISGKAGERLENGSIIASKNKFDTKIEASSAKMYFHYYGQLLHQQNMLQDFVRTGTYYAAVMENRSDFEGRVVVDVGAGSGILSLFAVQAGARHVYAVEASEMAEHAQRLISGNPSLGHRITVIKGKVEEVVLPEKADILISEPMGTLLVNERMLESYVIARDRLLAPDGKMFPTTGRIHMAPFSDEYLYVEMANKALFWQQHNFFGVDLTPLHGSAFQGYFSQPVVDAFDPRLLISPPTYHTLDFTSMKEEELYEINIPLSFVASVGTRVHGLACWFDVLFNGSTVQRWLTTAPGSPTTHWYQLRCVLSQPLYVMAGQEITGHLRLVAHSAQSYTIYLTMSAKMWGVGAEQGGILQTSTGKLELKEPYYRLSQPQSCTLPQDQQQQQLPSLQAQGSEQQMQEGLSPAFTIDQDCLN

SEQ ID NO: 9382 - protein, 385 aa, Zea mays subsp. mays
  peptide (1)..(385): Ceres Seq. ID no. 12358852
  misc_feature (29)..(289): Pfam Name: Skb1 methyltransferase Pfam Description: Skb1 methyltransferase
  misc_feature (1)..(363): Homolog of NCBI NO: 33146849 NR Description: putative protein arginine N-methyltransferase 4
  misc_feature (1)..(373): Homolog of NCBI NO: 30680069 NR Description: protein arginine N-methyltransferase family
  misc_feature (1)..(363): Homolog of NCBI NO: 30680066 NR Description: protein arginine N-methyltransferase family
  misc_feature (1)..(373): Homolog of NCBI NO: 28393408 NR Description: putative arginine methyltransferase [Arabidopsis
  misc_feature (1)..(356): Homolog of NCBI NO: 30695591 NR Description: protein arginine N-methyltransferase family
  misc_feature (1)..(356): Homolog of NCBI NO: 27754675 NR Description: putative arginine methyltransferase [Arabidopsis
  misc_feature (1)..(363): Homolog of NCBI NO: 6729000 NR Description: putative arginine methyltransferase [Arabidopsis
  misc_feature (1)..(271): Homolog of NCBI NO: 10177192 NR Description: arginine methyltransferase-like protein
  misc_feature (1)..(365): Homolog of NCBI NO: 24645553 NR Description: CG5358-PA [Drosophila melanogaster]
  misc_feature (1)..(365): Homolog of NCBI NO: 28557603 NR Description: RE68504p [Drosophila melanogaster]
MYFHYYGQLLHQQNMLQDFVRTGTYYAAVMENRSDFEGRVVVDVGAGSGILSLFAVQAGARHVYAVEASEMAEHAQRLISGNPSLGHRITVIKGKVEEVVLPEKADILISEPMGTLLVNERMLESYVIARDRLLAPDGKMFPTTGRIHMAPFSDEYLYVEMANKALFWQQHNFFGVDLTPLHGSAFQGYFSQPVVDAFDPRLLISPPTYHTLDFTSMKEEELYEINIPLSFVASVGTRVHGLACWFDVLFNGSTVQRWLTTAPGSPTTHWYQLRCVLSQPLYVMAGQEITGHLRLVAHSAQSYTIYLTMSAKMWGVGAEQGGILQTSTGKLELKEPYYRLSQPQSCTLPQDQQQQQLPSLQAQGSEQQMQEGLSPAFTIDQDCLN

SEQ ID NO: 9383 - protein, 371 aa, Zea mays subsp. mays
  peptide (1)..(371): Ceres Seq. ID no. 12358853
  misc_feature (15)..(275): Pfam Name: Skb1 methyltransferase Pfam Description: Skb1 methyltransferase
  misc_feature (1)..(349): Homolog of NCBI NO: 33146849 NR Description: putative protein arginine N-methyltransferase 4
  misc_feature (1)..(359): Homolog of NCBI NO: 30680069 NR Description: protein arginine N-methyltransferase family
  misc_feature (1)..(349): Homolog of NCBI NO: 30680066 NR Description: protein arginine N-methyltransferase family
  misc_feature (1)..(359): Homolog of NCBI NO: 28393408 NR Description: putative arginine methyltransferase [Arabidopsis
  misc_feature (1)..(342): Homolog of NCBI NO: 30695591 NR Description: protein arginine N-methyltransferase family
  misc_feature (1)..(342): Homolog of NCBI NO: 27754675 NR Description: putative arginine methyltransferase [Arabidopsis
  misc_feature (1)..(349): Homolog of NCBI NO: 6729000 NR Description: putative arginine methyltransferase [Arabidopsis
  misc_feature (1)..(257): Homolog of NCBI NO: 10177192 NR Description: arginine methyltransferase-like protein
  misc_feature (1)..(351): Homolog of NCBI NO: 24645553 NR Description: CG5358-PA [Drosophila melanogaster]
  misc_feature (1)..(351): Homolog of NCBI NO: 28557603 NR Description: RE68504p [Drosophila melanogaster]
MLQDFVRTGTYYAAVMENRSDFEGRVVVDVGAGSGILSLFAVQAGARHVYAVEASEMAEHAQRLISGNPSLGHRITVIKGKVEEVVLPEKADILISEPMGTLLVNERMLESYVIARDRLLAPDGKMFPTTGRIHMAPFSDEYLYVEMANKALFWQQHNFFGVDLTPLHGSAFQGYFSQPVVDAFDPRLLISPPTYHTLDFTSMKEEELYEINIPLSFVASVGTRVHGLACWFDVLFNGSTVQRWLTTAPGSPTTHWYQLRCVLSQPLYVMAGQEITGHLRLVAHSAQSYTIYLTMSAKMWGVGAEQGGILQTSTGKLELKEPYYRLSQPQSCTLPQDQQQQQLPSLQAQGSEQQMQEGLSPAFTIDQDCLN

SEQ ID NO: 9384 - DNA, 1980 bp, Zea mays subsp. mays
  misc_feature (1)..(1980): Ceres Seq. ID no. 12390151
  misc_feature: MA Experiment ID: 108515 Result: Up-regulated in Transcription
  misc_feature: MA Experiment 108515 PARAMETER Experiment Name: Zm_2mM_SA_P Parameter: Age (day) Value: 8
  misc_feature: MA Experiment 108515 PARAMETER Experiment Name: Zm_2mM_SA_P Parameter: Organism Value: Zea mays
  misc_feature: MA Experiment 108515 PARAMETER Experiment Name: Zm_2mM_SA_P Parameter: Plant Line Value: 35A19
  misc_feature: MA Experiment 108515 PARAMETER Experiment Name: Zm_2mM_SA_P Parameter: Timepoint (hr) Value: 12
  misc_feature: MA Experiment 108515 PARAMETER Experiment Name: Zm_2mM_SA_P Parameter: Tissue Value: Aerial
  misc_feature: MA Experiment 108515 PARAMETER Experiment Name: Zm_2mM_SA_P Parameter: Treatment Value: 2mM SA vs. No Treatment
  misc_feature: MA Experiment ID: 108543 Result: Down-regulated in Transcription
  misc_feature: MA Experiment ID: 20000479 Result: Up-regulated in Transcription
  misc_feature: MA Experiment 20000479 PARAMETER Experiment Name: Zm_Drought_P Parameter: Age (day) Value: 10
  misc_feature: MA Experiment 20000479 PARAMETER Experiment Name: Zm_Drought_P Parameter: Organism Value: Zea mays
  misc_feature: MA Experiment 20000479 PARAMETER Experiment Name: Zm_Drought_P Parameter: Plant Line Value: 35A19
  misc_feature: MA Experiment 20000479 PARAMETER Experiment Name: Zm_Drought_P Parameter: Timepoint (hr) Value: 48
  misc_feature: MA Experiment 20000479 PARAMETER Experiment Name: Zm_Drought_P Parameter: Tissue Value: Aerial
  misc_feature: MA Experiment 20000479 PARAMETER Experiment Name: Zm_Drought_P Parameter: Treatment Value: Drought vs. No Drought
  misc_feature: MA Experiment ID: 20000535 Result: Down-regulated in Transcription
  misc_feature: MA Experiment 20000535 PARAMETER Experiment Name: Zm_Hybrid_Seed_Dev_P Parameter: DAP Value: 30 vs. 12
  misc_feature: MA Experiment 20000535 PARAMETER Experiment Name: Zm_Hybrid_Seed_Dev_P Parameter: Organism Value: Zea mays
  misc_feature: MA Experiment 20000535 PARAMETER Experiment Name: Zm_Hybrid_Seed_Dev_P Parameter: Plant Line Value: 35A19
  misc_feature: MA Experiment 20000535 PARAMETER Experiment Name: Zm_Hybrid_Seed_Dev_P Parameter: Tissue Value: Embryo vs. Unfert Floret
gcacgagaccattacctagaacatcctaatcgaaaagaacccttcccgtctccaaccgtcgccatctccatccgcgatttaaccactcggccgccgctgagtcagagtcagtagcgagaagcagagcggctctgctcctctcggtcgcgcgccgcccacacaacgccgtccaaccatcagcaatgcctcctgcagttggactccttcccctcctcctcctcctcctcctcttccatctccccgtctccctctgctcccaccaccaccatcacagcaccccacccgcttctccgtccccgtccccgtccccagcaccctcctccgcgccgctagcggtgctcctggcctgcaacgccacccggttccatccggcctgcgtctccacgctctccggcgccgcgcccgatgcctccaccgccgacctcctcgacgcgacgctctcggcgctccgcgtccgcctcccgcccgccgtctccacggccaaatccgtgctggcgtcctcctccaacgtgaacctctccaacgccgccaccaactgcctcacgttcctcgcgctctcctcccgccgcctctcgccgtccccctcggcgccgccgctgctctccgcctccacggcgctgctccacctctacgactgctggtccgcgtacaagtacgtcaacttctcccgcaccatctccgacgccatggcctacctcgacgacaccatcaccgtgaacagcaactacatctccatgctcgccgcgcggcagcgctacggcgacgagacgtccctctggcggcccccgcagacggagcgcgacgggtactggccgccgcccgccgcgagctcgggggccgacgtcgacgcgctcggcgtgcccaagggcctgccggcgaacgcgacggtgtgcggcgccgggtgcgactacaggacggtgcgggaggcggtggcggccgcgccggactacggcgacggcgcgttcgtggtgcacgtgaaggagggggcgtacagggagacggtgagcgtgccgtgggagaagaccaacgtggtcctcgttggcgacggcatggggaagacggtcatcactggcgatctcaacgctgacacgtccggcgtgtccaccttcaacaccgccaccgtaggcgtgctggcggacgggttcatggcgcgtgacctgacgatcgcgaacacggcgggccccgacgcgcaccaggccgtggcgttccggtccacgggcgaccgcacggtgctggacggcgtggagctgctggggcaccaggacacgctgtacgcgcacgccatgcgccagttctacacccggtgccgcgtggcgggcaccgtcgacttcgtcttcggcaactccgccgcggtgctccacgacaccgccctcgtcgtgctgccgcggcagctgcggccggagaagggcgagaacgacgccgtcacggcgcagggccgcaccgacccggcccagcccacggggatcgtgctcagccgctgctccgtcaacggcagcgaggagtacatggcgctgtaccgcgagaggcccggcgtgcaccacgtgtacctgggccgcccgtggaaggagtactcccgcaccgtgtacgtcgggtgcatgctcgcggagatcgtgcagccgcaggggtggatgccgtggaacggggacttcgcgctccagacgctctactacggcgagtacgacagcgccggccccggcggcgccgcgggccagagggtggcgtggagcagccaggttcccaaggtccacgtcgacgcgtacagcgtcgccagcttcatacaggggcacgagtggatacccagagtgtagtgcagtaccgcgtaataactgtagagagtgtatttaccaacaatcgtgtcccacaattgacacggtgtccctgatgttgagcttgagcattgcagttactcctaataatacggagagagcaagtcaaagacatggaaataataaacctaccgcgataacgatcgcaacgggc

SEQ ID NO: 9385 - protein, 541 aa, Zea mays subsp. mays
  peptide (1)..(541): Ceres Seq. ID no. 12390152
  misc_feature (233)..(534): Pfam Name: Pectinesterase Pfam Description: Pectinesterase
  misc_feature (8)..(541): Homolog of NCBI NO: 34907404 NR Description: putative pectin methylesterase [Oryza sativa
  misc_feature (7)..(537): Homolog of NCBI NO: 9759007 NR Description: pectin methylesterase-like protein [Arabidopsis
  misc_feature (7)..(537): Homolog of NCBI NO: 15242495 NR Description: pectin methylesterase - like protein; protein id:
  misc_feature (25)..(537): Homolog of NCBI NO: 22328058 NR Description: pectinesterase family; protein id: At5g64640.1
  misc_feature (143)..(537): Homolog of NCBI NO: 22135882 NR Description: pectin methylesterase-like protein [Arabidopsis
  misc_feature (166)..(538): Homolog of NCBI NO: 1552379 NR Description: pectin methylesterase [Silene latifolia subsp.
  misc_feature (94)..(538): Homolog of NCBI NO: 38344075 NR Description: OSJNBa0006B20.19 [Oryza sativa (japonica
  misc_feature (322)..(537): Homolog of NCBI NO: 21554293 NR Description: pectin methylesterase-like protein [Arabidopsis
  misc_feature (205)..(538): Homolog of NCBI NO: 6689892 NR Description: pectin methyl esterase [Solanum tuberosum]
  misc_feature (56)..(538): Homolog of NCBI NO: 6689890 NR Description: pectin methyl esterase [Solanum tuberosum]
MPPAVGLLPLLLLLLLFHLPVSLCSHHHHHSTPPASPSPSPSPAPSSAPLAVLLACNATRFHPACVSTLSGAAPDASTADLLDATLSALRVRLPPAVSTAKSVLASSSNVNLSNAATNCLTFLALSSRRLSPSPSAPPLLSASTALLHLYDCWSAYKYVNFSRTISDAMAYLDDTITVNSNYISMLAARQRYGDETSLWRPPQTERDGYWPPPAASSGADVDALGVPKGLPANATVCGAGCDYRTVREAVAAAPDYGDGAFVVHVKEGAYRETVSVPWEKTNVVLVGDGMGKTVITGDLNADTSGVSTFNTATVGVLADGFMARDLTIANTAGPDAHQAVAFRSTGDRTVLDGVELLGHQDTLYAHAMRQFYTRCRVAGTVDFVFGNSAAVLHDTALVVLPRQLRPEKGENDAVTAQGRTDPAQPTGIVLSRCSVNGSEEYMALYRERPGVHHVYLGRPWKEYSRTVYVGCMLAEIVQPQGWMPWNGDFALQTLYYGEYDSAGPGGAAGQRVAWSSQVPKVHVDAYSVASFIQGHEWIPRV

SEQ ID NO: 9386 - protein, 373 aa, Zea mays subsp. mays
  peptide (1)..(373): Ceres Seq. ID no. 12390153
  misc_feature (65)..(366): Pfam Name: Pectinesterase Pfam Description: Pectinesterase
  misc_feature (37)..(370): Homolog of NCBI NO: 6689892 NR Description: pectin methyl esterase [Solanum tuberosum]
  misc_feature (1)..(373): Homolog of NCBI NO: 34907404 NR Description: putative pectin methylesterase [Oryza sativa
  misc_feature (1)..(369): Homolog of NCBI NO: 15242495 NR Description: pectin methylesterase - like protein; protein id:
  misc_feature (1)..(369): Homolog of NCBI NO: 22135882 NR Description: pectin methylesterase-like protein [Arabidopsis
  misc_feature (1)..(370): Homolog of NCBI NO: 38344075 NR Description: OSJNBa0006B20.19 [Oryza sativa (japonica
  misc_feature (154)..(369): Homolog of NCBI NO: 21554293 NR Description: pectin methylesterase-like protein [Arabidopsis
  misc_feature (1)..(370): Homolog of NCBI NO: 1552379 NR Description: pectin methylesterase [Silene latifolia subsp.
  misc_feature (1)..(369): Homolog of NCBI NO: 22328058 NR Description: pectinesterase family; protein id: At5g64640.1
  misc_feature (1)..(369): Homolog of NCBI NO: 9759007 NR Description: pectin methylesterase-like protein [Arabidopsis
  misc_feature (1)..(370): Homolog of NCBI NO: 6689890 NR Description: pectin methyl esterase [Solanum tuberosum]
MAYLDDTITVNSNYISMLAARQRYGDETSLWRPPQTERDGYWPPPAASSGADVDALGVPKGLPANATVCGAGCDYRTVREAVAAAPDYGDGAFVVHVKEGAYRETVSVPWEKTNVVLVGDGMGKTVITGDLNADTSGVSTFNTATVGVLADGFMARDLTIANTAGPDAHQAVAFRSTGDRTVLDGVELLGHQDTLYAHAMRQFYTRCRVAGTVDFVFGNSAAVLHDTALVVLPRQLRPEKGENDAVTAQGRTDPAQPTGIVLSRCSVNGSEEYMALYRERPGVHHVYLGRPWKEYSRTVYVGCMLAEIVQPQGWMPWNGDFALQTLYYGEYDSAGPGGAAGQRVAWSSQVPKVHVDAYSVASFIQGHEWIPRV

SEQ ID NO: 9387 - protein, 357 aa, Zea mays subsp. mays
  peptide (1)..(357): Ceres Seq. ID no. 12390154
  misc_feature (49)..(350): Pfam Name: Pectinesterase Pfam Description: Pectinesterase
  misc_feature (1)..(357): Homolog of NCBI NO: 34907404 NR Description: putative pectin methylesterase [Oryza sativa
  misc_feature (1)..(353): Homolog of NCBI NO: 9759007 NR Description: pectin methylesterase-like protein [Arabidopsis
  misc_feature (1)..(353): Homolog of NCBI NO: 15242495 NR Description: pectin methylesterase - like protein; protein id:
  misc_feature (1)..(353): Homolog of NCBI NO: 22328058 NR Description: pectinesterase family; protein id: At5g64640.1
  misc_feature (1)..(353): Homolog of NCBI NO: 22135882 NR Description: pectin methylesterase-like protein [Arabidopsis
  misc_feature (1)..(354): Homolog of NCBI NO: 1552379 NR Description: pectin methylesterase [Silene latifolia subsp.
  misc_feature (1)..(354): Homolog of NCBI NO: 38344075 NR Description: OSJNBa0006B20.19 [Oryza sativa (japonica
  misc_feature (138)..(353): Homolog of NCBI NO: 21554293 NR Description: pectin methylesterase-like protein [Arabidopsis
  misc_feature (21)..(354): Homolog of NCBI NO: 6689892 NR Description: pectin methyl esterase [Solanum tuberosum]
  misc_feature (1)..(354): Homolog of NCBI NO: 6689890 NR Description: pectin methyl esterase [Solanum tuberosum]
MLAARQRYGDETSLWRPPQTERDGYWPPPAASSGADVDALGVPKGLPANATVCGAGCDYRTVREAVAAAPDYGDGAFVVHVKEGAYRETVSVPWEKTNVVLVGDGMGKTVITGDLNADTSGVSTFNTATVGVLADGFMARDLTIANTAGPDAHQAVAFRSTGDRTVLDGVELLGHQDTLYAHAMRQFYTRCRVAGTVDFVFGNSAAVLHDTALVVLPRQLRPEKGENDAVTAQGRTDPAQPTGIVLSRCSVNGSEEYMALYRERPGVHHVYLGRPWKEYSRTVYVGCMLAEIVQPQGWMPWNGDFALQTLYYGEYDSAGPGGAAGQRVAWSSQVPKVHVDAYSVASFIQGHEWIPRV

SEQ ID NO: 9388 - DNA, 1619 bp, Zea mays subsp. mays
  misc_feature (1)..(1619): Ceres Seq. ID no. 12365892
  misc_feature: MA Experiment ID: 108556 Result: Up-regulated in Transcription
  misc_feature: MA Experiment 108556 PARAMETER Experiment Name: Zm_Drought_P Parameter: Age (day) Value: 9
  misc_feature: MA Experiment 108556 PARAMETER Experiment Name: Zm_Drought_P Parameter: Organism Value: Zea mays
  misc_feature: MA Experiment 108556 PARAMETER Experiment Name: Zm_Drought_P Parameter: Plant Line Value: 35A19
  misc_feature: MA Experiment 108556 PARAMETER Experiment Name: Zm_Drought_P Parameter: Timepoint (hr) Value: 24
  misc_feature: MA Experiment 108556 PARAMETER Experiment Name: Zm_Drought_P Parameter: Tissue Value: Aerial
  misc_feature: MA Experiment 108556 PARAMETER Experiment Name: Zm_Drought_P Parameter: Treatment Value: Drought vs. No Drought
  misc_feature: MA Experiment ID: 108597 Result: Up-regulated in Transcription
  misc_feature: MA Experiment 108597 PARAMETER Experiment Name: Zm_100uM_ABA_P Parameter: Age (day) Value: 9
  misc_feature: MA Experiment 108597 PARAMETER Experiment Name: Zm_100uM_ABA_P Parameter: Organism Value: Zea mays
  misc_feature: MA Experiment 108597 PARAMETER Experiment Name: Zm_100uM_ABA_P Parameter: Plant Line Value: 35A19
  misc_feature: MA Experiment 108597 PARAMETER Experiment Name: Zm_100uM_ABA_P Parameter: Timepoint (hr) Value: 24
  misc_feature: MA Experiment 108597 PARAMETER Experiment Name: Zm_100uM_ABA_P Parameter: Tissue Value: Aerial
  misc_feature: MA Experiment 108597 PARAMETER Experiment Name: Zm_100uM_ABA_P Parameter: Treatment Value: 100uM ABA vs. No Treatment
  misc_feature: MA Experiment ID: 20000479 Result: Up-regulated in Transcription
  misc_feature: MA Experiment 20000479 PARAMETER Experiment Name: Zm_Drought_P Parameter: Age (day) Value: 10
  misc_feature: MA Experiment 20000479 PARAMETER Experiment Name: Zm_Drought_P Parameter: Organism Value: Zea mays
  misc_feature: MA Experiment 20000479 PARAMETER Experiment Name: Zm_Drought_P Parameter: Plant Line Value: 35A19
  misc_feature: MA Experiment 20000479 PARAMETER Experiment Name: Zm_Drought_P Parameter: Timepoint (hr) Value: 48
  misc_feature: MA Experiment 20000479 PARAMETER Experiment Name: Zm_Drought_P Parameter: Tissue Value: Aerial
  misc_feature: MA Experiment 20000479 PARAMETER Experiment Name: Zm_Drought_P Parameter: Treatment Value: Drought vs. No Drought
  misc_feature: MA Experiment ID: 20000535 Result: Up-regulated in Transcription
  misc_feature: MA Experiment 20000535 PARAMETER Experiment Name: Zm_Hybrid_Seed_Dev_P Parameter: DAP Value: 30 vs. 12
  misc_feature: MA Experiment 20000535 PARAMETER Experiment Name: Zm_Hybrid_Seed_Dev_P Parameter: Organism Value: Zea mays
  misc_feature: MA Experiment 20000535 PARAMETER Experiment Name: Zm_Hybrid_Seed_Dev_P Parameter: Plant Line Value: 35A19
  misc_feature: MA Experiment 20000535 PARAMETER Experiment Name: Zm_Hybrid_Seed_Dev_P Parameter: Tissue Value: Embryo vs. Unfert Floret
gcacgagaccattacctagaacatcctaatcgaaaaagtagacacctaaactttgccacatagccaataacggatcggatcgccttcgtacttttcctacttgctatctccagcgctaggctatcagctagcactagcagcgccgtcactgttcgaagagatcagcgcagcgaactcgcagccgagagatcgatcgaggccggccggggccgagatgggcagcgtcggcgtcggttgcggctcgccggacgaggagcagcagaccgagggcagtggccctctgccgccgccggctgtctgcgtcacggggtccaccggctacgtcggctcctggctcgtccgcacgctgctgcggcgaggctaccgcgtccacgccaccgccagggacacaggcaaggccttgcaggtgctcgccgtcgtggaagaagggagggaccggctcagggtgttcagggccgacatgggcgaggaagggagcttcgacgccgccgtcacgggatgcgtggcgctcttccacgtcgcggcctccatggacctccacgtatcacccgcccatcaggacaacctcgaggagcacgtgaggtcaagcatgctggagccggccacgaggggaaccatcaacgtgctgcggtcctgcgtccgcgccgggaccgtgcgccgggtcgtcttcacgtcctccgtcagcacgttgacggcggtggacgcggtggggcggcggaaggccgtgctcgacgagtcttgcctcagagccctcgacgacgtgtggcgcaccaagcccgtcggctgggtctacatcctgtccaagcggctgactgaggaggcggcgttcaggttcgcacgggagaacggcgtccacctcgtgtccctcgttctgccaaccgtcgccgggccgttcctcacgacaagcgtccctacgagcatccagctcctgctgtcacccatcacaggtgacccgaagctctactcggtgctggcctcagtgcacgccaggttcgggtgcgtcccgctggcgcacgtccaggacgtgtgtgacgcgcacgtcttactgatggaggcgccgcgcgccgaggggcggtacctgtgcgccgcgggcgggtacgcggcggcgcagctcgcgcggctcctcgcttcgcgctaccttccggccggtgacaggctgagcaaagatttcgacgacgtctcctgctcgccgccggtggtttcgtccaggaggctgttggatctggggttcaggttccggcacgacgtcgaggacgtggtgaaagacagtgttgcgcagtgtcttgcccatgggttcctggagcatcctgagacctgaatgcggcagagctgcaattcctagttggtttcaggcgttcagcaaatcagcggcgatctgaaggagaaggatgaatgcatggttgggctggggcctgggcccttaggctatccacatgttactctatatttactctacagactataccactattcctagcttaatcaccaaaattccttactctaaattactcaccaaaatttgtagcctcatatacctctatatatcaactactactacatagtctattttattctatttcattctaactacttttttctctatataatacaagattttg

SEQ ID NO: 9389 - protein, 367 aa, Zea mays subsp. mays
  peptide (1)..(367): Ceres Seq. ID no. 12365893
  misc_feature (28)..(157): Pfam Name: NAD dependent epimerase/dehydratase family Pfam Description: NAD dependent epimerase/dehydratase family
  misc_feature (29)..(353): Homolog of NCBI NO: 30687527 NR Description: dihydroflavonol 4-reductase (dihydrokaempferol family [Arabidopsis thaliana] >gi|23296465|gb|AAN13064.1| unknown
  misc_feature (74)..(353): Homolog of NCBI NO: 7486807 NR Description: hypothetical protein M4I22.60 - Arabidopsis >gi|3269286|emb|CAA19719.1| putative protein [Arabidopsis >gi|7269578|emb|CAB79580.1| putative protein [Arabidopsis
  misc_feature (29)..(60): Homolog of NCBI NO: 7486807 NR Description: hypothetical protein M4I22.60 - Arabidopsis >gi|3269286|emb|CAA19719.1| putative protein [Arabidopsis >gi|7269578|emb|CAB79580.1| putative protein [Arabidopsis
  misc_feature (25)..(367): Homolog of NCBI NO: 12248378 NR Description: dihydroflavonol 4-reductase [Torenia hybrida]
MGSVGVGCGSPDEEQQTEGSGPLPPPAVCVTGSTGYVGSWLVRTLLRRGYRVHATARDTGKALQVLAVVEEGRDRLRVFRADMGEEGSFDAAVTGCVALFHVAASMDLHVSPAHQDNLEEHVRSSMLEPATRGTINVLRSCVRAGTVRRVVFTSSVSTLTAVDAVGRRKAVLDESCLRALDDVWRTKPVGWVYILSKRLTEEAAFRFARENGVHLVSLVLPTVAGPFLTTSVPTSIQLLLSPITGDPKLYSVLASVHARFGCVPLAHVQDVCDAHVLLMEAPRAEGRYLCAAGGYAAAQLARLLASRYLPAGDRLSKDFDDVSCSPPVVSSRRLLDLGFRFRHDVEDVVKDSVAQCLAHGFLEHPET

SEQ ID NO: 9390 - protein, 285 aa, Zea mays subsp. mays
  peptide (1)..(285): Ceres Seq. ID no. 12365894
  misc_feature (1)..(75): Pfam Name: NAD dependent epimerase/dehydratase family Pfam Description: NAD dependent epimerase/dehydratase family
  misc_feature (1)..(271): Homolog of NCBI NO: 30687527 NR Description: dihydroflavonol 4-reductase (dihydrokaempferol family [Arabidopsis thaliana] >gi|23296465|gb|AAN13064.1| unknown
  misc_feature (1)..(271): Homolog of NCBI NO: 7486807 NR Description: hypothetical protein M4I22.60 - Arabidopsis >gi|3269286|emb|CAA19719.1| putative protein [Arabidopsis >gi|7269578|emb|CAB79580.1| putative protein [Arabidopsis
  misc_feature (1)..(285): Homolog of NCBI NO: 12248378 NR Description: dihydroflavonol 4-reductase [Torenia hybrida]
MGEEGSFDAAVTGCVALFHVAASMDLHVSPAHQDNLEEHVRSSMLEPATRGTINVLRSCVRAGTVRRVVFTSSVSTLTAVDAVGRRKAVLDESCLRALDDVWRTKPVGWVYILSKRLTEEAAFRFARENGVHLVSLVLPTVAGPFLTTSVPTSIQLLLSPITGDPKLYSVLASVHARFGCVPLAHVQDVCDAHVLLMEAPRAEGRYLCAAGGYAAAQLARLLASRYLPAGDRLSKDFDDVSCSPPVVSSRRLLDLGFRFRHDVEDVVKDSVAQCLAHGFLEHPET

SEQ ID NO: 9391 - protein, 262 aa, Zea mays subsp. mays
  peptide (1)..(262): Ceres Seq. ID no. 12365895
  misc_feature (1)..(52): Pfam Name: NAD dependent epimerase/dehydratase family Pfam Description: NAD dependent epimerase/dehydratase family
  misc_feature (1)..(248): Homolog of NCBI NO: 30687527 NR Description: dihydroflavonol 4-reductase (dihydrokaempferol family [Arabidopsis thaliana] >gi|23296465|gb|AAN13064.1| unknown
  misc_feature (1)..(248): Homolog of NCBI NO: 7486807 NR Description: hypothetical protein M4I22.60 - Arabidopsis >gi|3269286|emb|CAA19719.1| putative protein [Arabidopsis >gi|7269578|emb|CAB79580.1| putative protein [Arabidopsis
  misc_feature (1)..(262): Homolog of NCBI NO: 12248378 NR Description: dihydroflavonol 4-reductase [Torenia hybrida]
MDLHVSPAHQDNLEEHVRSSMLEPATRGTINVLRSCVRAGTVRRVVFTSSVSTLTAVDAVGRRKAVLDESCLRALDDVWRTKPVGWVYILSKRLTEEAAFRFARENGVHLVSLVLPTVAGPFLTTSVPTSIQLLLSPITGDPKLYSVLASVHARFGCVPLAHVQDVCDAHVLLMEAPRAEGRYLCAAGGYAAAQLARLLASRYLPAGDRLSKDFDDVSCSPPVVSSRRLLDLGFRFRHDVEDVVKDSVAQCLAHGFLEHPET

SEQ ID NO: 9392 - DNA, 1408 bp, Zea mays subsp. mays
  misc_feature (1)..(1408): Ceres Seq. ID no. 12555162
  misc_feature: MA Experiment ID: 108523 Result: Down-regulated in Transcription
  misc_feature: MA Experiment 108523 PARAMETER Experiment Name: Zm_42deg_Heat_P Parameter: Age (day) Value: 8
  misc_feature: MA Experiment 108523 PARAMETER Experiment Name: Zm_42deg_Heat_P Parameter: Organism Value: Zea mays
  misc_feature: MA Experiment 108523 PARAMETER Experiment Name: Zm_42deg_Heat_P Parameter: Plant Line Value: 35A19
  misc_feature: MA Experiment 108523 PARAMETER Experiment Name: Zm_42deg_Heat_P Parameter: Temperature (deg C) Value: 42 vs. 22
  misc_feature: MA Experiment 108523 PARAMETER Experiment Name: Zm_42deg_Heat_P Parameter: Timepoint (hr) Value: 6
  misc_feature: MA Experiment 108523 PARAMETER Experiment Name: Zm_42deg_Heat_P Parameter: Tissue Value: Aerial
  misc_feature: MA Experiment ID: 108527 Result: Down-regulated in Transcription
  misc_feature: MA Experiment 108527 PARAMETER Experiment Name: Zm_5mM_NO_P Parameter: Age (day) Value: 8
  misc_feature: MA Experiment 108527 PARAMETER Experiment Name: Zm_5mM_NO_P Parameter: Organism Value: Zea mays
  misc_feature: MA Experiment 108527 PARAMETER Experiment Name: Zm_5mM_NO_P Parameter: Plant Line Value: 35A19
  misc_feature: MA Experiment 108527 PARAMETER Experiment Name: Zm_5mM_NO_P Parameter: Timepoint (hr) Value: 6
  misc_feature: MA Experiment 108527 PARAMETER Experiment Name: Zm_5mM_NO_P Parameter: Tissue Value: Aerial
  misc_feature: MA Experiment 108527 PARAMETER Experiment Name: Zm_5mM_NO_P Parameter: Treatment Value: 5mM NO vs. No Treatment
  misc_feature: MA Experiment ID: 108528 Result: Up-regulated in Transcription
  misc_feature: MA Experiment 108528 PARAMETER Experiment Name: Zm_Imbibed_Seeds_P Parameter: Age (day) Value: 5 vs. 2
  misc_feature: MA Experiment 108528 PARAMETER Experiment Name: Zm_Imbibed_Seeds_P Parameter: Organism Value: Zea mays
  misc_feature: MA Experiment 108528 PARAMETER Experiment Name: Zm_Imbibed_Seeds_P Parameter: Plant Line Value: 35A19
  misc_feature: MA Experiment 108528 PARAMETER Experiment Name: Zm_Imbibed_Seeds_P Parameter: Tissue Value: Aerial vs. Embryo
  misc_feature: MA Experiment ID: 108530 Result: Up-regulated in Transcription
  misc_feature: MA Experiment 108530 PARAMETER Experiment Name: Zm_Imbibed_Seeds_P Parameter: Age (day) Value: 6 vs. 2
  misc_feature: MA Experiment 108530 PARAMETER Experiment Name: Zm_Imbibed_Seeds_P Parameter: Organism Value: Zea mays
  misc_feature: MA Experiment 108530 PARAMETER Experiment Name: Zm_Imbibed_Seeds_P Parameter: Plant Line Value: 35A19
  misc_feature: MA Experiment 108530 PARAMETER Experiment Name: Zm_Imbibed_Seeds_P Parameter: Tissue Value: Aerial vs. Embryo
  misc_feature: MA Experiment ID: 108536 Result: Down-regulated in Transcription
  misc_feature: MA Experiment 108536 PARAMETER Experiment Name: Zm_Meristem_P Parameter: Age (day) Value: 8
  misc_feature: MA Experiment 108536 PARAMETER Experiment Name: Zm_Meristem_P Parameter: Organism Value: Zea mays
  misc_feature: MA Experiment 108536 PARAMETER Experiment Name: Zm_Meristem_P Parameter: Plant Line Value: 35A19
  misc_feature: MA Experiment 108536 PARAMETER Experiment Name: Zm_Meristem_P Parameter: Tissue Value: Shoot Meristem vs. Above Shoot Meristem
  misc_feature: MA Experiment ID: 108544 Result: Up-regulated in Transcription
  misc_feature: MA Experiment ID: 108545 Result: Up-regulated in Transcription
  misc_feature: MA Experiment 108545 PARAMETER Experiment Name: Zm_Imbibed_Seeds_P Parameter: Age (day) Value: 3 vs. 2
  misc_feature: MA Experiment 108545 PARAMETER Experiment Name: Zm_Imbibed_Seeds_P Parameter: Organism Value: Zea mays
  misc_feature: MA Experiment 108545 PARAMETER Experiment Name: Zm_Imbibed_Seeds_P Parameter: Plant Line Value: 35A19
  misc_feature: MA Experiment 108545 PARAMETER Experiment Name: Zm_Imbibed_Seeds_P Parameter: Tissue Value: Aerial vs. Embryo
  misc_feature: MA Experiment ID: 108547 Result: Up-regulated in Transcription
  misc_feature: MA Experiment 108547 PARAMETER Experiment Name: Zm_Imbibed_Seeds_P Parameter: Age (day) Value: 4 vs. 2
  misc_feature: MA Experiment 108547 PARAMETER Experiment Name: Zm_Imbibed_Seeds_P Parameter: Organism Value: Zea mays
  misc_feature: MA Experiment 108547 PARAMETER Experiment Name: Zm_Imbibed_Seeds_P Parameter: Plant Line Value: 35A19
  misc_feature: MA Experiment 108547 PARAMETER Experiment Name: Zm_Imbibed_Seeds_P Parameter: Tissue Value: Aerial vs. Embryo
  misc_feature: MA Experiment ID: 108559 Result: Down-regulated in Transcription
  misc_feature: MA Experiment 108559 PARAMETER Experiment Name: Zm_5mM_NO_P Parameter: Age (day) Value: 8
  misc_feature: MA Experiment 108559 PARAMETER Experiment Name: Zm_5mM_NO_P Parameter: Organism Value: Zea mays
  misc_feature: MA Experiment 108559 PARAMETER Experiment Name: Zm_5mM_NO_P Parameter: Plant Line Value: 35A19
  misc_feature: MA Experiment 108559 PARAMETER Experiment Name: Zm_5mM_NO_P Parameter: Timepoint (hr) Value: 12
  misc_feature: MA Experiment 108559 PARAMETER Experiment Name: Zm_5mM_NO_P Parameter: Tissue Value: Aerial
  misc_feature: MA Experiment 108559 PARAMETER Experiment Name: Zm_5mM_NO_P Parameter: Treatment Value: 5mM NO vs. No Treatment
  misc_feature: MA Experiment ID: 108687 Result: Down-regulated in Transcription
  misc_feature: MA Experiment 108687 PARAMETER Experiment Name: Zm_Embryos-Flowers__P Parameter: Tissue Value: Embryo vs. Aerial+
  misc_feature: MA Experiment ID: 108688 Result: Down-regulated in Transcription
  misc_feature: MA Experiment 108688 PARAMETER Experiment Name: Zm_Embryos-Flowers__P Parameter: Tissue Value: Immature Flowers vs. Aerial+
  misc_feature: MA Experiment ID: 20000480 Result: Down-regulated in Transcription
  misc_feature: MA Experiment 20000480 PARAMETER Experiment Name: Zm_Drought_P Parameter: Age (day) Value: 11
  misc_feature: MA Experiment 20000480 PARAMETER Experiment Name: Zm_Drought_P Parameter: Organism Value: Zea mays
  misc_feature: MA Experiment 20000480 PARAMETER Experiment Name: Zm_Drought_P Parameter: Plant Line Value: 35A19
  misc_feature: MA Experiment 20000480 PARAMETER Experiment Name: Zm_Drought_P Parameter: Timepoint (hr) Value: 72
  misc_feature: MA Experiment 20000480 PARAMETER Experiment Name: Zm_Drought_P Parameter: Tissue Value: Aerial
  misc_feature: MA Experiment 20000480 PARAMETER Experiment Name: Zm_Drought_P Parameter: Treatment Value: Drought vs. No Drought
aaacccaatccatccaaacccatttccctcgctcccatcccgtcccgccccttgtctcttccgcttccgcccgaccccgcgcgccgcggaccagcagccatgtcgtgctcccacctctccaccgcctggtcctcctcggcgctcgccagcagcgcctccaccacccgtcggcgctcccccccgcgctcgggtctcctggtgcggtgttccctccgtgagctccgcacccgcatcgactccgtcaggaacacgcagaagatcacggaggccatgaagctggtggccgccgccaaggtccggcgcgcgcaggaggccgtcgtctcctctcgccctttctcggaggcgctggtggaggtgctctacaacatgaaccaggagatccagacggaggacatcgacctgcccctcacccgcacccgccccgtcaagaaggtggccctcgtggtcctgaccggcgagcgcggcctctgcgggagcttcaacaacaacgtgctcaagaaggcggaaacccgcatcgatgagctcaagcagctgggcctccagtacaccgtcgtcagcgtggggaagaagggcaacgcctacttccagcgccgcccctacatcccgttggagcgcgatctggaggtgagcagcgtgcccaccgtcaaggactcgcaggccatctgcgacctcgtctactcgctcttcgtctccgaggaggtggacaaggtggagctgctctactccaagttcgtgtcgctggtgcgctccgaccccatcatccagacgctgctccccatgtcgcccaagggcgagatctgcgacgtcaacggcgtctgcgtggacgccacggaggacgagctcttccgcctcaccaccaaggaggggaagctcaccgtggagcgcgagaaggtgaagatcgagacgcagcccttctcccccgtggtgcagttcgagcaggaccccgtgcagatcctggacgcgctgctcccgctctacctcaacagccagatcctccgtgccctgcaggagtcgctcgccagcgagctcgccgcccggatgagcgccatgagcagcgccaccgacaacgccatcgagctccgcaagaacctctccatcgcctacaaccgacagcgccaggccaagatcaccggggagatcctcgagatcgtcgccggtgccgacgccctcgctggctgagcctgagtccccttggtggtgcggtgctcctgctatatataattctttttcctcattttctccactctgcctgtaattcctgataatagcacaaacgcaacggagttctgtgttccttgcgacacacaagaatttcaatccagagatgccaaaatgtataatcttgccgcaactgagacgtcgaagctcagtgtatttttatgcccaagtcttccaaatgtttggcacg

SEQ ID NO: 9393 - protein, 392 aa, Zea mays subsp. mays
  peptide (1)..(392): Ceres Seq. ID no. 12555163
  misc_feature (69)..(390): Pfam Name: ATP synthase Pfam Description: ATP synthase
  misc_feature (34)..(391): Homolog of NCBI NO: 27818005 NR Description: OSJNBb0041J06.11 [Oryza sativa (japonica
  misc_feature (34)..(389): Homolog of NCBI NO: 18412632 NR Description: coded for by A. thaliana cDNA AA041141; protein At4g04640.1, supported by cDNA: 6687., supported by cDNA: supported by cDNA: gi_17473928, supported by cDNA: gi_20148352
  misc_feature (31)..(390): Homolog of NCBI NO: 231610 NR Description: ATP synthase gamma chain, chloroplast precursor
  misc_feature (34)..(389): Homolog of NCBI NO: 114643 NR Description: ATP synthase gamma chain, chloroplast precursor
  misc_feature (67)..(389): Homolog of NCBI NO: 755801 NR Description: ATP synthase [Spinacia oleracea]
  misc_feature (31)..(386): Homolog of NCBI NO: 114640 NR Description: ATP synthase gamma chain, chloroplast precursor
  misc_feature (91)..(389): Homolog of NCBI NO: 5708095 NR Description: ATP synthase gamma chain, chloroplast precursor
  misc_feature (58)..(390): Homolog of NCBI NO: 15218281 NR Description: ATP synthase gamma-subunit, putative; protein id: supported by cDNA: gi_17529041 [Arabidopsis thaliana]
  misc_feature (62)..(392): Homolog of NCBI NO: 114638 NR Description: ATP synthase gamma chain, chloroplast precursor
  misc_feature (62)..(392): Homolog of NCBI NO: 228698 NR Description: CF1 ATP synthase:SUBUNIT=gamma
KPNPSKPISLAPIPSRPLSLPLPPDPARRGPAAMSCSHLSTAWSSSALASSASTTRRRSPPRSGLLVRCSLRELRTRIDSVRNTQKITEAMKLVAAAKVRRAQEAVVSSRPFSEALVEVLYNMNQEIQTEDIDLPLTRTRPVKKVALVVLTGERGLCGSFNNNVLKKAETRIDELKQLGLQYTVVSVGKKGNAYFQRRPYIPLERDLEVSSVPTVKDSQAICDLVYSLFVSEEVDKVELLYSKFVSLVRSDPIIQTLLPMSPKGEICDVNGVCVDATEDELFRLTTKEGKLTVEREKVKIETQPFSPVVQFEQDPVQILDALLPLYLNSQILRALQESLASELAARMSAMSSATDNAIELRKNLSIAYNRQRQAKITGEILEIVAGADALAG

SEQ ID NO: 9394 - protein, 359 aa, Zea mays subsp. mays
  peptide (1)..(359): Ceres Seq. ID no. 12555164
  misc_feature (36)..(357): Pfam Name: ATP synthase Pfam Description: ATP synthase
  misc_feature (1)..(358): Homolog of NCBI NO: 27818005 NR Description: OSJNBb0041J06.11 [Oryza sativa (japonica
  misc_feature (1)..(356): Homolog of NCBI NO: 18412632 NR Description: coded for by A. thaliana cDNA AA041141; protein At4g04640.1, supported by cDNA: 6687., supported by cDNA: supported by cDNA: gi_17473928, supported by cDNA: gi_20148352
  misc_feature (1)..(357): Homolog of NCBI NO: 231610 NR Description: ATP synthase gamma chain, chloroplast precursor
  misc_feature (1)..(356): Homolog of NCBI NO: 114643 NR Description: ATP synthase gamma chain, chloroplast precursor
  misc_feature (34)..(356): Homolog of NCBI NO: 755801 NR Description: ATP synthase [Spinacia oleracea]
  misc_feature (1)..(353): Homolog of NCBI NO: 114640 NR Description: ATP synthase gamma chain, chloroplast precursor
  misc_feature (58)..(356): Homolog of NCBI NO: 5708095 NR Description: ATP synthase gamma chain, chloroplast precursor
  misc_feature (25)..(357): Homolog of NCBI NO: 15218281 NR Description: ATP synthase gamma-subunit, putative; protein id: supported by cDNA: gi_17529041 [Arabidopsis thaliana]
  misc_feature (29)..(359): Homolog of NCBI NO: 114638 NR Description: ATP synthase gamma chain, chloroplast precursor
  misc_feature (29)..(359): Homolog of NCBI NO: 228698 NR Description: CF1 ATP synthase:SUBUNIT=gamma
MSCSHLSTAWSSSALASSASTTRRRSPPRSGLLVRCSLRELRTRIDSVRNTQKITEAMKLVAAAKVRRAQEAVVSSRPFSEALVEVLYNMNQEIQTEDIDLPLTRTRPVKKVALVVLTGERGLCGSFNNNVLKKAETRIDELKQLGLQYTVVSVGKKGNAYFQRRPYIPLERDLEVSSVPTVKDSQAICDLVYSLFVSEEVDKVELLYSKFVSLVRSDPIIQTLLPMSPKGEICDVNGVCVDATEDELFRLTTKEGKLTVEREKVKIETQPFSPVVQFEQDPVQILDALLPLYLNSQILRALQESLASELAARMSAMSSATDNAIELRKNLSIAYNRQRQAKITGEILEIVAGADALAG

SEQ ID NO: 9395 - protein, 302 aa, Zea mays subsp. mays
  peptide (1)..(302): Ceres Seq. ID no. 12555165
  misc_feature (1)..(300): Pfam Name: ATP synthase Pfam Description: ATP synthase
  misc_feature (1)..(301): Homolog of NCBI NO: 27818005 NR Description: OSJNBb0041J06.11 [Oryza sativa (japonica
  misc_feature (1)..(299): Homolog of NCBI NO: 18412632 NR Description: coded for by A. thaliana cDNA AA041141; protein At4g04640.1, supported by cDNA: 6687., supported by cDNA: supported by cDNA: gi_17473928, supported by cDNA: gi_20148352
  misc_feature (1)..(300): Homolog of NCBI NO: 231610 NR Description: ATP synthase gamma chain, chloroplast precursor
  misc_feature (1)..(299): Homolog of NCBI NO: 114643 NR Description: ATP synthase gamma chain, chloroplast precursor
  misc_feature (1)..(299): Homolog of NCBI NO: 755801 NR Description: ATP synthase [Spinacia oleracea]
  misc_feature (1)..(296): Homolog of NCBI NO: 114640 NR Description: ATP synthase gamma chain, chloroplast precursor
  misc_feature (1)..(299): Homolog of NCBI NO: 5708095 NR Description: ATP synthase gamma chain, chloroplast precursor
  misc_feature (1)..(300): Homolog of NCBI NO: 15218281 NR Description: ATP synthase gamma-subunit, putative; protein id: supported by cDNA: gi_17529041 [Arabidopsis thaliana]
  misc_feature (1)..(302): Homolog of NCBI NO: 114638 NR Description: ATP synthase gamma chain, chloroplast precursor
  misc_feature (1)..(302): Homolog of NCBI NO: 228698 NR Description: CF1 ATP synthase:SUBUNIT=gamma
MKLVAAAKVRRAQEAVVSSRPFSEALVEVLYNMNQEIQTEDIDLPLTRTRPVKKVALVVLTGERGLCGSFNNNVLKKAETRIDELKQLGLQYTVVSVGKKGNAYFQRRPYIPLERDLEVSSVPTVKDSQAICDLVYSLFVSEEVDKVELLYSKFVSLVRSDPIIQTLLPMSPKGEICDVNGVCVDATEDELFRLTTKEGKLTVEREKVKIETQPFSPVVQFEQDPVQILDALLPLYLNSQILRALQESLASELAARMSAMSSATDNAIELRKNLSIAYNRQRQAKITGEILEIVAGADALAG

SEQ ID NO: 9396 - DNA, 965 bp, Zea mays subsp. mays
  misc_feature (1)..(965): Ceres Seq. ID no. 12415225
  misc_feature: MA Experiment ID: 108534 Result: Up-regulated in Transcription
  misc_feature: MA Experiment 108534 PARAMETER Experiment Name: Zm_4deg_Cold_P Parameter: Age (hr) Value: 8
  misc_feature: MA Experiment 108534 PARAMETER Experiment Name: Zm_4deg_Cold_P Parameter: Organism Value: Zea mays
  misc_feature: MA Experiment 108534 PARAMETER Experiment Name: Zm_4deg_Cold_P Parameter: Plant Line Value: 35A19
  misc_feature: MA Experiment 108534 PARAMETER Experiment Name: Zm_4deg_Cold_P Parameter: Temperature (deg C) Value: 4 vs. 22
  misc_feature: MA Experiment 108534 PARAMETER Experiment Name: Zm_4deg_Cold_P Parameter: Timepoint (hr) Value: 6
  misc_feature: MA Experiment 108534 PARAMETER Experiment Name: Zm_4deg_Cold_P Parameter: Tissue Value: Aerial
  misc_feature: MA Experiment ID: 108535 Result: Up-regulated in Transcription
  misc_feature: MA Experiment 108535 PARAMETER Experiment Name: Zm_Meristem_P Parameter: Age (day) Value: 8
  misc_feature: MA Experiment 108535 PARAMETER Experiment Name: Zm_Meristem_P Parameter: Organism Value: Zea mays
  misc_feature: MA Experiment 108535 PARAMETER Experiment Name: Zm_Meristem_P Parameter: Plant Line Value: 35A19
  misc_feature: MA Experiment 108535 PARAMETER Experiment Name: Zm_Meristem_P Parameter: Tissue Value: Root Meristem vs. Above Root Meristem
  misc_feature: MA Experiment ID: 108536 Result: Up-regulated in Transcription
  misc_feature: MA Experiment 108536 PARAMETER Experiment Name: Zm_Meristem_P Parameter: Age (day) Value: 8
  misc_feature: MA Experiment 108536 PARAMETER Experiment Name: Zm_Meristem_P Parameter: Organism Value: Zea mays
  misc_feature: MA Experiment 108536 PARAMETER Experiment Name: Zm_Meristem_P Parameter: Plant Line Value: 35A19
  misc_feature: MA Experiment 108536 PARAMETER Experiment Name: Zm_Meristem_P Parameter: Tissue Value: Shoot Meristem vs. Above Shoot Meristem
  misc_feature: MA Experiment ID: 108543 Result: Up-regulated in Transcription
  misc_feature: MA Experiment ID: 108559 Result: Down-regulated in Transcription
  misc_feature: MA Experiment 108559 PARAMETER Experiment Name: Zm_5mM_NO_P Parameter: Age (day) Value: 8
  misc_feature: MA Experiment 108559 PARAMETER Experiment Name: Zm_5mM_NO_P Parameter: Organism Value: Zea mays
  misc_feature: MA Experiment 108559 PARAMETER Experiment Name: Zm_5mM_NO_P Parameter: Plant Line Value: 35A19
  misc_feature: MA Experiment 108559 PARAMETER Experiment Name: Zm_5mM_NO_P Parameter: Timepoint (hr) Value: 12
  misc_feature: MA Experiment 108559 PARAMETER Experiment Name: Zm_5mM_NO_P Parameter: Tissue Value: Aerial
  misc_feature: MA Experiment 108559 PARAMETER Experiment Name: Zm_5mM_NO_P Parameter: Treatment Value: 5mM NO vs. No Treatment
  misc_feature: MA Experiment ID: 108597 Result: Down-regulated in Transcription
  misc_feature: MA Experiment 108597 PARAMETER Experiment Name: Zm_100uM_ABA_P Parameter: Age (day) Value: 9
  misc_feature: MA Experiment 108597 PARAMETER Experiment Name: Zm_100uM_ABA_P Parameter: Organism Value: Zea mays
  misc_feature: MA Experiment 108597 PARAMETER Experiment Name: Zm_100uM_ABA_P Parameter: Plant Line Value: 35A19
  misc_feature: MA Experiment 108597 PARAMETER Experiment Name: Zm_100uM_ABA_P Parameter: Timepoint (hr) Value: 24
  misc_feature: MA Experiment 108597 PARAMETER Experiment Name: Zm_100uM_ABA_P Parameter: Tissue Value: Aerial
  misc_feature: MA Experiment 108597 PARAMETER Experiment Name: Zm_100uM_ABA_P Parameter: Treatment Value: 100uM ABA vs. No Treatment
  misc_feature: MA Experiment ID: 20000477 Result: Down-regulated in Transcription
  misc_feature: MA Experiment 20000477 PARAMETER Experiment Name: Zm_5mM_SA_P Parameter: Age (day) Value: 10
  misc_feature: MA Experiment 20000477 PARAMETER Experiment Name: Zm_5mM_SA_P Parameter: Organism Value: Zea mays
  misc_feature: MA Experiment 20000477 PARAMETER Experiment Name: Zm_5mM_SA_P Parameter: Plant Line Value: 35A19
  misc_feature: MA Experiment 20000477 PARAMETER Experiment Name: Zm_5mM_SA_P Parameter: Timepoint (hr) Value: 48
  misc_feature: MA Experiment 20000477 PARAMETER Experiment Name: Zm_5mM_SA_P Parameter: Tissue Value: Aerial
  misc_feature: MA Experiment 20000477 PARAMETER Experiment Name: Zm_5mM_SA_P Parameter: Treatment Value: 5mM SA vs. No Treatment
  misc_feature: MA Experiment ID: 20000478 Result: Down-regulated in Transcription
  misc_feature: MA Experiment 20000478 PARAMETER Experiment Name: Zm_5mM_SA_P Parameter: Age (day) Value: 11
  misc_feature: MA Experiment 20000478 PARAMETER Experiment Name: Zm_5mM_SA_P Parameter: Organism Value: Zea mays
  misc_feature: MA Experiment 20000478 PARAMETER Experiment Name: Zm_5mM_SA_P Parameter: Plant Line Value: 35A19
  misc_feature: MA Experiment 20000478 PARAMETER Experiment Name: Zm_5mM_SA_P Parameter: Timepoint (hr) Value: 72
  misc_feature: MA Experiment 20000478 PARAMETER Experiment Name: Zm_5mM_SA_P Parameter: Tissue Value: Aerial
  misc_feature: MA Experiment 20000478 PARAMETER Experiment Name: Zm_5mM_SA_P Parameter: Treatment Value: 5mM SA vs. No Treatment
  misc_feature: MA Experiment ID: 20000535 Result: Down-regulated in Transcription
  misc_feature: MA Experiment 20000535 PARAMETER Experiment Name: Zm_Hybrid_Seed_Dev_P Parameter: DAP Value: 30 vs. 12
  misc_feature: MA Experiment 20000535 PARAMETER Experiment Name: Zm_Hybrid_Seed_Dev_P Parameter: Organism Value: Zea mays
  misc_feature: MA Experiment 20000535 PARAMETER Experiment Name: Zm_Hybrid_Seed_Dev_P Parameter: Plant Line Value: 35A19
  misc_feature: MA Experiment 20000535 PARAMETER Experiment Name: Zm_Hybrid_Seed_Dev_P Parameter: Tissue Value: Embryo vs. Unfert Floret
accaccagcagagagcagacccgccgtctccgctatcagcacgcgtgtagccctgcagcgaggaatcaccacacacacacacacgcagagagacagagaagaggagggagatgtcgccgcagtctcagcagcagacggcgatantcggggaggagtactgcgagggcgaggacagggagctgacggtgcgcaagangacgctcttcaccccgggggacgggctggaggcgtacgaccaccgcacgggcgcgctggcgttccgcgtcgagacgtacggccgcggcggggcgtgcgggggcggggccgccaggggggacctcgcgctgctgggcgcccagggggagcccgtcctcacggtgcgccgccgccgccccagcctgcacaaccgctgggacggcttcctcggcgacggcgccgcgcacggccagaagaagcccgtcttctccgcgcgccgctcctccatcctcggcgccggcacgggcgccgccgccgtcctcgtcgacctcctcgcccccggcgccgccggggagttccgcgtcgacggctccttcccgcgccgctgctgccgcgtcgtggcctccgccagggcntgggccgcgcccgtcgccaaggagnnggaggaggaggaggaggaggacgtggtggtggcggaggtcaggcggaaggtggacgaggacgcgcacgtcatgatgggccgggacgtcttcgtgctctgggtgcgcgccggcttcgacgccgccttcgccatggggatcgtgctcgtgctcgaccggatcaccggggatgacgtcgacggcgactgcgggaggacctgctcgaggccgctacatnccgccggcgtaagcacgcgggaccgacctcccgctcgcgtggggcgtggcttcagtacaattccacaaacaattttctcatggttcttcgatccgatgtactttaccttcgagcatgatgtgaattatcttctc

SEQ ID NO: 9397 - protein, 285 aa, Zea mays subsp. mays
  peptide (1)..(285): Ceres Seq. ID no. 12415226
  misc_feature (10)..(218): Pfam Name: Protein of unknown function (DUF567) Pfam Description: Protein of unknown function (DUF567)
  misc_feature (10)..(239): Homolog of NCBI NO: 34909922 NR Description: P0665A11.21 [Oryza sativa (japonica
  misc_feature (14)..(170): Homolog of NCBI NO: 15220064 NR Description: hypothetical protein; protein id: At1g80120.1
  misc_feature (11)..(187): Homolog of NCBI NO: 18400907 NR Description: expressed protein; protein id: At3g15810.1, by cDNA: 2528., supported by cDNA: gi_17380787, supported by gi_20259608 [Arabidopsis thaliana] >gi|11994353|dbj|BAB02312.1|
  misc_feature (11)..(187): Homolog of NCBI NO: 21554362 NR Description: unknown [Arabidopsis thaliana]
  misc_feature (24)..(222): Homolog of NCBI NO: 27542769 NR Description: hypothetical protein-like protein [Sorghum
  misc_feature (9)..(222): Homolog of NCBI NO: 27542765 NR Description: hypothetical protein-like protein [Sorghum
  misc_feature (124)..(227): Homolog of NCBI NO: 15220064 NR Description: hypothetical protein; protein id: At1g80120.1
  misc_feature (179)..(226): Homolog of NCBI NO: 18400907 NR Description: expressed protein; protein id: At3g15810.1, by cDNA: 2528., supported by cDNA: gi_17380787, supported by gi_20259608 [Arabidopsis thaliana] >gi|11994353|dbj|BAB02312.1|
  misc_feature (179)..(226): Homolog of NCBI NO: 21554362 NR Description: unknown [Arabidopsis thaliana]
  misc_feature (12)..(12): Xaa is any aa, unknown or other
  misc_feature (29)..(29): Xaa is any aa, unknown or other
  misc_feature (160)..(160): Xaa is any aa, unknown or other
  misc_feature (169)..(169): Xaa is any aa, unknown or other
  misc_feature (241)..(241): Xaa is any aa, unknown or other
MSPQSQQQTAIXGEEYCEGEDRELTVRKXTLFTPGDGLEAYDHRTGALAFRVETYGRGGACGGGAARGDLALLGAQGEPVLTVRRRRPSLHNRWDGFLGDGAAHGQKKPVFSARRSSILGAGTGAAAVLVDLLAPGAAGEFRVDGSFPRRCCRVVASARXWAAPVAKEXEEEEEEDVVVAEVRRKVDEDAHVMMGRDVFVLWVRAGFDAAFAMGIVLVLDRITGDDVDGDCGRTCSRPLHXAGVSTRDRPPARVGRGFSTIPQTIFSWFFDPMYFTFEHDVNYLL

SEQ ID NO: 9398 - protein, 261 aa, Zea mays subsp. mays
  peptide (1)..(261): Ceres Seq. ID no. 12415227
  misc_feature (43)..(233): Homolog of NCBI NO: 29829093 NR Description: putative translation initiation factor IF-2
  misc_feature (42)..(260): Homolog of NCBI NO: 23104656 NR Description: hypothetical protein [Azotobacter vinelandii]
  misc_feature (29)..(244): Homolog of NCBI NO: 34915038 NR Description: putative multi resistance protein ABC transporter
  misc_feature (92)..(261): Homolog of NCBI NO: 13633918 NR Description: U1 small nuclear ribonucleoprotein 70 kDa (U1
  misc_feature (71)..(261): Homolog of NCBI NO: 23018055 NR Description: hypothetical protein [Thermobifida fusca]
  misc_feature (62)..(258): Homolog of NCBI NO: 23019271 NR Description: hypothetical protein [Thermobifida fusca]
  misc_feature (194)..(260): Homolog of NCBI NO: 24641772 NR Description: CG1987-PA [Drosophila melanogaster]
  misc_feature (24)..(261): Homolog of NCBI NO: 30424862 NR Description: RIKEN cDNA 5033413A03 [Mus musculus]
  misc_feature (13)..(261): Homolog of NCBI NO: 22960097 NR Description: hypothetical protein [Rhodobacter sphaeroides]
  misc_feature (28)..(258): Homolog of NCBI NO: 19553189 NR Description: translation initiation factor 2 [Corynebacterium ATCC 13032] >gi|21324755|dbj|BAB99378.1| Translation initiation
  misc_feature (48)..(48): Xaa is any aa, unknown or other
  misc_feature (65)..(65): Xaa is any aa, unknown or other
  misc_feature (197)..(197): Xaa is any aa, unknown or other
  misc_feature (205)..(205): Xaa is any aa, unknown or other
PPAESRPAVSAISTRVALQRGITTHTHTQRDREEEGDVAAVSAADGDXRGGVLRGRGQGADGAQXDALHPGGRAGGVRPPHGRAGVPRRDVRPRRGVRGRGRQGGPRAAGRPGGARPHGAPPPPQPAQPLGRLPRRRRRARPEEARLLRAPLLHPRRRHGRRRRPRRPPRPRRRRGVPRRRLLPAPLLPRRGLRQGXGRARRQGXGGGGGGGRGGGGGQAEGGRGRARHDGPGRLRALGARRLRRRLRHGDRARARPDHRG

SEQ ID NO: 9399 - DNA, 960 bp, Zea mays subsp. mays
  misc_feature (1)..(960): Ceres Seq. ID no. 12369133
  misc_feature: MA Experiment ID: 108522 Result: Up-regulated in Transcription
  misc_feature: MA Experiment 108522 PARAMETER Experiment Name: Zm_42deg_Heat_P Parameter: Age (day) Value: 8
  misc_feature: MA Experiment 108522 PARAMETER Experiment Name: Zm_42deg_Heat_P Parameter: Organism Value: Zea mays
  misc_feature: MA Experiment 108522 PARAMETER Experiment Name: Zm_42deg_Heat_P Parameter: Plant Line Value: 35A19
  misc_feature: MA Experiment 108522 PARAMETER Experiment Name: Zm_42deg_Heat_P Parameter: Temperature (deg C) Value: 42 vs. 22
  misc_feature: MA Experiment 108522 PARAMETER Experiment Name: Zm_42deg_Heat_P Parameter: Timepoint (hr) Value: 1
  misc_feature: MA Experiment 108522 PARAMETER Experiment Name: Zm_42deg_Heat_P Parameter: Tissue Value: Aerial
gaacctgagaacctgacgcggcatcatgcaaacaaaaccgatcagagagatggcggccgtctcctccaccgccaccgcctcctcgcagccggagctgccgacctccaccgcccaccctaccgccaatgccgccgccatcagcaggctggcgcggcggccacggcggaacaacagcttcgtgatggtggaggaggcgtcctatgccagcggcggcggcgacggcggggtggccaggacgaagagcctcacggaggacgacctggaggagctcaagggctgcgtcgacctcggcttcggcttcgcgtacagcgagatacccgagctctgcgggacgctgcccgcgctcgagctctgctactccatgacccggaggttcctcgacgagcagagggcgccgggacaggatgaggaggaggaggagcctgcgtcgccgccgctcccaaattggaggatctttgcaccgggtgacgatccggaggaagtgaaggccaggttgaagtattgggctcaagcagtagcatgcactgtcaagctctgcagctgaaccagaggctggttttaactgctgtctgttctgttagcgtatgctgcgacgggccgaaccgagggcctgttggaggttgaacagtctggttgtatgtgttttgggattcgggggagcgaagaactctcttcataggtttcttctctggctgcttctgcaagaacttgggagggcggaggagggatcatgatccgggacagcgacagaccccgattgagatccatggtttgagggttctacgccgcaagcctttgcaaaatgcaggacctgctgtttcgttgttaataataataatgatgatgatgatcactaggtgttctaactgtcgtagtcctgtaataattaatgatgcactgaatggaagtttcgagttttggctactaatccaagggttgattagctccaatttttgatct

SEQ ID NO: 9400 - protein, 172 aa, Zea mays subsp. mays
  peptide (1)..(172): Ceres Seq. ID no. 12369134
  misc_feature (9)..(147): Homolog of NCBI NO: 34907664 NR Description: P0506A10.18 [Oryza sativa (japonica
  misc_feature (43)..(172): Homolog of NCBI NO: 30684991 NR Description: expressed protein [Arabidopsis thaliana]
  misc_feature (43)..(172): Homolog of NCBI NO: 25406874 NR Description: hypothetical protein [imported] - Arabidopsis >gi|6850316|gb|AAF29393.1|AC009999_13 Contains similarity to an protein from Arabidopsis thaliana gb|AC002335.2. ESTs
  misc_feature (43)..(172): Homolog of NCBI NO: 30689349 NR Description: expressed protein [Arabidopsis thaliana]
  misc_feature (43)..(169): Homolog of NCBI NO: 25408860 NR Description: hypothetical protein At2g43340 [imported] - thaliana >gi|2289002|gb|AAB64331.1| unknown protein [Arabidopsis
  misc_feature (43)..(165): Homolog of NCBI NO: 15221309 NR Description: unknown protein; protein id: At1g05870.1
  misc_feature (43)..(148): Homolog of NCBI NO: 25408168 NR Description: hypothetical protein At2g31560 [imported] - thaliana >gi|4582451|gb|AAD24835.1| unknown protein [Arabidopsis
  misc_feature (74)..(168): Homolog of NCBI NO: 15228829 NR Description: hypothetical protein; protein id: At3g22690.1
  misc_feature (4)..(168): Homolog of NCBI NO: 15229330 NR Description: hypothetical protein; protein id: At3g04700.1 thaliana] >gi|6175172|gb|AAF04898.1|AC011437_13 hypothetical
  misc_feature (13)..(168): Homolog of NCBI NO: 15241882 NR Description: putative protein; protein id: At5g28690.1
MQTKPIREMAAVSSTATASSQPELPTSTAHPTANAAAISRLARRPRRNNSFVMVEEASYASGGGDGGVARTKSLTEDDLEELKGCVDLGFGFAYSEIPELCGTLPALELCYSMTRRFLDEQRAPGQDEEEEEPASPPLPNWRIFAPGDDPEEVKARLKYWAQAVACTVKLCS

SEQ ID NO: 9401 - protein, 164 aa, Zea mays subsp. mays
  peptide (1)..(164): Ceres Seq. ID no. 12369135
  misc_feature (1)..(139): Homolog of NCBI NO: 34907664 NR Description: P0506A10.18 [Oryza sativa (japonica
  misc_feature (35)..(164): Homolog of NCBI NO: 30684991 NR Description: expressed protein [Arabidopsis thaliana]
  misc_feature (35)..(164): Homolog of NCBI NO: 25406874 NR Description: hypothetical protein [imported] - Arabidopsis >gi|6850316|gb|AAF29393.1|AC009999_13 Contains similarity to an protein from Arabidopsis thaliana gb|AC002335.2. ESTs
  misc_feature (35)..(164): Homolog of NCBI NO: 30689349 NR Description: expressed protein [Arabidopsis thaliana]
  misc_feature (35)..(161): Homolog of NCBI NO: 25408860 NR Description: hypothetical protein At2g43340 [imported] - thaliana >gi|2289002|gb|AAB64331.1| unknown protein [Arabidopsis
  misc_feature (35)..(157): Homolog of NCBI NO: 15221309 NR Description: unknown protein; protein id: At1g05870.1
  misc_feature (35)..(140): Homolog of NCBI NO: 25408168 NR Description: hypothetical protein At2g31560 [imported] - thaliana >gi|4582451|gb|AAD24835.1| unknown protein [Arabidopsis
  misc_feature (66)..(160): Homolog of NCBI NO: 15228829 NR Description: hypothetical protein; protein id: At3g22690.1
  misc_feature (1)..(160): Homolog of NCBI NO: 15229330 NR Description: hypothetical protein; protein id: At3g04700.1 thaliana] >gi|6175172|gb|AAF04898.1|AC011437_13 hypothetical
  misc_feature (5)..(160): Homolog of NCBI NO: 15241882 NR Description: putative protein; protein id: At5g28690.1
MAAVSSTATASSQPELPTSTAHPTANAAAISRLARRPRRNNSFVMVEEASYASGGGDGGVARTKSLTEDDLEELKGCVDLGFGFAYSEIPELCGTLPALELCYSMTRRFLDEQRAPGQDEEEEEPASPPLPNWRIFAPGDDPEEVKARLKYWAQAVACTVKLCS

SEQ ID NO: 9402 - protein, 135 aa, Zea mays subsp. mays
  peptide (1)..(135): Ceres Seq. ID no. 12369136
EPENLTRHHANKTDQRDGGRLLHRHRLLAAGAADLHRPPYRQCRRHQQAGAAATAEQQLRDGGGGVLCQRRRRRRGGQDEEPHGGRPGGAQGLRRPRLRLRVQRDTRALRDAARARALLLHDPEVPRRAEGAGTG

SEQ ID NO: 9403 - DNA, 1016 bp, Zea mays subsp. mays
  misc_feature (1)..(1016): Ceres Seq. ID no. 13499183
  misc_feature: MA Experiment ID: 108527 Result: Down-regulated in Transcription
  misc_feature: MA Experiment 108527 PARAMETER Experiment Name: Zm_5mM_NO_P Parameter: Age (day) Value: 8
  misc_feature: MA Experiment 108527 PARAMETER Experiment Name: Zm_5mM_NO_P Parameter: Organism Value: Zea mays
  misc_feature: MA Experiment 108527 PARAMETER Experiment Name: Zm_5mM_NO_P Parameter: Plant Line Value: 35A19
  misc_feature: MA Experiment 108527 PARAMETER Experiment Name: Zm_5mM_NO_P Parameter: Timepoint (hr) Value: 6
  misc_feature: MA Experiment 108527 PARAMETER Experiment Name: Zm_5mM_NO_P Parameter: Tissue Value: Aerial
  misc_feature: MA Experiment 108527 PARAMETER Experiment Name: Zm_5mM_NO_P Parameter: Treatment Value: 5mM NO vs. No Treatment
  misc_feature: MA Experiment ID: 108556 Result: Down-regulated in Transcription
  misc_feature: MA Experiment 108556 PARAMETER Experiment Name: Zm_Drought_P Parameter: Age (day) Value: 9
  misc_feature: MA Experiment 108556 PARAMETER Experiment Name: Zm_Drought_P Parameter: Organism Value: Zea mays
  misc_feature: MA Experiment 108556 PARAMETER Experiment Name: Zm_Drought_P Parameter: Plant Line Value: 35A19
  misc_feature: MA Experiment 108556 PARAMETER Experiment Name: Zm_Drought_P Parameter: Timepoint (hr) Value: 24
  misc_feature: MA Experiment 108556 PARAMETER Experiment Name: Zm_Drought_P Parameter: Tissue Value: Aerial
  misc_feature: MA Experiment 108556 PARAMETER Experiment Name: Zm_Drought_P Parameter: Treatment Value: Drought vs. No Drought
  misc_feature: MA Experiment ID: 20000478 Result: Down-regulated in Transcription
  misc_feature: MA Experiment 20000478 PARAMETER Experiment Name: Zm_5mM_SA_P Parameter: Age (day) Value: 11
  misc_feature: MA Experiment 20000478 PARAMETER Experiment Name: Zm_5mM_SA_P Parameter: Organism Value: Zea mays
  misc_feature: MA Experiment 20000478 PARAMETER Experiment Name: Zm_5mM_SA_P Parameter: Plant Line Value: 35A19
  misc_feature: MA Experiment 20000478 PARAMETER Experiment Name: Zm_5mM_SA_P Parameter: Timepoint (hr) Value: 72
  misc_feature: MA Experiment 20000478 PARAMETER Experiment Name: Zm_5mM_SA_P Parameter: Tissue Value: Aerial
  misc_feature: MA Experiment 20000478 PARAMETER Experiment Name: Zm_5mM_SA_P Parameter: Treatment Value: 5mM SA vs. No Treatment
  misc_feature: MA Experiment ID: 20000492 Result: Up-regulated in Transcription
  misc_feature: MA Experiment 20000492 PARAMETER Experiment Name: Zm_Hybrid_Seed_Dev_P Parameter: DAP Value: 12
  misc_feature: MA Experiment 20000492 PARAMETER Experiment Name: Zm_Hybrid_Seed_Dev_P Parameter: Organism Value: Zea mays
  misc_feature: MA Experiment 20000492 PARAMETER Experiment Name: Zm_Hybrid_Seed_Dev_P Parameter: Plant Line Value: 35A19
  misc_feature: MA Experiment 20000492 PARAMETER Experiment Name: Zm_Hybrid_Seed_Dev_P Parameter: Tissue Value: Fert Kernel vs. Unfert Floret
  misc_feature: MA Experiment ID: 20000535 Result: Down-regulated in Transcription
  misc_feature: MA Experiment 20000535 PARAMETER Experiment Name: Zm_Hybrid_Seed_Dev_P Parameter: DAP Value: 30 vs. 12
  misc_feature: MA Experiment 20000535 PARAMETER Experiment Name: Zm_Hybrid_Seed_Dev_P Parameter: Organism Value: Zea mays
  misc_feature: MA Experiment 20000535 PARAMETER Experiment Name: Zm_Hybrid_Seed_Dev_P Parameter: Plant Line Value: 35A19
  misc_feature: MA Experiment 20000535 PARAMETER Experiment Name: Zm_Hybrid_Seed_Dev_P Parameter: Tissue Value: Embryo vs. Unfert Floret
acacagacacagcagccgtttccactgacagtttctcagaaccacagcctcgatccatcgggggagaggatgggagagcctacgcggcaggagctggcggaggcggcgctcgccggggagtcggcggagcagcgcaaccgcttcctggtgctgcggctgtacgaggcgctcggctcccgcgacgcgcgccgggcgcggaagctgctggcgcccgacctcgagtggtggttccacgggccccccacgcgccagcacatgatgcgcctcctcaccggcgcggaccaccagcgccacatgagcggcggcgggttcgccttctccccgcgctccgtcgacgccttcgggtccaccgtcgtcgcggagggcggcgctgacgacgcgcgccagctctactgggtgcacgcctggaccgtggggcccgacggggtcatcacacagctcagggagtacttcaacaccgacctcactgtcaccctcctcgccggcgctgcctccgccaagaaagctgctccgcctaagcagcagcaggacgctgcctcttcttctacctcctcctcctcacccccctcggctgcgtcgtcgtctgcagctgcagggtccaggtgcctgtggcagagccgccgcgccgacagcgcgcacaagtcgctgccgggcctcgtcctcgccatctgagactagagacagcaagatccatctaccctccattataagtttataaccttattacaaaagatcctaaaattcgaaactgttattgcataaataatctggaactgcactagttgtatgtactcggagtcggagtcagtcagtgaagacgtaatgacgatgcgcgtatggactgaactgctcgatcctccgtgttgtgacttgtgaggttcaggtaccagttccttgcttagctcgtgtcgtgtgtgctgctactaggctgtaaggatcgactgttattgtccgagtctgctggatcatggatgtgatgtgatggtatatcgtggtggttaaataaaagttgcatg

SEQ ID NO: 9404 - protein, 223 aa, Zea mays subsp. mays
  peptide (1)..(223): Ceres Seq. ID no. 13499184
  misc_feature (40)..(160): Homolog of NCBI NO: 34898184 NR Description: P0034A04.2 [Oryza sativa (japonica
  misc_feature (26)..(172): Homolog of NCBI NO: 15228414 NR Description: expressed protein [Arabidopsis thaliana]
  misc_feature (43)..(158): Homolog of NCBI NO: 15241041 NR Description: expressed protein [Arabidopsis thaliana]
  misc_feature (87)..(223): Homolog of NCBI NO: 4574320 NR Description: wound-induced protein WI12 [Mesembryanthemum
  misc_feature (87)..(172): Homolog of NCBI NO: 15028339 NR Description: unknown protein [Arabidopsis thaliana]
  misc_feature (87)..(158): Homolog of NCBI NO: 139780 NR Description: WOUND-INDUCED PROTEIN 1 >gi|82293|pir||JQ0398
  misc_feature (104)..(158): Homolog of NCBI NO: 10241935 NR Description: elicitor inducible protein [Nicotiana tabacum]
  misc_feature (86)..(160): Homolog of NCBI NO: 33146884 NR Description: unknown protein [Oryza sativa (japonica
TQTQQPFPLTVSQNHSLDPSGERMGEPTRQELAEAALAGESAEQRNRFLVLRLYEALGSRDARRARKLLAPDLEWWFHGPPTRQHMMRLLTGADHQRHMSGGGFAFSPRSVDAFGSTVVAEGGADDARQLYWVHAWTVGPDGVITQLREYFNTDLTVTLLAGAASAKKAAPPKQQQDAASSSTSSSSPPSAASSSAAAGSRCLWQSRRADSAHKSLPGLVLAI

SEQ ID NO: 9405 - protein, 200 aa, Zea mays subsp. mays
  peptide (1)..(200): Ceres Seq. ID no. 13499185
  misc_feature (17)..(137): Homolog of NCBI NO: 34898184 NR Description: P0034A04.2 [Oryza sativa (japonica
  misc_feature (3)..(149): Homolog of NCBI NO: 15228414 NR Description: expressed protein [Arabidopsis thaliana]
  misc_feature (20)..(135): Homolog of NCBI NO: 15241041 NR Description: expressed protein [Arabidopsis thaliana]
  misc_feature (64)..(200): Homolog of NCBI NO: 4574320 NR Description: wound-induced protein WI12 [Mesembryanthemum
  misc_feature (64)..(149): Homolog of NCBI NO: 15028339 NR Description: unknown protein [Arabidopsis thaliana]
  misc_feature (64)..(135): Homolog of NCBI NO: 139780 NR Description: WOUND-INDUCED PROTEIN 1 >gi|82293|pir||JQ0398
  misc_feature (81)..(135): Homolog of NCBI NO: 10241935 NR Description: elicitor inducible protein [Nicotiana tabacum]
  misc_feature (63)..(137): Homolog of NCBI NO: 33146884 NR Description: unknown protein [Oryza sativa (japonica
MGEPTRQELAEAALAGESAEQRNRFLVLRLYEALGSRDARRARKLLAPDLEWWFHGPPTRQHMMRLLTGADHQRHMSGGGFAFSPRSVDAFGSTVVAEGGADDARQLYWVHAWTVGPDGVITQLREYFNTDLTVTLLAGAASAKKAAPPKQQQDAASSSTSSSSPPSAASSSAAAGSRCLWQSRRADSAHKSLPGLVLAI

SEQ ID NO: 9406 - protein, 138 aa, Zea mays subsp. mays
  peptide (1)..(138): Ceres Seq. ID no. 13499186
  misc_feature (2)..(73): Homolog of NCBI NO: 139780 NR Description: WOUND-INDUCED PROTEIN 1 >gi|82293|pir||JQ0398
  misc_feature (19)..(73): Homolog of NCBI NO: 10241935 NR Description: elicitor inducible protein [Nicotiana tabacum]
  misc_feature (1)..(75): Homolog of NCBI NO: 33146884 NR Description: unknown protein [Oryza sativa (japonica
  misc_feature (1)..(75): Homolog of NCBI NO: 34898184 NR Description: P0034A04.2 [Oryza sativa (japonica
  misc_feature (1)..(87): Homolog of NCBI NO: 15228414 NR Description: expressed protein [Arabidopsis thaliana]
  misc_feature (1)..(73): Homolog of NCBI NO: 15241041 NR Description: expressed protein [Arabidopsis thaliana]
  misc_feature (2)..(138): Homolog of NCBI NO: 4574320 NR Description: wound-induced protein WI12 [Mesembryanthemum
  misc_feature (2)..(87): Homolog of NCBI NO: 15028339 NR Description: unknown protein [Arabidopsis thaliana]
MMRLLTGADHQRHMSGGGFAFSPRSVDAFGSTVVAEGGADDARQLYWVHAWTVGPDGVITQLREYFNTDLTVTLLAGAASAKKAAPPKQQQDAASSSTSSSSPPSAASSSAAAGSRCLWQSRRADSAHKSLPGLVLAI

SEQ ID NO: 9407 - DNA, 1244 bp, Zea mays subsp. mays
  misc_feature (1)..(1244): Ceres Seq. ID no. 12354322
  misc_feature: MA Experiment ID: 108543 Result: Down-regulated in Transcription
aagcaaaccctaatccgtcggccatgtcgtcctcccccgcggcgctgcgcttctactgccaccagtgcgaccgcaccgtctccctcgcccctcccgcatccccggacgccgacgtcttctgcccccgctgcggcggcggattcgtcgaggagcttcctcccaaccctagccccgcgcctccggccgccgccttctttgccccgccctccttcgacatccgccaccccagcgacctctccgctttcttcggccccgcctcccccgagccgctcgccccaggcctcttcgatccctccaacttccttcacgaccacttcggcggcctcctctccggcggcgccaccatccagatcgtcctcgagggtgggcccccgcccccaggcctcaactttgccgactacttcgtcggctcctccggcctcgagcagctcatccagcagctcgccgagaacgaccccaaccgctacggcaccccgcccgccgccaaggccgccgtcgcctcgctccctgacgtcgctgtctcggccgacatgatgcaggccgacggcggcgctcagtgtgccgtctgcatggacgacttccacctcggcgccgccgccaagcagctcccctgcaagcacgtcttccacaaggactgcatcgtcccatggctacctccacagctcctgcccggtctgccgcttcgagctgcccaccgacgaccctgactacaatcacacccatcagcagcacggtgattcgtctgcccctgctcccccttcccccgctcccgcggtctcctcccccagggtggccgagaggaggtttaggatttcgctgccctggcctctcagggccgcttttggcgctgctcaggcagagagcagcaatcccaccgatgatgacgtgcctccgtctggcagcgatgcagctggtggccctcagtctcagactggatatgatgatctcgactgaggcctcaatagccgatcttggaaacaaataggctatacaccaaagatgagagatgataccgtcgtgtaccaaattaataaatgtgcatcagaagtatggagtcctttaggaacctctgctgactgttgatggaatatggttggtttgttgacactgtcagtgcattgtttctgaagggatatgggcctgttaatttaaaatttgtattcactaatggttgggggaggaacggtggagaaactgagtcatgtatagttgttccttttgcaattgctgcatggtttttttct

SEQ ID NO: 9408 - protein, 234 aa, Zea mays subsp. mays
  peptide (1)..(234): Ceres Seq. ID no. 12354323
  misc_feature (186)..(217): Pfam Name: Zinc finger, C3HC4 type (RING finger) Pfam Description: Zinc finger, C3HC4 type (RING finger)
  misc_feature (71)..(217): Homolog of NCBI NO: 37535546 NR Description: putative zinc finger protein [Oryza sativa
  misc_feature (4)..(87): Homolog of NCBI NO: 37535546 NR Description: putative zinc finger protein [Oryza sativa
  misc_feature (77)..(217): Homolog of NCBI NO: 11994207 NR Description: gene_id:MPN9.20~unknown protein [Arabidopsis
  misc_feature (77)..(217): Homolog of NCBI NO: 15231003 NR Description: unknown protein; protein id: At3g19950.1, by cDNA: gi_20465262 [Arabidopsis thaliana] AT3g19950/MPN9_19 [Arabidopsis thaliana]
  misc_feature (127)..(217): Homolog of NCBI NO: 34903272 NR Description: unnamed protein product [Oryza sativa (japonica group)] >gi|6539567|dbj|BAA88184.1| unnamed protein product
  misc_feature (17)..(51): Homolog of NCBI NO: 34903272 NR Description: unnamed protein product [Oryza sativa (japonica group)] >gi|6539567|dbj|BAA88184.1| unnamed protein product
  misc_feature (114)..(217): Homolog of NCBI NO: 18405411 NR Description: expressed protein; protein id: At1g55530.1, by cDNA: gi_14517545, supported by cDNA: gi_15983407 [Arabidopsis
  misc_feature (126)..(217): Homolog of NCBI NO: 15231238 NR Description: unknown protein; protein id: At3g13430.1 thaliana] >gi|9280292|dbj|BAB01747.1| gene_id:MRP15.6~unknown
  misc_feature (126)..(217): Homolog of NCBI NO: 38454178 NR Description: At3g13430 [Arabidopsis thaliana]
  misc_feature (1)..(234): Homolog of NCBI NO: 14719329 NR Description: putative RING-H2 finger protein [Oryza sativa]
ANPNPSAMSSSPAALRFYCHQCDRTVSLAPPASPDADVFCPRCGGGFVEELPPNPSPAPPAAAFFAPPSFDIRHPSDLSAFFGPASPEPLAPGLFDPSNFLHDHFGGLLSGGATIQIVLEGGPPPPGLNFADYFVGSSGLEQLIQQLAENDPNRYGTPPAAKAAVASLPDVAVSADMMQADGGAQCAVCMDDFHLGAAAKQLPCKHVFHKDCIVPWLPPQLLPGLPLRAAHRRP

SEQ ID NO: 9409 - protein, 227 aa, Zea mays subsp. mays
  peptide (1)..(227): Ceres Seq. ID no. 12354324
  misc_feature (179)..(210): Pfam Name: Zinc finger, C3HC4 type (RING finger) Pfam Description: Zinc finger, C3HC4 type (RING finger)
  misc_feature (64)..(210): Homolog of NCBI NO: 37535546 NR Description: putative zinc finger protein [Oryza sativa
  misc_feature (1)..(80): Homolog of NCBI NO: 37535546 NR Description: putative zinc finger protein [Oryza sativa
  misc_feature (70)..(210): Homolog of NCBI NO: 11994207 NR Description: gene_id:MPN9.20~unknown protein [Arabidopsis
  misc_feature (70)..(210): Homolog of NCBI NO: 15231003 NR Description: unknown protein; protein id: At3g19950.1, by cDNA: gi_20465262 [Arabidopsis thaliana] AT3g19950/MPN9_19 [Arabidopsis thaliana]
  misc_feature (120)..(210): Homolog of NCBI NO: 34903272 NR Description: unnamed protein product [Oryza sativa (japonica group)] >gi|6539567|dbj|BAA88184.1| unnamed protein product
  misc_feature (10)..(44): Homolog of NCBI NO: 34903272 NR Description: unnamed protein product [Oryza sativa (japonica group)] >gi|6539567|dbj|BAA88184.1| unnamed protein product
  misc_feature (107)..(210): Homolog of NCBI NO: 18405411 NR Description: expressed protein; protein id: At1g55530.1, by cDNA: gi_14517545, supported by cDNA: gi_15983407 [Arabidopsis
  misc_feature (119)..(210): Homolog of NCBI NO: 15231238 NR Description: unknown protein; protein id: At3g13430.1 thaliana] >gi|9280292|dbj|BAB01747.1| gene_id:MRP15.6~unknown
  misc_feature (119)..(210): Homolog of NCBI NO: 38454178 NR Description: At3g13430 [Arabidopsis thaliana]
  misc_feature (1)..(227): Homolog of NCBI NO: 14719329 NR Description: putative RING-H2 finger protein [Oryza sativa]
MSSSPAALRFYCHQCDRTVSLAPPASPDADVFCPRCGGGFVEELPPNPSPAPPAAAFFAPPSFDIRHPSDLSAFFGPASPEPLAPGLFDPSNFLHDHFGGLLSGGATIQIVLEGGPPPPGLNFADYFVGSSGLEQLIQQLAENDPNRYGTPPAAKAAVASLPDVAVSADMMQADGGAQCAVCMDDFHLGAAAKQLPCKHVFHKDCIVPWLPPQLLPGLPLRAAHRRP

SEQ ID NO: 9410 - protein, 177 aa, Zea mays subsp. mays
  peptide (1)..(177): Ceres Seq. ID no. 12354325
  misc_feature (44)..(177): Pfam Name: Glycoprotein GG/GX Pfam Description: Glycoprotein GG/GX
  misc_feature (11)..(177): Homolog of NCBI NO: 188864 NR Description: mucin
  misc_feature (11)..(177): Homolog of NCBI NO: 13592175 NR Description: ppg3 [Leishmania major]
  misc_feature (11)..(177): Homolog of NCBI NO: 186396 NR Description: mucin
  misc_feature (13)..(177): Homolog of NCBI NO: 13592175 NR Description: ppg3 [Leishmania major]
  misc_feature (11)..(177): Homolog of NCBI NO: 13592175 NR Description: ppg3 [Leishmania major]
  misc_feature (8)..(177): Homolog of NCBI NO: 20138131 NR Description: Vegetative cell wall protein gp1 precursor rich glycoprotein 1) >gi|12018147|gb|AAG45420.1|AF309494_1
  misc_feature (12)..(177): Homolog of NCBI NO: 188864 NR Description: mucin
  misc_feature (11)..(177): Homolog of NCBI NO: 13592175 NR Description: ppg3 [Leishmania major]
  misc_feature (17)..(177): Homolog of NCBI NO: 13592175 NR Description: ppg3 [Leishmania major]
  misc_feature (11)..(177): Homolog of NCBI NO: 2135765 NR Description: mucin 2 precursor, intestinal - human (fragments)
KQTLIRRPCRPPPRRCASTATSATAPSPSPLPHPRTPTSSAPAAAADSSRSFLPTLAPRLRPPPSLPRPPSTSATPATSPLSSAPPPPSRSPQASSIPPTSFTTTSAASSPAAPPSRSSSRVGPRPQASTLPTTSSAPPASSSSSSSSPRTTPTATAPRPPPRPPSPRSLTSLSRPT

SEQ ID NO: 9411 - DNA, 816 bp, Zea mays subsp. mays
  misc_feature (1)..(816): Ceres Seq. ID no. 12384239
  misc_feature: MA Experiment ID: 20000534 Result: Up-regulated in Transcription
  misc_feature: MA Experiment 20000534 PARAMETER Experiment Name: Zm_Hybrid_Pollen_P Parameter: Age (day) Value: 8
  misc_feature: MA Experiment 20000534 PARAMETER Experiment Name: Zm_Hybrid_Pollen_P Parameter: Organism Value: Zea mays
  misc_feature: MA Experiment 20000534 PARAMETER Experiment Name: Zm_Hybrid_Pollen_P Parameter: Plant Line Value: 35A19
  misc_feature: MA Experiment 20000534 PARAMETER Experiment Name: Zm_Hybrid_Pollen_P Parameter: Tissue Value: Pollen vs. Aerial
acaggtaattctctcgtagttcagttgtagccgttgagacttgggaggcaggcgacatgggtggcgggaaggacgacggccacgatccctccaaggcggacaagggattccacggaggagggtacccggccgccggtggatactacggcggccagtaccccggcggcggctaccctgctccaccgggcggcggtgcgtaccctcccgggcctgggtacccggtaccacctggtgggtacccgcctccgggtggctaccctcagcctggcggatacccgccgtcgcacggggcgtacccggcgccgggtgcaggcgcgtatcctcccagcgggtacccccatcaaccggtctacccacagcctggctatccatcgatgcccggtcatggtggcatgtacggaggagggcacggcgcagggggttctgcaggccacggggcgatgctggccggaggtgccgcggcggcgtacggagctcacacggtgtcccactcccacgggatgtacggccacggccacggccacggcaagttcaagcatggcaagttcaagcacggcaagtttggcaagcacaagaagatgtttggcaagcacaagaatatgttcggtcgcaagtggaagtgattaacgtacagctttaatccgattctggacgagcagacgtatatatatacaccggagtccagaatgctaagttatgctattttgattgtgattcgaatacgggaggttgttagggttttcgaagtacgtactgacggctgcctgtaagctttgttggagctgttcttgccgtgttggcagtccgaattaattt

SEQ ID NO: 9412 - protein, 188 aa, Zea mays subsp. mays
  peptide (1)..(188): Ceres Seq. ID no. 12384240
  misc_feature (65)..(134): Pfam Name: Bindin Pfam Description: Bindin
  misc_feature (3)..(188): Homolog of NCBI NO: 29124113 NR Description: hypothetical protein [Oryza sativa (japonica
  misc_feature (1)..(188): Homolog of NCBI NO: 13543234 NR Description: Unknown (protein for MGC:12025) [Mus musculus]
  misc_feature (1)..(188): Homolog of NCBI NO: 33668156 NR Description: GPRP [Oryza sativa (indica cultivar-group)]
  misc_feature (6)..(188): Homolog of NCBI NO: 15238005 NR Description: glycine/proline-rich protein; protein id:
  misc_feature (8)..(188): Homolog of NCBI NO: 18422542 NR Description: expressed protein; protein id: At5g45350.1, by cDNA: 22538., supported by cDNA: gi_15529251 [Arabidopsis
  misc_feature (1)..(181): Homolog of NCBI NO: 6478148 NR Description: putative glycine and proline-rich protein
  misc_feature (8)..(185): Homolog of NCBI NO: 6478148 NR Description: putative glycine and proline-rich protein
  misc_feature (34)..(184): Homolog of NCBI NO: 15234178 NR Description: putative protein; protein id: At4g19200.1, by cDNA: 8188. [Arabidopsis thaliana] >gi|25407569|pir||A85217
  misc_feature (17)..(174): Homolog of NCBI NO: 6478148 NR Description: putative glycine and proline-rich protein
  misc_feature (34)..(170): Homolog of NCBI NO: 7487135 NR Description: hypothetical protein T18B16.170 - Arabidopsis >gi|2828295|emb|CAA16709.1| putative protein [Arabidopsis
MGGGKDDGHDPSKADKGFHGGGYPAAGGYYGGQYPGGGYPAPPGGGAYPPGPGYPVPPGGYPPPGGYPQPGGYPPSHGAYPAPGAGAYPPSGYPHQPVYPQPGYPSMPGHGGMYGGGHGAGGSAGHGAMLAGGAAAAYGAHTVSHSHGMYGHGHGHGKFKHGKFKHGKFGKHKKMFGKHKNMFGRKWK

SEQ ID NO: 9413 - DNA, 726 bp, Zea mays subsp. mays
  misc_feature (1)..(726): Ceres Seq. ID no. 12354125
  misc_feature: MA Experiment ID: 108504 Result: Up-regulated in Transcription
  misc_feature: MA Experiment 108504 PARAMETER Experiment Name: Zm_Drought_P Parameter: Age (day) Value: 8
  misc_feature: MA Experiment 108504 PARAMETER Experiment Name: Zm_Drought_P Parameter: Organism Value: Zea mays
  misc_feature: MA Experiment 108504 PARAMETER Experiment Name: Zm_Drought_P Parameter: Plant Line Value: 35A19
  misc_feature: MA Experiment 108504 PARAMETER Experiment Name: Zm_Drought_P Parameter: Timepoint (hr) Value: 12
  misc_feature: MA Experiment 108504 PARAMETER Experiment Name: Zm_Drought_P Parameter: Tissue Value: Aerial
  misc_feature: MA Experiment 108504 PARAMETER Experiment Name: Zm_Drought_P Parameter: Treatment Value: Drought vs. No Drought
  misc_feature: MA Experiment ID: 108530 Result: Down-regulated in Transcription
  misc_feature: MA Experiment 108530 PARAMETER Experiment Name: Zm_Imbibed_Seeds_P Parameter: Age (day) Value: 6 vs. 2
  misc_feature: MA Experiment 108530 PARAMETER Experiment Name: Zm_Imbibed_Seeds_P Parameter: Organism Value: Zea mays
  misc_feature: MA Experiment 108530 PARAMETER Experiment Name: Zm_Imbibed_Seeds_P Parameter: Plant Line Value: 35A19
  misc_feature: MA Experiment 108530 PARAMETER Experiment Name: Zm_Imbibed_Seeds_P Parameter: Tissue Value: Aerial vs. Embryo
  misc_feature: MA Experiment ID: 108536 Result: Up-regulated in Transcription
  misc_feature: MA Experiment 108536 PARAMETER Experiment Name: Zm_Meristem_P Parameter: Age (day) Value: 8
  misc_feature: MA Experiment 108536 PARAMETER Experiment Name: Zm_Meristem_P Parameter: Organism Value: Zea mays
  misc_feature: MA Experiment 108536 PARAMETER Experiment Name: Zm_Meristem_P Parameter: Plant Line Value: 35A19
  misc_feature: MA Experiment 108536 PARAMETER Experiment Name: Zm_Meristem_P Parameter: Tissue Value: Shoot Meristem vs. Above Shoot Meristem
  misc_feature: MA Experiment ID: 108543 Result: Down-regulated in Transcription
  misc_feature: MA Experiment ID: 108544 Result: Down-regulated in Transcription
  misc_feature: MA Experiment ID: 108545 Result: Down-regulated in Transcription
  misc_feature: MA Experiment 108545 PARAMETER Experiment Name: Zm_Imbibed_Seeds_P Parameter: Age (day) Value: 3 vs. 2
  misc_feature: MA Experiment 108545 PARAMETER Experiment Name: Zm_Imbibed_Seeds_P Parameter: Organism Value: Zea mays
  misc_feature: MA Experiment 108545 PARAMETER Experiment Name: Zm_Imbibed_Seeds_P Parameter: Plant Line Value: 35A19
  misc_feature: MA Experiment 108545 PARAMETER Experiment Name: Zm_Imbibed_Seeds_P Parameter: Tissue Value: Aerial vs. Embryo
  misc_feature: MA Experiment ID: 108546 Result: Down-regulated in Transcription
  misc_feature: MA Experiment 108546 PARAMETER Experiment Name: Zm_Imbibed_Seeds_P Parameter: Age (day) Value: 3 vs. 2
  misc_feature: MA Experiment 108546 PARAMETER Experiment Name: Zm_Imbibed_Seeds_P Parameter: Organism Value: Zea mays
  misc_feature: MA Experiment 108546 PARAMETER Experiment Name: Zm_Imbibed_Seeds_P Parameter: Plant Line Value: 35A19
  misc_feature: MA Experiment 108546 PARAMETER Experiment Name: Zm_Imbibed_Seeds_P Parameter: Tissue Value: Roots vs. Embryo
  misc_feature: MA Experiment ID: 108556 Result: Up-regulated in Transcription
  misc_feature: MA Experiment 108556 PARAMETER Experiment Name: Zm_Drought_P Parameter: Age (day) Value: 9
  misc_feature: MA Experiment 108556 PARAMETER Experiment Name: Zm_Drought_P Parameter: Organism Value: Zea mays
  misc_feature: MA Experiment 108556 PARAMETER Experiment Name: Zm_Drought_P Parameter: Plant Line Value: 35A19
  misc_feature: MA Experiment 108556 PARAMETER Experiment Name: Zm_Drought_P Parameter: Timepoint (hr) Value: 24
  misc_feature: MA Experiment 108556 PARAMETER Experiment Name: Zm_Drought_P Parameter: Tissue Value: Aerial
  misc_feature: MA Experiment 108556 PARAMETER Experiment Name: Zm_Drought_P Parameter: Treatment Value: Drought vs. No Drought
  misc_feature: MA Experiment ID: 20000477 Result: Up-regulated in Transcription
  misc_feature: MA Experiment 20000477 PARAMETER Experiment Name: Zm_5mM_SA_P Parameter: Age (day) Value: 10
  misc_feature: MA Experiment 20000477 PARAMETER Experiment Name: Zm_5mM_SA_P Parameter: Organism Value: Zea mays
  misc_feature: MA Experiment 20000477 PARAMETER Experiment Name: Zm_5mM_SA_P Parameter: Plant Line Value: 35A19
  misc_feature: MA Experiment 20000477 PARAMETER Experiment Name: Zm_5mM_SA_P Parameter: Timepoint (hr) Value: 48
  misc_feature: MA Experiment 20000477 PARAMETER Experiment Name: Zm_5mM_SA_P Parameter: Tissue Value: Aerial
  misc_feature: MA Experiment 20000477 PARAMETER Experiment Name: Zm_5mM_SA_P Parameter: Treatment Value: 5mM SA vs. No Treatment
  misc_feature: MA Experiment ID: 20000478 Result: Up-regulated in Transcription
  misc_feature: MA Experiment 20000478 PARAMETER Experiment Name: Zm_5mM_SA_P Parameter: Age (day) Value: 11
  misc_feature: MA Experiment 20000478 PARAMETER Experiment Name: Zm_5mM_SA_P Parameter: Organism Value: Zea mays
  misc_feature: MA Experiment 20000478 PARAMETER Experiment Name: Zm_5mM_SA_P Parameter: Plant Line Value: 35A19
  misc_feature: MA Experiment 20000478 PARAMETER Experiment Name: Zm_5mM_SA_P Parameter: Timepoint (hr) Value: 72
  misc_feature: MA Experiment 20000478 PARAMETER Experiment Name: Zm_5mM_SA_P Parameter: Tissue Value: Aerial
  misc_feature: MA Experiment 20000478 PARAMETER Experiment Name: Zm_5mM_SA_P Parameter: Treatment Value: 5mM SA vs. No Treatment
  misc_feature: MA Experiment ID: 20000479 Result: Up-regulated in Transcription
  misc_feature: MA Experiment 20000479 PARAMETER Experiment Name: Zm_Drought_P Parameter: Age (day) Value: 10
  misc_feature: MA Experiment 20000479 PARAMETER Experiment Name: Zm_Drought_P Parameter: Organism Value: Zea mays
  misc_feature: MA Experiment 20000479 PARAMETER Experiment Name: Zm_Drought_P Parameter: Plant Line Value: 35A19
  misc_feature: MA Experiment 20000479 PARAMETER Experiment Name: Zm_Drought_P Parameter: Timepoint (hr) Value: 48
  misc_feature: MA Experiment 20000479 PARAMETER Experiment Name: Zm_Drought_P Parameter: Tissue Value: Aerial
  misc_feature: MA Experiment 20000479 PARAMETER Experiment Name: Zm_Drought_P Parameter: Treatment Value: Drought vs. No Drought
  misc_feature: MA Experiment ID: 20000480 Result: Up-regulated in Transcription
  misc_feature: MA Experiment 20000480 PARAMETER Experiment Name: Zm_Drought_P Parameter: Age (day) Value: 11
  misc_feature: MA Experiment 20000480 PARAMETER Experiment Name: Zm_Drought_P Parameter: Organism Value: Zea mays
  misc_feature: MA Experiment 20000480 PARAMETER Experiment Name: Zm_Drought_P Parameter: Plant Line Value: 35A19
  misc_feature: MA Experiment 20000480 PARAMETER Experiment Name: Zm_Drought_P Parameter: Timepoint (hr) Value: 72
  misc_feature: MA Experiment 20000480 PARAMETER Experiment Name: Zm_Drought_P Parameter: Tissue Value: Aerial
  misc_feature: MA Experiment 20000480 PARAMETER Experiment Name: Zm_Drought_P Parameter: Treatment Value: Drought vs. No Drought
  misc_feature: MA Experiment ID: 20000492 Result: Up-regulated in Transcription
  misc_feature: MA Experiment 20000492 PARAMETER Experiment Name: Zm_Hybrid_Seed_Dev_P Parameter: DAP Value: 12
  misc_feature: MA Experiment 20000492 PARAMETER Experiment Name: Zm_Hybrid_Seed_Dev_P Parameter: Organism Value: Zea mays
  misc_feature: MA Experiment 20000492 PARAMETER Experiment Name: Zm_Hybrid_Seed_Dev_P Parameter: Plant Line Value: 35A19
  misc_feature: MA Experiment 20000492 PARAMETER Experiment Name: Zm_Hybrid_Seed_Dev_P Parameter: Tissue Value: Fert Kernel vs. Unfert Floret
  misc_feature: MA Experiment ID: 20000535 Result: Up-regulated in Transcription
  misc_feature: MA Experiment 20000535 PARAMETER Experiment Name: Zm_Hybrid_Seed_Dev_P Parameter: DAP Value: 30 vs. 12
  misc_feature: MA Experiment 20000535 PARAMETER Experiment Name: Zm_Hybrid_Seed_Dev_P Parameter: Organism Value: Zea mays
  misc_feature: MA Experiment 20000535 PARAMETER Experiment Name: Zm_Hybrid_Seed_Dev_P Parameter: Plant Line Value: 35A19
  misc_feature: MA Experiment 20000535 PARAMETER Experiment Name: Zm_Hybrid_Seed_Dev_P Parameter: Tissue Value: Embryo vs. Unfert Floret
ccactcatctatttcttttgaatcattgtatactagctagctagctagccagagcttgtatggccactgctcatcatgcggatgaccatcgtgcagggagaagaagcgaggccgtcggagagaactacatgaggggcctctacggcgacgatgactacaacgccacccactacggtcaccagcagcagcagcggccgccgcccgcgcccatggcggtggccaaggcgttagccacagccacggcagccttctccatgttgttgttgtcggggctggcggtgacgggcacggtgctggcgctcatcgtggcgacgccattgatggtgatcttcagccccgtgctggtgccggcggccatcacggtggcgctgctcacggtaggcatcgtttcgtcgggagggttcggcgtggctgcggtggctgtgctggcgtgggtgtaccgctaccttcagaccacgacctcgtcgtcgggtcagcagccgcacatcgtcaaggactgggcgcagcagcaccgtctggagcagacacgcgcgcactgaaataaaaaaaaaagcgtagtacccctccgtttctttttatttgttgctgtttagttcatatttgtcactgtttcgttaaaaatgaactagcgggataacgagaacgggaggtaatatagcttttcatttaatgtaatgtaacgtaatcttatgtttgcagcagtaataatgtgtattatatatttgc

SEQ ID NO: 9414 - protein, 159 aa, Zea mays subsp. mays
  peptide (1)..(159): Ceres Seq. ID no. 12354126
  misc_feature (53)..(141): Pfam Name: Oleosin Pfam Description: Oleosin
  misc_feature (5)..(130): Homolog of NCBI NO: 3334281 NR Description: Oleosin 16 kDa >gi|1622939|gb|AAB67992.1| oleosin
  misc_feature (35)..(130): Homolog of NCBI NO: 5381321 NR Description: 15 kDa oleosin [Sesamum indicum]
  misc_feature (1)..(130): Homolog of NCBI NO: 1362168 NR Description: oleosin 2 - barley >gi|963064|emb|CAA57995.1| low
  misc_feature (26)..(157): Homolog of NCBI NO: 3334474 NR Description: OLEOSIN ZM-I (OLEOSIN 16 KD) (LIPID
  misc_feature (25)..(158): Homolog of NCBI NO: 3334280 NR Description: OLEOSIN 16 KD (OSE701) >gi|7442010|pir||T03378
  misc_feature (26)..(157): Homolog of NCBI NO: 82705 NR Description: lipid body-associated major protein L3 - maize
  misc_feature (38)..(141): Homolog of NCBI NO: 2119749 NR Description: oleosin - almond
  misc_feature (38)..(141): Homolog of NCBI NO: 3914199 NR Description: OLEOSIN 1 >gi|460803|emb|CAA55008.1| oleosin
  misc_feature (25)..(158): Homolog of NCBI NO: 38346165 NR Description: OSJNBa0079A21.12 [Oryza sativa (japonica
  misc_feature (35)..(130): Homolog of NCBI NO: 15225211 NR Description: oleosin; protein id: At2g25890.1 [Arabidopsis
MATAHHADDHRAGRRSEAVGENYMRGLYGDDDYNATHYGHQQQQRPPPAPMAVAKALATATAAFSMLLLSGLAVTGTVLALIVATPLMVIFSPVLVPAAITVALLTVGIVSSGGFGVAAVAVLAWVYRYLQTTTSSSGQQPHIVKDWAQQHRLEQTRAH

SEQ ID NO: 9415 - protein, 136 aa, Zea mays subsp. mays
  peptide (1)..(136): Ceres Seq. ID no. 12354127
  misc_feature (30)..(118): Pfam Name: Oleosin Pfam Description: Oleosin
  misc_feature (1)..(107): Homolog of NCBI NO: 3334281 NR Description: Oleosin 16 kDa >gi|1622939|gb|AAB67992.1| oleosin
  misc_feature (12)..(107): Homolog of NCBI NO: 5381321 NR Description: 15 kDa oleosin [Sesamum indicum]
  misc_feature (1)..(107): Homolog of NCBI NO: 1362168 NR Description: oleosin 2 - barley >gi|963064|emb|CAA57995.1| low
  misc_feature (3)..(134): Homolog of NCBI NO: 3334474 NR Description: OLEOSIN ZM-I (OLEOSIN 16 KD) (LIPID
  misc_feature (2)..(135): Homolog of NCBI NO: 3334280 NR Description: OLEOSIN 16 KD (OSE701) >gi|7442010|pir||T03378
  misc_feature (3)..(134): Homolog of NCBI NO: 82705 NR Description: lipid body-associated major protein L3 - maize
  misc_feature (15)..(118): Homolog of NCBI NO: 2119749 NR Description: oleosin - almond
  misc_feature (15)..(118): Homolog of NCBI NO: 3914199 NR Description: OLEOSIN 1 >gi|460803|emb|CAA55008.1| oleosin
  misc_feature (2)..(135): Homolog of NCBI NO: 38346165 NR Description: OSJNBa0079A21.12 [Oryza sativa (japonica
  misc_feature (12)..(107): Homolog of NCBI NO: 15225211 NR Description: oleosin; protein id: At2g25890.1 [Arabidopsis
MRGLYGDDDYNATHYGHQQQQRPPPAPMAVAKALATATAAFSMLLLSGLAVTGTVLALIVATPLMVIFSPVLVPAAITVALLTVGIVSSGGFGVAAVAVLAWVYRYLQTTTSSSGQQPHIVKDWAQQHRLEQTRAH

SEQ ID NO: 9416 - protein, 109 aa, Zea mays subsp. mays
  peptide (1)..(109): Ceres Seq. ID no. 12354128
  misc_feature (3)..(91): Pfam Name: Oleosin Pfam Description: Oleosin
  misc_feature (1)..(80): Homolog of NCBI NO: 3334281 NR Description: Oleosin 16 kDa >gi|1622939|gb|AAB67992.1| oleosin
  misc_feature (1)..(80): Homolog of NCBI NO: 5381321 NR Description: 15 kDa oleosin [Sesamum indicum]
  misc_feature (1)..(80): Homolog of NCBI NO: 1362168 NR Description: oleosin 2 - barley >gi|963064|emb|CAA57995.1| low
  misc_feature (1)..(107): Homolog of NCBI NO: 3334474 NR Description: OLEOSIN ZM-I (OLEOSIN 16 KD) (LIPID
  misc_feature (1)..(108): Homolog of NCBI NO: 3334280 NR Description: OLEOSIN 16 KD (OSE701) >gi|7442010|pir||T03378
  misc_feature (1)..(107): Homolog of NCBI NO: 82705 NR Description: lipid body-associated major protein L3 - maize
  misc_feature (1)..(91): Homolog of NCBI NO: 2119749 NR Description: oleosin - almond
  misc_feature (1)..(91): Homolog of NCBI NO: 3914199 NR Description: OLEOSIN 1 >gi|460803|emb|CAA55008.1| oleosin
  misc_feature (1)..(108): Homolog of NCBI NO: 38346165 NR Description: OSJNBa0079A21.12 [Oryza sativa (japonica
  misc_feature (1)..(80): Homolog of NCBI NO: 15225211 NR Description: oleosin; protein id: At2g25890.1 [Arabidopsis
MAVAKALATATAAFSMLLLSGLAVTGTVLALIVATPLMVIFSPVLVPAAITVALLTVGIVSSGGFGVAAVAVLAWVYRYLQTTTSSSGQQPHIVKDWAQQHRLEQTRAH

SEQ ID NO: 9417 - DNA, 1141 bp, Zea mays subsp. mays
  misc_feature (1)..(1141): Ceres Seq. ID no. 12367647
  misc_feature: MA Experiment ID: 108530 Result: Up-regulated in Transcription
  misc_feature: MA Experiment 108530 PARAMETER Experiment Name: Zm_Imbibed_Seeds_P Parameter: Age (day) Value: 6 vs. 2
  misc_feature: MA Experiment 108530 PARAMETER Experiment Name: Zm_Imbibed_Seeds_P Parameter: Organism Value: Zea mays
  misc_feature: MA Experiment 108530 PARAMETER Experiment Name: Zm_Imbibed_Seeds_P Parameter: Plant Line Value: 35A19
  misc_feature: MA Experiment 108530 PARAMETER Experiment Name: Zm_Imbibed_Seeds_P Parameter: Tissue Value: Aerial vs. Embryo
  misc_feature: MA Experiment ID: 20000479 Result: Down-regulated in Transcription
  misc_feature: MA Experiment 20000479 PARAMETER Experiment Name: Zm_Drought_P Parameter: Age (day) Value: 10
  misc_feature: MA Experiment 20000479 PARAMETER Experiment Name: Zm_Drought_P Parameter: Organism Value: Zea mays
  misc_feature: MA Experiment 20000479 PARAMETER Experiment Name: Zm_Drought_P Parameter: Plant Line Value: 35A19
  misc_feature: MA Experiment 20000479 PARAMETER Experiment Name: Zm_Drought_P Parameter: Timepoint (hr) Value: 48
  misc_feature: MA Experiment 20000479 PARAMETER Experiment Name: Zm_Drought_P Parameter: Tissue Value: Aerial
  misc_feature: MA Experiment 20000479 PARAMETER Experiment Name: Zm_Drought_P Parameter: Treatment Value: Drought vs. No Drought
  misc_feature: MA Experiment ID: 20000487 Result: Up-regulated in Transcription
  misc_feature: MA Experiment 20000487 PARAMETER Experiment Name: Zm_50mM_NH4NO3_L_to_H_P Parameter: Organism Value: Zea mays
  misc_feature: MA Experiment 20000487 PARAMETER Experiment Name: Zm_50mM_NH4NO3_L_to_H_P Parameter: Timepoint (hr) Value: 4
  misc_feature: MA Experiment 20000487 PARAMETER Experiment Name: Zm_50mM_NH4NO3_L_to_H_P Parameter: Tissue Value: Leaves
  misc_feature: MA Experiment 20000487 PARAMETER Experiment Name: Zm_50mM_NH4NO3_L_to_H_P Parameter: Treatment Value: 50mM NH4NO3 vs. 100mM Mannitol
gcgacacacaccacacacacacattttcaaatctagcttgttcgctaagctcaggctagctgagctgatctgagaaacgatcgctgcttcagtttcagcttgatcgctagctcgctacacagatcgatcgacctcttatttagcttgttcctccaaggaccgagatcggttgttgttgataaaccagccatggttgcggttgcggaggcagcggtgacgacgaccatgacgacgacgggcgggcggtacgcgctgctgatggcggcgcacgactcggagtacgtgctcaacaagtacggcgggtacctccacgtcttcgtggcggccttcggcgacgccggcgagacgtgggacctgtatcgggccatcgacagcgagctccctggccccggtgagcttgaggcctacgacgggttcgtgatcagcggcagcccccacgacgcgtacgccgacgagctgtggatcctgcggctgtgcctcctggtgcgggcgctgcacggcatgcgcaagcgggtcctcggcgtctgcttcggccaccaggtgatctgccgcgcgctgggaggccgcgtgggcaaggcccgcgccggctgggacgtcggcgtcagggaggtggccatcgccgaggcgccgccgcgcaggttcctcgacgcgctgcgggagcgggaccagctgccgctccgcgccaggatcaccgaggtccatcaggacgaggtgtgggaggtgccggagggcgcggaggttctggcctcctccgacaagaccggcgtcgagatgttctgcgtcggcgagcacgtgctgggcatccaggggcacccggagtacaccaaggacatcttcctcagcctcgtcgaccgcctcctcgccgccggatccatcaccattccctttgctgaggccgtgaacaggcagctggagatcactgcgccggaccgggagttctggctcatgctctgcaagagcttcctcaaggctcgtgaagaataagagtattaattagagtttgcacactgtgatgtcattgtcacttaattaccattaaaacggttgtaaatcttctatcacttcaacaaataaacctctctcgagtcaaatacttgaccatcttcttcaaatgagagaaaaaaaatggaagaccactttc

SEQ ID NO: 9418 - protein, 264 aa, Zea mays subsp. mays
  peptide (1)..(264): Ceres Seq. ID no. 12367648
  misc_feature (31)..(223): Pfam Name: Glutamine amidotransferase class-I Pfam Description: Glutamine amidotransferase class-I
  misc_feature (1)..(262): Homolog of NCBI NO: 13174241 NR Description: putative glutamine synthetase [Oryza sativa]
  misc_feature (19)..(260): Homolog of NCBI NO: 15234767 NR Description: putative protein; protein id: At4g30550.1, by cDNA: 29388., supported by cDNA: gi_17381293 [Arabidopsis >gi|25407659|pir||D85357 hypothetical protein AT4g30550
  misc_feature (19)..(260): Homolog of NCBI NO: 17381294 NR Description: AT4g30550/F17I23_110 [Arabidopsis thaliana]
  misc_feature (19)..(264): Homolog of NCBI NO: 15224079 NR Description: unknown protein; protein id: At2g23970.1
  misc_feature (19)..(260): Homolog of NCBI NO: 21555885 NR Description: unknown [Arabidopsis thaliana]
  misc_feature (19)..(262): Homolog of NCBI NO: 15234765 NR Description: putative protein; protein id: At4g30540.1
  misc_feature (19)..(262): Homolog of NCBI NO: 15234763 NR Description: putative protein; protein id: At4g30530.1, by cDNA: 37987., supported by cDNA: gi_15294151, supported by gi_20147268 [Arabidopsis thaliana] >gi|25407655|pir||B85357
  misc_feature (19)..(262): Homolog of NCBI NO: 21593315 NR Description: defense-related protein [Arabidopsis thaliana]
  misc_feature (19)..(262): Homolog of NCBI NO: 14009290 NR Description: defense-related protein [Brassica carinata]
  misc_feature (19)..(233): Homolog of NCBI NO: 15224078 NR Description: unknown protein; protein id: At2g23960.1
MVAVAEAAVTTTMTTTGGRYALLMAAHDSEYVLNKYGGYLHVFVAAFGDAGETWDLYRAIDSELPGPGELEAYDGFVISGSPHDAYADELWILRLCLLVRALHGMRKRVLGVCFGHQVICRALGGRVGKARAGWDVGVREVAIAEAPPRRFLDALRERDQLPLRARITEVHQDEVWEVPEGAEVLASSDKTGVEMFCVGEHVLGIQGHPEYTKDIFLSLVDRLLAAGSITIPFAEAVNRQLEITAPDREFWLMLCKSFLKAREE

SEQ ID NO: 9419 - protein, 252 aa, Zea mays subsp. mays
  peptide (1)..(252): Ceres Seq. ID no. 12367649
  misc_feature (19)..(211): Pfam Name: Glutamine amidotransferase class-I Pfam Description: Glutamine amidotransferase class-I
  misc_feature (1)..(250): Homolog of NCBI NO: 13174241 NR Description: putative glutamine synthetase [Oryza sativa]
  misc_feature (7)..(248): Homolog of NCBI NO: 15234767 NR Description: putative protein; protein id: At4g30550.1, by cDNA: 29388., supported by cDNA: gi_17381293 [Arabidopsis >gi|25407659|pir||D85357 hypothetical protein AT4g30550
  misc_feature (7)..(248): Homolog of NCBI NO: 17381294 NR Description: AT4g30550/F17I23_110 [Arabidopsis thaliana]
  misc_feature (7)..(252): Homolog of NCBI NO: 15224079 NR Description: unknown protein; protein id: At2g23970.1
  misc_feature (7)..(248): Homolog of NCBI NO: 21555885 NR Description: unknown [Arabidopsis thaliana]
  misc_feature (7)..(250): Homolog of NCBI NO: 15234765 NR Description: putative protein; protein id: At4g30540.1
  misc_feature (7)..(250): Homolog of NCBI NO: 15234763 NR Description: putative protein; protein id: At4g30530.1, by cDNA: 37987., supported by cDNA: gi_15294151, supported by gi_20147268 [Arabidopsis thaliana] >gi|25407655|pir||B85357
  misc_feature (7)..(250): Homolog of NCBI NO: 21593315 NR Description: defense-related protein [Arabidopsis thaliana]
  misc_feature (7)..(250): Homolog of NCBI NO: 14009290 NR Description: defense-related protein [Brassica carinata]
  misc_feature (7)..(221): Homolog of NCBI NO: 15224078 NR Description: unknown protein; protein id: At2g23960.1
MTTTGGRYALLMAAHDSEYVLNKYGGYLHVFVAAFGDAGETWDLYRAIDSELPGPGELEAYDGFVISGSPHDAYADELWILRLCLLVRALHGMRKRVLGVCFGHQVICRALGGRVGKARAGWDVGVREVAIAEAPPRRFLDALRERDQLPLRARITEVHQDEVWEVPEGAEVLASSDKTGVEMFCVGEHVLGIQGHPEYTKDIFLSLVDRLLAAGSITIPFAEAVNRQLEITAPDREFWLMLCKSFLKAREE

SEQ ID NO: 9420 - protein, 241 aa, Zea mays subsp. mays
  peptide (1)..(241): Ceres Seq. ID no. 12367650
  misc_feature (8)..(200): Pfam Name: Glutamine amidotransferase class-I Pfam Description: Glutamine amidotransferase class-I
  misc_feature (1)..(239): Homolog of NCBI NO: 13174241 NR Description: putative glutamine synthetase [Oryza sativa]
  misc_feature (1)..(237): Homolog of NCBI NO: 15234767 NR Description: putative protein; protein id: At4g30550.1, by cDNA: 29388., supported by cDNA: gi_17381293 [Arabidopsis >gi|25407659|pir||D85357 hypothetical protein AT4g30550
  misc_feature (1)..(237): Homolog of NCBI NO: 17381294 NR Description: AT4g30550/F17I23_110 [Arabidopsis thaliana]
  misc_feature (1)..(241): Homolog of NCBI NO: 15224079 NR Description: unknown protein; protein id: At2g23970.1
  misc_feature (1)..(237): Homolog of NCBI NO: 21555885 NR Description: unknown [Arabidopsis thaliana]
  misc_feature (1)..(239): Homolog of NCBI NO: 15234765 NR Description: putative protein; protein id: At4g30540.1
  misc_feature (1)..(239): Homolog of NCBI NO: 15234763 NR Description: putative protein; protein id: At4g30530.1, by cDNA: 37987., supported by cDNA: gi_15294151, supported by gi_20147268 [Arabidopsis thaliana] >gi|25407655|pir||B85357
  misc_feature (1)..(239): Homolog of NCBI NO: 21593315 NR Description: defense-related protein [Arabidopsis thaliana]
  misc_feature (1)..(239): Homolog of NCBI NO: 14009290 NR Description: defense-related protein [Brassica carinata]
  misc_feature (1)..(210): Homolog of NCBI NO: 15224078 NR Description: unknown protein; protein id: At2g23960.1
MAAHDSEYVLNKYGGYLHVFVAAFGDAGETWDLYRAIDSELPGPGELEAYDGFVISGSPHDAYADELWILRLCLLVRALHGMRKRVLGVCFGHQVICRALGGRVGKARAGWDVGVREVAIAEAPPRRFLDALRERDQLPLRARITEVHQDEVWEVPEGAEVLASSDKTGVEMFCVGEHVLGIQGHPEYTKDIFLSLVDRLLAAGSITIPFAEAVNRQLEITAPDREFWLMLCKSFLKAREE

SEQ ID NO: 9421 - DNA, 893 bp, Zea mays subsp. mays
  misc_feature (1)..(893): Ceres Seq. ID no. 12347530
  misc_feature: MA Experiment ID: 108504 Result: Up-regulated in Transcription
  misc_feature: MA Experiment 108504 PARAMETER Experiment Name: Zm_Drought_P Parameter: Age (day) Value: 8
  misc_feature: MA Experiment 108504 PARAMETER Experiment Name: Zm_Drought_P Parameter: Organism Value: Zea mays
  misc_feature: MA Experiment 108504 PARAMETER Experiment Name: Zm_Drought_P Parameter: Plant Line Value: 35A19
  misc_feature: MA Experiment 108504 PARAMETER Experiment Name: Zm_Drought_P Parameter: Timepoint (hr) Value: 12
  misc_feature: MA Experiment 108504 PARAMETER Experiment Name: Zm_Drought_P Parameter: Tissue Value: Aerial
  misc_feature: MA Experiment 108504 PARAMETER Experiment Name: Zm_Drought_P Parameter: Treatment Value: Drought vs. No Drought
  misc_feature: MA Experiment ID: 108544 Result: Down-regulated in Transcription
  misc_feature: MA Experiment ID: 108556 Result: Up-regulated in Transcription
  misc_feature: MA Experiment 108556 PARAMETER Experiment Name: Zm_Drought_P Parameter: Age (day) Value: 9
  misc_feature: MA Experiment 108556 PARAMETER Experiment Name: Zm_Drought_P Parameter: Organism Value: Zea mays
  misc_feature: MA Experiment 108556 PARAMETER Experiment Name: Zm_Drought_P Parameter: Plant Line Value: 35A19
  misc_feature: MA Experiment 108556 PARAMETER Experiment Name: Zm_Drought_P Parameter: Timepoint (hr) Value: 24
  misc_feature: MA Experiment 108556 PARAMETER Experiment Name: Zm_Drought_P Parameter: Tissue Value: Aerial
  misc_feature: MA Experiment 108556 PARAMETER Experiment Name: Zm_Drought_P Parameter: Treatment Value: Drought vs. No Drought
  misc_feature: MA Experiment ID: 20000492 Result: Up-regulated in Transcription
  misc_feature: MA Experiment 20000492 PARAMETER Experiment Name: Zm_Hybrid_Seed_Dev_P Parameter: DAP Value: 12
  misc_feature: MA Experiment 20000492 PARAMETER Experiment Name: Zm_Hybrid_Seed_Dev_P Parameter: Organism Value: Zea mays
  misc_feature: MA Experiment 20000492 PARAMETER Experiment Name: Zm_Hybrid_Seed_Dev_P Parameter: Plant Line Value: 35A19
  misc_feature: MA Experiment 20000492 PARAMETER Experiment Name: Zm_Hybrid_Seed_Dev_P Parameter: Tissue Value: Fert Kernel vs. Unfert Floret
  misc_feature: MA Experiment ID: 20000535 Result: Up-regulated in Transcription
  misc_feature: MA Experiment 20000535 PARAMETER Experiment Name: Zm_Hybrid_Seed_Dev_P Parameter: DAP Value: 30 vs. 12
  misc_feature: MA Experiment 20000535 PARAMETER Experiment Name: Zm_Hybrid_Seed_Dev_P Parameter: Organism Value: Zea mays
  misc_feature: MA Experiment 20000535 PARAMETER Experiment Name: Zm_Hybrid_Seed_Dev_P Parameter: Plant Line Value: 35A19
  misc_feature: MA Experiment 20000535 PARAMETER Experiment Name: Zm_Hybrid_Seed_Dev_P Parameter: Tissue Value: Embryo vs. Unfert Floret
ggcattccgaccgatcccaccgaatggacagccgcctcgccatcgccgcgctcctcctgctcgcctccgcctcctccgctgccgctgccgcggacggcgggaaggtggccgtggcgctgtactacgagtcgctgtgcccctactcggcgcgcttcgtggtcaaccacctcgccaaggtcttcgcggacggcctccgcgaggtcgtggacctcacgctcgtcccctacggcaacgcccggatccatcccggcggagagatctcgtgccagcatggtccgtacgagtgtctgctcaacaccgtggaagcttgcgccatcgacgcctggccggatctggatgtgcatttcagcttcatctactgcgtggaggacctggtggtgaagcggcagtacaaggactgggagtcctgcttcgagaagctgggcctcgacgccaagcccgtaacagaatgctacaaaagcgagcatggccacaagctcgagctcaagtacgcgaaccagaccgacgctctcgagccgccgcaccggtacgtgccctgggtggtcgtcgacgggcagcccctgcttgaggattacgagaatttcgaggcttacatctgcaaggcttacaagggcactccaccgaaggcctgccagggcctgggacgtctgcagatggccctcgagacagcggcggaggcgcgcaacggcgtcagctacaactccggtgtcagcaagcttgcgactgctgaagatgagggtggggagcataaggtgggagaatactagtacataattgactagcgacgtgccccttttttgggtcatgtgaagttgaaggaccgttccatctcgttgtccggttttttattgtacagtaatagctaatatgataatgataataattacatttcg

SEQ ID NO: 9422 - protein, 254 aa, Zea mays subsp. mays
  peptide (1)..(254): Ceres Seq. ID no. 12347531
  misc_feature (35)..(144): Pfam Name: Gamma interferon inducible lysosomal thiol Pfam Description: Gamma interferon inducible lysosomal thiol
  misc_feature (34)..(214): Homolog of NCBI NO: 30793446 NR Description: 27K protein [Triticum aestivum]
  misc_feature (24)..(210): Homolog of NCBI NO: 18390723 NR Description: expressed protein; protein id: At1g07080.1, by cDNA: gi_15146333, supported by cDNA: gi_15809755 [Arabidopsis >gi|15146334|gb|AAK83650.1| At1g07080/F10K1_15 [Arabidopsis
  misc_feature (24)..(210): Homolog of NCBI NO: 25406953 NR Description: hypothetical protein [imported] - Arabidopsis >gi|8954038|gb|AAF82212.1|AC067971_20 Contains similarity to an protein F7A7_100 gi|7327817 from Arabidopsis thaliana BAC from
  misc_feature (34)..(242): Homolog of NCBI NO: 15241015 NR Description: putative protein; protein id: At5g01580.1
  misc_feature (15)..(221): Homolog of NCBI NO: 15235523 NR Description: putative protein; protein id: At4g12900.1
  misc_feature (12)..(210): Homolog of NCBI NO: 18413888 NR Description: putative protein; protein id: At4g12890.1,
  misc_feature (12)..(210): Homolog of NCBI NO: 21593076 NR Description: unknown [Arabidopsis thaliana]
  misc_feature (10)..(221): Homolog of NCBI NO: 15235540 NR Description: putative protein; protein id: At4g12960.1, by cDNA: 516., supported by cDNA: gi_16648686 [Arabidopsis
  misc_feature (10)..(221): Homolog of NCBI NO: 21593852 NR Description: unknown [Arabidopsis thaliana]
  misc_feature (12)..(191): Homolog of NCBI NO: 7487272 NR Description: hypothetical protein T20K18.240 - Arabidopsis >gi|4586265|emb|CAB41006.1| putative protein [Arabidopsis >gi|7267991|emb|CAB78331.1| putative protein [Arabidopsis
HSDRSHRMDSRLAIAALLLLASASSAAAAADGGKVAVALYYESLCPYSARFVVNHLAKVFADGLREVVDLTLVPYGNARIHPGGEISCQHGPYECLLNTVEACAIDAWPDLDVHFSFIYCVEDLVVKRQYKDWESCFEKLGLDAKPVTECYKSEHGHKLELKYANQTDALEPPHRYVPWVVVDGQPLLEDYENFEAYICKAYKGTPPKACQGLGRLQMALETAAEARNGVSYNSGVSKLATAEDEGGEHKVGEY

SEQ ID NO: 9423 - protein, 247 aa, Zea mays subsp. mays
  peptide (1)..(247): Ceres Seq. ID no. 12347532
  misc_feature (28)..(137): Pfam Name: Gamma interferon inducible lysosomal thiol Pfam Description: Gamma interferon inducible lysosomal thiol
  misc_feature (17)..(203): Homolog of NCBI NO: 25406953 NR Description: hypothetical protein [imported] - Arabidopsis >gi|8954038|gb|AAF82212.1|AC067971_20 Contains similarity to an protein F7A7_100 gi|7327817 from Arabidopsis thaliana BAC from
  misc_feature (27)..(235): Homolog of NCBI NO: 15241015 NR Description: putative protein; protein id: At5g01580.1
  misc_feature (8)..(214): Homolog of NCBI NO: 15235523 NR Description: putative protein; protein id: At4g12900.1
  misc_feature (5)..(203): Homolog of NCBI NO: 18413888 NR Description: putative protein; protein id: At4g12890.1,
  misc_feature (27)..(207): Homolog of NCBI NO: 30793446 NR Description: 27K protein [Triticum aestivum]
  misc_feature (17)..(203): Homolog of NCBI NO: 18390723 NR Description: expressed protein; protein id: At1g07080.1, by cDNA: gi_15146333, supported by cDNA: gi_15809755 [Arabidopsis >gi|15146334|gb|AAK83650.1| At1g07080/F10K1_15 [Arabidopsis
  misc_feature (5)..(203): Homolog of NCBI NO: 21593076 NR Description: unknown [Arabidopsis thaliana]
  misc_feature (3)..(214): Homolog of NCBI NO: 15235540 NR Description: putative protein; protein id: At4g12960.1, by cDNA: 516., supported by cDNA: gi_16648686 [Arabidopsis
  misc_feature (3)..(214): Homolog of NCBI NO: 21593852 NR Description: unknown [Arabidopsis thaliana]
  misc_feature (5)..(184): Homolog of NCBI NO: 7487272 NR Description: hypothetical protein T20K18.240 - Arabidopsis >gi|4586265|emb|CAB41006.1| putative protein [Arabidopsis >gi|7267991|emb|CAB78331.1| putative protein [Arabidopsis
MDSRLAIAALLLLASASSAAAAADGGKVAVALYYESLCPYSARFVVNHLAKVFADGLREVVDLTLVPYGNARIHPGGEISCQHGPYECLLNTVEACAIDAWPDLDVHFSFIYCVEDLVVKRQYKDWESCFEKLGLDAKPVTECYKSEHGHKLELKYANQTDALEPPHRYVPWVVVDGQPLLEDYENFEAYICKAYKGTPPKACQGLGRLQMALETAAEARNGVSYNSGVSKLATAEDEGGEHKVGEY

SEQ ID NO: 9424 - protein, 188 aa, Zea mays subsp. mays
  peptide (1)..(188): Ceres Seq. ID no. 12347533
AFRPIPPNGQPPRHRRAPPARLRLLRCRCRGRREGGRGAVLRVAVPLLGALRGQPPRQGLRGRPPRGRGPHARPLRQRPDPSRRRDLVPAWSVRVSAQHRGSLRHRRLAGSGCAFQLHLLRGGPGGEAAVQGLGVLLREAGPRRQARNRMLQKRAWPQARAQVREPDRRSRAAAPVRALGGRRRAAPA

SEQ ID NO: 9425 - DNA, 1004 bp, Zea mays subsp. mays
  misc_feature (1)..(1004): Ceres Seq. ID no. 12354129
  misc_feature: MA Experiment ID: 108504 Result: Down-regulated in Transcription
  misc_feature: MA Experiment 108504 PARAMETER Experiment Name: Zm_Drought_P Parameter: Age (day) Value: 8
  misc_feature: MA Experiment 108504 PARAMETER Experiment Name: Zm_Drought_P Parameter: Organism Value: Zea mays
  misc_feature: MA Experiment 108504 PARAMETER Experiment Name: Zm_Drought_P Parameter: Plant Line Value: 35A19
  misc_feature: MA Experiment 108504 PARAMETER Experiment Name: Zm_Drought_P Parameter: Timepoint (hr) Value: 12
  misc_feature: MA Experiment 108504 PARAMETER Experiment Name: Zm_Drought_P Parameter: Tissue Value: Aerial
  misc_feature: MA Experiment 108504 PARAMETER Experiment Name: Zm_Drought_P Parameter: Treatment Value: Drought vs. No Drought
  misc_feature: MA Experiment ID: 108515 Result: Down-regulated in Transcription
  misc_feature: MA Experiment 108515 PARAMETER Experiment Name: Zm_2mM_SA_P Parameter: Age (day) Value: 8
  misc_feature: MA Experiment 108515 PARAMETER Experiment Name: Zm_2mM_SA_P Parameter: Organism Value: Zea mays
  misc_feature: MA Experiment 108515 PARAMETER Experiment Name: Zm_2mM_SA_P Parameter: Plant Line Value: 35A19
  misc_feature: MA Experiment 108515 PARAMETER Experiment Name: Zm_2mM_SA_P Parameter: Timepoint (hr) Value: 12
  misc_feature: MA Experiment 108515 PARAMETER Experiment Name: Zm_2mM_SA_P Parameter: Tissue Value: Aerial
  misc_feature: MA Experiment 108515 PARAMETER Experiment Name: Zm_2mM_SA_P Parameter: Treatment Value: 2mM SA vs. No Treatment
  misc_feature: MA Experiment ID: 108522 Result: Down-regulated in Transcription
  misc_feature: MA Experiment 108522 PARAMETER Experiment Name: Zm_42deg_Heat_P Parameter: Age (day) Value: 8
  misc_feature: MA Experiment 108522 PARAMETER Experiment Name: Zm_42deg_Heat_P Parameter: Organism Value: Zea mays
  misc_feature: MA Experiment 108522 PARAMETER Experiment Name: Zm_42deg_Heat_P Parameter: Plant Line Value: 35A19
  misc_feature: MA Experiment 108522 PARAMETER Experiment Name: Zm_42deg_Heat_P Parameter: Temperature (deg C) Value: 42 vs. 22
  misc_feature: MA Experiment 108522 PARAMETER Experiment Name: Zm_42deg_Heat_P Parameter: Timepoint (hr) Value: 1
  misc_feature: MA Experiment 108522 PARAMETER Experiment Name: Zm_42deg_Heat_P Parameter: Tissue Value: Aerial
  misc_feature: MA Experiment ID: 108523 Result: Down-regulated in Transcription
  misc_feature: MA Experiment 108523 PARAMETER Experiment Name: Zm_42deg_Heat_P Parameter: Age (day) Value: 8
  misc_feature: MA Experiment 108523 PARAMETER Experiment Name: Zm_42deg_Heat_P Parameter: Organism Value: Zea mays
  misc_feature: MA Experiment 108523 PARAMETER Experiment Name: Zm_42deg_Heat_P Parameter: Plant Line Value: 35A19
  misc_feature: MA Experiment 108523 PARAMETER Experiment Name: Zm_42deg_Heat_P Parameter: Temperature (deg C) Value: 42 vs. 22
  misc_feature: MA Experiment 108523 PARAMETER Experiment Name: Zm_42deg_Heat_P Parameter: Timepoint (hr) Value: 6
  misc_feature: MA Experiment 108523 PARAMETER Experiment Name: Zm_42deg_Heat_P Parameter: Tissue Value: Aerial
  misc_feature: MA Experiment ID: 108527 Result: Down-regulated in Transcription
  misc_feature: MA Experiment 108527 PARAMETER Experiment Name: Zm_5mM_NO_P Parameter: Age (day) Value: 8
  misc_feature: MA Experiment 108527 PARAMETER Experiment Name: Zm_5mM_NO_P Parameter: Organism Value: Zea mays
  misc_feature: MA Experiment 108527 PARAMETER Experiment Name: Zm_5mM_NO_P Parameter: Plant Line Value: 35A19
  misc_feature: MA Experiment 108527 PARAMETER Experiment Name: Zm_5mM_NO_P Parameter: Timepoint (hr) Value: 6
  misc_feature: MA Experiment 108527 PARAMETER Experiment Name: Zm_5mM_NO_P Parameter: Tissue Value: Aerial
  misc_feature: MA Experiment 108527 PARAMETER Experiment Name: Zm_5mM_NO_P Parameter: Treatment Value: 5mM NO vs. No Treatment
  misc_feature: MA Experiment ID: 108528 Result: Up-regulated in Transcription
  misc_feature: MA Experiment 108528 PARAMETER Experiment Name: Zm_Imbibed_Seeds_P Parameter: Age (day) Value: 5 vs. 2
  misc_feature: MA Experiment 108528 PARAMETER Experiment Name: Zm_Imbibed_Seeds_P Parameter: Organism Value: Zea mays
  misc_feature: MA Experiment 108528 PARAMETER Experiment Name: Zm_Imbibed_Seeds_P Parameter: Plant Line Value: 35A19
  misc_feature: MA Experiment 108528 PARAMETER Experiment Name: Zm_Imbibed_Seeds_P Parameter: Tissue Value: Aerial vs. Embryo
  misc_feature: MA Experiment ID: 108529 Result: Down-regulated in Transcription
  misc_feature: MA Experiment 108529 PARAMETER Experiment Name: Zm_Imbibed_Seeds_P Parameter: Age (day) Value: 5 vs. 2
  misc_feature: MA Experiment 108529 PARAMETER Experiment Name: Zm_Imbibed_Seeds_P Parameter: Organism Value: Zea mays
  misc_feature: MA Experiment 108529 PARAMETER Experiment Name: Zm_Imbibed_Seeds_P Parameter: Plant Line Value: 35A19
  misc_feature: MA Experiment 108529 PARAMETER Experiment Name: Zm_Imbibed_Seeds_P Parameter: Tissue Value: Roots vs. Embryo
  misc_feature: MA Experiment ID: 108530 Result: Up-regulated in Transcription
  misc_feature: MA Experiment 108530 PARAMETER Experiment Name: Zm_Imbibed_Seeds_P Parameter: Age (day) Value: 6 vs. 2
  misc_feature: MA Experiment 108530 PARAMETER Experiment Name: Zm_Imbibed_Seeds_P Parameter: Organism Value: Zea mays
  misc_feature: MA Experiment 108530 PARAMETER Experiment Name: Zm_Imbibed_Seeds_P Parameter: Plant Line Value: 35A19
  misc_feature: MA Experiment 108530 PARAMETER Experiment Name: Zm_Imbibed_Seeds_P Parameter: Tissue Value: Aerial vs. Embryo
  misc_feature: MA Experiment ID: 108536 Result: Down-regulated in Transcription
  misc_feature: MA Experiment 108536 PARAMETER Experiment Name: Zm_Meristem_P Parameter: Age (day) Value: 8
  misc_feature: MA Experiment 108536 PARAMETER Experiment Name: Zm_Meristem_P Parameter: Organism Value: Zea mays
  misc_feature: MA Experiment 108536 PARAMETER Experiment Name: Zm_Meristem_P Parameter: Plant Line Value: 35A19
  misc_feature: MA Experiment 108536 PARAMETER Experiment Name: Zm_Meristem_P Parameter: Tissue Value: Shoot Meristem vs. Above Shoot Meristem
  misc_feature: MA Experiment ID: 108540 Result: Down-regulated in Transcription
  misc_feature: MA Experiment 108540 PARAMETER Experiment Name: Zm_20percent_PEG_P Parameter: Age (day) Value: 8
  misc_feature: MA Experiment 108540 PARAMETER Experiment Name: Zm_20percent_PEG_P Parameter: Organism Value: Zea mays
  misc_feature: MA Experiment 108540 PARAMETER Experiment Name: Zm_20percent_PEG_P Parameter: Plant Line Value: 35A19
  misc_feature: MA Experiment 108540 PARAMETER Experiment Name: Zm_20percent_PEG_P Parameter: Timepoint (hr) Value: 6
  misc_feature: MA Experiment 108540 PARAMETER Experiment Name: Zm_20percent_PEG_P Parameter: Tissue Value: Aerial
  misc_feature: MA Experiment 108540 PARAMETER Experiment Name: Zm_20percent_PEG_P Parameter: Treatment Value: 20percent PEG vs. No Treatment
  misc_feature: MA Experiment ID: 108543 Result: Down-regulated in Transcription
  misc_feature: MA Experiment ID: 108544 Result: Down-regulated in Transcription
  misc_feature: MA Experiment ID: 108546 Result: Down-regulated in Transcription
  misc_feature: MA Experiment 108546 PARAMETER Experiment Name: Zm_Imbibed_Seeds_P Parameter: Age (day) Value: 3 vs. 2
  misc_feature: MA Experiment 108546 PARAMETER Experiment Name: Zm_Imbibed_Seeds_P Parameter: Organism Value: Zea mays
  misc_feature: MA Experiment 108546 PARAMETER Experiment Name: Zm_Imbibed_Seeds_P Parameter: Plant Line Value: 35A19
  misc_feature: MA Experiment 108546 PARAMETER Experiment Name: Zm_Imbibed_Seeds_P Parameter: Tissue Value: Roots vs. Embryo
  misc_feature: MA Experiment ID: 108547 Result: Up-regulated in Transcription
  misc_feature: MA Experiment 108547 PARAMETER Experiment Name: Zm_Imbibed_Seeds_P Parameter: Age (day) Value: 4 vs. 2
  misc_feature: MA Experiment 108547 PARAMETER Experiment Name: Zm_Imbibed_Seeds_P Parameter: Organism Value: Zea mays
  misc_feature: MA Experiment 108547 PARAMETER Experiment Name: Zm_Imbibed_Seeds_P Parameter: Plant Line Value: 35A19
  misc_feature: MA Experiment 108547 PARAMETER Experiment Name: Zm_Imbibed_Seeds_P Parameter: Tissue Value: Aerial vs. Embryo
  misc_feature: MA Experiment ID: 108559 Result: Down-regulated in Transcription
  misc_feature: MA Experiment 108559 PARAMETER Experiment Name: Zm_5mM_NO_P Parameter: Age (day) Value: 8
  misc_feature: MA Experiment 108559 PARAMETER Experiment Name: Zm_5mM_NO_P Parameter: Organism Value: Zea mays
  misc_feature: MA Experiment 108559 PARAMETER Experiment Name: Zm_5mM_NO_P Parameter: Plant Line Value: 35A19
  misc_feature: MA Experiment 108559 PARAMETER Experiment Name: Zm_5mM_NO_P Parameter: Timepoint (hr) Value: 12
  misc_feature: MA Experiment 108559 PARAMETER Experiment Name: Zm_5mM_NO_P Parameter: Tissue Value: Aerial
  misc_feature: MA Experiment 108559 PARAMETER Experiment Name: Zm_5mM_NO_P Parameter: Treatment Value: 5mM NO vs. No Treatment
  misc_feature: MA Experiment ID: 108597 Result: Down-regulated in Transcription
  misc_feature: MA Experiment 108597 PARAMETER Experiment Name: Zm_100uM_ABA_P Parameter: Age (day) Value: 9
  misc_feature: MA Experiment 108597 PARAMETER Experiment Name: Zm_100uM_ABA_P Parameter: Organism Value: Zea mays
  misc_feature: MA Experiment 108597 PARAMETER Experiment Name: Zm_100uM_ABA_P Parameter: Plant Line Value: 35A19
  misc_feature: MA Experiment 108597 PARAMETER Experiment Name: Zm_100uM_ABA_P Parameter: Timepoint (hr) Value: 24
  misc_feature: MA Experiment 108597 PARAMETER Experiment Name: Zm_100uM_ABA_P Parameter: Tissue Value: Aerial
  misc_feature: MA Experiment 108597 PARAMETER Experiment Name: Zm_100uM_ABA_P Parameter: Treatment Value: 100uM ABA vs. No Treatment
  misc_feature: MA Experiment ID: 108688 Result: Down-regulated in Transcription
  misc_feature: MA Experiment 108688 PARAMETER Experiment Name: Zm_Embryos-Flowers__P Parameter: Tissue Value: Immature Flowers vs. Aerial+
  misc_feature: MA Experiment ID: 108689 Result: Down-regulated in Transcription
  misc_feature: MA Experiment 108689 PARAMETER Experiment Name: Zm_Drought_Roots_P Parameter: Age (day) Value: 9
  misc_feature: MA Experiment 108689 PARAMETER Experiment Name: Zm_Drought_Roots_P Parameter: Organism Value: Zea mays
  misc_feature: MA Experiment 108689 PARAMETER Experiment Name: Zm_Drought_Roots_P Parameter: Plant Line Value: 35A19
  misc_feature: MA Experiment 108689 PARAMETER Experiment Name: Zm_Drought_Roots_P Parameter: Timepoint (hr) Value: 24
  misc_feature: MA Experiment 108689 PARAMETER Experiment Name: Zm_Drought_Roots_P Parameter: Tissue Value: Roots
  misc_feature: MA Experiment 108689 PARAMETER Experiment Name: Zm_Drought_Roots_P Parameter: Treatment Value: Drought vs. No Drought
  misc_feature: MA Experiment ID: 20000535 Result: Up-regulated in Transcription
  misc_feature: MA Experiment 20000535 PARAMETER Experiment Name: Zm_Hybrid_Seed_Dev_P Parameter: DAP Value: 30 vs. 12
  misc_feature: MA Experiment 20000535 PARAMETER Experiment Name: Zm_Hybrid_Seed_Dev_P Parameter: Organism Value: Zea mays
  misc_feature: MA Experiment 20000535 PARAMETER Experiment Name: Zm_Hybrid_Seed_Dev_P Parameter: Plant Line Value: 35A19
  misc_feature: MA Experiment 20000535 PARAMETER Experiment Name: Zm_Hybrid_Seed_Dev_P Parameter: Tissue Value: Embryo vs. Unfert Floret
  misc_feature: MA Experiment ID: 20000626 Result: Down-regulated in Transcription
  misc_feature: MA Experiment 20000626 PARAMETER Experiment Name: Zm_Herbicide-Treatments_P Parameter: Timepoint (hr) Value: 12
  misc_feature: MA Experiment 20000626 PARAMETER Experiment Name: Zm_Herbicide-Treatments_P Parameter: Tissue Value: Aerial
  misc_feature: MA Experiment 20000626 PARAMETER Experiment Name: Zm_Herbicide-Treatments_P Parameter: Treatment Value: Roundup vs. No Treatment
aggcaaacggttcacacgttcgaaccccatatggctgaacccaagtcaaataatggcggggcggacgcgacggcatcgatgatgctccacggccgcgtagccattgtcaccggtggtgccggcggcatcggctcggccgtgtcgaagcacctgtcgtcgctcggcgcgcgcgtcgtggtggggtacatcggcgacccggcacctgctctgacgctggtagccgccatcaactcctccgagcaccccggcgagagccagcagccgcgagccatcgcggtcgaggcggacgtgtccgacgcggcagccgtgaaggcgctgttcgacgcggccgccgcagccttcggcggggagctccacatcctggtaacgttggcggcggtgctggactactcctacccgccgctggcggagaccagcgaggcgacgttcgacgccgccttcagcgtcaacacacggggcaccttcctgtgctgccgcgaggcggccaggcggctggtgcgtgacggccgcggccgaatcgtgacgttctcttcgtcgggagttgggtctctgcgccctggctactcggcatacgcagcaagcaaggccgcggtggaggtgatgactaagatcctggcgcgcgagctgcgcggcacggggatcacggccaacgtggtggcgccagggtccacggggacacccatgatgtacaccggcaagacggaggatgacatggagcgatacatcgccgaggcgccgctgggccggctcggcatgcccgaggacatcgcgccgctcgtcagcttcctcgctagtgatgctggccactgggtcaacgcgcaggtcctgcgctgcaacggtggcaccatctagctagtactgcgtgcctactttttatggttgattagatgtattttcctcggagcataaatttaagcttgtggcgcagttatcgcttggcagttcattaatttatttaaagattgtgtcgtttattctattgtgtgtatttataatcaggctcc

SEQ ID NO: 9426 - protein, 283 aa, Zea mays subsp. mays
  peptide (1)..(283): Ceres Seq. ID no. 12354130
  misc_feature (21)..(283): Homolog of NCBI NO: 18087667 NR Description: putative dehydrogenase [Oryza sativa]
  misc_feature (25)..(283): Homolog of NCBI NO: 34393370 NR Description: putative short-chain dehydrogenase/reductase
  misc_feature (29)..(283): Homolog of NCBI NO: 15229203 NR Description: putative short-chain type protein id: At3g03980.1, supported by cDNA: gi_14326546
  misc_feature (23)..(283): Homolog of NCBI NO: 15235621 NR Description: short-chain alcohol dehydrogenase like protein; id: At4g13180.1, supported by cDNA: 748., supported by cDNA:
  misc_feature (16)..(281): Homolog of NCBI NO: 34395018 NR Description: putative short-chain dehydrogenase/reductase
  misc_feature (21)..(281): Homolog of NCBI NO: 37534988 NR Description: putative short-chain alcohol dehydrogenase [Oryza
  misc_feature (25)..(283): Homolog of NCBI NO: 34395019 NR Description: putative short-chain dehydrogenase/reductase
  misc_feature (23)..(280): Homolog of NCBI NO: 9758903 NR Description: Brn1-like protein [Arabidopsis thaliana]
  misc_feature (29)..(283): Homolog of NCBI NO: 1711355 NR Description: SHORT-CHAIN TYPE DEHYDROGENASE/REDUCTASE
  misc_feature (27)..(283): Homolog of NCBI NO: 30679011 NR Description: short-chain type dehydrogenase/reductase -related
RQTVHTFEPHMAEPKSNNGGADATASMMLHGRVAIVTGGAGGIGSAVSKHLSSLGARVVVGYIGDPAPALTLVAAINSSEHPGESQQPRAIAVEADVSDAAAVKALFDAAAAAFGGELHILVTLAAVLDYSYPPLAETSEATFDAAFSVNTRGTFLCCREAARRLVRDGRGRIVTFSSSGVGSLRPGYSAYAASKAAVEVMTKILARELRGTGITANVVAPGSTGTPMMYTGKTEDDMERYIAEAPLGRLGMPEDIAPLVSFLASDAGHWVNAQVLRCNGGTI

SEQ ID NO: 9427 - protein, 273 aa, Zea mays subsp. mays
  peptide (1)..(273): Ceres Seq. ID no. 12354131
  misc_feature (11)..(273): Homolog of NCBI NO: 18087667 NR Description: putative dehydrogenase [Oryza sativa]
  misc_feature (15)..(273): Homolog of NCBI NO: 34393370 NR Description: putative short-chain dehydrogenase/reductase
  misc_feature (19)..(273): Homolog of NCBI NO: 15229203 NR Description: putative short-chain type protein id: At3g03980.1, supported by cDNA: gi_14326546
  misc_feature (13)..(273): Homolog of NCBI NO: 15235621 NR Description: short-chain alcohol dehydrogenase like protein; id: At4g13180.1, supported by cDNA: 748., supported by cDNA:
  misc_feature (6)..(271): Homolog of NCBI NO: 34395018 NR Description: putative short-chain dehydrogenase/reductase
  misc_feature (11)..(271): Homolog of NCBI NO: 37534988 NR Description: putative short-chain alcohol dehydrogenase [Oryza
  misc_feature (15)..(273): Homolog of NCBI NO: 34395019 NR Description: putative short-chain dehydrogenase/reductase
  misc_feature (13)..(270): Homolog of NCBI NO: 9758903 NR Description: Brn1-like protein [Arabidopsis thaliana]
  misc_feature (19)..(273): Homolog of NCBI NO: 1711355 NR Description: SHORT-CHAIN TYPE DEHYDROGENASE/REDUCTASE
  misc_feature (17)..(273): Homolog of NCBI NO: 30679011 NR Description: short-chain type dehydrogenase/reductase -related
MAEPKSNNGGADATASMMLHGRVAIVTGGAGGIGSAVSKHLSSLGARVVVGYIGDPAPALTLVAAINSSEHPGESQQPRAIAVEADVSDAAAVKALFDAAAAAFGGELHILVTLAAVLDYSYPPLAETSEATFDAAFSVNTRGTFLCCREAARRLVRDGRGRIVTFSSSGVGSLRPGYSAYAASKAAVEVMTKILARELRGTGITANVVAPGSTGTPMMYTGKTEDDMERYIAEAPLGRLGMPEDIAPLVSFLASDAGHWVNAQVLRCNGGTI

SEQ ID NO: 9428 - protein, 257 aa, Zea mays subsp. mays
  peptide (1)..(257): Ceres Seq. ID no. 12354132
  misc_feature (1)..(257): Homolog of NCBI NO: 18087667 NR Description: putative dehydrogenase [Oryza sativa]
  misc_feature (1)..(257): Homolog of NCBI NO: 34393370 NR Description: putative short-chain dehydrogenase/reductase
  misc_feature (3)..(257): Homolog of NCBI NO: 15229203 NR Description: putative short-chain type protein id: At3g03980.1, supported by cDNA: gi_14326546
  misc_feature (1)..(257): Homolog of NCBI NO: 15235621 NR Description: short-chain alcohol dehydrogenase like protein; id: At4g13180.1, supported by cDNA: 748., supported by cDNA:
  misc_feature (1)..(255): Homolog of NCBI NO: 34395018 NR Description: putative short-chain dehydrogenase/reductase
  misc_feature (1)..(255): Homolog of NCBI NO: 37534988 NR Description: putative short-chain alcohol dehydrogenase [Oryza
  misc_feature (1)..(257): Homolog of NCBI NO: 34395019 NR Description: putative short-chain dehydrogenase/reductase
  misc_feature (1)..(254): Homolog of NCBI NO: 9758903 NR Description: Brn1-like protein [Arabidopsis thaliana]
  misc_feature (3)..(257): Homolog of NCBI NO: 1711355 NR Description: SHORT-CHAIN TYPE DEHYDROGENASE/REDUCTASE
  misc_feature (1)..(257): Homolog of NCBI NO: 30679011 NR Description: short-chain type dehydrogenase/reductase -related
MMLHGRVAIVTGGAGGIGSAVSKHLSSLGARVVVGYIGDPAPALTLVAAINSSEHPGESQQPRAIAVEADVSDAAAVKALFDAAAAAFGGELHILVTLAAVLDYSYPPLAETSEATFDAAFSVNTRGTFLCCREAARRLVRDGRGRIVTFSSSGVGSLRPGYSAYAASKAAVEVMTKILARELRGTGITANVVAPGSTGTPMMYTGKTEDDMERYIAEAPLGRLGMPEDIAPLVSFLASDAGHWVNAQVLRCNGGTI

SEQ ID NO: 9429 - DNA, 1120 bp, Zea mays subsp. mays
  misc_feature (1)..(1120): Ceres Seq. ID no. 12365896
  misc_feature: MA Experiment ID: 108528 Result: Up-regulated in Transcription
  misc_feature: MA Experiment 108528 PARAMETER Experiment Name: Zm_Imbibed_Seeds_P Parameter: Age (day) Value: 5 vs. 2
  misc_feature: MA Experiment 108528 PARAMETER Experiment Name: Zm_Imbibed_Seeds_P Parameter: Organism Value: Zea mays
  misc_feature: MA Experiment 108528 PARAMETER Experiment Name: Zm_Imbibed_Seeds_P Parameter: Plant Line Value: 35A19
  misc_feature: MA Experiment 108528 PARAMETER Experiment Name: Zm_Imbibed_Seeds_P Parameter: Tissue Value: Aerial vs. Embryo
  misc_feature: MA Experiment ID: 108545 Result: Up-regulated in Transcription
  misc_feature: MA Experiment 108545 PARAMETER Experiment Name: Zm_Imbibed_Seeds_P Parameter: Age (day) Value: 3 vs. 2
  misc_feature: MA Experiment 108545 PARAMETER Experiment Name: Zm_Imbibed_Seeds_P Parameter: Organism Value: Zea mays
  misc_feature: MA Experiment 108545 PARAMETER Experiment Name: Zm_Imbibed_Seeds_P Parameter: Plant Line Value: 35A19
  misc_feature: MA Experiment 108545 PARAMETER Experiment Name: Zm_Imbibed_Seeds_P Parameter: Tissue Value: Aerial vs. Embryo
  misc_feature: MA Experiment ID: 108547 Result: Up-regulated in Transcription
  misc_feature: MA Experiment 108547 PARAMETER Experiment Name: Zm_Imbibed_Seeds_P Parameter: Age (day) Value: 4 vs. 2
  misc_feature: MA Experiment 108547 PARAMETER Experiment Name: Zm_Imbibed_Seeds_P Parameter: Organism Value: Zea mays
  misc_feature: MA Experiment 108547 PARAMETER Experiment Name: Zm_Imbibed_Seeds_P Parameter: Plant Line Value: 35A19
  misc_feature: MA Experiment 108547 PARAMETER Experiment Name: Zm_Imbibed_Seeds_P Parameter: Tissue Value: Aerial vs. Embryo
  misc_feature: MA Experiment ID: 20000487 Result: Up-regulated in Transcription
  misc_feature: MA Experiment 20000487 PARAMETER Experiment Name: Zm_50mM_NH4NO3_L_to_H_P Parameter: Organism Value: Zea mays
  misc_feature: MA Experiment 20000487 PARAMETER Experiment Name: Zm_50mM_NH4NO3_L_to_H_P Parameter: Timepoint (hr) Value: 4
  misc_feature: MA Experiment 20000487 PARAMETER Experiment Name: Zm_50mM_NH4NO3_L_to_H_P Parameter: Tissue Value: Leaves
  misc_feature: MA Experiment 20000487 PARAMETER Experiment Name: Zm_50mM_NH4NO3_L_to_H_P Parameter: Treatment Value: 50mM NH4NO3 vs. 100mM Mannitol
ctttggagtttatagctaccattgcgtcatctatttggtgtgaaatgaatattcgcaaagagaggtttaaacaagaatgggatttggtgattgttaatgctttgactgcagcttgttgcaacttgatggttcttggacttttagcaccatgccgttcatatgcgagtacatctcgatttgacttccaaaatgcaattgagaaacttccgaacaacatatttgagaagagctatcctttgagagagtttgatctagcaaaacgaatcagtgcattcttttataaagctgctgagcttagtctggtcgggtttgtagctggctctgtgcaagggggtatgtcaatagtcttgtccgcaagaaaagaaaggaggttatcggtgactattccctctatcagcaccaatgctcttggttatggagctttcctaggactctatgctaacttgcgttatcaattgctatgtggagtagaccaatatatggtcaagcgcttcgatgttttgggtgtggcaatcttcttcagcacagcagcaagactgatcaatattcagattggtgaggcatcaaggaggacttggcttggcgaggaagctgatccacagtactcagatcgactgttgagagcatacaagagacctgtggaggttgacgcggaccaatcaaggtggtttatatccaaggatgcaattgtatctggccttggtcttctaggtatcaagcagggtggacctgaggcaacattttctaagtctcgtcgaaagagagtcatccgcaaaaaggtcacttcaggttgagtttagtggatttggatagcaatgctggaacaattttgcttctgttccactatgccagagggaggtctacccaaattatggtaaatgagaaaaaggtatcaagtcaaccagcacgtggtctgtcggcgaagggatcaaagggtttgttactgggaagggttagttaaaaggtgccaattactattttataatttaattgcagttatttaaggtaagaaaatatgttgttttcttgtattgctgtgaggcaaatagacacgtttagtggtagttttgtaagattgttaatgtactgactttacatgagaaatggattctgcattttt

SEQ ID NO: 9430 - protein, 263 aa, Zea mays subsp. mays
  peptide (1)..(263): Ceres Seq. ID no. 12365897
  misc_feature (1)..(262): Homolog of NCBI NO: 9759209 NR Description: gb|AAD25674.1~gene_id:MXC17.8~similar to unknown
  misc_feature (1)..(262): Homolog of NCBI NO: 22327037 NR Description: putative protein; protein id: At5g24690.1, by cDNA: gi_13877882, supported by cDNA: gi_15912312 [Arabidopsis >gi|13877883|gb|AAK44019.1|AF370204_1 unknown protein
  misc_feature (12)..(192): Homolog of NCBI NO: 15242979 NR Description: putative protein; protein id: At5g22790.1, by cDNA: gi_13605898, supported by cDNA: gi_19548024 [Arabidopsis >gi|9758754|dbj|BAB09278.1| gb|AAF31706.1~gene_id:K8E10.2~similar
  misc_feature (2)..(181): Homolog of NCBI NO: 34395170 NR Description: chloroplast lumen common protein family-like
  misc_feature (2)..(181): Homolog of NCBI NO: 6934300 NR Description: unknown [Euphorbia esula]
  misc_feature (14)..(181): Homolog of NCBI NO: 30687286 NR Description: expressed protein [Arabidopsis thaliana]
LEFIATIASSIWCEMNIRKERFKQEWDLVIVNALTAACCNLMVLGLLAPCRSYASTSRFDFQNAIEKLPNNIFEKSYPLREFDLAKRISAFFYKAAELSLVGFVAGSVQGGMSIVLSARKERRLSVTIPSISTNALGYGAFLGLYANLRYQLLCGVDQYMVKRFDVLGVAIFFSTAARLINIQIGEASRRTWLGEEADPQYSDRLLRAYKRPVEVDADQSRWFISKDAIVSGLGLLGIKQGGPEATFSKSRRKRVIRKKVTSG

SEQ ID NO: 9431 - protein, 249 aa, Zea mays subsp. mays
  peptide (1)..(249): Ceres Seq. ID no. 12365898
  misc_feature (1)..(248): Homolog of NCBI NO: 9759209 NR Description: gb|AAD25674.1~gene_id:MXC17.8~similar to unknown
  misc_feature (1)..(248): Homolog of NCBI NO: 22327037 NR Description: putative protein; protein id: At5g24690.1, by cDNA: gi_13877882, supported by cDNA: gi_15912312 [Arabidopsis >gi|13877883|gb|AAK44019.1|AF370204_1 unknown protein
  misc_feature (1)..(178): Homolog of NCBI NO: 15242979 NR Description: putative protein; protein id: At5g22790.1, by cDNA: gi_13605898, supported by cDNA: gi_19548024 [Arabidopsis >gi|9758754|dbj|BAB09278.1| gb|AAF31706.1~gene_id:K8E10.2~similar
  misc_feature (1)..(167): Homolog of NCBI NO: 34395170 NR Description: chloroplast lumen common protein family-like
  misc_feature (1)..(167): Homolog of NCBI NO: 6934300 NR Description: unknown [Euphorbia esula]
  misc_feature (1)..(167): Homolog of NCBI NO: 30687286 NR Description: expressed protein [Arabidopsis thaliana]
MNIRKERFKQEWDLVIVNALTAACCNLMVLGLLAPCRSYASTSRFDFQNAIEKLPNNIFEKSYPLREFDLAKRISAFFYKAAELSLVGFVAGSVQGGMSIVLSARKERRLSVTIPSISTNALGYGAFLGLYANLRYQLLCGVDQYMVKRFDVLGVAIFFSTAARLINIQIGEASRRTWLGEEADPQYSDRLLRAYKRPVEVDADQSRWFISKDAIVSGLGLLGIKQGGPEATFSKSRRKRVIRKKVTSG

SEQ ID NO: 9432 - protein, 222 aa, Zea mays subsp. mays
  peptide (1)..(222): Ceres Seq. ID no. 12365899
  misc_feature (1)..(221): Homolog of NCBI NO: 9759209 NR Description: gb|AAD25674.1~gene_id:MXC17.8~similar to unknown
  misc_feature (1)..(221): Homolog of NCBI NO: 22327037 NR Description: putative protein; protein id: At5g24690.1, by cDNA: gi_13877882, supported by cDNA: gi_15912312 [Arabidopsis >gi|13877883|gb|AAK44019.1|AF370204_1 unknown protein
  misc_feature (1)..(151): Homolog of NCBI NO: 15242979 NR Description: putative protein; protein id: At5g22790.1, by cDNA: gi_13605898, supported by cDNA: gi_19548024 [Arabidopsis >gi|9758754|dbj|BAB09278.1| gb|AAF31706.1~gene_id:K8E10.2~similar
  misc_feature (1)..(140): Homolog of NCBI NO: 34395170 NR Description: chloroplast lumen common protein family-like
  misc_feature (1)..(140): Homolog of NCBI NO: 6934300 NR Description: unknown [Euphorbia esula]
  misc_feature (1)..(140): Homolog of NCBI NO: 30687286 NR Description: expressed protein [Arabidopsis thaliana]
MVLGLLAPCRSYASTSRFDFQNAIEKLPNNIFEKSYPLREFDLAKRISAFFYKAAELSLVGFVAGSVQGGMSIVLSARKERRLSVTIPSISTNALGYGAFLGLYANLRYQLLCGVDQYMVKRFDVLGVAIFFSTAARLINIQIGEASRRTWLGEEADPQYSDRLLRAYKRPVEVDADQSRWFISKDAIVSGLGLLGIKQGGPEATFSKSRRKRVIRKKVTSG

SEQ ID NO: 9433 - DNA, 1122 bp, Zea mays subsp. mays
  misc_feature (1)..(1122): Ceres Seq. ID no. 13495286
  misc_feature: MA Experiment ID: 108527 Result: Down-regulated in Transcription
  misc_feature: MA Experiment 108527 PARAMETER Experiment Name: Zm_5mM_NO_P Parameter: Age (day) Value: 8
  misc_feature: MA Experiment 108527 PARAMETER Experiment Name: Zm_5mM_NO_P Parameter: Organism Value: Zea mays
  misc_feature: MA Experiment 108527 PARAMETER Experiment Name: Zm_5mM_NO_P Parameter: Plant Line Value: 35A19
  misc_feature: MA Experiment 108527 PARAMETER Experiment Name: Zm_5mM_NO_P Parameter: Timepoint (hr) Value: 6
  misc_feature: MA Experiment 108527 PARAMETER Experiment Name: Zm_5mM_NO_P Parameter: Tissue Value: Aerial
  misc_feature: MA Experiment 108527 PARAMETER Experiment Name: Zm_5mM_NO_P Parameter: Treatment Value: 5mM NO vs. No Treatment
  misc_feature: MA Experiment ID: 108528 Result: Up-regulated in Transcription
  misc_feature: MA Experiment 108528 PARAMETER Experiment Name: Zm_Imbibed_Seeds_P Parameter: Age (day) Value: 5 vs. 2
  misc_feature: MA Experiment 108528 PARAMETER Experiment Name: Zm_Imbibed_Seeds_P Parameter: Organism Value: Zea mays
  misc_feature: MA Experiment 108528 PARAMETER Experiment Name: Zm_Imbibed_Seeds_P Parameter: Plant Line Value: 35A19
  misc_feature: MA Experiment 108528 PARAMETER Experiment Name: Zm_Imbibed_Seeds_P Parameter: Tissue Value: Aerial vs. Embryo
  misc_feature: MA Experiment ID: 108530 Result: Up-regulated in Transcription
  misc_feature: MA Experiment 108530 PARAMETER Experiment Name: Zm_Imbibed_Seeds_P Parameter: Age (day) Value: 6 vs. 2
  misc_feature: MA Experiment 108530 PARAMETER Experiment Name: Zm_Imbibed_Seeds_P Parameter: Organism Value: Zea mays
  misc_feature: MA Experiment 108530 PARAMETER Experiment Name: Zm_Imbibed_Seeds_P Parameter: Plant Line Value: 35A19
  misc_feature: MA Experiment 108530 PARAMETER Experiment Name: Zm_Imbibed_Seeds_P Parameter: Tissue Value: Aerial vs. Embryo
  misc_feature: MA Experiment ID: 108536 Result: Down-regulated in Transcription
  misc_feature: MA Experiment 108536 PARAMETER Experiment Name: Zm_Meristem_P Parameter: Age (day) Value: 8
  misc_feature: MA Experiment 108536 PARAMETER Experiment Name: Zm_Meristem_P Parameter: Organism Value: Zea mays
  misc_feature: MA Experiment 108536 PARAMETER Experiment Name: Zm_Meristem_P Parameter: Plant Line Value: 35A19
  misc_feature: MA Experiment 108536 PARAMETER Experiment Name: Zm_Meristem_P Parameter: Tissue Value: Shoot Meristem vs. Above Shoot Meristem
  misc_feature: MA Experiment ID: 108547 Result: Up-regulated in Transcription
  misc_feature: MA Experiment 108547 PARAMETER Experiment Name: Zm_Imbibed_Seeds_P Parameter: Age (day) Value: 4 vs. 2
  misc_feature: MA Experiment 108547 PARAMETER Experiment Name: Zm_Imbibed_Seeds_P Parameter: Organism Value: Zea mays
  misc_feature: MA Experiment 108547 PARAMETER Experiment Name: Zm_Imbibed_Seeds_P Parameter: Plant Line Value: 35A19
  misc_feature: MA Experiment 108547 PARAMETER Experiment Name: Zm_Imbibed_Seeds_P Parameter: Tissue Value: Aerial vs. Embryo
  misc_feature: MA Experiment ID: 20000626 Result: Down-regulated in Transcription
  misc_feature: MA Experiment 20000626 PARAMETER Experiment Name: Zm_Herbicide-Treatments_P Parameter: Timepoint (hr) Value: 12
  misc_feature: MA Experiment 20000626 PARAMETER Experiment Name: Zm_Herbicide-Treatments_P Parameter: Tissue Value: Aerial
  misc_feature: MA Experiment 20000626 PARAMETER Experiment Name: Zm_Herbicide-Treatments_P Parameter: Treatment Value: Roundup vs. No Treatment
  misc_feature: MA Experiment ID: 20000630 Result: Down-regulated in Transcription
  misc_feature: MA Experiment 20000630 PARAMETER Experiment Name: Zm_Herbicide-Treatments_P Parameter: Timepoint (hr) Value: 4
  misc_feature: MA Experiment 20000630 PARAMETER Experiment Name: Zm_Herbicide-Treatments_P Parameter: Tissue Value: Aerial
  misc_feature: MA Experiment 20000630 PARAMETER Experiment Name: Zm_Herbicide-Treatments_P Parameter: Treatment Value: Roundup vs. No Treatment
aaactcctcgctatcctcttccaatccgaaccacccggactcccggagcaagcggccgccggctaagcagacacgaacgcaggtccggcggcaatgcaacgcgccgcgctcgtcgggtcccctctcgtacctgtgggtccccttgctcagcttgccgtgcggcgccgctgccgcttccatggtggtgttcgcgtgaggtcctcaaccgggaaggacgggaccgggactgggaccgggggcggaagcgagggcggcgacggcgccggtgccgcagcgtcttggctgagctcggcggtcggggagaaagtggacgagcttctgcgccgcgaagagaaccgggccctgctcgagggcgtcgaggacgccgagcgccgcgttgagcgcgcgcgcgccgcgctcgccgacatcgagcgccaggaggccgccgcacgcctcgcccgcgaggaggtccgccgcctcgagaagcggcgcgatgagattgcagagtcccagcgggaattgcttcaagcaagagaaatgattgatgaagctcagcgatccttgtcttctagtcttgacgaaggaagctttggagatatgtcaagtggtgatgttgatgaagataacgagagaatagaatccgtaaaagctgctgcagtttcctctgtcgtcggtgttctggctagtttgcccatatctttctatgaagttgaagatcttccacaactattccttcggtcatcaattgttttcataagttgtgctttgtttggagtcacattccggtacgctgttagaagagatctggataatatccaactaaaaactggggctcctgcagcatttgcttttgttagaggccttgctctgctggaatctggtagaaccttcgagctgagtactgataccttaatatcagttactcttgatgctgcagtcagtgtggttgagaacattttcatatttctgcctgctgctgttgcactggactactgttttaagatgagatttttgagtccctttcctagaagaaaacaatagcttctgtgaagaatatgtatgatcaatagcaatcttgatagctcaaatggtcatatgtaacacaagtgatatcttagattcattaaaaaaacatttcccccc

SEQ ID NO: 9434 - protein, 308 aa, Zea mays subsp. mays
  peptide (1)..(308): Ceres Seq. ID no. 13495287
  misc_feature (33)..(304): Homolog of NCBI NO: 30686406 NR Description: expressed protein [Arabidopsis thaliana]
  misc_feature (33)..(304): Homolog of NCBI NO: 28393641 NR Description: unknown protein [Arabidopsis thaliana]
  misc_feature (33)..(304): Homolog of NCBI NO: 7487177 NR Description: hypothetical protein T19F6.80 - Arabidopsis >gi|5668637|emb|CAB51652.1| hypothetical protein [Arabidopsis >gi|7269258|emb|CAB81327.1| hypothetical protein [Arabidopsis
MQRAALVGSPLVPVGPLAQLAVRRRCRFHGGVRVRSSTGKDGTGTGTGGGSEGGDGAGAAASWLSSAVGEKVDELLRREENRALLEGVEDAERRVERARAALADIERQEAAARLAREEVRRLEKRRDEIAESQRELLQAREMIDEAQRSLSSSLDEGSFGDMSSGDVDEDNERIESVKAAAVSSVVGVLASLPISFYEVEDLPQLFLRSSIVFISCALFGVTFRYAVRRDLDNIQLKTGAPAAFAFVRGLALLESGRTFELSTDTLISVTLDAAVSVVENIFIFLPAAVALDYCFKMRFLSPFPRRKQ

SEQ ID NO: 9435 - protein, 167 aa, Zea mays subsp. mays
  peptide (1)..(167): Ceres Seq. ID no. 13495288
  misc_feature (1)..(163): Homolog of NCBI NO: 30686406 NR Description: expressed protein [Arabidopsis thaliana]
  misc_feature (1)..(163): Homolog of NCBI NO: 28393641 NR Description: unknown protein [Arabidopsis thaliana]
  misc_feature (1)..(163): Homolog of NCBI NO: 7487177 NR Description: hypothetical protein T19F6.80 - Arabidopsis >gi|5668637|emb|CAB51652.1| hypothetical protein [Arabidopsis >gi|7269258|emb|CAB81327.1| hypothetical protein [Arabidopsis
MIDEAQRSLSSSLDEGSFGDMSSGDVDEDNERIESVKAAAVSSVVGVLASLPISFYEVEDLPQLFLRSSIVFISCALFGVTFRYAVRRDLDNIQLKTGAPAAFAFVRGLALLESGRTFELSTDTLISVTLDAAVSVVENIFIFLPAAVALDYCFKMRFLSPFPRRKQ

SEQ ID NO: 9436 - DNA, 913 bp, Zea mays subsp. mays
  misc_feature (1)..(913): Ceres Seq. ID no. 12415447
  misc_feature: MA Experiment ID: 108687 Result: Down-regulated in Transcription
  misc_feature: MA Experiment 108687 PARAMETER Experiment Name: Zm_Embryos-Flowers__P Parameter: Tissue Value: Embryo vs. Aerial+
gcacgagaccattacctagaacatcctaatcgaaaagtataaccagctagagtagcttggtagctaggctcggctcgctagcgagctcgtcgatccaatccatcgctcgttcgtccactataacaatcgacgacgtgtacgatggcagctgcggcggcgccgaggcccaagtcgccgcctgcctcgccggacccctgcggccgccaccgcctccagctcgccgtcgacgcgctccaccgggagatcggcttcctcgagggcgaaataagttccatcgagggggtccacgctgcctccagatgctgcaaagaggttgatgagttcgttggaaggaacccggatccgttcctaacgattcagcaagagagaggaagccacgatcaatctcagcagtttctgaagaagttccgaggaaagagctgcctgagctactacctctcgtggatctncggtggcgggtggtggtgcccgccgccgttgcagctcaagaggccaccggcgccgagctgctcctgcgcgccgcggctggggaagctctgctcctccaccgcctcctcctgctgcagctgttgctgctgccggttccgcgtcgtgtacgccgccgccggctgcgggtgctgcgcgccgtgcccgcgctgctcgtgcgactgcacctgcgcctgcccgcgctgctgctcctgcgcctgccccatgtgcagcgccgcgtgctgcgccccgcgctgctgcctgtgcctatgatggccatgagaaattttgcgtgcatgctagtagtagtagtacctggagatgatgatggatgactggcattttgcagcatggttttttttttgtttagtttcggcgacacgagtactgttgtaactggctgtacgtggctgatctggttagtgctggtgaatggtgtcgattccgc

SEQ ID NO: 9437 - protein, 198 aa, Zea mays subsp. mays
  peptide (1)..(198): Ceres Seq. ID no. 12415448
  misc_feature (122)..(197): Pfam Name: Keratin, high sulfur B2 protein Pfam Description: Keratin, high sulfur B2 protein
  misc_feature (1)..(57): Homolog of NCBI NO: 30017557 NR Description: hypothetical protein [Oryza sativa (japonica
  misc_feature (120)..(197): Homolog of NCBI NO: 21356647 NR Description: PFTAIRE-interacting factor 2 [Drosophila
  misc_feature (121)..(197): Homolog of NCBI NO: 21356647 NR Description: PFTAIRE-interacting factor 2 [Drosophila
  misc_feature (120)..(197): Homolog of NCBI NO: 21356647 NR Description: PFTAIRE-interacting factor 2 [Drosophila
  misc_feature (125)..(197): Homolog of NCBI NO: 21356647 NR Description: PFTAIRE-interacting factor 2 [Drosophila
  misc_feature (128)..(197): Homolog of NCBI NO: 39592063 NR Description: Hypothetical protein CBG23250 [Caenorhabditis
  misc_feature (140)..(197): Homolog of NCBI NO: 17531545 NR Description: Putative protein, nematode specific (15.6 kD)
  misc_feature (114)..(197): Homolog of NCBI NO: 17532099 NR Description: Putative secreted or extracellular protein family precursor, nematode specific [Caenorhabditis elegans]
  misc_feature (141)..(197): Homolog of NCBI NO: 17531545 NR Description: Putative protein, nematode specific (15.6 kD)
  misc_feature (114)..(197): Homolog of NCBI NO: 17531493 NR Description: Putative protein, nematode specific elegans] >gi|14573757|gb|AAK68158.1|U55854_2 Hypothetical protein
  misc_feature (103)..(103): Xaa is any aa, unknown or other
MAAAAAPRPKSPPASPDPCGRHRLQLAVDALHREIGFLEGEISSIEGVHAASRCCKEVDEFVGRNPDPFLTIQQERGSHDQSQQFLKKFRGKSCLSYYLSWIXGGGWWCPPPLQLKRPPAPSCSCAPRLGKLCSSTASSCCSCCCCRFRVVYAAAGCGCCAPCPRCSCDCTCACPRCCSCACPMCSAACCAPRCCLCL

SEQ ID NO: 9438 - DNA, 1176 bp, Zea mays subsp. mays
  misc_feature (1)..(1176): Ceres Seq. ID no. 12416015
  misc_feature: MA Experiment ID: 108535 Result: Down-regulated in Transcription
  misc_feature: MA Experiment 108535 PARAMETER Experiment Name: Zm_Meristem_P Parameter: Age (day) Value: 8
  misc_feature: MA Experiment 108535 PARAMETER Experiment Name: Zm_Meristem_P Parameter: Organism Value: Zea mays
  misc_feature: MA Experiment 108535 PARAMETER Experiment Name: Zm_Meristem_P Parameter: Plant Line Value: 35A19
  misc_feature: MA Experiment 108535 PARAMETER Experiment Name: Zm_Meristem_P Parameter: Tissue Value: Root Meristem vs. Above Root Meristem
  misc_feature: MA Experiment ID: 108544 Result: Down-regulated in Transcription
  misc_feature: MA Experiment ID: 20000479 Result: Down-regulated in Transcription
  misc_feature: MA Experiment 20000479 PARAMETER Experiment Name: Zm_Drought_P Parameter: Age (day) Value: 10
  misc_feature: MA Experiment 20000479 PARAMETER Experiment Name: Zm_Drought_P Parameter: Organism Value: Zea mays
  misc_feature: MA Experiment 20000479 PARAMETER Experiment Name: Zm_Drought_P Parameter: Plant Line Value: 35A19
  misc_feature: MA Experiment 20000479 PARAMETER Experiment Name: Zm_Drought_P Parameter: Timepoint (hr) Value: 48
  misc_feature: MA Experiment 20000479 PARAMETER Experiment Name: Zm_Drought_P Parameter: Tissue Value: Aerial
  misc_feature: MA Experiment 20000479 PARAMETER Experiment Name: Zm_Drought_P Parameter: Treatment Value: Drought vs. No Drought
  misc_feature: MA Experiment ID: 20000480 Result: Down-regulated in Transcription
  misc_feature: MA Experiment 20000480 PARAMETER Experiment Name: Zm_Drought_P Parameter: Age (day) Value: 11
  misc_feature: MA Experiment 20000480 PARAMETER Experiment Name: Zm_Drought_P Parameter: Organism Value: Zea mays
  misc_feature: MA Experiment 20000480 PARAMETER Experiment Name: Zm_Drought_P Parameter: Plant Line Value: 35A19
  misc_feature: MA Experiment 20000480 PARAMETER Experiment Name: Zm_Drought_P Parameter: Timepoint (hr) Value: 72
  misc_feature: MA Experiment 20000480 PARAMETER Experiment Name: Zm_Drought_P Parameter: Tissue Value: Aerial
  misc_feature: MA Experiment 20000480 PARAMETER Experiment Name: Zm_Drought_P Parameter: Treatment Value: Drought vs. No Drought
cgcaattaaccctcactaaagggaacaaaagctggagctccaccgcggtggcggccgctctagaactagtggatcccccgggctgcaggaattcgcacgagaccattacctagaacatcctaatcgaaaaagattataaggcgaagagccgtcgtgatcaccagacgagttaccagaccaagccgcagcaggaatttctcagatgtctaaagccaagcttcctcacgtcgagacggattcttccggcgacgacgatgggccgaagccaaggctagtgttccgtagacgcatgcgcacaccagttaagctgctcggtggccggaaagtctcggacgtcctgctatggaggaacaggaacctgtcagcggggatcctcgcgggggcgacgctggtctggttcctgttcgacgtggcggagtacaacgtggtgacgctcctttgccacgtcgcgctgctcgggatggtcctgctcttcgtctggtccaacgccgcgcctctccttgacaggccgcctccacagatcccggaggtgatcgtttctgaacacgcgttcagagaagctgcgcggaccacccattacagactggctcactttgtatccgtcctctacgacgttgcgtgcgggaaggatctcaagaagttcctcatggtgattggttctctgtggatactggcgatacttggagacacatgcagcttcacgacgctgttatatggcgggcttttgtgtgctctgactttaccggcgctgtacgagagatacgaagccgaggtggaccatcttgtggccaagggacgcgaagacctcaagaaattctacaggaaggttgactccaacgtgctcaacaagataccaagaggccctgtcaagacaaaggctctctgatcaagatgtgtgctttgtcaaattgccggtgcacgccggcagtcccgtacataaaagaaaaacagtaaccagtgtcaccagaccatctcaaatcagtttttatggtatctgattgtacgtgctagactactgctgcaatgatccaccatactttaccgtgtcagcagtaaacaagcctaaaatctgaagtaatttattcgtaaaaaaacaaataggtactggaagattgtaagtgttgccaaaacggaaaagtggcgaataaaaatctgaggtcattcggtgtgggacct

SEQ ID NO: 9439 - protein, 227 aa, Zea mays subsp. mays
  peptide (1)..(227): Ceres Seq. ID no. 12416016
  misc_feature (25)..(225): Homolog of NCBI NO: 34904202 NR Description: P0492F05.25 [Oryza sativa (japonica
  misc_feature (23)..(225): Homolog of NCBI NO: 34909318 NR Description: OSJNBb0021A09.5 [Oryza sativa (japonica
  misc_feature (11)..(225): Homolog of NCBI NO: 18401821 NR Description: expressed protein; protein id: At3g18260.1, by cDNA: 33183. [Arabidopsis thaliana]
  misc_feature (11)..(225): Homolog of NCBI NO: 21592845 NR Description: unknown [Arabidopsis thaliana]
  misc_feature (10)..(225): Homolog of NCBI NO: 15237093 NR Description: putative protein; protein id: At4g11220.1, by cDNA: 23536., supported by cDNA: gi_14334419, supported by gi_15081760, supported by cDNA: gi_16209686 [Arabidopsis
  misc_feature (33)..(225): Homolog of NCBI NO: 15236556 NR Description: putative protein; protein id: At4g23630.1, by cDNA: 39185., supported by cDNA: gi_15215585 [Arabidopsis
  misc_feature (1)..(226): Homolog of NCBI NO: 18406991 NR Description: expressed protein; protein id: At2g46170.1, by cDNA: gi_15450758, supported by cDNA: gi_18491130 [Arabidopsis >gi|25408969|pir||E84899 hypothetical protein At2g46170
  misc_feature (11)..(220): Homolog of NCBI NO: 15222616 NR Description: hypothetical protein; protein id: At1g64090.1, by cDNA: gi_17381217 [Arabidopsis thaliana] F22C12.15 [Arabidopsis thaliana] >gi|17381218|gb|AAL36421.1|
  misc_feature (1)..(225): Homolog of NCBI NO: 15238125 NR Description: putative protein; protein id: At5g41600.1, by cDNA: gi_14334529, supported by cDNA: gi_16323068 [Arabidopsis >gi|10178014|dbj|BAB11466.1| contains similarity to 24 kDa seed
  misc_feature (36)..(225): Homolog of NCBI NO: 34899590 NR Description: hypothetical protein~similar to Oryza sativa
MSKAKLPHVETDSSGDDDGPKPRLVFRRRMRTPVKLLGGRKVSDVLLWRNRNLSAGILAGATLVWFLFDVAEYNVVTLLCHVALLGMVLLFVWSNAAPLLDRPPPQIPEVIVSEHAFREAARTTHYRLAHFVSVLYDVACGKDLKKFLMVIGSLWILAILGDTCSFTTLLYGGLLCALTLPALYERYEAEVDHLVAKGREDLKKFYRKVDSNVLNKIPRGPVKTKAL

SEQ ID NO: 9440 - protein, 198 aa, Zea mays subsp. mays
  peptide (1)..(198): Ceres Seq. ID no. 12416017
  misc_feature (1)..(196): Homolog of NCBI NO: 34904202 NR Description: P0492F05.25 [Oryza sativa (japonica
  misc_feature (1)..(196): Homolog of NCBI NO: 34909318 NR Description: OSJNBb0021A09.5 [Oryza sativa (japonica
  misc_feature (1)..(196): Homolog of NCBI NO: 18401821 NR Description: expressed protein; protein id: At3g18260.1, by cDNA: 33183. [Arabidopsis thaliana]
  misc_feature (1)..(196): Homolog of NCBI NO: 21592845 NR Description: unknown [Arabidopsis thaliana]
  misc_feature (1)..(196): Homolog of NCBI NO: 15237093 NR Description: putative protein; protein id: At4g11220.1, by cDNA: 23536., supported by cDNA: gi_14334419, supported by gi_15081760, supported by cDNA: gi_16209686 [Arabidopsis
  misc_feature (4)..(196): Homolog of NCBI NO: 15236556 NR Description: putative protein; protein id: At4g23630.1, by cDNA: 39185., supported by cDNA: gi_15215585 [Arabidopsis
  misc_feature (1)..(197): Homolog of NCBI NO: 18406991 NR Description: expressed protein; protein id: At2g46170.1, by cDNA: gi_15450758, supported by cDNA: gi_18491130 [Arabidopsis >gi|25408969|pir||E84899 hypothetical protein At2g46170
  misc_feature (1)..(191): Homolog of NCBI NO: 15222616 NR Description: hypothetical protein; protein id: At1g64090.1, by cDNA: gi_17381217 [Arabidopsis thaliana] F22C12.15 [Arabidopsis thaliana] >gi|17381218|gb|AAL36421.1|
  misc_feature (1)..(196): Homolog of NCBI NO: 15238125 NR Description: putative protein; protein id: At5g41600.1, by cDNA: gi_14334529, supported by cDNA: gi_16323068 [Arabidopsis >gi|10178014|dbj|BAB11466.1| contains similarity to 24 kDa seed
  misc_feature (7)..(196): Homolog of NCBI NO: 34899590 NR Description: hypothetical protein~similar to Oryza sativa
MRTPVKLLGGRKVSDVLLWRNRNLSAGILAGATLVWFLFDVAEYNVVTLLCHVALLGMVLLFVWSNAAPLLDRPPPQIPEVIVSEHAFREAARTTHYRLAHFVSVLYDVACGKDLKKFLMVIGSLWILAILGDTCSFTTLLYGGLLCALTLPALYERYEAEVDHLVAKGREDLKKFYRKVDSNVLNKIPRGPVKTKAL

SEQ ID NO: 9441 - protein, 141 aa, Zea mays subsp. mays
  peptide (1)..(141): Ceres Seq. ID no. 12416018
  misc_feature (1)..(139): Homolog of NCBI NO: 34904202 NR Description: P0492F05.25 [Oryza sativa (japonica
  misc_feature (1)..(139): Homolog of NCBI NO: 34909318 NR Description: OSJNBb0021A09.5 [Oryza sativa (japonica
  misc_feature (1)..(139): Homolog of NCBI NO: 18401821 NR Description: expressed protein; protein id: At3g18260.1, by cDNA: 33183. [Arabidopsis thaliana]
  misc_feature (1)..(139): Homolog of NCBI NO: 21592845 NR Description: unknown [Arabidopsis thaliana]
  misc_feature (1)..(139): Homolog of NCBI NO: 15237093 NR Description: putative protein; protein id: At4g11220.1, by cDNA: 23536., supported by cDNA: gi_14334419, supported by gi_15081760, supported by cDNA: gi_16209686 [Arabidopsis
  misc_feature (1)..(139): Homolog of NCBI NO: 15236556 NR Description: putative protein; protein id: At4g23630.1, by cDNA: 39185., supported by cDNA: gi_15215585 [Arabidopsis
  misc_feature (1)..(140): Homolog of NCBI NO: 18406991 NR Description: expressed protein; protein id: At2g46170.1, by cDNA: gi_15450758, supported by cDNA: gi_18491130 [Arabidopsis >gi|25408969|pir||E84899 hypothetical protein At2g46170
  misc_feature (1)..(134): Homolog of NCBI NO: 15222616 NR Description: hypothetical protein; protein id: At1g64090.1, by cDNA: gi_17381217 [Arabidopsis thaliana] F22C12.15 [Arabidopsis thaliana] >gi|17381218|gb|AAL36421.1|
  misc_feature (1)..(139): Homolog of NCBI NO: 15238125 NR Description: putative protein; protein id: At5g41600.1, by cDNA: gi_14334529, supported by cDNA: gi_16323068 [Arabidopsis >gi|10178014|dbj|BAB11466.1| contains similarity to 24 kDa seed
  misc_feature (1)..(139): Homolog of NCBI NO: 34899590 NR Description: hypothetical protein~similar to Oryza sativa
MVLLFVWSNAAPLLDRPPPQIPEVIVSEHAFREAARTTHYRLAHFVSVLYDVACGKDLKKFLMVIGSLWILAILGDTCSFTTLLYGGLLCALTLPALYERYEAEVDHLVAKGREDLKKFYRKVDSNVLNKIPRGPVKTKAL

SEQ ID NO: 9442 - DNA, 1284 bp, Zea mays subsp. mays
  misc_feature (1)..(1284): Ceres Seq. ID no. 12354326
  misc_feature: MA Experiment ID: 108527 Result: Down-regulated in Transcription
  misc_feature: MA Experiment 108527 PARAMETER Experiment Name: Zm_5mM_NO_P Parameter: Age (day) Value: 8
  misc_feature: MA Experiment 108527 PARAMETER Experiment Name: Zm_5mM_NO_P Parameter: Organism Value: Zea mays
  misc_feature: MA Experiment 108527 PARAMETER Experiment Name: Zm_5mM_NO_P Parameter: Plant Line Value: 35A19
  misc_feature: MA Experiment 108527 PARAMETER Experiment Name: Zm_5mM_NO_P Parameter: Timepoint (hr) Value: 6
  misc_feature: MA Experiment 108527 PARAMETER Experiment Name: Zm_5mM_NO_P Parameter: Tissue Value: Aerial
  misc_feature: MA Experiment 108527 PARAMETER Experiment Name: Zm_5mM_NO_P Parameter: Treatment Value: 5mM NO vs. No Treatment
  misc_feature: MA Experiment ID: 108528 Result: Up-regulated in Transcription
  misc_feature: MA Experiment 108528 PARAMETER Experiment Name: Zm_Imbibed_Seeds_P Parameter: Age (day) Value: 5 vs. 2
  misc_feature: MA Experiment 108528 PARAMETER Experiment Name: Zm_Imbibed_Seeds_P Parameter: Organism Value: Zea mays
  misc_feature: MA Experiment 108528 PARAMETER Experiment Name: Zm_Imbibed_Seeds_P Parameter: Plant Line Value: 35A19
  misc_feature: MA Experiment 108528 PARAMETER Experiment Name: Zm_Imbibed_Seeds_P Parameter: Tissue Value: Aerial vs. Embryo
  misc_feature: MA Experiment ID: 108530 Result: Up-regulated in Transcription
  misc_feature: MA Experiment 108530 PARAMETER Experiment Name: Zm_Imbibed_Seeds_P Parameter: Age (day) Value: 6 vs. 2
  misc_feature: MA Experiment 108530 PARAMETER Experiment Name: Zm_Imbibed_Seeds_P Parameter: Organism Value: Zea mays
  misc_feature: MA Experiment 108530 PARAMETER Experiment Name: Zm_Imbibed_Seeds_P Parameter: Plant Line Value: 35A19
  misc_feature: MA Experiment 108530 PARAMETER Experiment Name: Zm_Imbibed_Seeds_P Parameter: Tissue Value: Aerial vs. Embryo
  misc_feature: MA Experiment ID: 108547 Result: Up-regulated in Transcription
  misc_feature: MA Experiment 108547 PARAMETER Experiment Name: Zm_Imbibed_Seeds_P Parameter: Age (day) Value: 4 vs. 2
  misc_feature: MA Experiment 108547 PARAMETER Experiment Name: Zm_Imbibed_Seeds_P Parameter: Organism Value: Zea mays
  misc_feature: MA Experiment 108547 PARAMETER Experiment Name: Zm_Imbibed_Seeds_P Parameter: Plant Line Value: 35A19
  misc_feature: MA Experiment 108547 PARAMETER Experiment Name: Zm_Imbibed_Seeds_P Parameter: Tissue Value: Aerial vs. Embryo
  misc_feature: MA Experiment ID: 108559 Result: Down-regulated in Transcription
  misc_feature: MA Experiment 108559 PARAMETER Experiment Name: Zm_5mM_NO_P Parameter: Age (day) Value: 8
  misc_feature: MA Experiment 108559 PARAMETER Experiment Name: Zm_5mM_NO_P Parameter: Organism Value: Zea mays
  misc_feature: MA Experiment 108559 PARAMETER Experiment Name: Zm_5mM_NO_P Parameter: Plant Line Value: 35A19
  misc_feature: MA Experiment 108559 PARAMETER Experiment Name: Zm_5mM_NO_P Parameter: Timepoint (hr) Value: 12
  misc_feature: MA Experiment 108559 PARAMETER Experiment Name: Zm_5mM_NO_P Parameter: Tissue Value: Aerial
  misc_feature: MA Experiment 108559 PARAMETER Experiment Name: Zm_5mM_NO_P Parameter: Treatment Value: 5mM NO vs. No Treatment
  misc_feature: MA Experiment ID: 108688 Result: Down-regulated in Transcription
  misc_feature: MA Experiment 108688 PARAMETER Experiment Name: Zm_Embryos-Flowers__P Parameter: Tissue Value: Immature Flowers vs. Aerial+
  misc_feature: MA Experiment ID: 108689 Result: Down-regulated in Transcription
  misc_feature: MA Experiment 108689 PARAMETER Experiment Name: Zm_Drought_Roots_P Parameter: Age (day) Value: 9
  misc_feature: MA Experiment 108689 PARAMETER Experiment Name: Zm_Drought_Roots_P Parameter: Organism Value: Zea mays
  misc_feature: MA Experiment 108689 PARAMETER Experiment Name: Zm_Drought_Roots_P Parameter: Plant Line Value: 35A19
  misc_feature: MA Experiment 108689 PARAMETER Experiment Name: Zm_Drought_Roots_P Parameter: Timepoint (hr) Value: 24
  misc_feature: MA Experiment 108689 PARAMETER Experiment Name: Zm_Drought_Roots_P Parameter: Tissue Value: Roots
  misc_feature: MA Experiment 108689 PARAMETER Experiment Name: Zm_Drought_Roots_P Parameter: Treatment Value: Drought vs. No Drought
  misc_feature: MA Experiment ID: 20000479 Result: Down-regulated in Transcription
  misc_feature: MA Experiment 20000479 PARAMETER Experiment Name: Zm_Drought_P Parameter: Age (day) Value: 10
  misc_feature: MA Experiment 20000479 PARAMETER Experiment Name: Zm_Drought_P Parameter: Organism Value: Zea mays
  misc_feature: MA Experiment 20000479 PARAMETER Experiment Name: Zm_Drought_P Parameter: Plant Line Value: 35A19
  misc_feature: MA Experiment 20000479 PARAMETER Experiment Name: Zm_Drought_P Parameter: Timepoint (hr) Value: 48
  misc_feature: MA Experiment 20000479 PARAMETER Experiment Name: Zm_Drought_P Parameter: Tissue Value: Aerial
  misc_feature: MA Experiment 20000479 PARAMETER Experiment Name: Zm_Drought_P Parameter: Treatment Value: Drought vs. No Drought
  misc_feature: MA Experiment ID: 20001608 Result: Up-regulated in Transcription
  misc_feature: MA Experiment 20001608 PARAMETER Experiment Name: Zm_50ppm_KNO3_L-to-H_P Parameter: Age (day) Value: 21
  misc_feature: MA Experiment 20001608 PARAMETER Experiment Name: Zm_50ppm_KNO3_L-to-H_P Parameter: Organism Value: Zea mays
  misc_feature: MA Experiment 20001608 PARAMETER Experiment Name: Zm_50ppm_KNO3_L-to-H_P Parameter: Plant Line Value: 35A19
  misc_feature: MA Experiment 20001608 PARAMETER Experiment Name: Zm_50ppm_KNO3_L-to-H_P Parameter: Timepoint (hr) Value: 48
  misc_feature: MA Experiment 20001608 PARAMETER Experiment Name: Zm_50ppm_KNO3_L-to-H_P Parameter: Tissue Value: Shoots
  misc_feature: MA Experiment 20001608 PARAMETER Experiment Name: Zm_50ppm_KNO3_L-to-H_P Parameter: Treatment Value: 50ppm KNO3 vs. 50ppm KCl
ctagccagcggccagcccgtccgccagcgagaggtcaaaaactactacgagccaaaaactggagcccagggaaagcgacgagcaaaccaaacatggcggcgatcctcgcgcgcgccggcgtcatcgccaccgccggcaaaggtttctcgggccgccgccggggcaatggtatcgtcgtcgcggcggtcactaaaacgggggctgctgtgccacaggagggggcgctggaacggccggcgtggtccggcgagaccacgctgtcgcgtctggttggcgcgctcatcgcgttcaagccgctctactcggtattgaagctcgcctcccgcgaggtcatcatcaggacggcggagaagtcgaacatcccgtggagggagatgacgaaggaggtgctggagtcggacgtgtacgaggtgttcgagagaatccaagacccaaacctcgtgtaccctgactactatctcaacccgtttcatgcctacgacgaagggaatctatcatggctggctgcagcagaggccgagccggcaacaatgtcaatcgcaaagagggcaatacctgaggctacatcaatcgaagaggccaaccaaatcgtccgcggcaactggctgaatgtaattgaggagcatcatctgaagtactcggggaactgtcaggtaaacgacatcctggacattggctgctctgttggagtaagcaccagatacctcgccgagaagttcccatcagctcaagctgttgggctcgacctatcaccgtactttcttgctgtggcggcacaaaaggaagaaaaactgtcacgaccaaagcctattcgctgggttcatgccaatggtgaagcgaccgggctatcttcagattcatttgaccttgtctcccttgcttatgtgtgccatgagtgcccagcacgagcaataaccgcattggtgaaggaagcattcagggtccttcgcccaggaggaacaatcgccttaacagacaattcgccgaagtccaaagtacttcaggaactatccccagttttgttcactctgatgaagagtaccgagcctttcctggacgagtactacatgctggatttggaggagacgatgagaaaagtgggctttgttaacgtttgctccgtcctgacagaccccaggcacagaacagtcactgcaaccgtgccttactaattgggtcagaccatcaaatcccaagcccggccggtgtacaacaattgactatttgaaattttgtatccttactggtatggttgcaattgtataaagtagagcaatctgagtg

SEQ ID NO: 9443 - protein, 389 aa, Zea mays subsp. mays
  peptide (1)..(389): Ceres Seq. ID no. 12354327
  misc_feature (328)..(389): Homolog of NCBI NO: 37531718 NR Description: unknown protein [Oryza sativa (japonica >gi|14589368|gb|AAK70623.1| Unknown protein [Oryza sativa] Unknown protein [Oryza sativa] >gi|31430554|gb|AAP52448.1|
  misc_feature (77)..(388): Homolog of NCBI NO: 17230530 NR Description: hypothetical protein [Nostoc sp. PCC 7120]
  misc_feature (87)..(387): Homolog of NCBI NO: 23039316 NR Description: hypothetical protein [Trichodesmium erythraeum
  misc_feature (87)..(387): Homolog of NCBI NO: 23129131 NR Description: hypothetical protein [Nostoc punctiforme]
  misc_feature (87)..(387): Homolog of NCBI NO: 17229577 NR Description: hypothetical protein [Nostoc sp. PCC 7120]
  misc_feature (86)..(385): Homolog of NCBI NO: 37523046 NR Description: hypothetical protein gll3477 [Gloeobacter
  misc_feature (84)..(387): Homolog of NCBI NO: 16332323 NR Description: unknown protein [Synechocystis sp. PCC 6803]
  misc_feature (76)..(383): Homolog of NCBI NO: 33866811 NR Description: conserved hypothetical protein [Synechococcus sp.
  misc_feature (217)..(371): Homolog of NCBI NO: 17231019 NR Description: similar to ubiquinone/menaquinone biosynthesis
  misc_feature (31)..(295): Homolog of NCBI NO: 37531718 NR Description: unknown protein [Oryza sativa (japonica >gi|14589368|gb|AAK70623.1| Unknown protein [Oryza sativa] Unknown protein [Oryza sativa] >gi|31430554|gb|AAP52448.1|
SQRPARPPARGQKLLRAKNWSPGKATSKPNMAAILARAGVIATAGKGFSGRRRGNGIVVAAVTKTGAAVPQEGALERPAWSGETTLSRLVGALIAFKPLYSVLKLASREVIIRTAEKSNIPWREMTKEVLESDVYEVFERIQDPNLVYPDYYLNPFHAYDEGNLSWLAAAEAEPATMSIAKRAIPEATSIEEANQIVRGNWLNVIEEHHLKYSGNCQVNDILDIGCSVGVSTRYLAEKFPSAQAVGLDLSPYFLAVAAQKEEKLSRPKPIRWVHANGEATGLSSDSFDLVSLAYVCHECPARAITALVKEAFRVLRPGGTIALTDNSPKSKVLQELSPVLFTLMKSTEPFLDEYYMLDLEETMRKVGFVNVCSVLTDPRHRTVTATVPY

SEQ ID NO: 9444 - protein, 359 aa, Zea mays subsp. mays
  peptide (1)..(359): Ceres Seq. ID no. 12354328
  misc_feature (1)..(265): Homolog of NCBI NO: 37531718 NR Description: unknown protein [Oryza sativa (japonica >gi|14589368|gb|AAK70623.1| Unknown protein [Oryza sativa] Unknown protein [Oryza sativa] >gi|31430554|gb|AAP52448.1|
  misc_feature (298)..(359): Homolog of NCBI NO: 37531718 NR Description: unknown protein [Oryza sativa (japonica >gi|14589368|gb|AAK70623.1| Unknown protein [Oryza sativa] Unknown protein [Oryza sativa] >gi|31430554|gb|AAP52448.1|
  misc_feature (47)..(358): Homolog of NCBI NO: 17230530 NR Description: hypothetical protein [Nostoc sp. PCC 7120]
  misc_feature (57)..(357): Homolog of NCBI NO: 23039316 NR Description: hypothetical protein [Trichodesmium erythraeum
  misc_feature (57)..(357): Homolog of NCBI NO: 23129131 NR Description: hypothetical protein [Nostoc punctiforme]
  misc_feature (57)..(357): Homolog of NCBI NO: 17229577 NR Description: hypothetical protein [Nostoc sp. PCC 7120]
  misc_feature (56)..(355): Homolog of NCBI NO: 37523046 NR Description: hypothetical protein gll3477 [Gloeobacter
  misc_feature (54)..(357): Homolog of NCBI NO: 16332323 NR Description: unknown protein [Synechocystis sp. PCC 6803]
  misc_feature (46)..(353): Homolog of NCBI NO: 33866811 NR Description: conserved hypothetical protein [Synechococcus sp.
  misc_feature (187)..(341): Homolog of NCBI NO: 17231019 NR Description: similar to ubiquinone/menaquinone biosynthesis
MAAILARAGVIATAGKGFSGRRRGNGIVVAAVTKTGAAVPQEGALERPAWSGETTLSRLVGALIAFKPLYSVLKLASREVIIRTAEKSNIPWREMTKEVLESDVYEVFERIQDPNLVYPDYYLNPFHAYDEGNLSWLAAAEAEPATMSIAKRAIPEATSIEEANQIVRGNWLNVIEEHHLKYSGNCQVNDILDIGCSVGVSTRYLAEKFPSAQAVGLDLSPYFLAVAAQKEEKLSRPKPIRWVHANGEATGLSSDSFDLVSLAYVCHECPARAITALVKEAFRVLRPGGTIALTDNSPKSKVLQELSPVLFTLMKSTEPFLDEYYMLDLEETMRKVGFVNVCSVLTDPRHRTVTATVPY

SEQ ID NO: 9445 - protein, 265 aa, Zea mays subsp. mays
  peptide (1)..(265): Ceres Seq. ID no. 12354329
  misc_feature (1)..(171): Homolog of NCBI NO: 37531718 NR Description: unknown protein [Oryza sativa (japonica >gi|14589368|gb|AAK70623.1| Unknown protein [Oryza sativa] Unknown protein [Oryza sativa] >gi|31430554|gb|AAP52448.1|
  misc_feature (204)..(265): Homolog of NCBI NO: 37531718 NR Description: unknown protein [Oryza sativa (japonica >gi|14589368|gb|AAK70623.1| Unknown protein [Oryza sativa] Unknown protein [Oryza sativa] >gi|31430554|gb|AAP52448.1|
  misc_feature (1)..(264): Homolog of NCBI NO: 17230530 NR Description: hypothetical protein [Nostoc sp. PCC 7120]
  misc_feature (1)..(263): Homolog of NCBI NO: 23039316 NR Description: hypothetical protein [Trichodesmium erythraeum
  misc_feature (1)..(263): Homolog of NCBI NO: 23129131 NR Description: hypothetical protein [Nostoc punctiforme]
  misc_feature (1)..(263): Homolog of NCBI NO: 17229577 NR Description: hypothetical protein [Nostoc sp. PCC 7120]
  misc_feature (1)..(261): Homolog of NCBI NO: 37523046 NR Description: hypothetical protein gll3477 [Gloeobacter
  misc_feature (1)..(263): Homolog of NCBI NO: 16332323 NR Description: unknown protein [Synechocystis sp. PCC 6803]
  misc_feature (1)..(259): Homolog of NCBI NO: 33866811 NR Description: conserved hypothetical protein [Synechococcus sp.
  misc_feature (93)..(247): Homolog of NCBI NO: 17231019 NR Description: similar to ubiquinone/menaquinone biosynthesis
MTKEVLESDVYEVFERIQDPNLVYPDYYLNPFHAYDEGNLSWLAAAEAEPATMSIAKRAIPEATSIEEANQIVRGNWLNVIEEHHLKYSGNCQVNDILDIGCSVGVSTRYLAEKFPSAQAVGLDLSPYFLAVAAQKEEKLSRPKPIRWVHANGEATGLSSDSFDLVSLAYVCHECPARAITALVKEAFRVLRPGGTIALTDNSPKSKVLQELSPVLFTLMKSTEPFLDEYYMLDLEETMRKVGFVNVCSVLTDPRHRTVTATVPY

SEQ ID NO: 9446 - DNA, 843 bp, Zea mays subsp. mays
  misc_feature (1)..(843): Ceres Seq. ID no. 12415746
  misc_feature: MA Experiment ID: 108515 Result: Down-regulated in Transcription
  misc_feature: MA Experiment 108515 PARAMETER Experiment Name: Zm_2mM_SA_P Parameter: Age (day) Value: 8
  misc_feature: MA Experiment 108515 PARAMETER Experiment Name: Zm_2mM_SA_P Parameter: Organism Value: Zea mays
  misc_feature: MA Experiment 108515 PARAMETER Experiment Name: Zm_2mM_SA_P Parameter: Plant Line Value: 35A19
  misc_feature: MA Experiment 108515 PARAMETER Experiment Name: Zm_2mM_SA_P Parameter: Timepoint (hr) Value: 12
  misc_feature: MA Experiment 108515 PARAMETER Experiment Name: Zm_2mM_SA_P Parameter: Tissue Value: Aerial
  misc_feature: MA Experiment 108515 PARAMETER Experiment Name: Zm_2mM_SA_P Parameter: Treatment Value: 2mM SA vs. No Treatment
  misc_feature: MA Experiment ID: 108522 Result: Down-regulated in Transcription
  misc_feature: MA Experiment 108522 PARAMETER Experiment Name: Zm_42deg_Heat_P Parameter: Age (day) Value: 8
  misc_feature: MA Experiment 108522 PARAMETER Experiment Name: Zm_42deg_Heat_P Parameter: Organism Value: Zea mays
  misc_feature: MA Experiment 108522 PARAMETER Experiment Name: Zm_42deg_Heat_P Parameter: Plant Line Value: 35A19
  misc_feature: MA Experiment 108522 PARAMETER Experiment Name: Zm_42deg_Heat_P Parameter: Temperature (deg C) Value: 42 vs. 22
  misc_feature: MA Experiment 108522 PARAMETER Experiment Name: Zm_42deg_Heat_P Parameter: Timepoint (hr) Value: 1
  misc_feature: MA Experiment 108522 PARAMETER Experiment Name: Zm_42deg_Heat_P Parameter: Tissue Value: Aerial
  misc_feature: MA Experiment ID: 108523 Result: Down-regulated in Transcription
  misc_feature: MA Experiment 108523 PARAMETER Experiment Name: Zm_42deg_Heat_P Parameter: Age (day) Value: 8
  misc_feature: MA Experiment 108523 PARAMETER Experiment Name: Zm_42deg_Heat_P Parameter: Organism Value: Zea mays
  misc_feature: MA Experiment 108523 PARAMETER Experiment Name: Zm_42deg_Heat_P Parameter: Plant Line Value: 35A19
  misc_feature: MA Experiment 108523 PARAMETER Experiment Name: Zm_42deg_Heat_P Parameter: Temperature (deg C) Value: 42 vs. 22
  misc_feature: MA Experiment 108523 PARAMETER Experiment Name: Zm_42deg_Heat_P Parameter: Timepoint (hr) Value: 6
  misc_feature: MA Experiment 108523 PARAMETER Experiment Name: Zm_42deg_Heat_P Parameter: Tissue Value: Aerial
  misc_feature: MA Experiment ID: 108527 Result: Down-regulated in Transcription
  misc_feature: MA Experiment 108527 PARAMETER Experiment Name: Zm_5mM_NO_P Parameter: Age (day) Value: 8
  misc_feature: MA Experiment 108527 PARAMETER Experiment Name: Zm_5mM_NO_P Parameter: Organism Value: Zea mays
  misc_feature: MA Experiment 108527 PARAMETER Experiment Name: Zm_5mM_NO_P Parameter: Plant Line Value: 35A19
  misc_feature: MA Experiment 108527 PARAMETER Experiment Name: Zm_5mM_NO_P Parameter: Timepoint (hr) Value: 6
  misc_feature: MA Experiment 108527 PARAMETER Experiment Name: Zm_5mM_NO_P Parameter: Tissue Value: Aerial
  misc_feature: MA Experiment 108527 PARAMETER Experiment Name: Zm_5mM_NO_P Parameter: Treatment Value: 5mM NO vs. No Treatment
  misc_feature: MA Experiment ID: 108535 Result: Down-regulated in Transcription
  misc_feature: MA Experiment 108535 PARAMETER Experiment Name: Zm_Meristem_P Parameter: Age (day) Value: 8
  misc_feature: MA Experiment 108535 PARAMETER Experiment Name: Zm_Meristem_P Parameter: Organism Value: Zea mays
  misc_feature: MA Experiment 108535 PARAMETER Experiment Name: Zm_Meristem_P Parameter: Plant Line Value: 35A19
  misc_feature: MA Experiment 108535 PARAMETER Experiment Name: Zm_Meristem_P Parameter: Tissue Value: Root Meristem vs. Above Root Meristem
  misc_feature: MA Experiment ID: 108543 Result: Up-regulated in Transcription
  misc_feature: MA Experiment ID: 108547 Result: Up-regulated in Transcription
  misc_feature: MA Experiment 108547 PARAMETER Experiment Name: Zm_Imbibed_Seeds_P Parameter: Age (day) Value: 4 vs. 2
  misc_feature: MA Experiment 108547 PARAMETER Experiment Name: Zm_Imbibed_Seeds_P Parameter: Organism Value: Zea mays
  misc_feature: MA Experiment 108547 PARAMETER Experiment Name: Zm_Imbibed_Seeds_P Parameter: Plant Line Value: 35A19
  misc_feature: MA Experiment 108547 PARAMETER Experiment Name: Zm_Imbibed_Seeds_P Parameter: Tissue Value: Aerial vs. Embryo
  misc_feature: MA Experiment ID: 108556 Result: Down-regulated in Transcription
  misc_feature: MA Experiment 108556 PARAMETER Experiment Name: Zm_Drought_P Parameter: Age (day) Value: 9
  misc_feature: MA Experiment 108556 PARAMETER Experiment Name: Zm_Drought_P Parameter: Organism Value: Zea mays
  misc_feature: MA Experiment 108556 PARAMETER Experiment Name: Zm_Drought_P Parameter: Plant Line Value: 35A19
  misc_feature: MA Experiment 108556 PARAMETER Experiment Name: Zm_Drought_P Parameter: Timepoint (hr) Value: 24
  misc_feature: MA Experiment 108556 PARAMETER Experiment Name: Zm_Drought_P Parameter: Tissue Value: Aerial
  misc_feature: MA Experiment 108556 PARAMETER Experiment Name: Zm_Drought_P Parameter: Treatment Value: Drought vs. No Drought
  misc_feature: MA Experiment ID: 108559 Result: Down-regulated in Transcription
  misc_feature: MA Experiment 108559 PARAMETER Experiment Name: Zm_5mM_NO_P Parameter: Age (day) Value: 8
  misc_feature: MA Experiment 108559 PARAMETER Experiment Name: Zm_5mM_NO_P Parameter: Organism Value: Zea mays
  misc_feature: MA Experiment 108559 PARAMETER Experiment Name: Zm_5mM_NO_P Parameter: Plant Line Value: 35A19
  misc_feature: MA Experiment 108559 PARAMETER Experiment Name: Zm_5mM_NO_P Parameter: Timepoint (hr) Value: 12
  misc_feature: MA Experiment 108559 PARAMETER Experiment Name: Zm_5mM_NO_P Parameter: Tissue Value: Aerial
  misc_feature: MA Experiment 108559 PARAMETER Experiment Name: Zm_5mM_NO_P Parameter: Treatment Value: 5mM NO vs. No Treatment
  misc_feature: MA Experiment ID: 108689 Result: Down-regulated in Transcription
  misc_feature: MA Experiment 108689 PARAMETER Experiment Name: Zm_Drought_Roots_P Parameter: Age (day) Value: 9
  misc_feature: MA Experiment 108689 PARAMETER Experiment Name: Zm_Drought_Roots_P Parameter: Organism Value: Zea mays
  misc_feature: MA Experiment 108689 PARAMETER Experiment Name: Zm_Drought_Roots_P Parameter: Plant Line Value: 35A19
  misc_feature: MA Experiment 108689 PARAMETER Experiment Name: Zm_Drought_Roots_P Parameter: Timepoint (hr) Value: 24
  misc_feature: MA Experiment 108689 PARAMETER Experiment Name: Zm_Drought_Roots_P Parameter: Tissue Value: Roots
  misc_feature: MA Experiment 108689 PARAMETER Experiment Name: Zm_Drought_Roots_P Parameter: Treatment Value: Drought vs. No Drought
  misc_feature: MA Experiment ID: 20000477 Result: Down-regulated in Transcription
  misc_feature: MA Experiment 20000477 PARAMETER Experiment Name: Zm_5mM_SA_P Parameter: Age (day) Value: 10
  misc_feature: MA Experiment 20000477 PARAMETER Experiment Name: Zm_5mM_SA_P Parameter: Organism Value: Zea mays
  misc_feature: MA Experiment 20000477 PARAMETER Experiment Name: Zm_5mM_SA_P Parameter: Plant Line Value: 35A19
  misc_feature: MA Experiment 20000477 PARAMETER Experiment Name: Zm_5mM_SA_P Parameter: Timepoint (hr) Value: 48
  misc_feature: MA Experiment 20000477 PARAMETER Experiment Name: Zm_5mM_SA_P Parameter: Tissue Value: Aerial
  misc_feature: MA Experiment 20000477 PARAMETER Experiment Name: Zm_5mM_SA_P Parameter: Treatment Value: 5mM SA vs. No Treatment
  misc_feature: MA Experiment ID: 20000478 Result: Down-regulated in Transcription
  misc_feature: MA Experiment 20000478 PARAMETER Experiment Name: Zm_5mM_SA_P Parameter: Age (day) Value: 11
  misc_feature: MA Experiment 20000478 PARAMETER Experiment Name: Zm_5mM_SA_P Parameter: Organism Value: Zea mays
  misc_feature: MA Experiment 20000478 PARAMETER Experiment Name: Zm_5mM_SA_P Parameter: Plant Line Value: 35A19
  misc_feature: MA Experiment 20000478 PARAMETER Experiment Name: Zm_5mM_SA_P Parameter: Timepoint (hr) Value: 72
  misc_feature: MA Experiment 20000478 PARAMETER Experiment Name: Zm_5mM_SA_P Parameter: Tissue Value: Aerial
  misc_feature: MA Experiment 20000478 PARAMETER Experiment Name: Zm_5mM_SA_P Parameter: Treatment Value: 5mM SA vs. No Treatment
  misc_feature: MA Experiment ID: 20000535 Result: Down-regulated in Transcription
  misc_feature: MA Experiment 20000535 PARAMETER Experiment Name: Zm_Hybrid_Seed_Dev_P Parameter: DAP Value: 30 vs. 12
  misc_feature: MA Experiment 20000535 PARAMETER Experiment Name: Zm_Hybrid_Seed_Dev_P Parameter: Organism Value: Zea mays
  misc_feature: MA Experiment 20000535 PARAMETER Experiment Name: Zm_Hybrid_Seed_Dev_P Parameter: Plant Line Value: 35A19
  misc_feature: MA Experiment 20000535 PARAMETER Experiment Name: Zm_Hybrid_Seed_Dev_P Parameter: Tissue Value: Embryo vs. Unfert Floret
  misc_feature: MA Experiment ID: 20000626 Result: Down-regulated in Transcription
  misc_feature: MA Experiment 20000626 PARAMETER Experiment Name: Zm_Herbicide-Treatments_P Parameter: Timepoint (hr) Value: 12
  misc_feature: MA Experiment 20000626 PARAMETER Experiment Name: Zm_Herbicide-Treatments_P Parameter: Tissue Value: Aerial
  misc_feature: MA Experiment 20000626 PARAMETER Experiment Name: Zm_Herbicide-Treatments_P Parameter: Treatment Value: Roundup vs. No Treatment
  misc_feature: MA Experiment ID: 20000630 Result: Down-regulated in Transcription
  misc_feature: MA Experiment 20000630 PARAMETER Experiment Name: Zm_Herbicide-Treatments_P Parameter: Timepoint (hr) Value: 4
  misc_feature: MA Experiment 20000630 PARAMETER Experiment Name: Zm_Herbicide-Treatments_P Parameter: Tissue Value: Aerial
  misc_feature: MA Experiment 20000630 PARAMETER Experiment Name: Zm_Herbicide-Treatments_P Parameter: Treatment Value: Roundup vs. No Treatment
agttcttcttcctcggtgcatttgcaagcgttaggaaagggagaagagaaaggaattaatggaacgtgaagaggagctgccttcatcttcttcttccttgggttacatgatgcagtgcagggtctgccatgaggaagaggatcaagggcgtgcgaccatggagtctccttgtggatgctccggctctctcaagtacgctcacaggggatgtgtgcagagatggtgtgacgagaaggggagcaccctctgtgagatctgccttcagaatttcaagccaggctacacaatgcctcccaagaaaaccccggtggttgaaacggcggtcactatcagtgaacacgaggacatgcaacatttggaacctccggagggcttggttgacggtgcagattacaccaggtgctcctacgccgcagatcaatgcgccacatggtgccggtcgctggcgatcacgttcaccattgtgacgctcgcatggcatctggttgcagtggcgacggctgaagcagcagagcactgcgcgttcagtctcctcacaatgtacttacttcgtgctgctggtatcctgctgccgctctaccttgtcatgcgaatgattggcgtcgtccaaagtgggcagaggcagtaccggttgcagctgctggaggaacaaagaagaaatgcatcaactatatgaattatatgcgtgtccaggaagaggaccagctagtaattaatattcattagccaattcatttaaataaatcttatggaaggttgtattaatgggaaaactttcaaacagaacatcatttgtaaactttcagtatacatacagttggtgcagtgaaacagcagcatttt

SEQ ID NO: 9447 - protein, 205 aa, Zea mays subsp. mays
  peptide (1)..(205): Ceres Seq. ID no. 12415747
  misc_feature (20)..(67): Pfam Name: Zinc finger, C3HC4 type (RING finger) Pfam Description: Zinc finger, C3HC4 type (RING finger)
  misc_feature (1)..(203): Homolog of NCBI NO: 34905532 NR Description: B1146F03.23 [Oryza sativa (japonica
  misc_feature (19)..(204): Homolog of NCBI NO: 25518349 NR Description: hypothetical protein T14P4.10 - Arabidopsis >gi|9972376|gb|AAG10626.1|AC022521_4 Unknown protein [Arabidopsis
  misc_feature (19)..(203): Homolog of NCBI NO: 18411826 NR Description: Expressed protein; protein id: At4g02075.1, by cDNA: gi_4741922 [Arabidopsis thaliana]
  misc_feature (1)..(189): Homolog of NCBI NO: 18424590 NR Description: expressed protein; protein id: At5g62460.1, by cDNA: gi_16974606 [Arabidopsis thaliana] gene_id:K19B1.7~unknown protein [Arabidopsis thaliana]
  misc_feature (19)..(189): Homolog of NCBI NO: 15227065 NR Description: unknown protein; protein id: At2g02960.1, by cDNA: gi_17529099, supported by cDNA: gi_20259116 [Arabidopsis >gi|25365876|pir||F84442 hypothetical protein At2g02960
  misc_feature (17)..(188): Homolog of NCBI NO: 22325409 NR Description: similar to nucleoside triphosphatase, putative;
  misc_feature (18)..(192): Homolog of NCBI NO: 30692888 NR Description: expressed protein [Arabidopsis thaliana]
  misc_feature (2)..(189): Homolog of NCBI NO: 21537046 NR Description: nucleoside triphosphatase, putative [Arabidopsis
  misc_feature (18)..(189): Homolog of NCBI NO: 15232824 NR Description: putative protein; protein id: At3g47550.1
  misc_feature (2)..(189): Homolog of NCBI NO: 15223693 NR Description: nucleoside triphosphatase, putative; protein id:
MEREEELPSSSSSLGYMMQCRVCHEEEDQGRATMESPCGCSGSLKYAHRGCVQRWCDEKGSTLCEICLQNFKPGYTMPPKKTPVVETAVTISEHEDMQHLEPPEGLVDGADYTRCSYAADQCATWCRSLAITFTIVTLAWHLVAVATAEAAEHCAFSLLTMYLLRAAGILLPLYLVMRMIGVVQSGQRQYRLQLLEEQRRNASTI

SEQ ID NO: 9448 - protein, 189 aa, Zea mays subsp. mays
  peptide (1)..(189): Ceres Seq. ID no. 12415748
  misc_feature (4)..(51): Pfam Name: Zinc finger, C3HC4 type (RING finger) Pfam Description: Zinc finger, C3HC4 type (RING finger)
  misc_feature (1)..(187): Homolog of NCBI NO: 34905532 NR Description: B1146F03.23 [Oryza sativa (japonica
  misc_feature (3)..(188): Homolog of NCBI NO: 25518349 NR Description: hypothetical protein T14P4.10 - Arabidopsis >gi|9972376|gb|AAG10626.1|AC022521_4 Unknown protein [Arabidopsis
  misc_feature (3)..(187): Homolog of NCBI NO: 18411826 NR Description: Expressed protein; protein id: At4g02075.1, by cDNA: gi_4741922 [Arabidopsis thaliana]
  misc_feature (1)..(173): Homolog of NCBI NO: 18424590 NR Description: expressed protein; protein id: At5g62460.1, by cDNA: gi_16974606 [Arabidopsis thaliana] gene_id:K19B1.7~unknown protein [Arabidopsis thaliana]
  misc_feature (3)..(173): Homolog of NCBI NO: 15227065 NR Description: unknown protein; protein id: At2g02960.1, by cDNA: gi_17529099, supported by cDNA: gi_20259116 [Arabidopsis >gi|25365876|pir||F84442 hypothetical protein At2g02960
  misc_feature (1)..(172): Homolog of NCBI NO: 22325409 NR Description: similar to nucleoside triphosphatase, putative;
  misc_feature (2)..(176): Homolog of NCBI NO: 30692888 NR Description: expressed protein [Arabidopsis thaliana]
  misc_feature (1)..(173): Homolog of NCBI NO: 21537046 NR Description: nucleoside triphosphatase, putative [Arabidopsis
  misc_feature (2)..(173): Homolog of NCBI NO: 15232824 NR Description: putative protein; protein id: At3g47550.1
  misc_feature (1)..(173): Homolog of NCBI NO: 15223693 NR Description: nucleoside triphosphatase, putative; protein id:
MMQCRVCHEEEDQGRATMESPCGCSGSLKYAHRGCVQRWCDEKGSTLCEICLQNFKPGYTMPPKKTPVVETAVTISEHEDMQHLEPPEGLVDGADYTRCSYAADQCATWCRSLAITFTIVTLAWHLVAVATAEAAEHCAFSLLTMYLLRAAGILLPLYLVMRMIGVVQSGQRQYRLQLLEEQRRNASTI

SEQ ID NO: 9449 - protein, 188 aa, Zea mays subsp. mays
  peptide (1)..(188): Ceres Seq. ID no. 12415749
  misc_feature (3)..(50): Pfam Name: Zinc finger, C3HC4 type (RING finger) Pfam Description: Zinc finger, C3HC4 type (RING finger)
  misc_feature (1)..(186): Homolog of NCBI NO: 34905532 NR Description: B1146F03.23 [Oryza sativa (japonica
  misc_feature (2)..(187): Homolog of NCBI NO: 25518349 NR Description: hypothetical protein T14P4.10 - Arabidopsis >gi|9972376|gb|AAG10626.1|AC022521_4 Unknown protein [Arabidopsis
  misc_feature (2)..(186): Homolog of NCBI NO: 18411826 NR Description: Expressed protein; protein id: At4g02075.1, by cDNA: gi_4741922 [Arabidopsis thaliana]
  misc_feature (1)..(172): Homolog of NCBI NO: 18424590 NR Description: expressed protein; protein id: At5g62460.1, by cDNA: gi_16974606 [Arabidopsis thaliana] gene_id:K19B1.7~unknown protein [Arabidopsis thaliana]
  misc_feature (2)..(172): Homolog of NCBI NO: 15227065 NR Description: unknown protein; protein id: At2g02960.1, by cDNA: gi_17529099, supported by cDNA: gi_20259116 [Arabidopsis >gi|25365876|pir||F84442 hypothetical protein At2g02960
  misc_feature (1)..(171): Homolog of NCBI NO: 22325409 NR Description: similar to nucleoside triphosphatase, putative;
  misc_feature (1)..(175): Homolog of NCBI NO: 30692888 NR Description: expressed protein [Arabidopsis thaliana]
  misc_feature (1)..(172): Homolog of NCBI NO: 21537046 NR Description: nucleoside triphosphatase, putative [Arabidopsis
  misc_feature (1)..(172): Homolog of NCBI NO: 15232824 NR Description: putative protein; protein id: At3g47550.1
  misc_feature (1)..(172): Homolog of NCBI NO: 15223693 NR Description: nucleoside triphosphatase, putative; protein id:
MQCRVCHEEEDQGRATMESPCGCSGSLKYAHRGCVQRWCDEKGSTLCEICLQNFKPGYTMPPKKTPVVETAVTISEHEDMQHLEPPEGLVDGADYTRCSYAADQCATWCRSLAITFTIVTLAWHLVAVATAEAAEHCAFSLLTMYLLRAAGILLPLYLVMRMIGVVQSGQRQYRLQLLEEQRRNASTI

SEQ ID NO: 9450 - DNA, 818 bp, Zea mays subsp. mays
  misc_feature (1)..(818): Ceres Seq. ID no. 12350165
  misc_feature: MA Experiment ID: 20000492 Result: Up-regulated in Transcription
  misc_feature: MA Experiment 20000492 PARAMETER Experiment Name: Zm_Hybrid_Seed_Dev_P Parameter: DAP Value: 12
  misc_feature: MA Experiment 20000492 PARAMETER Experiment Name: Zm_Hybrid_Seed_Dev_P Parameter: Organism Value: Zea mays
  misc_feature: MA Experiment 20000492 PARAMETER Experiment Name: Zm_Hybrid_Seed_Dev_P Parameter: Plant Line Value: 35A19
  misc_feature: MA Experiment 20000492 PARAMETER Experiment Name: Zm_Hybrid_Seed_Dev_P Parameter: Tissue Value: Fert Kernel vs. Unfert Floret
  misc_feature: MA Experiment ID: 20000534 Result: Down-regulated in Transcription
  misc_feature: MA Experiment 20000534 PARAMETER Experiment Name: Zm_Hybrid_Pollen_P Parameter: Age (day) Value: 8
  misc_feature: MA Experiment 20000534 PARAMETER Experiment Name: Zm_Hybrid_Pollen_P Parameter: Organism Value: Zea mays
  misc_feature: MA Experiment 20000534 PARAMETER Experiment Name: Zm_Hybrid_Pollen_P Parameter: Plant Line Value: 35A19
  misc_feature: MA Experiment 20000534 PARAMETER Experiment Name: Zm_Hybrid_Pollen_P Parameter: Tissue Value: Pollen vs. Aerial
aatttttgaaattggtcgtgagccgctgccgcacacggcgagaggaatagggttgctccccccgttgccgactcgccgccgcatcgccgcgagcgtcatgaagaccttcccgctgtccaggggaagcaccatctccctagccctcttctccgacgtctccaacagccgggagctcctggacttgatgcagtcagggaagctggagccggcggtcgctctcctcaacgcgtcactggtgccggatgtgttccctatcctcgcggcagcgcttaaggcgctgttgtccaagactagggagtcactgaccacaaggactctgcactctgagctcgtctacaactactcggggtccaaacatataacagagtccctgaagcgctgtgggatctctgataatacaacttacatccttgctgcttgttttgatgcttccgacgaggagatgaaggcagtggagaagctcatcagtggcaccgagattgatctcacagaactggaaagaagagcaaaccagccacagatcttgaagcattacaagatacctccccaagaactatcgatatctacgttgccggacgcaattgtatgcaggattgctgctcgagatgctctctgaagtctcaataatcaccgtaagctatgtggtttcaggatgtaggtctctctctaccacatgtatggtgtgacattgacagcacaagtgcacaactagaattaggtatccgaaataccattgatgttcgcattccttgcaagcaacccagaagcacattgcgtggttaatttttcttgctaaactgtgctgcaaagcaacagtt

SEQ ID NO: 9451 - protein, 204 aa, Zea mays subsp. mays
  peptide (1)..(204): Ceres Seq. ID no. 12350166
  misc_feature (33)..(204): Homolog of NCBI NO: 34895710 NR Description: P0019D06.12 [Oryza sativa (japonica
  misc_feature (33)..(204): Homolog of NCBI NO: 38454120 NR Description: At4g34412 [Arabidopsis thaliana]
  misc_feature (33)..(147): Homolog of NCBI NO: 22329156 NR Description: hypothetical protein; protein id: At4g34412.1
  misc_feature (165)..(204): Homolog of NCBI NO: 22329156 NR Description: hypothetical protein; protein id: At4g34412.1
  misc_feature (36)..(204): Homolog of NCBI NO: 7705590 NR Description: CGI-121 protein [Homo sapiens]
  misc_feature (36)..(204): Homolog of NCBI NO: 12001980 NR Description: My019 protein [Homo sapiens]
  misc_feature (36)..(202): Homolog of NCBI NO: 17542786 NR Description: Putative cytoplasmic protein of eukaryotic origin
  misc_feature (36)..(202): Homolog of NCBI NO: 39588478 NR Description: Hypothetical protein CBG20111 [Caenorhabditis
  misc_feature (44)..(204): Homolog of NCBI NO: 27712192 NR Description: similar to RIKEN cDNA 1810034M08 [Mus musculus]
  misc_feature (36)..(204): Homolog of NCBI NO: 28849893 NR Description: CGI-121 protein [Mus musculus] RIKEN cDNA 1810034M08 [Mus musculus] >gi|20071790|gb|AAH27162.1|
IFEIGREPLPHTARGIGLLPPLPTRRRIAASVMKTFPLSRGSTISLALFSDVSNSRELLDLMQSGKLEPAVALLNASLVPDVFPILAAALKALLSKTRESLTTRTLHSELVYNYSGSKHITESLKRCGISDNTTYILAACFDASDEEMKAVEKLISGTEIDLTELERRANQPQILKHYKIPPQELSISTLPDAIVCRIAARDAL

SEQ ID NO: 9452 - protein, 172 aa, Zea mays subsp. mays
  peptide (1)..(172): Ceres Seq. ID no. 12350167
  misc_feature (1)..(172): Homolog of NCBI NO: 34895710 NR Description: P0019D06.12 [Oryza sativa (japonica
  misc_feature (1)..(172): Homolog of NCBI NO: 38454120 NR Description: At4g34412 [Arabidopsis thaliana]
  misc_feature (1)..(115): Homolog of NCBI NO: 22329156 NR Description: hypothetical protein; protein id: At4g34412.1
  misc_feature (133)..(172): Homolog of NCBI NO: 22329156 NR Description: hypothetical protein; protein id: At4g34412.1
  misc_feature (4)..(172): Homolog of NCBI NO: 7705590 NR Description: CGI-121 protein [Homo sapiens]
  misc_feature (4)..(172): Homolog of NCBI NO: 12001980 NR Description: My019 protein [Homo sapiens]
  misc_feature (4)..(170): Homolog of NCBI NO: 17542786 NR Description: Putative cytoplasmic protein of eukaryotic origin
  misc_feature (4)..(170): Homolog of NCBI NO: 39588478 NR Description: Hypothetical protein CBG20111 [Caenorhabditis
  misc_feature (12)..(172): Homolog of NCBI NO: 27712192 NR Description: similar to RIKEN cDNA 1810034M08 [Mus musculus]
  misc_feature (4)..(172): Homolog of NCBI NO: 28849893 NR Description: CGI-121 protein [Mus musculus] RIKEN cDNA 1810034M08 [Mus musculus] >gi|20071790|gb|AAH27162.1|
MKTFPLSRGSTISLALFSDVSNSRELLDLMQSGKLEPAVALLNASLVPDVFPILAAALKALLSKTRESLTTRTLHSELVYNYSGSKHITESLKRCGISDNTTYILAACFDASDEEMKAVEKLISGTEIDLTELERRANQPQILKHYKIPPQELSISTLPDAIVCRIAARDAL

SEQ ID NO: 9453 - protein, 143 aa, Zea mays subsp. mays
  peptide (1)..(143): Ceres Seq. ID no. 12350168
  misc_feature (1)..(143): Homolog of NCBI NO: 34895710 NR Description: P0019D06.12 [Oryza sativa (japonica
  misc_feature (1)..(143): Homolog of NCBI NO: 38454120 NR Description: At4g34412 [Arabidopsis thaliana]
  misc_feature (1)..(86): Homolog of NCBI NO: 22329156 NR Description: hypothetical protein; protein id: At4g34412.1
  misc_feature (104)..(143): Homolog of NCBI NO: 22329156 NR Description: hypothetical protein; protein id: At4g34412.1
  misc_feature (1)..(143): Homolog of NCBI NO: 7705590 NR Description: CGI-121 protein [Homo sapiens]
  misc_feature (1)..(143): Homolog of NCBI NO: 12001980 NR Description: My019 protein [Homo sapiens]
  misc_feature (1)..(141): Homolog of NCBI NO: 17542786 NR Description: Putative cytoplasmic protein of eukaryotic origin
  misc_feature (1)..(141): Homolog of NCBI NO: 39588478 NR Description: Hypothetical protein CBG20111 [Caenorhabditis
  misc_feature (1)..(143): Homolog of NCBI NO: 27712192 NR Description: similar to RIKEN cDNA 1810034M08 [Mus musculus]
  misc_feature (1)..(143): Homolog of NCBI NO: 28849893 NR Description: CGI-121 protein [Mus musculus] RIKEN cDNA 1810034M08 [Mus musculus] >gi|20071790|gb|AAH27162.1|
MQSGKLEPAVALLNASLVPDVFPILAAALKALLSKTRESLTTRTLHSELVYNYSGSKHITESLKRCGISDNTTYILAACFDASDEEMKAVEKLISGTEIDLTELERRANQPQILKHYKIPPQELSISTLPDAIVCRIAARDAL

SEQ ID NO: 9454 - DNA, 1076 bp, Zea mays subsp. mays
  misc_feature (1)..(1076): Ceres Seq. ID no. 12355259
  misc_feature: MA Experiment ID: 108523 Result: Up-regulated in Transcription
  misc_feature: MA Experiment 108523 PARAMETER Experiment Name: Zm_42deg_Heat_P Parameter: Age (day) Value: 8
  misc_feature: MA Experiment 108523 PARAMETER Experiment Name: Zm_42deg_Heat_P Parameter: Organism Value: Zea mays
  misc_feature: MA Experiment 108523 PARAMETER Experiment Name: Zm_42deg_Heat_P Parameter: Plant Line Value: 35A19
  misc_feature: MA Experiment 108523 PARAMETER Experiment Name: Zm_42deg_Heat_P Parameter: Temperature (deg C) Value: 42 vs. 22
  misc_feature: MA Experiment 108523 PARAMETER Experiment Name: Zm_42deg_Heat_P Parameter: Timepoint (hr) Value: 6
  misc_feature: MA Experiment 108523 PARAMETER Experiment Name: Zm_42deg_Heat_P Parameter: Tissue Value: Aerial
  misc_feature: MA Experiment ID: 108527 Result: Up-regulated in Transcription
  misc_feature: MA Experiment 108527 PARAMETER Experiment Name: Zm_5mM_NO_P Parameter: Age (day) Value: 8
  misc_feature: MA Experiment 108527 PARAMETER Experiment Name: Zm_5mM_NO_P Parameter: Organism Value: Zea mays
  misc_feature: MA Experiment 108527 PARAMETER Experiment Name: Zm_5mM_NO_P Parameter: Plant Line Value: 35A19
  misc_feature: MA Experiment 108527 PARAMETER Experiment Name: Zm_5mM_NO_P Parameter: Timepoint (hr) Value: 6
  misc_feature: MA Experiment 108527 PARAMETER Experiment Name: Zm_5mM_NO_P Parameter: Tissue Value: Aerial
  misc_feature: MA Experiment 108527 PARAMETER Experiment Name: Zm_5mM_NO_P Parameter: Treatment Value: 5mM NO vs. No Treatment
  misc_feature: MA Experiment ID: 108533 Result: Up-regulated in Transcription
  misc_feature: MA Experiment 108533 PARAMETER Experiment Name: Zm_4deg_Cold_P Parameter: Age (hr) Value: 8
  misc_feature: MA Experiment 108533 PARAMETER Experiment Name: Zm_4deg_Cold_P Parameter: Organism Value: Zea mays
  misc_feature: MA Experiment 108533 PARAMETER Experiment Name: Zm_4deg_Cold_P Parameter: Plant Line Value: 35A19
  misc_feature: MA Experiment 108533 PARAMETER Experiment Name: Zm_4deg_Cold_P Parameter: Temperature (deg C) Value: 4 vs. 22
  misc_feature: MA Experiment 108533 PARAMETER Experiment Name: Zm_4deg_Cold_P Parameter: Timepoint (hr) Value: 1
  misc_feature: MA Experiment 108533 PARAMETER Experiment Name: Zm_4deg_Cold_P Parameter: Tissue Value: Aerial
  misc_feature: MA Experiment ID: 108534 Result: Up-regulated in Transcription
  misc_feature: MA Experiment 108534 PARAMETER Experiment Name: Zm_4deg_Cold_P Parameter: Age (hr) Value: 8
  misc_feature: MA Experiment 108534 PARAMETER Experiment Name: Zm_4deg_Cold_P Parameter: Organism Value: Zea mays
  misc_feature: MA Experiment 108534 PARAMETER Experiment Name: Zm_4deg_Cold_P Parameter: Plant Line Value: 35A19
  misc_feature: MA Experiment 108534 PARAMETER Experiment Name: Zm_4deg_Cold_P Parameter: Temperature (deg C) Value: 4 vs. 22
  misc_feature: MA Experiment 108534 PARAMETER Experiment Name: Zm_4deg_Cold_P Parameter: Timepoint (hr) Value: 6
  misc_feature: MA Experiment 108534 PARAMETER Experiment Name: Zm_4deg_Cold_P Parameter: Tissue Value: Aerial
  misc_feature: MA Experiment ID: 108543 Result: Up-regulated in Transcription
  misc_feature: MA Experiment ID: 108545 Result: Down-regulated in Transcription
  misc_feature: MA Experiment 108545 PARAMETER Experiment Name: Zm_Imbibed_Seeds_P Parameter: Age (day) Value: 3 vs. 2
  misc_feature: MA Experiment 108545 PARAMETER Experiment Name: Zm_Imbibed_Seeds_P Parameter: Organism Value: Zea mays
  misc_feature: MA Experiment 108545 PARAMETER Experiment Name: Zm_Imbibed_Seeds_P Parameter: Plant Line Value: 35A19
  misc_feature: MA Experiment 108545 PARAMETER Experiment Name: Zm_Imbibed_Seeds_P Parameter: Tissue Value: Aerial vs. Embryo
  misc_feature: MA Experiment ID: 108688 Result: Down-regulated in Transcription
  misc_feature: MA Experiment 108688 PARAMETER Experiment Name: Zm_Embryos-Flowers__P Parameter: Tissue Value: Immature Flowers vs. Aerial+
  misc_feature: MA Experiment ID: 20000478 Result: Up-regulated in Transcription
  misc_feature: MA Experiment 20000478 PARAMETER Experiment Name: Zm_5mM_SA_P Parameter: Age (day) Value: 11
  misc_feature: MA Experiment 20000478 PARAMETER Experiment Name: Zm_5mM_SA_P Parameter: Organism Value: Zea mays
  misc_feature: MA Experiment 20000478 PARAMETER Experiment Name: Zm_5mM_SA_P Parameter: Plant Line Value: 35A19
  misc_feature: MA Experiment 20000478 PARAMETER Experiment Name: Zm_5mM_SA_P Parameter: Timepoint (hr) Value: 72
  misc_feature: MA Experiment 20000478 PARAMETER Experiment Name: Zm_5mM_SA_P Parameter: Tissue Value: Aerial
  misc_feature: MA Experiment 20000478 PARAMETER Experiment Name: Zm_5mM_SA_P Parameter: Treatment Value: 5mM SA vs. No Treatment
  misc_feature: MA Experiment ID: 20000479 Result: Up-regulated in Transcription
  misc_feature: MA Experiment 20000479 PARAMETER Experiment Name: Zm_Drought_P Parameter: Age (day) Value: 10
  misc_feature: MA Experiment 20000479 PARAMETER Experiment Name: Zm_Drought_P Parameter: Organism Value: Zea mays
  misc_feature: MA Experiment 20000479 PARAMETER Experiment Name: Zm_Drought_P Parameter: Plant Line Value: 35A19
  misc_feature: MA Experiment 20000479 PARAMETER Experiment Name: Zm_Drought_P Parameter: Timepoint (hr) Value: 48
  misc_feature: MA Experiment 20000479 PARAMETER Experiment Name: Zm_Drought_P Parameter: Tissue Value: Aerial
  misc_feature: MA Experiment 20000479 PARAMETER Experiment Name: Zm_Drought_P Parameter: Treatment Value: Drought vs. No Drought
  misc_feature: MA Experiment ID: 20000492 Result: Down-regulated in Transcription
  misc_feature: MA Experiment 20000492 PARAMETER Experiment Name: Zm_Hybrid_Seed_Dev_P Parameter: DAP Value: 12
  misc_feature: MA Experiment 20000492 PARAMETER Experiment Name: Zm_Hybrid_Seed_Dev_P Parameter: Organism Value: Zea mays
  misc_feature: MA Experiment 20000492 PARAMETER Experiment Name: Zm_Hybrid_Seed_Dev_P Parameter: Plant Line Value: 35A19
  misc_feature: MA Experiment 20000492 PARAMETER Experiment Name: Zm_Hybrid_Seed_Dev_P Parameter: Tissue Value: Fert Kernel vs. Unfert Floret
  misc_feature: MA Experiment ID: 20000533 Result: Up-regulated in Transcription
  misc_feature: MA Experiment 20000533 PARAMETER Experiment Name: Zm_0.001percent_MeJA_P Parameter: Age (day) Value: 11
  misc_feature: MA Experiment 20000533 PARAMETER Experiment Name: Zm_0.001percent_MeJA_P Parameter: Organism Value: Zea mays
  misc_feature: MA Experiment 20000533 PARAMETER Experiment Name: Zm_0.001percent_MeJA_P Parameter: Plant Line Value: 35A19
  misc_feature: MA Experiment 20000533 PARAMETER Experiment Name: Zm_0.001percent_MeJA_P Parameter: Timepoint (hr) Value: 72
  misc_feature: MA Experiment 20000533 PARAMETER Experiment Name: Zm_0.001percent_MeJA_P Parameter: Tissue Value: Aerial
  misc_feature: MA Experiment 20000533 PARAMETER Experiment Name: Zm_0.001percent_MeJA_P Parameter: Treatment Value: 0.001percent MeJA vs. No Treatment
  misc_feature: MA Experiment ID: 20000535 Result: Down-regulated in Transcription
  misc_feature: MA Experiment 20000535 PARAMETER Experiment Name: Zm_Hybrid_Seed_Dev_P Parameter: DAP Value: 30 vs. 12
  misc_feature: MA Experiment 20000535 PARAMETER Experiment Name: Zm_Hybrid_Seed_Dev_P Parameter: Organism Value: Zea mays
  misc_feature: MA Experiment 20000535 PARAMETER Experiment Name: Zm_Hybrid_Seed_Dev_P Parameter: Plant Line Value: 35A19
  misc_feature: MA Experiment 20000535 PARAMETER Experiment Name: Zm_Hybrid_Seed_Dev_P Parameter: Tissue Value: Embryo vs. Unfert Floret
  misc_feature: MA Experiment ID: 20000630 Result: Up-regulated in Transcription
  misc_feature: MA Experiment 20000630 PARAMETER Experiment Name: Zm_Herbicide-Treatments_P Parameter: Timepoint (hr) Value: 4
  misc_feature: MA Experiment 20000630 PARAMETER Experiment Name: Zm_Herbicide-Treatments_P Parameter: Tissue Value: Aerial
  misc_feature: MA Experiment 20000630 PARAMETER Experiment Name: Zm_Herbicide-Treatments_P Parameter: Treatment Value: Roundup vs. No Treatment
  misc_feature: MA Experiment ID: 20001613 Result: Down-regulated in Transcription
  misc_feature: MA Experiment 20001613 PARAMETER Experiment Name: Zm_50ppm_KNO3_L-to-H_P Parameter: Age (day) Value: 20
  misc_feature: MA Experiment 20001613 PARAMETER Experiment Name: Zm_50ppm_KNO3_L-to-H_P Parameter: Organism Value: Zea mays
  misc_feature: MA Experiment 20001613 PARAMETER Experiment Name: Zm_50ppm_KNO3_L-to-H_P Parameter: Plant Line Value: 35A19
  misc_feature: MA Experiment 20001613 PARAMETER Experiment Name: Zm_50ppm_KNO3_L-to-H_P Parameter: Timepoint (hr) Value: 24
  misc_feature: MA Experiment 20001613 PARAMETER Experiment Name: Zm_50ppm_KNO3_L-to-H_P Parameter: Tissue Value: Roots
  misc_feature: MA Experiment 20001613 PARAMETER Experiment Name: Zm_50ppm_KNO3_L-to-H_P Parameter: Treatment Value: 50ppm KNO3 vs. 50ppm KCl
agtcctccacgcacgcacgcacgcacgaccagttgccacggcagaccaccccgcccagcggccagcttgctcgccacgaccacgatgggcttccccgtggggtactcggagtcggagatgctgctcccgcgcgtgctgctgcaggtgctcctcctcctcggccacttccaccgcttcctcctctgggccttccacgccgtggggctcggcgacctgatcgacctcggctgcaactacccgccgccgccgccctccgcgtccacggcgcacgagatgatggagcaccagcaccagcaccaggggcgcgacgacgtggcctccccgctgcagcaccagcgcccggagttccggcccgtcgcggcggcgctcatcgaggaggcgctccccgtggtgcggttcgacgagctgggcggcgcgccgtgcggcggcggcgactgcgcggtgtgcctgagcggcatcggcggcggcgacgaggtgcggcggctcggcaactgccgccacgccttccaccgggcctgcctggaccgctggatggcgcacgaccagcgcacctgcccgctctgccgcgcgccgctcatcccctgggccgccgacgccgactacgacatgtcctatccgtctcccctgccgcccacgccactgcggcggcctcacgagctgctgctgctgcttaccggcctgggcggcttccagtgatgcgcctgcgcgtgggcagcgtggctggcacttgggcaggccggccacgcgaatccgatccgtggcgaggcaaaccgcgtgctcatgtgcggcccagnacgcccggtcggtcaggcgggtgaccgccgccaaacctgctcagttgccagccgtacacgcttgccggcctcgtcttcggtcgtgtctccgactccgttggtttttttacagaggctcccagtcccaggtcaaacaaaaaaggaggcgaaacagacaaagcagtcggaaattaggcaggtactgtactaggttgatctgtaggccgattgggcgactccaaatctgtggagctgtgaatcctttggcagattaaactaaaaattgtctctatagatcagacc

SEQ ID NO: 9455 - protein, 271 aa, Zea mays subsp. mays
  peptide (1)..(271): Ceres Seq. ID no. 12355260
  misc_feature (11)..(271): Homolog of NCBI NO: 29247944 NR Description: GLP_26_54603_52153 [Giardia lamblia ATCC 50803]
  misc_feature (45)..(270): Homolog of NCBI NO: 38565531 NR Description: atherin [Oryctolagus cuniculus]
  misc_feature (264)..(264): Xaa is any aa, unknown or other
SSTHARTHDQLPRQTTPPSGQLARHDHDGLPRGVLGVGDAAPARAAAGAPPPRPLPPLPPLGLPRRGARRPDRPRLQLPAAAALRVHGARDDGAPAPAPGARRRGLPAAAPAPGVPARRGGAHRGGAPRGAVRRAGRRAVRRRRLRGVPERHRRRRRGAAARQLPPRLPPGLPGPLDGARPAHLPALPRAAHPLGRRRRLRHVLSVSPAAHATAAASRAAAAAYRPGRLPVMRLRVGSVAGTWAGRPRESDPWRGKPRAHVRPXTPGRSGG

SEQ ID NO: 9456 - protein, 231 aa, Zea mays subsp. mays
  peptide (1)..(231): Ceres Seq. ID no. 12355261
  misc_feature (146)..(188): Pfam Name: Zinc finger, C3HC4 type (RING finger) Pfam Description: Zinc finger, C3HC4 type (RING finger)
  misc_feature (29)..(193): Homolog of NCBI NO: 21554155 NR Description: RING zinc finger protein-like [Arabidopsis
  misc_feature (29)..(193): Homolog of NCBI NO: 15238072 NR Description: RING zinc finger protein-like; protein id: supported by cDNA: 207148. [Arabidopsis thaliana]
  misc_feature (114)..(194): Homolog of NCBI NO: 15233117 NR Description: RING finger protein; protein id: At3g61460.1, by cDNA: 25801., supported by cDNA: gi_17644156, supported by
  misc_feature (117)..(194): Homolog of NCBI NO: 15222553 NR Description: putative RING zinc finger protein; protein id: supported by cDNA: gi_16648709 [Arabidopsis thaliana]
  misc_feature (124)..(210): Homolog of NCBI NO: 34897812 NR Description: P0514G12.26 [Oryza sativa (japonica
  misc_feature (124)..(194): Homolog of NCBI NO: 18411282 NR Description: similar to RING finger protein; protein id:
  misc_feature (124)..(194): Homolog of NCBI NO: 38345870 NR Description: OSJNBa0064M23.12 [Oryza sativa (japonica
  misc_feature (119)..(198): Homolog of NCBI NO: 15229284 NR Description: putative protein; protein id: At3g43430.1, by cDNA: 3137. [Arabidopsis thaliana] >gi|11358362|pir||T47385
  misc_feature (125)..(202): Homolog of NCBI NO: 22324426 NR Description: hypothetical protein~predicted by FGENESH etc.
  misc_feature (94)..(192): Homolog of NCBI NO: 37537088 NR Description: putative zinc finger protein [Oryza sativa
SPPRTHARTTSCHGRPPRPAASLLATTTMGFPVGYSESEMLLPRVLLQVLLLLGHFHRFLLWAFHAVGLGDLIDLGCNYPPPPPSASTAHEMMEHQHQHQGRDDVASPLQHQRPEFRPVAAALIEEALPVVRFDELGGAPCGGGDCAVCLSGIGGGDEVRRLGNCRHAFHRACLDRWMAHDQRTCPLCRAPLIPWAADADYDMSYPSPLPPTPLRRPHELLLLLTGLGGFQ

SEQ ID NO: 9457 - protein, 203 aa, Zea mays subsp. mays
  peptide (1)..(203): Ceres Seq. ID no. 12355262
  misc_feature (118)..(160): Pfam Name: Zinc finger, C3HC4 type (RING finger) Pfam Description: Zinc finger, C3HC4 type (RING finger)
  misc_feature (96)..(166): Homolog of NCBI NO: 38345870 NR Description: OSJNBa0064M23.12 [Oryza sativa (japonica
  misc_feature (91)..(170): Homolog of NCBI NO: 15229284 NR Description: putative protein; protein id: At3g43430.1, by cDNA: 3137. [Arabidopsis thaliana] >gi|11358362|pir||T47385
  misc_feature (1)..(165): Homolog of NCBI NO: 21554155 NR Description: RING zinc finger protein-like [Arabidopsis
  misc_feature (86)..(166): Homolog of NCBI NO: 15233117 NR Description: RING finger protein; protein id: At3g61460.1, by cDNA: 25801., supported by cDNA: gi_17644156, supported by
  misc_feature (96)..(182): Homolog of NCBI NO: 34897812 NR Description: P0514G12.26 [Oryza sativa (japonica
  misc_feature (96)..(166): Homolog of NCBI NO: 18411282 NR Description: similar to RING finger protein; protein id:
  misc_feature (89)..(166): Homolog of NCBI NO: 15222553 NR Description: putative RING zinc finger protein; protein id: supported by cDNA: gi_16648709 [Arabidopsis thaliana]
  misc_feature (1)..(165): Homolog of NCBI NO: 15238072 NR Description: RING zinc finger protein-like; protein id: supported by cDNA: 207148. [Arabidopsis thaliana]
  misc_feature (97)..(174): Homolog of NCBI NO: 22324426 NR Description: hypothetical protein~predicted by FGENESH etc.
  misc_feature (66)..(164): Homolog of NCBI NO: 37537088 NR Description: putative zinc finger protein [Oryza sativa
MGFPVGYSESEMLLPRVLLQVLLLLGHFHRFLLWAFHAVGLGDLIDLGCNYPPPPPSASTAHEMMEHQHQHQGRDDVASPLQHQRPEFRPVAAALIEEALPVVRFDELGGAPCGGGDCAVCLSGIGGGDEVRRLGNCRHAFHRACLDRWMAHDQRTCPLCRAPLIPWAADADYDMSYPSPLPPTPLRRPHELLLLLTGLGGFQ

SEQ ID NO: 9458 - DNA, 656 bp, Zea mays subsp. mays
  misc_feature (1)..(656): Ceres Seq. ID no. 12347270
  misc_feature: MA Experiment ID: 108527 Result: Up-regulated in Transcription
  misc_feature: MA Experiment 108527 PARAMETER Experiment Name: Zm_5mM_NO_P Parameter: Age (day) Value: 8
  misc_feature: MA Experiment 108527 PARAMETER Experiment Name: Zm_5mM_NO_P Parameter: Organism Value: Zea mays
  misc_feature: MA Experiment 108527 PARAMETER Experiment Name: Zm_5mM_NO_P Parameter: Plant Line Value: 35A19
  misc_feature: MA Experiment 108527 PARAMETER Experiment Name: Zm_5mM_NO_P Parameter: Timepoint (hr) Value: 6
  misc_feature: MA Experiment 108527 PARAMETER Experiment Name: Zm_5mM_NO_P Parameter: Tissue Value: Aerial
  misc_feature: MA Experiment 108527 PARAMETER Experiment Name: Zm_5mM_NO_P Parameter: Treatment Value: 5mM NO vs. No Treatment
  misc_feature: MA Experiment ID: 108535 Result: Up-regulated in Transcription
  misc_feature: MA Experiment 108535 PARAMETER Experiment Name: Zm_Meristem_P Parameter: Age (day) Value: 8
  misc_feature: MA Experiment 108535 PARAMETER Experiment Name: Zm_Meristem_P Parameter: Organism Value: Zea mays
  misc_feature: MA Experiment 108535 PARAMETER Experiment Name: Zm_Meristem_P Parameter: Plant Line Value: 35A19
  misc_feature: MA Experiment 108535 PARAMETER Experiment Name: Zm_Meristem_P Parameter: Tissue Value: Root Meristem vs. Above Root Meristem
  misc_feature: MA Experiment ID: 108559 Result: Up-regulated in Transcription
  misc_feature: MA Experiment 108559 PARAMETER Experiment Name: Zm_5mM_NO_P Parameter: Age (day) Value: 8
  misc_feature: MA Experiment 108559 PARAMETER Experiment Name: Zm_5mM_NO_P Parameter: Organism Value: Zea mays
  misc_feature: MA Experiment 108559 PARAMETER Experiment Name: Zm_5mM_NO_P Parameter: Plant Line Value: 35A19
  misc_feature: MA Experiment 108559 PARAMETER Experiment Name: Zm_5mM_NO_P Parameter: Timepoint (hr) Value: 12
  misc_feature: MA Experiment 108559 PARAMETER Experiment Name: Zm_5mM_NO_P Parameter: Tissue Value: Aerial
  misc_feature: MA Experiment 108559 PARAMETER Experiment Name: Zm_5mM_NO_P Parameter: Treatment Value: 5mM NO vs. No Treatment
  misc_feature: MA Experiment ID: 108687 Result: Up-regulated in Transcription
  misc_feature: MA Experiment 108687 PARAMETER Experiment Name: Zm_Embryos-Flowers__P Parameter: Tissue Value: Embryo vs. Aerial+
  misc_feature: MA Experiment ID: 108689 Result: Down-regulated in Transcription
  misc_feature: MA Experiment 108689 PARAMETER Experiment Name: Zm_Drought_Roots_P Parameter: Age (day) Value: 9
  misc_feature: MA Experiment 108689 PARAMETER Experiment Name: Zm_Drought_Roots_P Parameter: Organism Value: Zea mays
  misc_feature: MA Experiment 108689 PARAMETER Experiment Name: Zm_Drought_Roots_P Parameter: Plant Line Value: 35A19
  misc_feature: MA Experiment 108689 PARAMETER Experiment Name: Zm_Drought_Roots_P Parameter: Timepoint (hr) Value: 24
  misc_feature: MA Experiment 108689 PARAMETER Experiment Name: Zm_Drought_Roots_P Parameter: Tissue Value: Roots
  misc_feature: MA Experiment 108689 PARAMETER Experiment Name: Zm_Drought_Roots_P Parameter: Treatment Value: Drought vs. No Drought
  misc_feature: MA Experiment ID: 20000480 Result: Down-regulated in Transcription
  misc_feature: MA Experiment 20000480 PARAMETER Experiment Name: Zm_Drought_P Parameter: Age (day) Value: 11
  misc_feature: MA Experiment 20000480 PARAMETER Experiment Name: Zm_Drought_P Parameter: Organism Value: Zea mays
  misc_feature: MA Experiment 20000480 PARAMETER Experiment Name: Zm_Drought_P Parameter: Plant Line Value: 35A19
  misc_feature: MA Experiment 20000480 PARAMETER Experiment Name: Zm_Drought_P Parameter: Timepoint (hr) Value: 72
  misc_feature: MA Experiment 20000480 PARAMETER Experiment Name: Zm_Drought_P Parameter: Tissue Value: Aerial
  misc_feature: MA Experiment 20000480 PARAMETER Experiment Name: Zm_Drought_P Parameter: Treatment Value: Drought vs. No Drought
  misc_feature: MA Experiment ID: 20000488 Result: Down-regulated in Transcription
  misc_feature: MA Experiment 20000488 PARAMETER Experiment Name: Zm_50mM_NH4NO3_L_to_H_P Parameter: Organism Value: Zea mays
  misc_feature: MA Experiment 20000488 PARAMETER Experiment Name: Zm_50mM_NH4NO3_L_to_H_P Parameter: Timepoint (hr) Value: 8
  misc_feature: MA Experiment 20000488 PARAMETER Experiment Name: Zm_50mM_NH4NO3_L_to_H_P Parameter: Tissue Value: Leaves
  misc_feature: MA Experiment 20000488 PARAMETER Experiment Name: Zm_50mM_NH4NO3_L_to_H_P Parameter: Treatment Value: 50mM NH4NO3 vs. 100mM Mannitol
  misc_feature: MA Experiment ID: 20000534 Result: Down-regulated in Transcription
  misc_feature: MA Experiment 20000534 PARAMETER Experiment Name: Zm_Hybrid_Pollen_P Parameter: Age (day) Value: 8
  misc_feature: MA Experiment 20000534 PARAMETER Experiment Name: Zm_Hybrid_Pollen_P Parameter: Organism Value: Zea mays
  misc_feature: MA Experiment 20000534 PARAMETER Experiment Name: Zm_Hybrid_Pollen_P Parameter: Plant Line Value: 35A19
  misc_feature: MA Experiment 20000534 PARAMETER Experiment Name: Zm_Hybrid_Pollen_P Parameter: Tissue Value: Pollen vs. Aerial
  misc_feature: MA Experiment ID: 20001614 Result: Up-regulated in Transcription
  misc_feature: MA Experiment 20001614 PARAMETER Experiment Name: Zm_50ppm_KNO3_L-to-H_P Parameter: Age (day) Value: 21
  misc_feature: MA Experiment 20001614 PARAMETER Experiment Name: Zm_50ppm_KNO3_L-to-H_P Parameter: Organism Value: Zea mays
  misc_feature: MA Experiment 20001614 PARAMETER Experiment Name: Zm_50ppm_KNO3_L-to-H_P Parameter: Plant Line Value: 35A19
  misc_feature: MA Experiment 20001614 PARAMETER Experiment Name: Zm_50ppm_KNO3_L-to-H_P Parameter: Timepoint (hr) Value: 48
  misc_feature: MA Experiment 20001614 PARAMETER Experiment Name: Zm_50ppm_KNO3_L-to-H_P Parameter: Tissue Value: Roots
  misc_feature: MA Experiment 20001614 PARAMETER Experiment Name: Zm_50ppm_KNO3_L-to-H_P Parameter: Treatment Value: 50ppm KNO3 vs. 50ppm KCl
atcgactcatcctcttgcacagcggcgcacacggtggggttcgcgcactgcagcacgttctcggaccggatccagccgcagtcggtggacccgacaatgaacgcgacgtacgcggaggacctgcaggcggcgtgcccggcgggggtggaccccaacatcgcgctgcagctggaccccgtgacgccgcaggccttcgacaaccagtacttcgccaacctggtggacggccgggggctgttcgcctccgaccaggtgctcttctccgacgcgcggtcgcagcccaccgtggtggcgtgggcgcagaacgccaccgccttcgagcaggccttcgtcgacgccatcaccaggctcggccgcgtcggcgtcaagaccgacccgtcgctgggggacgtccgccgcgactgcgccttcctcaactgaaaaggatggacatggagagctggtttatatctcacacaagtgttcatacacaatctagagtaaagtttttttgttgttgttattattatcatgtcaggtatgagcacaaggttgaattaatggttaatgcgattgatatactgtaagtggcacttgcattggtaggccaagaccgagatgtattccttttccttgttgattttgttcggtctcggagcaatatttgtttcagtgtt

SEQ ID NO: 9459 - protein, 187 aa, Zea mays subsp. mays
  peptide (1)..(187): Ceres Seq. ID no. 12347271
RLILLHSGAHGGVRALQHVLGPDPAAVGGPDNERDVRGGPAGGVPGGGGPQHRAAAGPRDAAGLRQPVLRQPGGRPGAVRLRPGALLRRAVAAHRGGVGAERHRLRAGLRRRHHQARPRRRQDRPVAGGRPPRLRLPQLKRMDMESWFISHTSVHTQSRVKFFCCCYYYHVRYEHKVELMVNAIDIL

SEQ ID NO: 9460 - protein, 139 aa, Zea mays subsp. mays
  peptide (1)..(139): Ceres Seq. ID no. 12347272
  misc_feature (2)..(102): Pfam Name: Peroxidase Pfam Description: Peroxidase
  misc_feature (2)..(138): Homolog of NCBI NO: 17027274 NR Description: putative peroxidase [Oryza sativa (japonica
  misc_feature (2)..(139): Homolog of NCBI NO: 34915320 NR Description: putative peroxidase [Oryza sativa (japonica >gi|22831350|dbj|BAC16194.1| putative peroxidase [Oryza sativa
  misc_feature (2)..(139): Homolog of NCBI NO: 15229646 NR Description: peroxidase, putative; protein id: At3g49960.1 thaliana] >gi|25453201|sp|Q96510|PE35_ARATH Peroxidase 35
  misc_feature (2)..(139): Homolog of NCBI NO: 15240737 NR Description: peroxidase, putative; protein id: At5g67400.1 thaliana] >gi|26397661|sp|Q43873|PE73_ARATH Peroxidase 73 (Atperox P73) (PRXR11) (ATP10a) >gi|1402902|emb|CAA66967.1|
  misc_feature (2)..(139): Homolog of NCBI NO: 28629828 NR Description: peroxidase 1 [Artemisia annua]
  misc_feature (2)..(139): Homolog of NCBI NO: 14485511 NR Description: putative peroxidase [Solanum tuberosum]
  misc_feature (2)..(139): Homolog of NCBI NO: 1546708 NR Description: peroxidase ATP9a [Arabidopsis thaliana]
  misc_feature (2)..(139): Homolog of NCBI NO: 15235597 NR Description: peroxidase, putative; protein id: At4g37520.1, by cDNA: 2583., supported by cDNA: gi_17065479, supported by gi_20148496 [Arabidopsis thaliana]
  misc_feature (2)..(139): Homolog of NCBI NO: 21554605 NR Description: peroxidase, prxr2 [Arabidopsis thaliana]
  misc_feature (2)..(139): Homolog of NCBI NO: 15235600 NR Description: peroxidase, putative; protein id: At4g37530.1, by cDNA: gi_18874553 [Arabidopsis thaliana] Peroxidase 51 precursor (Atperox P51) (ATP37)
IDSSSCTAAHTVGFAHCSTFSDRIQPQSVDPTMNATYAEDLQAACPAGVDPNIALQLDPVTPQAFDNQYFANLVDGRGLFASDQVLFSDARSQPTVVAWAQNATAFEQAFVDAITRLGRVGVKTDPSLGDVRRDCAFLN

SEQ ID NO: 9461 - protein, 107 aa, Zea mays subsp. mays
  peptide (1)..(107): Ceres Seq. ID no. 12347273
  misc_feature (1)..(70): Pfam Name: Peroxidase Pfam Description: Peroxidase
  misc_feature (1)..(106): Homolog of NCBI NO: 17027274 NR Description: putative peroxidase [Oryza sativa (japonica
  misc_feature (1)..(107): Homolog of NCBI NO: 34915320 NR Description: putative peroxidase [Oryza sativa (japonica >gi|22831350|dbj|BAC16194.1| putative peroxidase [Oryza sativa
  misc_feature (1)..(107): Homolog of NCBI NO: 15229646 NR Description: peroxidase, putative; protein id: At3g49960.1 thaliana] >gi|25453201|sp|Q96510|PE35_ARATH Peroxidase 35
  misc_feature (1)..(107): Homolog of NCBI NO: 15240737 NR Description: peroxidase, putative; protein id: At5g67400.1 thaliana] >gi|26397661|sp|Q43873|PE73_ARATH Peroxidase 73 (Atperox P73) (PRXR11) (ATP10a) >gi|1402902|emb|CAA66967.1|
  misc_feature (1)..(107): Homolog of NCBI NO: 28629828 NR Description: peroxidase 1 [Artemisia annua]
  misc_feature (1)..(107): Homolog of NCBI NO: 14485511 NR Description: putative peroxidase [Solanum tuberosum]
  misc_feature (1)..(107): Homolog of NCBI NO: 1546708 NR Description: peroxidase ATP9a [Arabidopsis thaliana]
  misc_feature (1)..(107): Homolog of NCBI NO: 21554605 NR Description: peroxidase, prxr2 [Arabidopsis thaliana]
  misc_feature (1)..(107): Homolog of NCBI NO: 15235597 NR Description: peroxidase, putative; protein id: At4g37520.1, by cDNA: 2583., supported by cDNA: gi_17065479, supported by gi_20148496 [Arabidopsis thaliana]
  misc_feature (1)..(107): Homolog of NCBI NO: 15235600 NR Description: peroxidase, putative; protein id: At4g37530.1, by cDNA: gi_18874553 [Arabidopsis thaliana] Peroxidase 51 precursor (Atperox P51) (ATP37)
MNATYAEDLQAACPAGVDPNIALQLDPVTPQAFDNQYFANLVDGRGLFASDQVLFSDARSQPTVVAWAQNATAFEQAFVDAITRLGRVGVKTDPSLGDVRRDCAFLN

SEQ ID NO: 9462 - DNA, 1993 bp, Zea mays subsp. mays
  misc_feature (1)..(1993): Ceres Seq. ID no. 13586155
  misc_feature: MA Experiment ID: 108527 Result: Up-regulated in Transcription
  misc_feature: MA Experiment 108527 PARAMETER Experiment Name: Zm_5mM_NO_P Parameter: Age (day) Value: 8
  misc_feature: MA Experiment 108527 PARAMETER Experiment Name: Zm_5mM_NO_P Parameter: Organism Value: Zea mays
  misc_feature: MA Experiment 108527 PARAMETER Experiment Name: Zm_5mM_NO_P Parameter: Plant Line Value: 35A19
  misc_feature: MA Experiment 108527 PARAMETER Experiment Name: Zm_5mM_NO_P Parameter: Timepoint (hr) Value: 6
  misc_feature: MA Experiment 108527 PARAMETER Experiment Name: Zm_5mM_NO_P Parameter: Tissue Value: Aerial
  misc_feature: MA Experiment 108527 PARAMETER Experiment Name: Zm_5mM_NO_P Parameter: Treatment Value: 5mM NO vs. No Treatment
  misc_feature: MA Experiment ID: 108529 Result: Up-regulated in Transcription
  misc_feature: MA Experiment 108529 PARAMETER Experiment Name: Zm_Imbibed_Seeds_P Parameter: Age (day) Value: 5 vs. 2
  misc_feature: MA Experiment 108529 PARAMETER Experiment Name: Zm_Imbibed_Seeds_P Parameter: Organism Value: Zea mays
  misc_feature: MA Experiment 108529 PARAMETER Experiment Name: Zm_Imbibed_Seeds_P Parameter: Plant Line Value: 35A19
  misc_feature: MA Experiment 108529 PARAMETER Experiment Name: Zm_Imbibed_Seeds_P Parameter: Tissue Value: Roots vs. Embryo
  misc_feature: MA Experiment ID: 108535 Result: Down-regulated in Transcription
  misc_feature: MA Experiment 108535 PARAMETER Experiment Name: Zm_Meristem_P Parameter: Age (day) Value: 8
  misc_feature: MA Experiment 108535 PARAMETER Experiment Name: Zm_Meristem_P Parameter: Organism Value: Zea mays
  misc_feature: MA Experiment 108535 PARAMETER Experiment Name: Zm_Meristem_P Parameter: Plant Line Value: 35A19
  misc_feature: MA Experiment 108535 PARAMETER Experiment Name: Zm_Meristem_P Parameter: Tissue Value: Root Meristem vs. Above Root Meristem
  misc_feature: MA Experiment ID: 108536 Result: Up-regulated in Transcription
  misc_feature: MA Experiment 108536 PARAMETER Experiment Name: Zm_Meristem_P Parameter: Age (day) Value: 8
  misc_feature: MA Experiment 108536 PARAMETER Experiment Name: Zm_Meristem_P Parameter: Organism Value: Zea mays
  misc_feature: MA Experiment 108536 PARAMETER Experiment Name: Zm_Meristem_P Parameter: Plant Line Value: 35A19
  misc_feature: MA Experiment 108536 PARAMETER Experiment Name: Zm_Meristem_P Parameter: Tissue Value: Shoot Meristem vs. Above Shoot Meristem
  misc_feature: MA Experiment ID: 108546 Result: Up-regulated in Transcription
  misc_feature: MA Experiment 108546 PARAMETER Experiment Name: Zm_Imbibed_Seeds_P Parameter: Age (day) Value: 3 vs. 2
  misc_feature: MA Experiment 108546 PARAMETER Experiment Name: Zm_Imbibed_Seeds_P Parameter: Organism Value: Zea mays
  misc_feature: MA Experiment 108546 PARAMETER Experiment Name: Zm_Imbibed_Seeds_P Parameter: Plant Line Value: 35A19
  misc_feature: MA Experiment 108546 PARAMETER Experiment Name: Zm_Imbibed_Seeds_P Parameter: Tissue Value: Roots vs. Embryo
  misc_feature: MA Experiment ID: 108559 Result: Up-regulated in Transcription
  misc_feature: MA Experiment 108559 PARAMETER Experiment Name: Zm_5mM_NO_P Parameter: Age (day) Value: 8
  misc_feature: MA Experiment 108559 PARAMETER Experiment Name: Zm_5mM_NO_P Parameter: Organism Value: Zea mays
  misc_feature: MA Experiment 108559 PARAMETER Experiment Name: Zm_5mM_NO_P Parameter: Plant Line Value: 35A19
  misc_feature: MA Experiment 108559 PARAMETER Experiment Name: Zm_5mM_NO_P Parameter: Timepoint (hr) Value: 12
  misc_feature: MA Experiment 108559 PARAMETER Experiment Name: Zm_5mM_NO_P Parameter: Tissue Value: Aerial
  misc_feature: MA Experiment 108559 PARAMETER Experiment Name: Zm_5mM_NO_P Parameter: Treatment Value: 5mM NO vs. No Treatment
  misc_feature: MA Experiment ID: 108687 Result: Up-regulated in Transcription
  misc_feature: MA Experiment 108687 PARAMETER Experiment Name: Zm_Embryos-Flowers__P Parameter: Tissue Value: Embryo vs. Aerial+
  misc_feature: MA Experiment ID: 108688 Result: Down-regulated in Transcription
  misc_feature: MA Experiment 108688 PARAMETER Experiment Name: Zm_Embryos-Flowers__P Parameter: Tissue Value: Immature Flowers vs. Aerial+
  misc_feature: MA Experiment ID: 20000477 Result: Up-regulated in Transcription
  misc_feature: MA Experiment 20000477 PARAMETER Experiment Name: Zm_5mM_SA_P Parameter: Age (day) Value: 10
  misc_feature: MA Experiment 20000477 PARAMETER Experiment Name: Zm_5mM_SA_P Parameter: Organism Value: Zea mays
  misc_feature: MA Experiment 20000477 PARAMETER Experiment Name: Zm_5mM_SA_P Parameter: Plant Line Value: 35A19
  misc_feature: MA Experiment 20000477 PARAMETER Experiment Name: Zm_5mM_SA_P Parameter: Timepoint (hr) Value: 48
  misc_feature: MA Experiment 20000477 PARAMETER Experiment Name: Zm_5mM_SA_P Parameter: Tissue Value: Aerial
  misc_feature: MA Experiment 20000477 PARAMETER Experiment Name: Zm_5mM_SA_P Parameter: Treatment Value: 5mM SA vs. No Treatment
  misc_feature: MA Experiment ID: 20000534 Result: Down-regulated in Transcription
  misc_feature: MA Experiment 20000534 PARAMETER Experiment Name: Zm_Hybrid_Pollen_P Parameter: Age (day) Value: 8
  misc_feature: MA Experiment 20000534 PARAMETER Experiment Name: Zm_Hybrid_Pollen_P Parameter: Organism Value: Zea mays
  misc_feature: MA Experiment 20000534 PARAMETER Experiment Name: Zm_Hybrid_Pollen_P Parameter: Plant Line Value: 35A19
  misc_feature: MA Experiment 20000534 PARAMETER Experiment Name: Zm_Hybrid_Pollen_P Parameter: Tissue Value: Pollen vs. Aerial
  misc_feature: MA Experiment ID: 20000535 Result: Down-regulated in Transcription
  misc_feature: MA Experiment 20000535 PARAMETER Experiment Name: Zm_Hybrid_Seed_Dev_P Parameter: DAP Value: 30 vs. 12
  misc_feature: MA Experiment 20000535 PARAMETER Experiment Name: Zm_Hybrid_Seed_Dev_P Parameter: Organism Value: Zea mays
  misc_feature: MA Experiment 20000535 PARAMETER Experiment Name: Zm_Hybrid_Seed_Dev_P Parameter: Plant Line Value: 35A19
  misc_feature: MA Experiment 20000535 PARAMETER Experiment Name: Zm_Hybrid_Seed_Dev_P Parameter: Tissue Value: Embryo vs. Unfert Floret
  misc_feature: MA Experiment ID: 20001608 Result: Down-regulated in Transcription
  misc_feature: MA Experiment 20001608 PARAMETER Experiment Name: Zm_50ppm_KNO3_L-to-H_P Parameter: Age (day) Value: 21
  misc_feature: MA Experiment 20001608 PARAMETER Experiment Name: Zm_50ppm_KNO3_L-to-H_P Parameter: Organism Value: Zea mays
  misc_feature: MA Experiment 20001608 PARAMETER Experiment Name: Zm_50ppm_KNO3_L-to-H_P Parameter: Plant Line Value: 35A19
  misc_feature: MA Experiment 20001608 PARAMETER Experiment Name: Zm_50ppm_KNO3_L-to-H_P Parameter: Timepoint (hr) Value: 48
  misc_feature: MA Experiment 20001608 PARAMETER Experiment Name: Zm_50ppm_KNO3_L-to-H_P Parameter: Tissue Value: Shoots
  misc_feature: MA Experiment 20001608 PARAMETER Experiment Name: Zm_50ppm_KNO3_L-to-H_P Parameter: Treatment Value: 50ppm KNO3 vs. 50ppm KCl
cttttttccttttcttttatcttatggttggctgtcccgtcccgtccatcagccgccacaccacaaacacccaccactctgctctcgcccgcttgctttctctcccccgctccagcttatggcggaggcggcgccagcagccggcggcggcatcggggacatcctcgccacgagcgatcgggacttcctcgtccgcaactccggcgagcaggtgaagatcagcagcgttgaggcgagccctgtggccatctacttctccgcctcatggtgcccgccatgcaggaggttcacgcccaagcttattgaagtatacgaaaaactggcctcacagggcaagagcttcgaggtcgtctttgcttcggccgatcgcaatgaggaagctttcaatgaatactttgcaaagatgccatggttggctgtccccttttctgacagtgaaggccgtgaggcccttgatggccagttcaaggtctctggtatcccacacctggtcatcctggatgcaaaaactggtgaagtttacactgaagatggtgttgaattcgtgagtgagtatggcgtggaggcttaccctttcacaccagatcggatcaatgaactgaaggaacaggaaaaggcagaaaaggagaatcaaactattcaaagcgtgcttgtcacatctactcgagactatctcatttcaaacaagggagacaaggtacccatctctgagcttgaggggaagtatgttggtctttgctttgtggtggatggctttccaccactcgctgaattcactgaggtgcttgctaagatctatgagaaactcaaagaagtgggagagaaatttgaagttgtagctgtatccttggacagtgaagagtcatcatttaatgagagttttgcaaagatgccttggcttgcaattcctcaaggtgacattaagtgtcagacgctggttcgttactttgagcttagttctcttccaacactagttctgattggccctgatgggaagacactgaacaacaatgtcgccgacataattgacgaccatggttttgaggcatgggagggcttccccttcagtgctgagaagctggaaattcttgctgagaaggcaaagattaaagctgcatcacagaccttggagtccattctaatcagtggtcatttagactttgtcattggaaaagatggtgcaaaggttcctgtatcagaacttgttgggaagactgtccttgtttacttctcaggaaaatggtgcccaccatgccgtgccttcctgcccacacttgtcaaggagtacaacaagatcaaagagaagaacagtgattttgagatcgtcttcatctctagtgacgaggatcagagctcattcgatgattttttctctgaaatgccatggcttgctgtaccctgggaagatgaaaggaaagcatcgctgaagaaaaccttcaagatccgtggaatcccttcacttgtcgccatcggacctactgggcagacagtcagcagggacgcaaagtcccagctgatgatccacggtgctgatgctttcccattcaccgaggagagacttgaggagctacagaagaagctggatgagatggcgaaggggtggcctcagaagctgaagcatgagctgcatgacgagcacgaacttgtcctgctgcgccgtggtacgtaccgctgtgatggttgtaacgagatgggcagcagctggtcctacaggtgcgacgagtgtgactttgacctgcaccccaagtgcgcgttgggtgaggaaaagatgggcgaggaagcccctgctgggtatgtgtgcgagggaggcgtgtgcaggaaggcctaatctgaatgctgtgaaggatgacaataatcgtgagatggctgtgttttgatgtaaggtttttcggccgttgatgtttgtgtgttaataaatagtagttgcaggagcaaatgtgtgtatgcaaaactatgtgagtattgtgtcagatcaaagtaatggttttgctgc

SEQ ID NO: 9463 - protein, 608 aa, Zea mays subsp. mays
  peptide (1)..(608): Ceres Seq. ID no. 13586156
  misc_feature (77)..(119): Pfam Name: Thioredoxin Pfam Description: Thioredoxin
  misc_feature (40)..(608): Homolog of NCBI NO: 4056568 NR Description: PDI-like protein [Zea mays]
  misc_feature (40)..(608): Homolog of NCBI NO: 18406743 NR Description: expressed protein [Arabidopsis thaliana]
  misc_feature (40)..(608): Homolog of NCBI NO: 21592996 NR Description: PDI-like protein [Arabidopsis thaliana]
  misc_feature (54)..(532): Homolog of NCBI NO: 23304737 NR Description: PDI-like protein [Quercus suber]
  misc_feature (209)..(590): Homolog of NCBI NO: 18417767 NR Description: receptor kinase -related [Arabidopsis thaliana] unknown protein [Arabidopsis thaliana]
  misc_feature (63)..(485): Homolog of NCBI NO: 38567893 NR Description: OSJNBa0060N03.13 [Oryza sativa (japonica
  misc_feature (51)..(368): Homolog of NCBI NO: 23304737 NR Description: PDI-like protein [Quercus suber]
  misc_feature (215)..(555): Homolog of NCBI NO: 23304737 NR Description: PDI-like protein [Quercus suber]
  misc_feature (49)..(428): Homolog of NCBI NO: 18417767 NR Description: receptor kinase -related [Arabidopsis thaliana] unknown protein [Arabidopsis thaliana]
  misc_feature (225)..(550): Homolog of NCBI NO: 38567893 NR Description: OSJNBa0060N03.13 [Oryza sativa (japonica
FFPFLLSYGWLSRPVHQPPHHKHPPLCSRPLAFSPPLQLMAEAAPAAGGGIGDILATSDRDFLVRNSGEQVKISSVEASPVAIYFSASWCPPCRRFTPKLIEVYEKLASQGKSFEVVFASADRNEEAFNEYFAKMPWLAVPFSDSEGREALDGQFKVSGIPHLVILDAKTGEVYTEDGVEFVSEYGVEAYPFTPDRINELKEQEKAEKENQTIQSVLVTSTRDYLISNKGDKVPISELEGKYVGLCFVVDGFPPLAEFTEVLAKIYEKLKEVGEKFEVVAVSLDSEESSFNESFAKMPWLAIPQGDIKCQTLVRYFELSSLPTLVLIGPDGKTLNNNVADIIDDHGFEAWEGFPFSAEKLEILAEKAKIKAASQTLESILISGHLDFVIGKDGAKVPVSELVGKTVLVYFSGKWCPPCRAFLPTLVKEYNKIKEKNSDFEIVFISSDEDQSSFDDFFSEMPWLAVPWEDERKASLKKTFKIRGIPSLVAIGPTGQTVSRDAKSQLMIHGADAFPFTEERLEELQKKLDEMAKGWPQKLKHELHDEHELVLLRRGTYRCDGCNEMGSSWSYRCDECDFDLHPKCALGEEKMGEEAPAGYVCEGGVCRKA

SEQ ID NO: 9464 - protein, 569 aa, Zea mays subsp. mays
  peptide (1)..(569): Ceres Seq. ID no. 13586157
  misc_feature (38)..(80): Pfam Name: Thioredoxin Pfam Description: Thioredoxin
  misc_feature (1)..(569): Homolog of NCBI NO: 4056568 NR Description: PDI-like protein [Zea mays]
  misc_feature (1)..(569): Homolog of NCBI NO: 18406743 NR Description: expressed protein [Arabidopsis thaliana]
  misc_feature (1)..(569): Homolog of NCBI NO: 21592996 NR Description: PDI-like protein [Arabidopsis thaliana]
  misc_feature (15)..(493): Homolog of NCBI NO: 23304737 NR Description: PDI-like protein [Quercus suber]
  misc_feature (170)..(551): Homolog of NCBI NO: 18417767 NR Description: receptor kinase -related [Arabidopsis thaliana] unknown protein [Arabidopsis thaliana]
  misc_feature (24)..(446): Homolog of NCBI NO: 38567893 NR Description: OSJNBa0060N03.13 [Oryza sativa (japonica
  misc_feature (12)..(329): Homolog of NCBI NO: 23304737 NR Description: PDI-like protein [Quercus suber]
  misc_feature (176)..(516): Homolog of NCBI NO: 23304737 NR Description: PDI-like protein [Quercus suber]
  misc_feature (10)..(389): Homolog of NCBI NO: 18417767 NR Description: receptor kinase -related [Arabidopsis thaliana] unknown protein [Arabidopsis thaliana]
  misc_feature (186)..(511): Homolog of NCBI NO: 38567893 NR Description: OSJNBa0060N03.13 [Oryza sativa (japonica
MAEAAPAAGGGIGDILATSDRDFLVRNSGEQVKISSVEASPVAIYFSASWCPPCRRFTPKLIEVYEKLASQGKSFEVVFASADRNEEAFNEYFAKMPWLAVPFSDSEGREALDGQFKVSGIPHLVILDAKTGEVYTEDGVEFVSEYGVEAYPFTPDRINELKEQEKAEKENQTIQSVLVTSTRDYLISNKGDKVPISELEGKYVGLCFVVDGFPPLAEFTEVLAKIYEKLKEVGEKFEVVAVSLDSEESSFNESFAKMPWLAIPQGDIKCQTLVRYFELSSLPTLVLIGPDGKTLNNNVADIIDDHGFEAWEGFPFSAEKLEILAEKAKIKAASQTLESILISGHLDFVIGKDGAKVPVSELVGKTVLVYFSGKWCPPCRAFLPTLVKEYNKIKEKNSDFEIVFISSDEDQSSFDDFFSEMPWLAVPWEDERKASLKKTFKIRGIPSLVAIGPTGQTVSRDAKSQLMIHGADAFPFTEERLEELQKKLDEMAKGWPQKLKHELHDEHELVLLRRGTYRCDGCNEMGSSWSYRCDECDFDLHPKCALGEEKMGEEAPAGYVCEGGVCRKA

SEQ ID NO: 9465 - protein, 474 aa, Zea mays subsp. mays
  peptide (1)..(474): Ceres Seq. ID no. 13586158
  misc_feature (422)..(450): Pfam Name: DC1 domain Pfam Description: DC1 domain
  misc_feature (1)..(474): Homolog of NCBI NO: 4056568 NR Description: PDI-like protein [Zea mays]
  misc_feature (1)..(474): Homolog of NCBI NO: 18406743 NR Description: expressed protein [Arabidopsis thaliana]
  misc_feature (1)..(474): Homolog of NCBI NO: 21592996 NR Description: PDI-like protein [Arabidopsis thaliana]
  misc_feature (1)..(398): Homolog of NCBI NO: 23304737 NR Description: PDI-like protein [Quercus suber]
  misc_feature (75)..(456): Homolog of NCBI NO: 18417767 NR Description: receptor kinase -related [Arabidopsis thaliana] unknown protein [Arabidopsis thaliana]
  misc_feature (1)..(351): Homolog of NCBI NO: 38567893 NR Description: OSJNBa0060N03.13 [Oryza sativa (japonica
  misc_feature (1)..(234): Homolog of NCBI NO: 23304737 NR Description: PDI-like protein [Quercus suber]
  misc_feature (81)..(421): Homolog of NCBI NO: 23304737 NR Description: PDI-like protein [Quercus suber]
  misc_feature (1)..(294): Homolog of NCBI NO: 18417767 NR Description: receptor kinase -related [Arabidopsis thaliana] unknown protein [Arabidopsis thaliana]
  misc_feature (91)..(416): Homolog of NCBI NO: 38567893 NR Description: OSJNBa0060N03.13 [Oryza sativa (japonica
MPWLAVPFSDSEGREALDGQFKVSGIPHLVILDAKTGEVYTEDGVEFVSEYGVEAYPFTPDRINELKEQEKAEKENQTIQSVLVTSTRDYLISNKGDKVPISELEGKYVGLCFVVDGFPPLAEFTEVLAKIYEKLKEVGEKFEVVAVSLDSEESSFNESFAKMPWLAIPQGDIKCQTLVRYFELSSLPTLVLIGPDGKTLNNNVADIIDDHGFEAWEGFPFSAEKLEILAEKAKIKAASQTLESILISGHLDFVIGKDGAKVPVSELVGKTVLVYFSGKWCPPCRAFLPTLVKEYNKIKEKNSDFEIVFISSDEDQSSFDDFFSEMPWLAVPWEDERKASLKKTFKIRGIPSLVAIGPTGQTVSRDAKSQLMIHGADAFPFTEERLEELQKKLDEMAKGWPQKLKHELHDEHELVLLRRGTYRCDGCNEMGSSWSYRCDECDFDLHPKCALGEEKMGEEAPAGYVCEGGVCRKA

SEQ ID NO: 9466 - DNA, 793 bp, Zea mays subsp. mays
  misc_feature (1)..(793): Ceres Seq. ID no. 12415980
  misc_feature: MA Experiment ID: 108503 Result: Up-regulated in Transcription
  misc_feature: MA Experiment 108503 PARAMETER Experiment Name: Zm_Drought_P Parameter: Age (day) Value: 8
  misc_feature: MA Experiment 108503 PARAMETER Experiment Name: Zm_Drought_P Parameter: Organism Value: Zea mays
  misc_feature: MA Experiment 108503 PARAMETER Experiment Name: Zm_Drought_P Parameter: Plant Line Value: 35A19
  misc_feature: MA Experiment 108503 PARAMETER Experiment Name: Zm_Drought_P Parameter: Timepoint (hr) Value: 6
  misc_feature: MA Experiment 108503 PARAMETER Experiment Name: Zm_Drought_P Parameter: Tissue Value: Aerial
  misc_feature: MA Experiment 108503 PARAMETER Experiment Name: Zm_Drought_P Parameter: Treatment Value: Drought vs. No Drought
  misc_feature: MA Experiment ID: 108504 Result: Up-regulated in Transcription
  misc_feature: MA Experiment 108504 PARAMETER Experiment Name: Zm_Drought_P Parameter: Age (day) Value: 8
  misc_feature: MA Experiment 108504 PARAMETER Experiment Name: Zm_Drought_P Parameter: Organism Value: Zea mays
  misc_feature: MA Experiment 108504 PARAMETER Experiment Name: Zm_Drought_P Parameter: Plant Line Value: 35A19
  misc_feature: MA Experiment 108504 PARAMETER Experiment Name: Zm_Drought_P Parameter: Timepoint (hr) Value: 12
  misc_feature: MA Experiment 108504 PARAMETER Experiment Name: Zm_Drought_P Parameter: Tissue Value: Aerial
  misc_feature: MA Experiment 108504 PARAMETER Experiment Name: Zm_Drought_P Parameter: Treatment Value: Drought vs. No Drought
  misc_feature: MA Experiment ID: 108515 Result: Up-regulated in Transcription
  misc_feature: MA Experiment 108515 PARAMETER Experiment Name: Zm_2mM_SA_P Parameter: Age (day) Value: 8
  misc_feature: MA Experiment 108515 PARAMETER Experiment Name: Zm_2mM_SA_P Parameter: Organism Value: Zea mays
  misc_feature: MA Experiment 108515 PARAMETER Experiment Name: Zm_2mM_SA_P Parameter: Plant Line Value: 35A19
  misc_feature: MA Experiment 108515 PARAMETER Experiment Name: Zm_2mM_SA_P Parameter: Timepoint (hr) Value: 12
  misc_feature: MA Experiment 108515 PARAMETER Experiment Name: Zm_2mM_SA_P Parameter: Tissue Value: Aerial
  misc_feature: MA Experiment 108515 PARAMETER Experiment Name: Zm_2mM_SA_P Parameter: Treatment Value: 2mM SA vs. No Treatment
  misc_feature: MA Experiment ID: 108526 Result: Up-regulated in Transcription
  misc_feature: MA Experiment 108526 PARAMETER Experiment Name: Zm_5mM_NO_P Parameter: Age (day) Value: 8
  misc_feature: MA Experiment 108526 PARAMETER Experiment Name: Zm_5mM_NO_P Parameter: Organism Value: Zea mays
  misc_feature: MA Experiment 108526 PARAMETER Experiment Name: Zm_5mM_NO_P Parameter: Plant Line Value: 35A19
  misc_feature: MA Experiment 108526 PARAMETER Experiment Name: Zm_5mM_NO_P Parameter: Timepoint (hr) Value: 1
  misc_feature: MA Experiment 108526 PARAMETER Experiment Name: Zm_5mM_NO_P Parameter: Tissue Value: Aerial
  misc_feature: MA Experiment 108526 PARAMETER Experiment Name: Zm_5mM_NO_P Parameter: Treatment Value: 5mM NO vs. No Treatment
  misc_feature: MA Experiment ID: 108527 Result: Up-regulated in Transcription
  misc_feature: MA Experiment 108527 PARAMETER Experiment Name: Zm_5mM_NO_P Parameter: Age (day) Value: 8
  misc_feature: MA Experiment 108527 PARAMETER Experiment Name: Zm_5mM_NO_P Parameter: Organism Value: Zea mays
  misc_feature: MA Experiment 108527 PARAMETER Experiment Name: Zm_5mM_NO_P Parameter: Plant Line Value: 35A19
  misc_feature: MA Experiment 108527 PARAMETER Experiment Name: Zm_5mM_NO_P Parameter: Timepoint (hr) Value: 6
  misc_feature: MA Experiment 108527 PARAMETER Experiment Name: Zm_5mM_NO_P Parameter: Tissue Value: Aerial
  misc_feature: MA Experiment 108527 PARAMETER Experiment Name: Zm_5mM_NO_P Parameter: Treatment Value: 5mM NO vs. No Treatment
  misc_feature: MA Experiment ID: 108528 Result: Down-regulated in Transcription
  misc_feature: MA Experiment 108528 PARAMETER Experiment Name: Zm_Imbibed_Seeds_P Parameter: Age (day) Value: 5 vs. 2
  misc_feature: MA Experiment 108528 PARAMETER Experiment Name: Zm_Imbibed_Seeds_P Parameter: Organism Value: Zea mays
  misc_feature: MA Experiment 108528 PARAMETER Experiment Name: Zm_Imbibed_Seeds_P Parameter: Plant Line Value: 35A19
  misc_feature: MA Experiment 108528 PARAMETER Experiment Name: Zm_Imbibed_Seeds_P Parameter: Tissue Value: Aerial vs. Embryo
  misc_feature: MA Experiment ID: 108530 Result: Down-regulated in Transcription
  misc_feature: MA Experiment 108530 PARAMETER Experiment Name: Zm_Imbibed_Seeds_P Parameter: Age (day) Value: 6 vs. 2
  misc_feature: MA Experiment 108530 PARAMETER Experiment Name: Zm_Imbibed_Seeds_P Parameter: Organism Value: Zea mays
  misc_feature: MA Experiment 108530 PARAMETER Experiment Name: Zm_Imbibed_Seeds_P Parameter: Plant Line Value: 35A19
  misc_feature: MA Experiment 108530 PARAMETER Experiment Name: Zm_Imbibed_Seeds_P Parameter: Tissue Value: Aerial vs. Embryo
  misc_feature: MA Experiment ID: 108534 Result: Up-regulated in Transcription
  misc_feature: MA Experiment 108534 PARAMETER Experiment Name: Zm_4deg_Cold_P Parameter: Age (hr) Value: 8
  misc_feature: MA Experiment 108534 PARAMETER Experiment Name: Zm_4deg_Cold_P Parameter: Organism Value: Zea mays
  misc_feature: MA Experiment 108534 PARAMETER Experiment Name: Zm_4deg_Cold_P Parameter: Plant Line Value: 35A19
  misc_feature: MA Experiment 108534 PARAMETER Experiment Name: Zm_4deg_Cold_P Parameter: Temperature (deg C) Value: 4 vs. 22
  misc_feature: MA Experiment 108534 PARAMETER Experiment Name: Zm_4deg_Cold_P Parameter: Timepoint (hr) Value: 6
  misc_feature: MA Experiment 108534 PARAMETER Experiment Name: Zm_4deg_Cold_P Parameter: Tissue Value: Aerial
  misc_feature: MA Experiment ID: 108536 Result: Up-regulated in Transcription
  misc_feature: MA Experiment 108536 PARAMETER Experiment Name: Zm_Meristem_P Parameter: Age (day) Value: 8
  misc_feature: MA Experiment 108536 PARAMETER Experiment Name: Zm_Meristem_P Parameter: Organism Value: Zea mays
  misc_feature: MA Experiment 108536 PARAMETER Experiment Name: Zm_Meristem_P Parameter: Plant Line Value: 35A19
  misc_feature: MA Experiment 108536 PARAMETER Experiment Name: Zm_Meristem_P Parameter: Tissue Value: Shoot Meristem vs. Above Shoot Meristem
  misc_feature: MA Experiment ID: 108545 Result: Down-regulated in Transcription
  misc_feature: MA Experiment 108545 PARAMETER Experiment Name: Zm_Imbibed_Seeds_P Parameter: Age (day) Value: 3 vs. 2
  misc_feature: MA Experiment 108545 PARAMETER Experiment Name: Zm_Imbibed_Seeds_P Parameter: Organism Value: Zea mays
  misc_feature: MA Experiment 108545 PARAMETER Experiment Name: Zm_Imbibed_Seeds_P Parameter: Plant Line Value: 35A19
  misc_feature: MA Experiment 108545 PARAMETER Experiment Name: Zm_Imbibed_Seeds_P Parameter: Tissue Value: Aerial vs. Embryo
  misc_feature: MA Experiment ID: 108547 Result: Down-regulated in Transcription
  misc_feature: MA Experiment 108547 PARAMETER Experiment Name: Zm_Imbibed_Seeds_P Parameter: Age (day) Value: 4 vs. 2
  misc_feature: MA Experiment 108547 PARAMETER Experiment Name: Zm_Imbibed_Seeds_P Parameter: Organism Value: Zea mays
  misc_feature: MA Experiment 108547 PARAMETER Experiment Name: Zm_Imbibed_Seeds_P Parameter: Plant Line Value: 35A19
  misc_feature: MA Experiment 108547 PARAMETER Experiment Name: Zm_Imbibed_Seeds_P Parameter: Tissue Value: Aerial vs. Embryo
  misc_feature: MA Experiment ID: 108556 Result: Down-regulated in Transcription
  misc_feature: MA Experiment 108556 PARAMETER Experiment Name: Zm_Drought_P Parameter: Age (day) Value: 9
  misc_feature: MA Experiment 108556 PARAMETER Experiment Name: Zm_Drought_P Parameter: Organism Value: Zea mays
  misc_feature: MA Experiment 108556 PARAMETER Experiment Name: Zm_Drought_P Parameter: Plant Line Value: 35A19
  misc_feature: MA Experiment 108556 PARAMETER Experiment Name: Zm_Drought_P Parameter: Timepoint (hr) Value: 24
  misc_feature: MA Experiment 108556 PARAMETER Experiment Name: Zm_Drought_P Parameter: Tissue Value: Aerial
  misc_feature: MA Experiment 108556 PARAMETER Experiment Name: Zm_Drought_P Parameter: Treatment Value: Drought vs. No Drought
  misc_feature: MA Experiment ID: 108597 Result: Up-regulated in Transcription
  misc_feature: MA Experiment 108597 PARAMETER Experiment Name: Zm_100uM_ABA_P Parameter: Age (day) Value: 9
  misc_feature: MA Experiment 108597 PARAMETER Experiment Name: Zm_100uM_ABA_P Parameter: Organism Value: Zea mays
  misc_feature: MA Experiment 108597 PARAMETER Experiment Name: Zm_100uM_ABA_P Parameter: Plant Line Value: 35A19
  misc_feature: MA Experiment 108597 PARAMETER Experiment Name: Zm_100uM_ABA_P Parameter: Timepoint (hr) Value: 24
  misc_feature: MA Experiment 108597 PARAMETER Experiment Name: Zm_100uM_ABA_P Parameter: Tissue Value: Aerial
  misc_feature: MA Experiment 108597 PARAMETER Experiment Name: Zm_100uM_ABA_P Parameter: Treatment Value: 100uM ABA vs. No Treatment
  misc_feature: MA Experiment ID: 108687 Result: Up-regulated in Transcription
  misc_feature: MA Experiment 108687 PARAMETER Experiment Name: Zm_Embryos-Flowers__P Parameter: Tissue Value: Embryo vs. Aerial+
  misc_feature: MA Experiment ID: 108688 Result: Down-regulated in Transcription
  misc_feature: MA Experiment 108688 PARAMETER Experiment Name: Zm_Embryos-Flowers__P Parameter: Tissue Value: Immature Flowers vs. Aerial+
  misc_feature: MA Experiment ID: 108689 Result: Down-regulated in Transcription
  misc_feature: MA Experiment 108689 PARAMETER Experiment Name: Zm_Drought_Roots_P Parameter: Age (day) Value: 9
  misc_feature: MA Experiment 108689 PARAMETER Experiment Name: Zm_Drought_Roots_P Parameter: Organism Value: Zea mays
  misc_feature: MA Experiment 108689 PARAMETER Experiment Name: Zm_Drought_Roots_P Parameter: Plant Line Value: 35A19
  misc_feature: MA Experiment 108689 PARAMETER Experiment Name: Zm_Drought_Roots_P Parameter: Timepoint (hr) Value: 24
  misc_feature: MA Experiment 108689 PARAMETER Experiment Name: Zm_Drought_Roots_P Parameter: Tissue Value: Roots
  misc_feature: MA Experiment 108689 PARAMETER Experiment Name: Zm_Drought_Roots_P Parameter: Treatment Value: Drought vs. No Drought
  misc_feature: MA Experiment ID: 20000477 Result: Up-regulated in Transcription
  misc_feature: MA Experiment 20000477 PARAMETER Experiment Name: Zm_5mM_SA_P Parameter: Age (day) Value: 10
  misc_feature: MA Experiment 20000477 PARAMETER Experiment Name: Zm_5mM_SA_P Parameter: Organism Value: Zea mays
  misc_feature: MA Experiment 20000477 PARAMETER Experiment Name: Zm_5mM_SA_P Parameter: Plant Line Value: 35A19
  misc_feature: MA Experiment 20000477 PARAMETER Experiment Name: Zm_5mM_SA_P Parameter: Timepoint (hr) Value: 48
  misc_feature: MA Experiment 20000477 PARAMETER Experiment Name: Zm_5mM_SA_P Parameter: Tissue Value: Aerial
  misc_feature: MA Experiment 20000477 PARAMETER Experiment Name: Zm_5mM_SA_P Parameter: Treatment Value: 5mM SA vs. No Treatment
  misc_feature: MA Experiment ID: 20000478 Result: Up-regulated in Transcription
  misc_feature: MA Experiment 20000478 PARAMETER Experiment Name: Zm_5mM_SA_P Parameter: Age (day) Value: 11
  misc_feature: MA Experiment 20000478 PARAMETER Experiment Name: Zm_5mM_SA_P Parameter: Organism Value: Zea mays
  misc_feature: MA Experiment 20000478 PARAMETER Experiment Name: Zm_5mM_SA_P Parameter: Plant Line Value: 35A19
  misc_feature: MA Experiment 20000478 PARAMETER Experiment Name: Zm_5mM_SA_P Parameter: Timepoint (hr) Value: 72
  misc_feature: MA Experiment 20000478 PARAMETER Experiment Name: Zm_5mM_SA_P Parameter: Tissue Value: Aerial
  misc_feature: MA Experiment 20000478 PARAMETER Experiment Name: Zm_5mM_SA_P Parameter: Treatment Value: 5mM SA vs. No Treatment
  misc_feature: MA Experiment ID: 20000479 Result: Up-regulated in Transcription
  misc_feature: MA Experiment 20000479 PARAMETER Experiment Name: Zm_Drought_P Parameter: Age (day) Value: 10
  misc_feature: MA Experiment 20000479 PARAMETER Experiment Name: Zm_Drought_P Parameter: Organism Value: Zea mays
  misc_feature: MA Experiment 20000479 PARAMETER Experiment Name: Zm_Drought_P Parameter: Plant Line Value: 35A19
  misc_feature: MA Experiment 20000479 PARAMETER Experiment Name: Zm_Drought_P Parameter: Timepoint (hr) Value: 48
  misc_feature: MA Experiment 20000479 PARAMETER Experiment Name: Zm_Drought_P Parameter: Tissue Value: Aerial
  misc_feature: MA Experiment 20000479 PARAMETER Experiment Name: Zm_Drought_P Parameter: Treatment Value: Drought vs. No Drought
  misc_feature: MA Experiment ID: 20000480 Result: Up-regulated in Transcription
  misc_feature: MA Experiment 20000480 PARAMETER Experiment Name: Zm_Drought_P Parameter: Age (day) Value: 11
  misc_feature: MA Experiment 20000480 PARAMETER Experiment Name: Zm_Drought_P Parameter: Organism Value: Zea mays
  misc_feature: MA Experiment 20000480 PARAMETER Experiment Name: Zm_Drought_P Parameter: Plant Line Value: 35A19
  misc_feature: MA Experiment 20000480 PARAMETER Experiment Name: Zm_Drought_P Parameter: Timepoint (hr) Value: 72
  misc_feature: MA Experiment 20000480 PARAMETER Experiment Name: Zm_Drought_P Parameter: Tissue Value: Aerial
  misc_feature: MA Experiment 20000480 PARAMETER Experiment Name: Zm_Drought_P Parameter: Treatment Value: Drought vs. No Drought
  misc_feature: MA Experiment ID: 20000487 Result: Down-regulated in Transcription
  misc_feature: MA Experiment 20000487 PARAMETER Experiment Name: Zm_50mM_NH4NO3_L_to_H_P Parameter: Organism Value: Zea mays
  misc_feature: MA Experiment 20000487 PARAMETER Experiment Name: Zm_50mM_NH4NO3_L_to_H_P Parameter: Timepoint (hr) Value: 4
  misc_feature: MA Experiment 20000487 PARAMETER Experiment Name: Zm_50mM_NH4NO3_L_to_H_P Parameter: Tissue Value: Leaves
  misc_feature: MA Experiment 20000487 PARAMETER Experiment Name: Zm_50mM_NH4NO3_L_to_H_P Parameter: Treatment Value: 50mM NH4NO3 vs. 100mM Mannitol
  misc_feature: MA Experiment ID: 20000488 Result: Down-regulated in Transcription
  misc_feature: MA Experiment 20000488 PARAMETER Experiment Name: Zm_50mM_NH4NO3_L_to_H_P Parameter: Organism Value: Zea mays
  misc_feature: MA Experiment 20000488 PARAMETER Experiment Name: Zm_50mM_NH4NO3_L_to_H_P Parameter: Timepoint (hr) Value: 8
  misc_feature: MA Experiment 20000488 PARAMETER Experiment Name: Zm_50mM_NH4NO3_L_to_H_P Parameter: Tissue Value: Leaves
  misc_feature: MA Experiment 20000488 PARAMETER Experiment Name: Zm_50mM_NH4NO3_L_to_H_P Parameter: Treatment Value: 50mM NH4NO3 vs. 100mM Mannitol
  misc_feature: MA Experiment ID: 20000532 Result: Up-regulated in Transcription
  misc_feature: MA Experiment 20000532 PARAMETER Experiment Name: Zm_0.001percent_MeJA_P Parameter: Age (day) Value: 10
  misc_feature: MA Experiment 20000532 PARAMETER Experiment Name: Zm_0.001percent_MeJA_P Parameter: Organism Value: Zea mays
  misc_feature: MA Experiment 20000532 PARAMETER Experiment Name: Zm_0.001percent_MeJA_P Parameter: Plant Line Value: 35A19
  misc_feature: MA Experiment 20000532 PARAMETER Experiment Name: Zm_0.001percent_MeJA_P Parameter: Timepoint (hr) Value: 48
  misc_feature: MA Experiment 20000532 PARAMETER Experiment Name: Zm_0.001percent_MeJA_P Parameter: Tissue Value: Aerial
  misc_feature: MA Experiment 20000532 PARAMETER Experiment Name: Zm_0.001percent_MeJA_P Parameter: Treatment Value: 0.001percent MeJA vs. No Treatment
  misc_feature: MA Experiment ID: 20000533 Result: Up-regulated in Transcription
  misc_feature: MA Experiment 20000533 PARAMETER Experiment Name: Zm_0.001percent_MeJA_P Parameter: Age (day) Value: 11
  misc_feature: MA Experiment 20000533 PARAMETER Experiment Name: Zm_0.001percent_MeJA_P Parameter: Organism Value: Zea mays
  misc_feature: MA Experiment 20000533 PARAMETER Experiment Name: Zm_0.001percent_MeJA_P Parameter: Plant Line Value: 35A19
  misc_feature: MA Experiment 20000533 PARAMETER Experiment Name: Zm_0.001percent_MeJA_P Parameter: Timepoint (hr) Value: 72
  misc_feature: MA Experiment 20000533 PARAMETER Experiment Name: Zm_0.001percent_MeJA_P Parameter: Tissue Value: Aerial
  misc_feature: MA Experiment 20000533 PARAMETER Experiment Name: Zm_0.001percent_MeJA_P Parameter: Treatment Value: 0.001percent MeJA vs. No Treatment
  misc_feature: MA Experiment ID: 20000535 Result: Up-regulated in Transcription
  misc_feature: MA Experiment 20000535 PARAMETER Experiment Name: Zm_Hybrid_Seed_Dev_P Parameter: DAP Value: 30 vs. 12
  misc_feature: MA Experiment 20000535 PARAMETER Experiment Name: Zm_Hybrid_Seed_Dev_P Parameter: Organism Value: Zea mays
  misc_feature: MA Experiment 20000535 PARAMETER Experiment Name: Zm_Hybrid_Seed_Dev_P Parameter: Plant Line Value: 35A19
  misc_feature: MA Experiment 20000535 PARAMETER Experiment Name: Zm_Hybrid_Seed_Dev_P Parameter: Tissue Value: Embryo vs. Unfert Floret
  misc_feature: MA Experiment ID: 20000626 Result: Up-regulated in Transcription
  misc_feature: MA Experiment 20000626 PARAMETER Experiment Name: Zm_Herbicide-Treatments_P Parameter: Timepoint (hr) Value: 12
  misc_feature: MA Experiment 20000626 PARAMETER Experiment Name: Zm_Herbicide-Treatments_P Parameter: Tissue Value: Aerial
  misc_feature: MA Experiment 20000626 PARAMETER Experiment Name: Zm_Herbicide-Treatments_P Parameter: Treatment Value: Roundup vs. No Treatment
  misc_feature: MA Experiment ID: 20000627 Result: Up-regulated in Transcription
  misc_feature: MA Experiment 20000627 PARAMETER Experiment Name: Zm_Herbicide-Treatments_P Parameter: Timepoint (hr) Value: 12
  misc_feature: MA Experiment 20000627 PARAMETER Experiment Name: Zm_Herbicide-Treatments_P Parameter: Tissue Value: Aerial
  misc_feature: MA Experiment 20000627 PARAMETER Experiment Name: Zm_Herbicide-Treatments_P Parameter: Treatment Value: Finale vs. No Treatment
  misc_feature: MA Experiment ID: 20001610 Result: Down-regulated in Transcription
  misc_feature: MA Experiment 20001610 PARAMETER Experiment Name: Zm_50ppm_KNO3_L-to-H_P Parameter: Age (day) Value: 19
  misc_feature: MA Experiment 20001610 PARAMETER Experiment Name: Zm_50ppm_KNO3_L-to-H_P Parameter: Organism Value: Zea mays
  misc_feature: MA Experiment 20001610 PARAMETER Experiment Name: Zm_50ppm_KNO3_L-to-H_P Parameter: Plant Line Value: 35A19
  misc_feature: MA Experiment 20001610 PARAMETER Experiment Name: Zm_50ppm_KNO3_L-to-H_P Parameter: Timepoint (hr) Value: 2
  misc_feature: MA Experiment 20001610 PARAMETER Experiment Name: Zm_50ppm_KNO3_L-to-H_P Parameter: Tissue Value: Roots
  misc_feature: MA Experiment 20001610 PARAMETER Experiment Name: Zm_50ppm_KNO3_L-to-H_P Parameter: Treatment Value: 50ppm KNO3 vs. 50ppm KCl
  misc_feature: MA Experiment ID: 20001613 Result: Down-regulated in Transcription
  misc_feature: MA Experiment 20001613 PARAMETER Experiment Name: Zm_50ppm_KNO3_L-to-H_P Parameter: Age (day) Value: 20
  misc_feature: MA Experiment 20001613 PARAMETER Experiment Name: Zm_50ppm_KNO3_L-to-H_P Parameter: Organism Value: Zea mays
  misc_feature: MA Experiment 20001613 PARAMETER Experiment Name: Zm_50ppm_KNO3_L-to-H_P Parameter: Plant Line Value: 35A19
  misc_feature: MA Experiment 20001613 PARAMETER Experiment Name: Zm_50ppm_KNO3_L-to-H_P Parameter: Timepoint (hr) Value: 24
  misc_feature: MA Experiment 20001613 PARAMETER Experiment Name: Zm_50ppm_KNO3_L-to-H_P Parameter: Tissue Value: Roots
  misc_feature: MA Experiment 20001613 PARAMETER Experiment Name: Zm_50ppm_KNO3_L-to-H_P Parameter: Treatment Value: 50ppm KNO3 vs. 50ppm KCl
gagagagagagagcgcgcgcgcgctggcaatggcgggagccgacgacctgaaggtgctgggcctgtggacgagcccgttcgtgatccgggtccgcatcgtgctcaacctcaagggcctggcgtacgagtacgtggaggacgacctcggcaacaagagcgcgctcctgctcagctccaacccggtgcacaagaccgtgcccgtgctgctccacgcgggtcgccccgtaaacgagtcccagatcatcctgcagtacatcgacgaggtctgggcggggaccgggccggccgtgctgccgcgcgacccctatgagcgcgcggccgcgcggttctgggcggcctacatcgacgacaaggtgaagtccgcgtggctgggcatgctgttcgagtgcagggacgagggggagcgggcggaggcggtggcgcgggccggcgaggcgctcgggacgctggagggcgcgctcagggggaagcccttcttcggcggcgacggcgtcggcttcgtggacgccgtgctcggcgggtacctcggctggttcggggccgtcggcaggatcatcggccgcaggctgatcgacccgactaagacgccgctgctggccgcgtgggaggaccggttccgcgccgccgacgtggccaagggcgtcgtaccggacgacgtcgacaagatgctcgcgttcctggagaccctgctcgcgaactactactccaagtgactgtactgagagcgaactactgctccaagtgactaaataagaagggctgcttaattaataattacagtatataattgtgc

SEQ ID NO: 9467 - protein, 236 aa, Zea mays subsp. mays
  peptide (1)..(236): Ceres Seq. ID no. 12415981
  misc_feature (97)..(209): Pfam Name: Glutathione S-transferase, C-terminal domain Pfam Description: Glutathione S-transferase, C-terminal domain
  misc_feature (12)..(236): Homolog of NCBI NO: 11385501 NR Description: glutathione S-transferase GST 25 [Zea mays]
  misc_feature (10)..(236): Homolog of NCBI NO: 11385511 NR Description: glutathione S-transferase GST 30 [Zea mays]
  misc_feature (10)..(231): Homolog of NCBI NO: 20067421 NR Description: glutathione transferase [Triticum aestivum]
  misc_feature (10)..(230): Homolog of NCBI NO: 37536360 NR Description: putative glutathione S-transferase [Oryza sativa
  misc_feature (10)..(236): Homolog of NCBI NO: 37536368 NR Description: putative glutathione S-transferase [Oryza sativa
  misc_feature (8)..(230): Homolog of NCBI NO: 11385527 NR Description: glutathione S-transferase GST 38 [Zea mays]
  misc_feature (10)..(231): Homolog of NCBI NO: 11385535 NR Description: glutathione S-transferase GST 42 [Zea mays]
  misc_feature (10)..(225): Homolog of NCBI NO: 21730248 NR Description: Chain A, The Structure Of A Tau Class Glutathione
  misc_feature (10)..(217): Homolog of NCBI NO: 37536308 NR Description: putative glutathione S-transferase [Oryza sativa
  misc_feature (12)..(231): Homolog of NCBI NO: 11385521 NR Description: glutathione S-transferase GST 35 [Zea mays]
ERESARALAMAGADDLKVLGLWTSPFVIRVRIVLNLKGLAYEYVEDDLGNKSALLLSSNPVHKTVPVLLHAGRPVNESQIILQYIDEVWAGTGPAVLPRDPYERAAARFWAAYIDDKVKSAWLGMLFECRDEGERAEAVARAGEALGTLEGALRGKPFFGGDGVGFVDAVLGGYLGWFGAVGRIIGRRLIDPTKTPLLAAWEDRFRAADVAKGVVPDDVDKMLAFLETLLANYYSK

SEQ ID NO: 9468 - protein, 227 aa, Zea mays subsp. mays
  peptide (1)..(227): Ceres Seq. ID no. 12415982
  misc_feature (88)..(200): Pfam Name: Glutathione S-transferase, C-terminal domain Pfam Description: Glutathione S-transferase, C-terminal domain
  misc_feature (3)..(227): Homolog of NCBI NO: 11385501 NR Description: glutathione S-transferase GST 25 [Zea mays]
  misc_feature (1)..(227): Homolog of NCBI NO: 11385511 NR Description: glutathione S-transferase GST 30 [Zea mays]
  misc_feature (1)..(222): Homolog of NCBI NO: 20067421 NR Description: glutathione transferase [Triticum aestivum]
  misc_feature (1)..(221): Homolog of NCBI NO: 37536360 NR Description: putative glutathione S-transferase [Oryza sativa
  misc_feature (1)..(227): Homolog of NCBI NO: 37536368 NR Description: putative glutathione S-transferase [Oryza sativa
  misc_feature (1)..(221): Homolog of NCBI NO: 11385527 NR Description: glutathione S-transferase GST 38 [Zea mays]
  misc_feature (1)..(222): Homolog of NCBI NO: 11385535 NR Description: glutathione S-transferase GST 42 [Zea mays]
  misc_feature (1)..(216): Homolog of NCBI NO: 21730248 NR Description: Chain A, The Structure Of A Tau Class Glutathione
  misc_feature (1)..(208): Homolog of NCBI NO: 37536308 NR Description: putative glutathione S-transferase [Oryza sativa
  misc_feature (3)..(222): Homolog of NCBI NO: 11385521 NR Description: glutathione S-transferase GST 35 [Zea mays]
MAGADDLKVLGLWTSPFVIRVRIVLNLKGLAYEYVEDDLGNKSALLLSSNPVHKTVPVLLHAGRPVNESQIILQYIDEVWAGTGPAVLPRDPYERAAARFWAAYIDDKVKSAWLGMLFECRDEGERAEAVARAGEALGTLEGALRGKPFFGGDGVGFVDAVLGGYLGWFGAVGRIIGRRLIDPTKTPLLAAWEDRFRAADVAKGVVPDDVDKMLAFLETLLANYYSK

SEQ ID NO: 9469 - DNA, 897 bp, Zea mays subsp. mays
  misc_feature (1)..(897): Ceres Seq. ID no. 13493255
  misc_feature: MA Experiment ID: 108543 Result: Up-regulated in Transcription
  misc_feature: MA Experiment ID: 20000535 Result: Down-regulated in Transcription
  misc_feature: MA Experiment 20000535 PARAMETER Experiment Name: Zm_Hybrid_Seed_Dev_P Parameter: DAP Value: 30 vs. 12
  misc_feature: MA Experiment 20000535 PARAMETER Experiment Name: Zm_Hybrid_Seed_Dev_P Parameter: Organism Value: Zea mays
  misc_feature: MA Experiment 20000535 PARAMETER Experiment Name: Zm_Hybrid_Seed_Dev_P Parameter: Plant Line Value: 35A19
  misc_feature: MA Experiment 20000535 PARAMETER Experiment Name: Zm_Hybrid_Seed_Dev_P Parameter: Tissue Value: Embryo vs. Unfert Floret
  misc_feature: MA Experiment ID: 20000626 Result: Down-regulated in Transcription
  misc_feature: MA Experiment 20000626 PARAMETER Experiment Name: Zm_Herbicide-Treatments_P Parameter: Timepoint (hr) Value: 12
  misc_feature: MA Experiment 20000626 PARAMETER Experiment Name: Zm_Herbicide-Treatments_P Parameter: Tissue Value: Aerial
  misc_feature: MA Experiment 20000626 PARAMETER Experiment Name: Zm_Herbicide-Treatments_P Parameter: Treatment Value: Roundup vs. No Treatment
  misc_feature: MA Experiment ID: 20000629 Result: Down-regulated in Transcription
  misc_feature: MA Experiment 20000629 PARAMETER Experiment Name: Zm_Herbicide-Treatments_P Parameter: Timepoint (hr) Value: 12
  misc_feature: MA Experiment 20000629 PARAMETER Experiment Name: Zm_Herbicide-Treatments_P Parameter: Tissue Value: Aerial
  misc_feature: MA Experiment 20000629 PARAMETER Experiment Name: Zm_Herbicide-Treatments_P Parameter: Treatment Value: Trimec vs. No Treatment
aatctatacacgattgacctgagctgagccgcctcccgtctcgagagggagggagagcgagagcgagagcgagagagctagcgcgcgcgatcgcaaagagatcggtgaagatgaaggtgcagtgcgacgtgtgcgcggccgaggcggcgtctgtgttctgctgcgccgacgaggccgcgctgtgcgaggcgtgcgaccgccgcgtgcaccgcgccaacaagctcgccggcaagcaccgccggctctcgctgctcggcccggcggcgccgtcctcgtcggcgcagcagacaccgccgcctccgctctgcgacatctgccaggagaagcgcgggctcctgttctgcaaggaggaccgggcgatcctgtgccgcgactgcgacgtgccggtgcacacggccagcgagctggccatgcgccacacccggttcctgctcacgggcgtgcgcctctccgcagagcccgccgcgcgcccgccgccntcggaggaggacgagaacgacagcagcggcagcagcatctccgagtacctgaccaagacgctgcccgggtggcatgtcgaggacttcctggtggacgagaccgccgccgccgcaactaccattggcgtctccacagacgtgtcgtatcaggcgggagggctagctcggacaggcgacggctactactccgcgtggatggcgccggagcagatcttctgcgagggcaagggcagcaggatgccgcagatggcgatgtgcagcagcagcaagagacccagagccacgtcctcctattcttactggtgaacaacccaacaggagacgaccgtgtcagagccgtcagccgtctgtctgtattattatttcgttcatgcatatgcctcggctggtgcattattcttaccgctagtctgcctgc

SEQ ID NO: 9470 - protein, 224 aa, Zea mays subsp. mays
  peptide (1)..(224): Ceres Seq. ID no. 13493256
  misc_feature (1)..(47): Pfam Name: B-box zinc finger Pfam Description: B-box zinc finger
  misc_feature (1)..(181): Homolog of NCBI NO: 38344979 NR Description: OSJNBa0011L07.9 [Oryza sativa (japonica
  misc_feature (1)..(137): Homolog of NCBI NO: 15222289 NR Description: CONSTANS B-box zinc finger family protein
  misc_feature (132)..(153): Homolog of NCBI NO: 15222289 NR Description: CONSTANS B-box zinc finger family protein
  misc_feature (1)..(133): Homolog of NCBI NO: 22329252 NR Description: CONSTANS B-box zinc finger family protein
  misc_feature (1)..(133): Homolog of NCBI NO: 26452767 NR Description: putative zinc finger protein [Arabidopsis
  misc_feature (127)..(153): Homolog of NCBI NO: 22329252 NR Description: CONSTANS B-box zinc finger family protein
  misc_feature (127)..(153): Homolog of NCBI NO: 26452767 NR Description: putative zinc finger protein [Arabidopsis
  misc_feature (1)..(133): Homolog of NCBI NO: 7485796 NR Description: hypothetical protein F19H22.170 - Arabidopsis >gi|4539326|emb|CAB38827.1| putative zinc finger protein thaliana] >gi|7270890|emb|CAB80570.1| putative zinc finger
  misc_feature (127)..(153): Homolog of NCBI NO: 7485796 NR Description: hypothetical protein F19H22.170 - Arabidopsis >gi|4539326|emb|CAB38827.1| putative zinc finger protein thaliana] >gi|7270890|emb|CAB80570.1| putative zinc finger
  misc_feature (1)..(139): Homolog of NCBI NO: 3618312 NR Description: zinc finger protein [Oryza sativa (japonica
  misc_feature (123)..(123): Xaa is any aa, unknown or other
MKVQCDVCAAEAASVFCCADEAALCEACDRRVHRANKLAGKHRRLSLLGPAAPSSSAQQTPPPPLCDICQEKRGLLFCKEDRAILCRDCDVPVHTASELAMRHTRFLLTGVRLSAEPAARPPXSEEDENDSSGSSISEYLTKTLPGWHVEDFLVDETAAAATTIGVSTDVSYQAGGLARTGDGYYSAWMAPEQIFCEGKGSRMPQMAMCSSSKRPRATSSYSYW

SEQ ID NO: 9471 - protein, 124 aa, Zea mays subsp. mays
  peptide (1)..(124): Ceres Seq. ID no. 13493257
  misc_feature (1)..(81): Homolog of NCBI NO: 38344979 NR Description: OSJNBa0011L07.9 [Oryza sativa (japonica
  misc_feature (1)..(37): Homolog of NCBI NO: 15222289 NR Description: CONSTANS B-box zinc finger family protein
  misc_feature (32)..(53): Homolog of NCBI NO: 15222289 NR Description: CONSTANS B-box zinc finger family protein
  misc_feature (1)..(33): Homolog of NCBI NO: 22329252 NR Description: CONSTANS B-box zinc finger family protein
  misc_feature (1)..(33): Homolog of NCBI NO: 26452767 NR Description: putative zinc finger protein [Arabidopsis
  misc_feature (27)..(53): Homolog of NCBI NO: 22329252 NR Description: CONSTANS B-box zinc finger family protein
  misc_feature (27)..(53): Homolog of NCBI NO: 26452767 NR Description: putative zinc finger protein [Arabidopsis
  misc_feature (1)..(33): Homolog of NCBI NO: 7485796 NR Description: hypothetical protein F19H22.170 - Arabidopsis >gi|4539326|emb|CAB38827.1| putative zinc finger protein thaliana] >gi|7270890|emb|CAB80570.1| putative zinc finger
  misc_feature (27)..(53): Homolog of NCBI NO: 7485796 NR Description: hypothetical protein F19H22.170 - Arabidopsis >gi|4539326|emb|CAB38827.1| putative zinc finger protein thaliana] >gi|7270890|emb|CAB80570.1| putative zinc finger
  misc_feature (1)..(39): Homolog of NCBI NO: 3618312 NR Description: zinc finger protein [Oryza sativa (japonica
  misc_feature (23)..(23): Xaa is any aa, unknown or other
MRHTRFLLTGVRLSAEPAARPPXSEEDENDSSGSSISEYLTKTLPGWHVEDFLVDETAAAATTIGVSTDVSYQAGGLARTGDGYYSAWMAPEQIFCEGKGSRMPQMAMCSSSKRPRATSSYSYW

SEQ ID NO: 9472 - DNA, 719 bp, Zea mays subsp. mays
  misc_feature (1)..(719): Ceres Seq. ID no. 12347337
  misc_feature: MA Experiment ID: 20000626 Result: Up-regulated in Transcription
  misc_feature: MA Experiment 20000626 PARAMETER Experiment Name: Zm_Herbicide-Treatments_P Parameter: Timepoint (hr) Value: 12
  misc_feature: MA Experiment 20000626 PARAMETER Experiment Name: Zm_Herbicide-Treatments_P Parameter: Tissue Value: Aerial
  misc_feature: MA Experiment 20000626 PARAMETER Experiment Name: Zm_Herbicide-Treatments_P Parameter: Treatment Value: Roundup vs. No Treatment
ccgaaatttgggtgaacccgaacgcgcagtcctagttcaagctgaaaggagaacataaaagaggagaggctagggttttggcgtccgagaccaaaccaagctctctccggcgacggtgagggctcgatatcggagtccagtaggcggctcctgctgcttcggcggtccctaatccctctctcggcagtgtacagatggcgtccggcggtccggcgctcgagccgctcgtcgaccaggtcatctccgtcatcaccaacgatggccgcaacatcgtgggtacgctcaggggattcgatcaggccaccaacattatactcgacgagtcccatgagagggtctattctagaaaggagggagtccaacaacttgttcttggtctgtacattatcaggggtgacaacataagcgttgtgggcgangttgatgaagagctggattcaagattggatatgtcgaagctaagggcgcacccactgaagcctgttattcactgaggtccgagtatgtctttgggtaatatgtggactggatggatgggtcactgttgaatgcaggatgtagcatcatcatggtgaggggactgagtaatatggacatgtatcttgcgtattgtgcaatgaatgtgttggctgttgggtcgcttgcctacgcattctgtaagattgcagttaccattaggaactgaactcaactcgactgaattaatatcatttggcttt

SEQ ID NO: 9473 - protein, 99 aa, Zea mays subsp. mays
  peptide (1)..(99): Ceres Seq. ID no. 12347338
  misc_feature (8)..(74): Pfam Name: LSM domain Pfam Description: LSM domain
  misc_feature (8)..(99): Homolog of NCBI NO: 15218779 NR Description: small nuclear ribonucleoprotein, putative; id: At1g65700.1, supported by cDNA: 30530., supported by cDNA: supported by cDNA: gi_20334917 [Arabidopsis thaliana]
  misc_feature (14)..(99): Homolog of NCBI NO: 25404943 NR Description: protein F1E22.8 [imported] - Arabidopsis thaliana
  misc_feature (8)..(99): Homolog of NCBI NO: 31240533 NR Description: ENSANGP00000020162 [Anopheles gambiae]
  misc_feature (7)..(99): Homolog of NCBI NO: 7706425 NR Description: U6 snRNA-associated Sm-like protein LSm8 [Homo >gi|19527156|ref|NP_598700.1| expressed sequence AW214405 [Mus
  misc_feature (8)..(99): Homolog of NCBI NO: 24655606 NR Description: CG2021-PA [Drosophila melanogaster]
  misc_feature (8)..(97): Homolog of NCBI NO: 17544148 NR Description: SM protein (10.8 kD) [Caenorhabditis elegans]
  misc_feature (8)..(97): Homolog of NCBI NO: 39584186 NR Description: Hypothetical protein CBG05470 [Caenorhabditis
  misc_feature (7)..(99): Homolog of NCBI NO: 19076009 NR Description: splicing factor [Schizosaccharomyces pombe]
  misc_feature (7)..(70): Homolog of NCBI NO: 28279736 NR Description: Similar to U6 snRNA-associated Sm-like protein
  misc_feature (8)..(97): Homolog of NCBI NO: 23612724 NR Description: u6 snRNA-associated sm-like protein, putative
  misc_feature (75)..(75): Xaa is any aa, unknown or other
MASGGPALEPLVDQVISVITNDGRNIVGTLRGFDQATNIILDESHERVYSRKEGVQQLVLGLYIIRGDNISVVGXVDEELDSRLDMSKLRAHPLKPVIH

SEQ ID NO: 9474 - protein, 51 aa, Zea mays subsp. mays
  peptide (1)..(51): Ceres Seq. ID no. 12347339
MDGSLLNAGCSIIMVRGLSNMDMYLAYCAMNVLAVGSLAYAFCKIAVTIRN

SEQ ID NO: 9475 - DNA, 1031 bp, Zea mays subsp. mays
  misc_feature (1)..(1031): Ceres Seq. ID no. 12355251
  misc_feature: MA Experiment ID: 108522 Result: Down-regulated in Transcription
  misc_feature: MA Experiment 108522 PARAMETER Experiment Name: Zm_42deg_Heat_P Parameter: Age (day) Value: 8
  misc_feature: MA Experiment 108522 PARAMETER Experiment Name: Zm_42deg_Heat_P Parameter: Organism Value: Zea mays
  misc_feature: MA Experiment 108522 PARAMETER Experiment Name: Zm_42deg_Heat_P Parameter: Plant Line Value: 35A19
  misc_feature: MA Experiment 108522 PARAMETER Experiment Name: Zm_42deg_Heat_P Parameter: Temperature (deg C) Value: 42 vs. 22
  misc_feature: MA Experiment 108522 PARAMETER Experiment Name: Zm_42deg_Heat_P Parameter: Timepoint (hr) Value: 1
  misc_feature: MA Experiment 108522 PARAMETER Experiment Name: Zm_42deg_Heat_P Parameter: Tissue Value: Aerial
  misc_feature: MA Experiment ID: 108523 Result: Down-regulated in Transcription
  misc_feature: MA Experiment 108523 PARAMETER Experiment Name: Zm_42deg_Heat_P Parameter: Age (day) Value: 8
  misc_feature: MA Experiment 108523 PARAMETER Experiment Name: Zm_42deg_Heat_P Parameter: Organism Value: Zea mays
  misc_feature: MA Experiment 108523 PARAMETER Experiment Name: Zm_42deg_Heat_P Parameter: Plant Line Value: 35A19
  misc_feature: MA Experiment 108523 PARAMETER Experiment Name: Zm_42deg_Heat_P Parameter: Temperature (deg C) Value: 42 vs. 22
  misc_feature: MA Experiment 108523 PARAMETER Experiment Name: Zm_42deg_Heat_P Parameter: Timepoint (hr) Value: 6
  misc_feature: MA Experiment 108523 PARAMETER Experiment Name: Zm_42deg_Heat_P Parameter: Tissue Value: Aerial
  misc_feature: MA Experiment ID: 108528 Result: Up-regulated in Transcription
  misc_feature: MA Experiment 108528 PARAMETER Experiment Name: Zm_Imbibed_Seeds_P Parameter: Age (day) Value: 5 vs. 2
  misc_feature: MA Experiment 108528 PARAMETER Experiment Name: Zm_Imbibed_Seeds_P Parameter: Organism Value: Zea mays
  misc_feature: MA Experiment 108528 PARAMETER Experiment Name: Zm_Imbibed_Seeds_P Parameter: Plant Line Value: 35A19
  misc_feature: MA Experiment 108528 PARAMETER Experiment Name: Zm_Imbibed_Seeds_P Parameter: Tissue Value: Aerial vs. Embryo
  misc_feature: MA Experiment ID: 108530 Result: Up-regulated in Transcription
  misc_feature: MA Experiment 108530 PARAMETER Experiment Name: Zm_Imbibed_Seeds_P Parameter: Age (day) Value: 6 vs. 2
  misc_feature: MA Experiment 108530 PARAMETER Experiment Name: Zm_Imbibed_Seeds_P Parameter: Organism Value: Zea mays
  misc_feature: MA Experiment 108530 PARAMETER Experiment Name: Zm_Imbibed_Seeds_P Parameter: Plant Line Value: 35A19
  misc_feature: MA Experiment 108530 PARAMETER Experiment Name: Zm_Imbibed_Seeds_P Parameter: Tissue Value: Aerial vs. Embryo
  misc_feature: MA Experiment ID: 108543 Result: Up-regulated in Transcription
  misc_feature: MA Experiment ID: 108545 Result: Up-regulated in Transcription
  misc_feature: MA Experiment 108545 PARAMETER Experiment Name: Zm_Imbibed_Seeds_P Parameter: Age (day) Value: 3 vs. 2
  misc_feature: MA Experiment 108545 PARAMETER Experiment Name: Zm_Imbibed_Seeds_P Parameter: Organism Value: Zea mays
  misc_feature: MA Experiment 108545 PARAMETER Experiment Name: Zm_Imbibed_Seeds_P Parameter: Plant Line Value: 35A19
  misc_feature: MA Experiment 108545 PARAMETER Experiment Name: Zm_Imbibed_Seeds_P Parameter: Tissue Value: Aerial vs. Embryo
  misc_feature: MA Experiment ID: 108546 Result: Down-regulated in Transcription
  misc_feature: MA Experiment 108546 PARAMETER Experiment Name: Zm_Imbibed_Seeds_P Parameter: Age (day) Value: 3 vs. 2
  misc_feature: MA Experiment 108546 PARAMETER Experiment Name: Zm_Imbibed_Seeds_P Parameter: Organism Value: Zea mays
  misc_feature: MA Experiment 108546 PARAMETER Experiment Name: Zm_Imbibed_Seeds_P Parameter: Plant Line Value: 35A19
  misc_feature: MA Experiment 108546 PARAMETER Experiment Name: Zm_Imbibed_Seeds_P Parameter: Tissue Value: Roots vs. Embryo
  misc_feature: MA Experiment ID: 108547 Result: Up-regulated in Transcription
  misc_feature: MA Experiment 108547 PARAMETER Experiment Name: Zm_Imbibed_Seeds_P Parameter: Age (day) Value: 4 vs. 2
  misc_feature: MA Experiment 108547 PARAMETER Experiment Name: Zm_Imbibed_Seeds_P Parameter: Organism Value: Zea mays
  misc_feature: MA Experiment 108547 PARAMETER Experiment Name: Zm_Imbibed_Seeds_P Parameter: Plant Line Value: 35A19
  misc_feature: MA Experiment 108547 PARAMETER Experiment Name: Zm_Imbibed_Seeds_P Parameter: Tissue Value: Aerial vs. Embryo
  misc_feature: MA Experiment ID: 108687 Result: Down-regulated in Transcription
  misc_feature: MA Experiment 108687 PARAMETER Experiment Name: Zm_Embryos-Flowers__P Parameter: Tissue Value: Embryo vs. Aerial+
  misc_feature: MA Experiment ID: 20000480 Result: Down-regulated in Transcription
  misc_feature: MA Experiment 20000480 PARAMETER Experiment Name: Zm_Drought_P Parameter: Age (day) Value: 11
  misc_feature: MA Experiment 20000480 PARAMETER Experiment Name: Zm_Drought_P Parameter: Organism Value: Zea mays
  misc_feature: MA Experiment 20000480 PARAMETER Experiment Name: Zm_Drought_P Parameter: Plant Line Value: 35A19
  misc_feature: MA Experiment 20000480 PARAMETER Experiment Name: Zm_Drought_P Parameter: Timepoint (hr) Value: 72
  misc_feature: MA Experiment 20000480 PARAMETER Experiment Name: Zm_Drought_P Parameter: Tissue Value: Aerial
  misc_feature: MA Experiment 20000480 PARAMETER Experiment Name: Zm_Drought_P Parameter: Treatment Value: Drought vs. No Drought
agaacgcactagcatttccacgcggcgttccacttccacccgaaaccccaatcaagcgtgcactgcatctgcgtagcccgttcaccacgcactcgcttccctccctaccgtgcgatctatggacggcgacggcgcgacgtgggggcagccgatgctggagaagcggccgagccaccgggagcggcatttcacggcgggggaagtggtgcgggacgtcatcatgggggtgtccgacggcctcaccgtgcccttcgccctcgccgcggggctctccggcgccagcgcgccctcctcgctcgtcctcaccgccggcctcgccgaggccccgccggcgccatctccatgggactcggagggtaccttgcggcccagagcgaggcggaccactacaagcgggagatgagaagggagcaggaggagatcatcgccgtcccagacaccgaggccgctgagattggagagatcatgtcacggtatgggctcgagccgcaggagtacggccctgtcgtcgccggactcaggcgaaaccctcaagcttggctagacttcatgatgaggttcgagctgggactggagagaccggatcccagaagggctctgcagagcgccttcacgatcgcagtgtcctacgtggtcggcgggctggtccctctcctgccctacgtgctcgtctccgcggcgaaggatgccatgctcacatccgtcagagtcacgctggccgcgctgcttttcttcggctacgtcaagggccgcttcacggggaactggccgttcgccagtgccgtccagaccgctgtcattggagcgctcgcttcggcggcggcgtacgggatggcgaaggctgttcaggcgaggtagttgtttgttggtgaggcggcggcgtcaggcgttttgggaaccagagtttcagtaggatgcggtaaaactgaagaaagctgtataattccgatcctttgggggacttctcgtttacagtgttaatcgcgggatctagtgctagtctactcttttgaataaatctaggggaggat

SEQ ID NO: 9476 - protein, 171 aa, Zea mays subsp. mays
  peptide (1)..(171): Ceres Seq. ID no. 12355252
  misc_feature (1)..(171): Homolog of NCBI NO: 38567721 NR Description: B1358B12.19 [Oryza sativa (japonica
  misc_feature (1)..(169): Homolog of NCBI NO: 15226346 NR Description: putative membrane protein; protein id: [Arabidopsis thaliana] >gi|25410932|pir||H84428 probable membrane
  misc_feature (1)..(166): Homolog of NCBI NO: 6323249 NR Description: Functions in the homeostasis of both calcium and ions; Ccc1p [Saccharomyces cerevisiae]
  misc_feature (1)..(170): Homolog of NCBI NO: 40741878 NR Description: hypothetical protein AN4990.2 [Aspergillus
  misc_feature (1)..(168): Homolog of NCBI NO: 40740699 NR Description: hypothetical protein AN3681.2 [Aspergillus
  misc_feature (1)..(164): Homolog of NCBI NO: 19554141 NR Description: uncharacterized membrane protein [Corynebacterium ATCC 13032] >gi|21325728|dbj|BAC00349.1| Uncharacterized membrane
  misc_feature (1)..(164): Homolog of NCBI NO: 33596200 NR Description: putative membrane protein [Bordetella >gi|33601611|ref|NP_889171.1| putative membrane protein bronchiseptica] >gi|33573203|emb|CAE36858.1| putative membrane
  misc_feature (1)..(166): Homolog of NCBI NO: 22984482 NR Description: hypothetical protein [Burkholderia fungorum]
  misc_feature (1)..(168): Homolog of NCBI NO: 15599046 NR Description: hypothetical protein [Pseudomonas aeruginosa PA01]
  misc_feature (1)..(164): Homolog of NCBI NO: 25029211 NR Description: putative nodulin 21-related protein
MGLGGYLAAQSEADHYKREMRREQEEIIAVPDTEAAEIGEIMSRYGLEPQEYGPVVAGLRRNPQAWLDFMMRFELGLERPDPRRALQSAFTIAVSYVVGGLVPLLPYVLVSAAKDAMLTSVRVTLAALLFFGYVKGRFTGNWPFASAVQTAVIGALASAAAYGMAKAVQAR

SEQ ID NO: 9477 - protein, 152 aa, Zea mays subsp. mays
  peptide (1)..(152): Ceres Seq. ID no. 12355253
  misc_feature (1)..(150): Homolog of NCBI NO: 15226346 NR Description: putative membrane protein; protein id: [Arabidopsis thaliana] >gi|25410932|pir||H84428 probable membrane
  misc_feature (1)..(147): Homolog of NCBI NO: 6323249 NR Description: Functions in the homeostasis of both calcium and ions; Ccc1p [Saccharomyces cerevisiae]
  misc_feature (1)..(151): Homolog of NCBI NO: 40741878 NR Description: hypothetical protein AN4990.2 [Aspergillus
  misc_feature (1)..(149): Homolog of NCBI NO: 40740699 NR Description: hypothetical protein AN3681.2 [Aspergillus
  misc_feature (1)..(145): Homolog of NCBI NO: 19554141 NR Description: uncharacterized membrane protein [Corynebacterium ATCC 13032] >gi|21325728|dbj|BAC00349.1| Uncharacterized membrane
  misc_feature (1)..(145): Homolog of NCBI NO: 33596200 NR Description: putative membrane protein [Bordetella >gi|33601611|ref|NP_889171.1| putative membrane protein bronchiseptica] >gi|33573203|emb|CAE36858.1| putative membrane
  misc_feature (1)..(147): Homolog of NCBI NO: 22984482 NR Description: hypothetical protein [Burkholderia fungorum]
  misc_feature (1)..(149): Homolog of NCBI NO: 15599046 NR Description: hypothetical protein [Pseudomonas aeruginosa PA01]
  misc_feature (1)..(145): Homolog of NCBI NO: 25029211 NR Description: putative nodulin 21-related protein
  misc_feature (1)..(152): Homolog of NCBI NO: 38567721 NR Description: B1358B12.19 [Oryza sativa (japonica
MRREQEEIIAVPDTEAAEIGEIMSRYGLEPQEYGPVVAGLRRNPQAWLDFMMRFELGLERPDPRRALQSAFTIAVSYVVGGLVPLLPYVLVSAAKDAMLTSVRVTLAALLFFGYVKGRFTGNWPFASAVQTAVIGALASAAAYGMAKAVQAR

SEQ ID NO: 9478 - protein, 149 aa, Zea mays subsp. mays
  peptide (1)..(149): Ceres Seq. ID no. 12355254
NALAFPRGVPLPPETPIKRALHLRSPFTTHSLPSLPCDLWTATARRGGSRCWRSGRATGSGISRRGKWCGTSSWGCPTASPCPSPSPRGSPAPARPPRSSSPPASPRPRRRHLHGTRRVPCGPERGGPLQAGDEKGAGGDHRRPRHRGR

SEQ ID NO: 9479 - DNA, 1065 bp, Zea mays subsp. mays
  misc_feature (1)..(1065): Ceres Seq. ID no. 12374811
  misc_feature: MA Experiment ID: 108522 Result: Up-regulated in Transcription
  misc_feature: MA Experiment 108522 PARAMETER Experiment Name: Zm_42deg_Heat_P Parameter: Age (day) Value: 8
  misc_feature: MA Experiment 108522 PARAMETER Experiment Name: Zm_42deg_Heat_P Parameter: Organism Value: Zea mays
  misc_feature: MA Experiment 108522 PARAMETER Experiment Name: Zm_42deg_Heat_P Parameter: Plant Line Value: 35A19
  misc_feature: MA Experiment 108522 PARAMETER Experiment Name: Zm_42deg_Heat_P Parameter: Temperature (deg C) Value: 42 vs. 22
  misc_feature: MA Experiment 108522 PARAMETER Experiment Name: Zm_42deg_Heat_P Parameter: Timepoint (hr) Value: 1
  misc_feature: MA Experiment 108522 PARAMETER Experiment Name: Zm_42deg_Heat_P Parameter: Tissue Value: Aerial
  misc_feature: MA Experiment ID: 108523 Result: Up-regulated in Transcription
  misc_feature: MA Experiment 108523 PARAMETER Experiment Name: Zm_42deg_Heat_P Parameter: Age (day) Value: 8
  misc_feature: MA Experiment 108523 PARAMETER Experiment Name: Zm_42deg_Heat_P Parameter: Organism Value: Zea mays
  misc_feature: MA Experiment 108523 PARAMETER Experiment Name: Zm_42deg_Heat_P Parameter: Plant Line Value: 35A19
  misc_feature: MA Experiment 108523 PARAMETER Experiment Name: Zm_42deg_Heat_P Parameter: Temperature (deg C) Value: 42 vs. 22
  misc_feature: MA Experiment 108523 PARAMETER Experiment Name: Zm_42deg_Heat_P Parameter: Timepoint (hr) Value: 6
  misc_feature: MA Experiment 108523 PARAMETER Experiment Name: Zm_42deg_Heat_P Parameter: Tissue Value: Aerial
  misc_feature: MA Experiment ID: 108528 Result: Up-regulated in Transcription
  misc_feature: MA Experiment 108528 PARAMETER Experiment Name: Zm_Imbibed_Seeds_P Parameter: Age (day) Value: 5 vs. 2
  misc_feature: MA Experiment 108528 PARAMETER Experiment Name: Zm_Imbibed_Seeds_P Parameter: Organism Value: Zea mays
  misc_feature: MA Experiment 108528 PARAMETER Experiment Name: Zm_Imbibed_Seeds_P Parameter: Plant Line Value: 35A19
  misc_feature: MA Experiment 108528 PARAMETER Experiment Name: Zm_Imbibed_Seeds_P Parameter: Tissue Value: Aerial vs. Embryo
  misc_feature: MA Experiment ID: 108530 Result: Up-regulated in Transcription
  misc_feature: MA Experiment 108530 PARAMETER Experiment Name: Zm_Imbibed_Seeds_P Parameter: Age (day) Value: 6 vs. 2
  misc_feature: MA Experiment 108530 PARAMETER Experiment Name: Zm_Imbibed_Seeds_P Parameter: Organism Value: Zea mays
  misc_feature: MA Experiment 108530 PARAMETER Experiment Name: Zm_Imbibed_Seeds_P Parameter: Plant Line Value: 35A19
  misc_feature: MA Experiment 108530 PARAMETER Experiment Name: Zm_Imbibed_Seeds_P Parameter: Tissue Value: Aerial vs. Embryo
  misc_feature: MA Experiment ID: 108545 Result: Up-regulated in Transcription
  misc_feature: MA Experiment 108545 PARAMETER Experiment Name: Zm_Imbibed_Seeds_P Parameter: Age (day) Value: 3 vs. 2
  misc_feature: MA Experiment 108545 PARAMETER Experiment Name: Zm_Imbibed_Seeds_P Parameter: Organism Value: Zea mays
  misc_feature: MA Experiment 108545 PARAMETER Experiment Name: Zm_Imbibed_Seeds_P Parameter: Plant Line Value: 35A19
  misc_feature: MA Experiment 108545 PARAMETER Experiment Name: Zm_Imbibed_Seeds_P Parameter: Tissue Value: Aerial vs. Embryo
  misc_feature: MA Experiment ID: 108547 Result: Up-regulated in Transcription
  misc_feature: MA Experiment 108547 PARAMETER Experiment Name: Zm_Imbibed_Seeds_P Parameter: Age (day) Value: 4 vs. 2
  misc_feature: MA Experiment 108547 PARAMETER Experiment Name: Zm_Imbibed_Seeds_P Parameter: Organism Value: Zea mays
  misc_feature: MA Experiment 108547 PARAMETER Experiment Name: Zm_Imbibed_Seeds_P Parameter: Plant Line Value: 35A19
  misc_feature: MA Experiment 108547 PARAMETER Experiment Name: Zm_Imbibed_Seeds_P Parameter: Tissue Value: Aerial vs. Embryo
  misc_feature: MA Experiment ID: 108556 Result: Up-regulated in Transcription
  misc_feature: MA Experiment 108556 PARAMETER Experiment Name: Zm_Drought_P Parameter: Age (day) Value: 9
  misc_feature: MA Experiment 108556 PARAMETER Experiment Name: Zm_Drought_P Parameter: Organism Value: Zea mays
  misc_feature: MA Experiment 108556 PARAMETER Experiment Name: Zm_Drought_P Parameter: Plant Line Value: 35A19
  misc_feature: MA Experiment 108556 PARAMETER Experiment Name: Zm_Drought_P Parameter: Timepoint (hr) Value: 24
  misc_feature: MA Experiment 108556 PARAMETER Experiment Name: Zm_Drought_P Parameter: Tissue Value: Aerial
  misc_feature: MA Experiment 108556 PARAMETER Experiment Name: Zm_Drought_P Parameter: Treatment Value: Drought vs. No Drought
  misc_feature: MA Experiment ID: 20000487 Result: Up-regulated in Transcription
  misc_feature: MA Experiment 20000487 PARAMETER Experiment Name: Zm_50mM_NH4NO3_L_to_H_P Parameter: Organism Value: Zea mays
  misc_feature: MA Experiment 20000487 PARAMETER Experiment Name: Zm_50mM_NH4NO3_L_to_H_P Parameter: Timepoint (hr) Value: 4
  misc_feature: MA Experiment 20000487 PARAMETER Experiment Name: Zm_50mM_NH4NO3_L_to_H_P Parameter: Tissue Value: Leaves
  misc_feature: MA Experiment 20000487 PARAMETER Experiment Name: Zm_50mM_NH4NO3_L_to_H_P Parameter: Treatment Value: 50mM NH4NO3 vs. 100mM Mannitol
  misc_feature: MA Experiment ID: 20000488 Result: Up-regulated in Transcription
  misc_feature: MA Experiment 20000488 PARAMETER Experiment Name: Zm_50mM_NH4NO3_L_to_H_P Parameter: Organism Value: Zea mays
  misc_feature: MA Experiment 20000488 PARAMETER Experiment Name: Zm_50mM_NH4NO3_L_to_H_P Parameter: Timepoint (hr) Value: 8
  misc_feature: MA Experiment 20000488 PARAMETER Experiment Name: Zm_50mM_NH4NO3_L_to_H_P Parameter: Tissue Value: Leaves
  misc_feature: MA Experiment 20000488 PARAMETER Experiment Name: Zm_50mM_NH4NO3_L_to_H_P Parameter: Treatment Value: 50mM NH4NO3 vs. 100mM Mannitol
  misc_feature: MA Experiment ID: 20000535 Result: Up-regulated in Transcription
  misc_feature: MA Experiment 20000535 PARAMETER Experiment Name: Zm_Hybrid_Seed_Dev_P Parameter: DAP Value: 30 vs. 12
  misc_feature: MA Experiment 20000535 PARAMETER Experiment Name: Zm_Hybrid_Seed_Dev_P Parameter: Organism Value: Zea mays
  misc_feature: MA Experiment 20000535 PARAMETER Experiment Name: Zm_Hybrid_Seed_Dev_P Parameter: Plant Line Value: 35A19
  misc_feature: MA Experiment 20000535 PARAMETER Experiment Name: Zm_Hybrid_Seed_Dev_P Parameter: Tissue Value: Embryo vs. Unfert Floret
actccccaagcgtcacaccgaatcactacagtcgagctcgagcaggaacaatccttgagcgcctgcctccccggtcctcagtatctattccacacctcatggcgccggcgctgagcaggaccctgggcccgtcgtcggtggccgcgctgcgcccgagcccgtcgtgccggggtctgctacgggccgcgctcgtgccgcagggcaggggcgcctccgcgaggtgcgcggtaggggtgagatgggaggcagccaggcggaggaggatggccggggtgaggtgcgacgccgccgtcgctgagaagcctgccggcgaggaggagacggccggcgagaagtacgagtaccaggctgaggttacccgcttgatggacttaattgtacacagtttatacagccacaaggaagtatttttacgtgagcttgtaagtaacgcgagtgatgcactggataagctgagattcctcagcgtaactgattcttctgtgttggctgatggtggtgagttggagataaggattaaacccgacctagaggcggggacaatcactatcacagatactggcattggaatgactaaagatgagctcaaagactgtcttggaaccattgcacaaagtggcacctcaaaatttttgaaggctctaaaggagaacaaagaccttggtgcagataatggactcattggtcaattcggtgtcgggttctattccgctttccttgttgcagagagggttgtggtgtctactaaaagtccaaaggcagataagcagtatgtttgggaagcagaggctgacagcagctcgtatgttatcaaggaagaaactgatcctgagaaaatgctttcacgtggaacagagattactctttatttgagagatgatgacaaatatgagtttgctgaccctaccaggattcaaggcttagttaagaactactcgcagtttgtctcattccccatatatacatggcaggaaaaatcaaaaacagttgaggttgaagaggaggaagaatcaaagggtgaagaggctactgaagaatcaaaaagtgaagaggctactgagggtg

SEQ ID NO: 9480 - protein, 354 aa, Zea mays subsp. mays
  peptide (1)..(354): Ceres Seq. ID no. 12374812
  misc_feature (132)..(293): Pfam Name: Histidine kinase-, DNA gyrase B-, and HSP90-like ATPase Pfam Description: Histidine kinase-, DNA gyrase B-, and
  misc_feature (33)..(350): Homolog of NCBI NO: 1076758 NR Description: heat-shock protein, 82K, precursor - rye
  misc_feature (33)..(353): Homolog of NCBI NO: 15228059 NR Description: putative heat shock protein; protein id: supported by cDNA: gi_15450722, supported by cDNA: gi_16930684, by cDNA: gi_20453105 [Arabidopsis thaliana]
  misc_feature (33)..(353): Homolog of NCBI NO: 30678090 NR Description: heat shock protein, putative [Arabidopsis
  misc_feature (33)..(353): Homolog of NCBI NO: 20453106 NR Description: At2g04030/F3C11.14 [Arabidopsis thaliana]
  misc_feature (85)..(353): Homolog of NCBI NO: 1906830 NR Description: heat shock protein [Arabidopsis thaliana]
  misc_feature (95)..(353): Homolog of NCBI NO: 15231505 NR Description: putative heat-shock protein; protein id:
  misc_feature (90)..(353): Homolog of NCBI NO: 23477636 NR Description: Grp94 [Xerophyta viscosa]
  misc_feature (108)..(353): Homolog of NCBI NO: 544242 NR Description: ENDOPLASMIN HOMOLOG PRECURSOR (GRP94 HOMOLOG)
  misc_feature (90)..(353): Homolog of NCBI NO: 18855040 NR Description: heat shock protein 90 [Oryza sativa]
  misc_feature (90)..(353): Homolog of NCBI NO: 6863054 NR Description: heat shock protein 90 [Oryza sativa]
SPSVTPNHYSRARAGTILERLPPRSSVSIPHLMAPALSRTLGPSSVAALRPSPSCRGLLRAALVPQGRGASARCAVGVRWEAARRRRMAGVRCDAAVAEKPAGEEETAGEKYEYQAEVTRLMDLIVHSLYSHKEVFLRELVSNASDALDKLRFLSVTDSSVLADGGELEIRIKPDLEAGTITITDTGIGMTKDELKDCLGTIAQSGTSKFLKALKENKDLGADNGLIGQFGVGFYSAFLVAERVVVSTKSPKADKQYVWEAEADSSSYVIKEETDPEKMLSRGTEITLYLRDDDKYEFADPTRIQGLVKNYSQFVSFPIYTWQEKSKTVEVEEEEESKGEEATEESKSEEATEG

SEQ ID NO: 9481 - protein, 322 aa, Zea mays subsp. mays
  peptide (1)..(322): Ceres Seq. ID no. 12374813
  misc_feature (100)..(261): Pfam Name: Histidine kinase-, DNA gyrase B-, and HSP90-like ATPase Pfam Description: Histidine kinase-, DNA gyrase B-, and
  misc_feature (1)..(318): Homolog of NCBI NO: 1076758 NR Description: heat-shock protein, 82K, precursor - rye
  misc_feature (1)..(321): Homolog of NCBI NO: 15228059 NR Description: putative heat shock protein; protein id: supported by cDNA: gi_15450722, supported by cDNA: gi_16930684, by cDNA: gi_20453105 [Arabidopsis thaliana]
  misc_feature (1)..(321): Homolog of NCBI NO: 30678090 NR Description: heat shock protein, putative [Arabidopsis
  misc_feature (1)..(321): Homolog of NCBI NO: 20453106 NR Description: At2g04030/F3C11.14 [Arabidopsis thaliana]
  misc_feature (53)..(321): Homolog of NCBI NO: 1906830 NR Description: heat shock protein [Arabidopsis thaliana]
  misc_feature (63)..(321): Homolog of NCBI NO: 15231505 NR Description: putative heat-shock protein; protein id:
  misc_feature (58)..(321): Homolog of NCBI NO: 23477636 NR Description: Grp94 [Xerophyta viscosa]
  misc_feature (76)..(321): Homolog of NCBI NO: 544242 NR Description: ENDOPLASMIN HOMOLOG PRECURSOR (GRP94 HOMOLOG)
  misc_feature (58)..(321): Homolog of NCBI NO: 18855040 NR Description: heat shock protein 90 [Oryza sativa]
  misc_feature (58)..(321): Homolog of NCBI NO: 6863054 NR Description: heat shock protein 90 [Oryza sativa]
MAPALSRTLGPSSVAALRPSPSCRGLLRAALVPQGRGASARCAVGVRWEAARRRRMAGVRCDAAVAEKPAGEEETAGEKYEYQAEVTRLMDLIVHSLYSHKEVFLRELVSNASDALDKLRFLSVTDSSVLADGGELEIRIKPDLEAGTITITDTGIGMTKDELKDCLGTIAQSGTSKFLKALKENKDLGADNGLIGQFGVGFYSAFLVAERVVVSTKSPKADKQYVWEAEADSSSYVIKEETDPEKMLSRGTEITLYLRDDDKYEFADPTRIQGLVKNYSQFVSFPIYTWQEKSKTVEVEEEEESKGEEATEESKSEEATEG

SEQ ID NO: 9482 - protein, 267 aa, Zea mays subsp. mays
  peptide (1)..(267): Ceres Seq. ID no. 12374814
  misc_feature (45)..(206): Pfam Name: Histidine kinase-, DNA gyrase B-, and HSP90-like ATPase Pfam Description: Histidine kinase-, DNA gyrase B-, and
  misc_feature (1)..(263): Homolog of NCBI NO: 1076758 NR Description: heat-shock protein, 82K, precursor - rye
  misc_feature (1)..(266): Homolog of NCBI NO: 15228059 NR Description: putative heat shock protein; protein id: supported by cDNA: gi_15450722, supported by cDNA: gi_16930684, by cDNA: gi_20453105 [Arabidopsis thaliana]
  misc_feature (1)..(266): Homolog of NCBI NO: 30678090 NR Description: heat shock protein, putative [Arabidopsis
  misc_feature (1)..(266): Homolog of NCBI NO: 20453106 NR Description: At2g04030/F3C11.14 [Arabidopsis thaliana]
  misc_feature (1)..(266): Homolog of NCBI NO: 1906830 NR Description: heat shock protein [Arabidopsis thaliana]
  misc_feature (8)..(266): Homolog of NCBI NO: 15231505 NR Description: putative heat-shock protein; protein id:
  misc_feature (3)..(266): Homolog of NCBI NO: 23477636 NR Description: Grp94 [Xerophyta viscosa]
  misc_feature (21)..(266): Homolog of NCBI NO: 544242 NR Description: ENDOPLASMIN HOMOLOG PRECURSOR (GRP94 HOMOLOG)
  misc_feature (3)..(266): Homolog of NCBI NO: 18855040 NR Description: heat shock protein 90 [Oryza sativa]
  misc_feature (3)..(266): Homolog of NCBI NO: 6863054 NR Description: heat shock protein 90 [Oryza sativa]
MAGVRCDAAVAEKPAGEEETAGEKYEYQAEVTRLMDLIVHSLYSHKEVFLRELVSNASDALDKLRFLSVTDSSVLADGGELEIRIKPDLEAGTITITDTGIGMTKDELKDCLGTIAQSGTSKFLKALKENKDLGADNGLIGQFGVGFYSAFLVAERVVVSTKSPKADKQYVWEAEADSSSYVIKEETDPEKMLSRGTEITLYLRDDDKYEFADPTRIQGLVKNYSQFVSFPIYTWQEKSKTVEVEEEEESKGEEATEESKSEEATEG

SEQ ID NO: 9483 - DNA, 751 bp, Zea mays subsp. mays
  misc_feature (1)..(751): Ceres Seq. ID no. 12356736
  misc_feature: MA Experiment ID: 108522 Result: Up-regulated in Transcription
  misc_feature: MA Experiment 108522 PARAMETER Experiment Name: Zm_42deg_Heat_P Parameter: Age (day) Value: 8
  misc_feature: MA Experiment 108522 PARAMETER Experiment Name: Zm_42deg_Heat_P Parameter: Organism Value: Zea mays
  misc_feature: MA Experiment 108522 PARAMETER Experiment Name: Zm_42deg_Heat_P Parameter: Plant Line Value: 35A19
  misc_feature: MA Experiment 108522 PARAMETER Experiment Name: Zm_42deg_Heat_P Parameter: Temperature (deg C) Value: 42 vs. 22
  misc_feature: MA Experiment 108522 PARAMETER Experiment Name: Zm_42deg_Heat_P Parameter: Timepoint (hr) Value: 1
  misc_feature: MA Experiment 108522 PARAMETER Experiment Name: Zm_42deg_Heat_P Parameter: Tissue Value: Aerial
ggagaaagtaccaagtgctcagggagttcagtctgacaatgatcctaacaatacaaccatttttgttggtggtcttgaccccaatgtcactgaagatatgttgaaacaagttttcaccccttatggggacgtagtccatgttaagattcctgttggcaaaagatgtggttttgttcaatatgctaacagatcttcggcagaggaggcattggtaattctgcaaggcaccttggttggagggcagaatgtgaggctttcatggggtcgcagcccttcaaacaaacaagttcagcctcaacaggactccaaccagtgggccggggctaatgctggatattatggctacggtcaaggctatgaggcctatgggtacccccagtctcaggaccctaatatgtataattatggagctggagcttatgctggctatccaaattaccaacaacaaccagtagcacagcaaccgccgcagcaacagtgagaggtccagtgacgctactgtcatttgggtgattgacgtggaaatatttatgagttgtaagatgagcttcggatgcaagctggattaggtatacagacatgattttcgtagtactcagattctgagttgccctcgtatcagagcttgtggtcccaatagcctgcagctgcagctaaaacgatctattttggtagcggaatgttttatctgcttattttgtaccgtgtcttccgctactgcggagccttgataacttgctatgttggattt

SEQ ID NO: 9484 - protein, 159 aa, Zea mays subsp. mays
  peptide (1)..(159): Ceres Seq. ID no. 12356737
  misc_feature (20)..(85): Pfam Name: RNA recognition motif. (a.k.a. RRM, RBD, or RNP domain) Pfam Description: RNA recognition motif. (a.k.a. RRM, RBD, or RNP
  misc_feature (1)..(159): Homolog of NCBI NO: 40253807 NR Description: putative RNA Binding Protein 45 [Oryza sativa
  misc_feature (1)..(158): Homolog of NCBI NO: 39545835 NR Description: OSJNBb0060E08.6 [Oryza sativa (japonica
  misc_feature (5)..(158): Homolog of NCBI NO: 34896988 NR Description: putative RNA binding protein [Oryza sativa]
  misc_feature (5)..(159): Homolog of NCBI NO: 34395214 NR Description: putative RNA Binding Protein [Oryza sativa
  misc_feature (5)..(159): Homolog of NCBI NO: 34901884 NR Description: putative RNA Binding Protein 45 [Oryza sativa
  misc_feature (7)..(159): Homolog of NCBI NO: 30524689 NR Description: salt tolerance protein 6 [Beta vulgaris]
  misc_feature (7)..(148): Homolog of NCBI NO: 9663767 NR Description: RNA Binding Protein 45 [Nicotiana plumbaginifolia]
  misc_feature (5)..(158): Homolog of NCBI NO: 7485342 NR Description: hypothetical protein F10M23.340 - Arabidopsis >gi|4455223|emb|CAB36546.1| putative DNA binding protein thaliana] >gi|7269553|emb|CAB79555.1| putative DNA binding
  misc_feature (5)..(158): Homolog of NCBI NO: 18416906 NR Description: RNA binding protein 45 (RBP45), putative; protein At4g27000.1, supported by cDNA: gi_13878152, supported by cDNA: supported by cDNA: gi_17104568, supported by cDNA: gi_20259887
  misc_feature (5)..(158): Homolog of NCBI NO: 15221071 NR Description: RNA binding protein 45 (RBP45), putative; protein At1g11650.1, supported by cDNA: 30022., supported by cDNA: [Arabidopsis thaliana] >gi|25402676|pir||H86249 hypothetical
EKVPSAQGVQSDNDPNNTTIFVGGLDPNVTEDMLKQVFTPYGDVVHVKIPVGKRCGFVQYANRSSAEEALVILQGTLVGGQNVRLSWGRSPSNKQVQPQQDSNQWAGANAGYYGYGQGYEAYGYPQSQDPNMYNYGAGAYAGYPNYQQQPVAQQPPQQQ

SEQ ID NO: 9485 - protein, 127 aa, Zea mays subsp. mays
  peptide (1)..(127): Ceres Seq. ID no. 12356738
  misc_feature (1)..(53): Pfam Name: RNA recognition motif. (a.k.a. RRM, RBD, or RNP domain) Pfam Description: RNA recognition motif. (a.k.a. RRM, RBD, or RNP
  misc_feature (1)..(127): Homolog of NCBI NO: 40253807 NR Description: putative RNA Binding Protein 45 [Oryza sativa
  misc_feature (1)..(126): Homolog of NCBI NO: 39545835 NR Description: OSJNBb0060E08.6 [Oryza sativa (japonica
  misc_feature (1)..(126): Homolog of NCBI NO: 34896988 NR Description: putative RNA binding protein [Oryza sativa]
  misc_feature (1)..(127): Homolog of NCBI NO: 34395214 NR Description: putative RNA Binding Protein [Oryza sativa
  misc_feature (1)..(127): Homolog of NCBI NO: 34901884 NR Description: putative RNA Binding Protein 45 [Oryza sativa
  misc_feature (1)..(127): Homolog of NCBI NO: 30524689 NR Description: salt tolerance protein 6 [Beta vulgaris]
  misc_feature (1)..(116): Homolog of NCBI NO: 9663767 NR Description: RNA Binding Protein 45 [Nicotiana plumbaginifolia]
  misc_feature (1)..(126): Homolog of NCBI NO: 7485342 NR Description: hypothetical protein F10M23.340 - Arabidopsis >gi|4455223|emb|CAB36546.1| putative DNA binding protein thaliana] >gi|7269553|emb|CAB79555.1| putative DNA binding
  misc_feature (1)..(126): Homolog of NCBI NO: 18416906 NR Description: RNA binding protein 45 (RBP45), putative; protein At4g27000.1, supported by cDNA: gi_13878152, supported by cDNA: supported by cDNA: gi_17104568, supported by cDNA: gi_20259887
  misc_feature (1)..(126): Homolog of NCBI NO: 15221071 NR Description: RNA binding protein 45 (RBP45), putative; protein At1g11650.1, supported by cDNA: 30022., supported by cDNA: [Arabidopsis thaliana] >gi|25402676|pir||H86249 hypothetical
MLKQVFTPYGDVVHVKIPVGKRCGFVQYANRSSAEEALVILQGTLVGGQNVRLSWGRSPSNKQVQPQQDSNQWAGANAGYYGYGQGYEAYGYPQSQDPNMYNYGAGAYAGYPNYQQQPVAQQPPQQQ

SEQ ID NO: 9486 - DNA, 771 bp, Zea mays subsp. mays
  misc_feature (1)..(771): Ceres Seq. ID no. 12415488
  misc_feature: MA Experiment ID: 108526 Result: Up-regulated in Transcription
  misc_feature: MA Experiment 108526 PARAMETER Experiment Name: Zm_5mM_NO_P Parameter: Age (day) Value: 8
  misc_feature: MA Experiment 108526 PARAMETER Experiment Name: Zm_5mM_NO_P Parameter: Organism Value: Zea mays
  misc_feature: MA Experiment 108526 PARAMETER Experiment Name: Zm_5mM_NO_P Parameter: Plant Line Value: 35A19
  misc_feature: MA Experiment 108526 PARAMETER Experiment Name: Zm_5mM_NO_P Parameter: Timepoint (hr) Value: 1
  misc_feature: MA Experiment 108526 PARAMETER Experiment Name: Zm_5mM_NO_P Parameter: Tissue Value: Aerial
  misc_feature: MA Experiment 108526 PARAMETER Experiment Name: Zm_5mM_NO_P Parameter: Treatment Value: 5mM NO vs. No Treatment
  misc_feature: MA Experiment ID: 108527 Result: Up-regulated in Transcription
  misc_feature: MA Experiment 108527 PARAMETER Experiment Name: Zm_5mM_NO_P Parameter: Age (day) Value: 8
  misc_feature: MA Experiment 108527 PARAMETER Experiment Name: Zm_5mM_NO_P Parameter: Organism Value: Zea mays
  misc_feature: MA Experiment 108527 PARAMETER Experiment Name: Zm_5mM_NO_P Parameter: Plant Line Value: 35A19
  misc_feature: MA Experiment 108527 PARAMETER Experiment Name: Zm_5mM_NO_P Parameter: Timepoint (hr) Value: 6
  misc_feature: MA Experiment 108527 PARAMETER Experiment Name: Zm_5mM_NO_P Parameter: Tissue Value: Aerial
  misc_feature: MA Experiment 108527 PARAMETER Experiment Name: Zm_5mM_NO_P Parameter: Treatment Value: 5mM NO vs. No Treatment
  misc_feature: MA Experiment ID: 108528 Result: Down-regulated in Transcription
  misc_feature: MA Experiment 108528 PARAMETER Experiment Name: Zm_Imbibed_Seeds_P Parameter: Age (day) Value: 5 vs. 2
  misc_feature: MA Experiment 108528 PARAMETER Experiment Name: Zm_Imbibed_Seeds_P Parameter: Organism Value: Zea mays
  misc_feature: MA Experiment 108528 PARAMETER Experiment Name: Zm_Imbibed_Seeds_P Parameter: Plant Line Value: 35A19
  misc_feature: MA Experiment 108528 PARAMETER Experiment Name: Zm_Imbibed_Seeds_P Parameter: Tissue Value: Aerial vs. Embryo
  misc_feature: MA Experiment ID: 108529 Result: Up-regulated in Transcription
  misc_feature: MA Experiment 108529 PARAMETER Experiment Name: Zm_Imbibed_Seeds_P Parameter: Age (day) Value: 5 vs. 2
  misc_feature: MA Experiment 108529 PARAMETER Experiment Name: Zm_Imbibed_Seeds_P Parameter: Organism Value: Zea mays
  misc_feature: MA Experiment 108529 PARAMETER Experiment Name: Zm_Imbibed_Seeds_P Parameter: Plant Line Value: 35A19
  misc_feature: MA Experiment 108529 PARAMETER Experiment Name: Zm_Imbibed_Seeds_P Parameter: Tissue Value: Roots vs. Embryo
  misc_feature: MA Experiment ID: 108534 Result: Up-regulated in Transcription
  misc_feature: MA Experiment 108534 PARAMETER Experiment Name: Zm_4deg_Cold_P Parameter: Age (hr) Value: 8
  misc_feature: MA Experiment 108534 PARAMETER Experiment Name: Zm_4deg_Cold_P Parameter: Organism Value: Zea mays
  misc_feature: MA Experiment 108534 PARAMETER Experiment Name: Zm_4deg_Cold_P Parameter: Plant Line Value: 35A19
  misc_feature: MA Experiment 108534 PARAMETER Experiment Name: Zm_4deg_Cold_P Parameter: Temperature (deg C) Value: 4 vs. 22
  misc_feature: MA Experiment 108534 PARAMETER Experiment Name: Zm_4deg_Cold_P Parameter: Timepoint (hr) Value: 6
  misc_feature: MA Experiment 108534 PARAMETER Experiment Name: Zm_4deg_Cold_P Parameter: Tissue Value: Aerial
  misc_feature: MA Experiment ID: 108535 Result: Down-regulated in Transcription
  misc_feature: MA Experiment 108535 PARAMETER Experiment Name: Zm_Meristem_P Parameter: Age (day) Value: 8
  misc_feature: MA Experiment 108535 PARAMETER Experiment Name: Zm_Meristem_P Parameter: Organism Value: Zea mays
  misc_feature: MA Experiment 108535 PARAMETER Experiment Name: Zm_Meristem_P Parameter: Plant Line Value: 35A19
  misc_feature: MA Experiment 108535 PARAMETER Experiment Name: Zm_Meristem_P Parameter: Tissue Value: Root Meristem vs. Above Root Meristem
  misc_feature: MA Experiment ID: 108543 Result: Up-regulated in Transcription
  misc_feature: MA Experiment ID: 108545 Result: Down-regulated in Transcription
  misc_feature: MA Experiment 108545 PARAMETER Experiment Name: Zm_Imbibed_Seeds_P Parameter: Age (day) Value: 3 vs. 2
  misc_feature: MA Experiment 108545 PARAMETER Experiment Name: Zm_Imbibed_Seeds_P Parameter: Organism Value: Zea mays
  misc_feature: MA Experiment 108545 PARAMETER Experiment Name: Zm_Imbibed_Seeds_P Parameter: Plant Line Value: 35A19
  misc_feature: MA Experiment 108545 PARAMETER Experiment Name: Zm_Imbibed_Seeds_P Parameter: Tissue Value: Aerial vs. Embryo
  misc_feature: MA Experiment ID: 20000108 Result: Down-regulated in Transcription
  misc_feature: MA Experiment 20000108 PARAMETER Experiment Name: Zm_Root-Tips_P Parameter: Age (day) Value: 12
  misc_feature: MA Experiment 20000108 PARAMETER Experiment Name: Zm_Root-Tips_P Parameter: Organism Value: Zea mays
  misc_feature: MA Experiment 20000108 PARAMETER Experiment Name: Zm_Root-Tips_P Parameter: Tissue Value: Root tips vs. Root mid region    35
  misc_feature: MA Experiment 20000108 PARAMETER Experiment Name: Zm_Root-Tips_P Parameter: Tissue Value: Root tips vs. Root mid region   Sequence Listing-Misc Features (4)
  misc_feature: MA Experiment ID: 20000532 Result: Up-regulated in Transcription
  misc_feature: MA Experiment 20000532 PARAMETER Experiment Name: Zm_0.001percent_MeJA_P Parameter: Age (day) Value: 10
  misc_feature: MA Experiment 20000532 PARAMETER Experiment Name: Zm_0.001percent_MeJA_P Parameter: Organism Value: Zea mays
  misc_feature: MA Experiment 20000532 PARAMETER Experiment Name: Zm_0.001percent_MeJA_P Parameter: Plant Line Value: 35A19
  misc_feature: MA Experiment 20000532 PARAMETER Experiment Name: Zm_0.001percent_MeJA_P Parameter: Timepoint (hr) Value: 48
  misc_feature: MA Experiment 20000532 PARAMETER Experiment Name: Zm_0.001percent_MeJA_P Parameter: Tissue Value: Aerial
  misc_feature: MA Experiment 20000532 PARAMETER Experiment Name: Zm_0.001percent_MeJA_P Parameter: Treatment Value: 0.001percent MeJA vs. No Treatment
  misc_feature: MA Experiment ID: 20000630 Result: Up-regulated in Transcription
  misc_feature: MA Experiment 20000630 PARAMETER Experiment Name: Zm_Herbicide-Treatments_P Parameter: Timepoint (hr) Value: 4
  misc_feature: MA Experiment 20000630 PARAMETER Experiment Name: Zm_Herbicide-Treatments_P Parameter: Tissue Value: Aerial
  misc_feature: MA Experiment 20000630 PARAMETER Experiment Name: Zm_Herbicide-Treatments_P Parameter: Treatment Value: Roundup vs. No Treatment
atcgatcgaacttgctaaaccagcggaaacctaaccagctaggcagcattagcttttcaacaagcctcgctcgcgcgccgtgaccgataggatggccatcacccacgacgactacgtctccctgtgcctcatggcgctcgcagccgcgggaggaggaggagggcacgctgcggctgccagtgccaggacgacgacgatgacgacgcaagagtgcgagctccgcttccggtgctccgtctgcggcaaggccttcgcgtcgcaccaggcgctgggcgggcacaaggccagccaccggaagccgccgccgacgctcgtacaggcggcgtcgtcgtcgtcgtcggtgacgacgaatacctcgtcggcgggcggcagcggcgccgggcaggggaggcacaggtgctcggtgtgccaccggggcttcgccacggggcaggcgctcggcgggcacaagaggtgccattactgggacgggctctcggtgtcgctcaccgcgtcggcggcgtcggggtccgcgtccagcttgaggggcttcgatctgaatttggtgccggccgccggcgcggcaaggtggcgagaggaggaagaggtgcagagccccttgccggtcaagaagcggcggctgtcctccggtccttccaccgaacttagtttaacgatttagagttccttttggtgagctgaggcatgtagagtgttttcgtagcttcattcttttaaccgtattttggtttttgtgtttgcgcggtgaataaacgtgtatttaattttgtc

SEQ ID NO: 9487 - protein, 189 aa, Zea mays subsp. mays
  peptide (1)..(189): Ceres Seq. ID no. 12415489
  misc_feature (101)..(123): Pfam Name: Zinc finger, C2H2 type Pfam Description: Zinc finger, C2H2 type
  misc_feature (3)..(187): Homolog of NCBI NO: 40737005 NR Description: putative zinc finger protein [Oryza sativa
  misc_feature (2)..(179): Homolog of NCBI NO: 40737008 NR Description: C2H2-type zinc finger protein ZFP36 [Oryza sativa
  misc_feature (1)..(176): Homolog of NCBI NO: 15237692 NR Description: putative c2h2 zinc finger transcription factor; id: At5g04340.1, supported by cDNA: gi_2511545 [Arabidopsis >gi|2511546|gb|AAB80922.1| putative c2h2 zinc finger
  misc_feature (1)..(176): Homolog of NCBI NO: 26452746 NR Description: putative C2H2 zinc finger transcription factor
  misc_feature (1)..(177): Homolog of NCBI NO: 28849865 NR Description: zinc finger transcription factor ZFP2 [Oryza
  misc_feature (1)..(185): Homolog of NCBI NO: 33331578 NR Description: zinc finger protein [Capsicum annuum]
  misc_feature (1)..(175): Homolog of NCBI NO: 7228329 NR Description: putative TFIIIA (or kruppel)-like zinc finger
  misc_feature (1)..(185): Homolog of NCBI NO: 439493 NR Description: zinc-finger protein [Petunia x hybrida]
MAITHDDYVSLCLMALAAAGGGGGHAAAASARTTTMTTQECELRFRCSVCGKAFASHQALGGHKASHRKPPPTLVQAASSSSSVTTNTSSAGGSGAGQGRHRCSVCHRGFATGQALGGHKRCHYWDGLSVSLTASAASGSASSLRGFDLNLVPAAGAARWREEEEVQSPLPVKKRRLSSGPSTELSLTI

SEQ ID NO: 9488 - protein, 176 aa, Zea mays subsp. mays
  peptide (1)..(176): Ceres Seq. ID no. 12415490
  misc_feature (88)..(110): Pfam Name: Zinc finger, C2H2 type Pfam Description: Zinc finger, C2H2 type
  misc_feature (1)..(174): Homolog of NCBI NO: 40737005 NR Description: putative zinc finger protein [Oryza sativa
  misc_feature (1)..(166): Homolog of NCBI NO: 40737008 NR Description: C2H2-type zinc finger protein ZFP36 [Oryza sativa
  misc_feature (1)..(163): Homolog of NCBI NO: 15237692 NR Description: putative c2h2 zinc finger transcription factor; id: At5g04340.1, supported by cDNA: gi_2511545 [Arabidopsis >gi|2511546|gb|AAB80922.1| putative c2h2 zinc finger
  misc_feature (1)..(163): Homolog of NCBI NO: 26452746 NR Description: putative C2H2 zinc finger transcription factor
  misc_feature (1)..(164): Homolog of NCBI NO: 28849865 NR Description: zinc finger transcription factor ZFP2 [Oryza
  misc_feature (1)..(172): Homolog of NCBI NO: 33331578 NR Description: zinc finger protein [Capsicum annuum]
  misc_feature (1)..(162): Homolog of NCBI NO: 7228329 NR Description: putative TFIIIA (or kruppel)-like zinc finger
  misc_feature (1)..(172): Homolog of NCBI NO: 439493 NR Description: zinc-finger protein [Petunia x hybrida]
MALAAAGGGGGHAAAASARTTTMTTQECELRFRCSVCGKAFASHQALGGHKASHRKPPPTLVQAASSSSSVTTNTSSAGGSGAGQGRHRCSVCHRGFATGQALGGHKRCHYWDGLSVSLTASAASGSASSLRGFDLNLVPAAGAARWREEEEVQSPLPVKKRRLSSGPSTELSLTI

SEQ ID NO: 9489 - protein, 154 aa, Zea mays subsp. mays
  peptide (1)..(154): Ceres Seq. ID no. 12415491
  misc_feature (66)..(88): Pfam Name: Zinc finger, C2H2 type Pfam Description: Zinc finger, C2H2 type
  misc_feature (1)..(152): Homolog of NCBI NO: 40737005 NR Description: putative zinc finger protein [Oryza sativa
  misc_feature (1)..(144): Homolog of NCBI NO: 40737008 NR Description: C2H2-type zinc finger protein ZFP36 [Oryza sativa
  misc_feature (1)..(141): Homolog of NCBI NO: 15237692 NR Description: putative c2h2 zinc finger transcription factor; id: At5g04340.1, supported by cDNA: gi_2511545 [Arabidopsis >gi|2511546|gb|AAB80922.1| putative c2h2 zinc finger
  misc_feature (1)..(141): Homolog of NCBI NO: 26452746 NR Description: putative C2H2 zinc finger transcription factor
  misc_feature (1)..(142): Homolog of NCBI NO: 28849865 NR Description: zinc finger transcription factor ZFP2 [Oryza
  misc_feature (1)..(150): Homolog of NCBI NO: 33331578 NR Description: zinc finger protein [Capsicum annuum]
  misc_feature (1)..(140): Homolog of NCBI NO: 7228329 NR Description: putative TFIIIA (or kruppel)-like zinc finger
  misc_feature (1)..(150): Homolog of NCBI NO: 439493 NR Description: zinc-finger protein [Petunia x hybrida]
MTTQECELRFRCSVCGKAFASHQALGGHKASHRKPPPTLVQAASSSSSVTTNTSSAGGSGAGQGRHRCSVCHRGFATGQALGGHKRCHYWDGLSVSLTASAASGSASSLRGFDLNLVPAAGAARWREEEEVQSPLPVKKRRLSSGPSTELSLTI

SEQ ID NO: 9490 - DNA, 975 bp, Zea mays subsp. mays
  misc_feature (1)..(975): Ceres Seq. ID no. 12367671
  misc_feature: MA Experiment ID: 108529 Result: Down-regulated in Transcription
  misc_feature: MA Experiment 108529 PARAMETER Experiment Name: Zm_Imbibed_Seeds_P Parameter: Age (day) Value: 5 vs. 2
  misc_feature: MA Experiment 108529 PARAMETER Experiment Name: Zm_Imbibed_Seeds_P Parameter: Organism Value: Zea mays
  misc_feature: MA Experiment 108529 PARAMETER Experiment Name: Zm_Imbibed_Seeds_P Parameter: Plant Line Value: 35A19
  misc_feature: MA Experiment 108529 PARAMETER Experiment Name: Zm_Imbibed_Seeds_P Parameter: Tissue Value: Roots vs. Embryo
  misc_feature: MA Experiment ID: 108535 Result: Up-regulated in Transcription
  misc_feature: MA Experiment 108535 PARAMETER Experiment Name: Zm_Meristem_P Parameter: Age (day) Value: 8
  misc_feature: MA Experiment 108535 PARAMETER Experiment Name: Zm_Meristem_P Parameter: Organism Value: Zea mays
  misc_feature: MA Experiment 108535 PARAMETER Experiment Name: Zm_Meristem_P Parameter: Plant Line Value: 35A19
  misc_feature: MA Experiment 108535 PARAMETER Experiment Name: Zm_Meristem_P Parameter: Tissue Value: Root Meristem vs. Above Root Meristem
  misc_feature: MA Experiment ID: 108543 Result: Up-regulated in Transcription
  misc_feature: MA Experiment ID: 108544 Result: Down-regulated in Transcription
  misc_feature: MA Experiment ID: 108546 Result: Down-regulated in Transcription
  misc_feature: MA Experiment 108546 PARAMETER Experiment Name: Zm_Imbibed_Seeds_P Parameter: Age (day) Value: 3 vs. 2
  misc_feature: MA Experiment 108546 PARAMETER Experiment Name: Zm_Imbibed_Seeds_P Parameter: Organism Value: Zea mays
  misc_feature: MA Experiment 108546 PARAMETER Experiment Name: Zm_Imbibed_Seeds_P Parameter: Plant Line Value: 35A19
  misc_feature: MA Experiment 108546 PARAMETER Experiment Name: Zm_Imbibed_Seeds_P Parameter: Tissue Value: Roots vs. Embryo
  misc_feature: MA Experiment ID: 108556 Result: Down-regulated in Transcription
  misc_feature: MA Experiment 108556 PARAMETER Experiment Name: Zm_Drought_P Parameter: Age (day) Value: 9
  misc_feature: MA Experiment 108556 PARAMETER Experiment Name: Zm_Drought_P Parameter: Organism Value: Zea mays
  misc_feature: MA Experiment 108556 PARAMETER Experiment Name: Zm_Drought_P Parameter: Plant Line Value: 35A19
  misc_feature: MA Experiment 108556 PARAMETER Experiment Name: Zm_Drought_P Parameter: Timepoint (hr) Value: 24
  misc_feature: MA Experiment 108556 PARAMETER Experiment Name: Zm_Drought_P Parameter: Tissue Value: Aerial
  misc_feature: MA Experiment 108556 PARAMETER Experiment Name: Zm_Drought_P Parameter: Treatment Value: Drought vs. No Drought
  misc_feature: MA Experiment ID: 108689 Result: Down-regulated in Transcription
  misc_feature: MA Experiment 108689 PARAMETER Experiment Name: Zm_Drought_Roots_P Parameter: Age (day) Value: 9
  misc_feature: MA Experiment 108689 PARAMETER Experiment Name: Zm_Drought_Roots_P Parameter: Organism Value: Zea mays
  misc_feature: MA Experiment 108689 PARAMETER Experiment Name: Zm_Drought_Roots_P Parameter: Plant Line Value: 35A19
  misc_feature: MA Experiment 108689 PARAMETER Experiment Name: Zm_Drought_Roots_P Parameter: Timepoint (hr) Value: 24
  misc_feature: MA Experiment 108689 PARAMETER Experiment Name: Zm_Drought_Roots_P Parameter: Tissue Value: Roots
  misc_feature: MA Experiment 108689 PARAMETER Experiment Name: Zm_Drought_Roots_P Parameter: Treatment Value: Drought vs. No Drought
  misc_feature: MA Experiment ID: 20000108 Result: Up-regulated in Transcription
  misc_feature: MA Experiment 20000108 PARAMETER Experiment Name: Zm_Root-Tips_P Parameter: Age (day) Value: 12
  misc_feature: MA Experiment 20000108 PARAMETER Experiment Name: Zm_Root-Tips_P Parameter: Organism Value: Zea mays
  misc_feature: MA Experiment 20000108 PARAMETER Experiment Name: Zm_Root-Tips_P Parameter: Tissue Value: Root tips vs. Root mid region    35
  misc_feature: MA Experiment 20000108 PARAMETER Experiment Name: Zm_Root-Tips_P Parameter: Tissue Value: Root tips vs. Root mid region   Sequence Listing-Misc Features (4)
  misc_feature: MA Experiment ID: 20000477 Result: Down-regulated in Transcription
  misc_feature: MA Experiment 20000477 PARAMETER Experiment Name: Zm_5mM_SA_P Parameter: Age (day) Value: 10
  misc_feature: MA Experiment 20000477 PARAMETER Experiment Name: Zm_5mM_SA_P Parameter: Organism Value: Zea mays
  misc_feature: MA Experiment 20000477 PARAMETER Experiment Name: Zm_5mM_SA_P Parameter: Plant Line Value: 35A19
  misc_feature: MA Experiment 20000477 PARAMETER Experiment Name: Zm_5mM_SA_P Parameter: Timepoint (hr) Value: 48
  misc_feature: MA Experiment 20000477 PARAMETER Experiment Name: Zm_5mM_SA_P Parameter: Tissue Value: Aerial
  misc_feature: MA Experiment 20000477 PARAMETER Experiment Name: Zm_5mM_SA_P Parameter: Treatment Value: 5mM SA vs. No Treatment
  misc_feature: MA Experiment ID: 20000478 Result: Down-regulated in Transcription
  misc_feature: MA Experiment 20000478 PARAMETER Experiment Name: Zm_5mM_SA_P Parameter: Age (day) Value: 11
  misc_feature: MA Experiment 20000478 PARAMETER Experiment Name: Zm_5mM_SA_P Parameter: Organism Value: Zea mays
  misc_feature: MA Experiment 20000478 PARAMETER Experiment Name: Zm_5mM_SA_P Parameter: Plant Line Value: 35A19
  misc_feature: MA Experiment 20000478 PARAMETER Experiment Name: Zm_5mM_SA_P Parameter: Timepoint (hr) Value: 72
  misc_feature: MA Experiment 20000478 PARAMETER Experiment Name: Zm_5mM_SA_P Parameter: Tissue Value: Aerial
  misc_feature: MA Experiment 20000478 PARAMETER Experiment Name: Zm_5mM_SA_P Parameter: Treatment Value: 5mM SA vs. No Treatment
  misc_feature: MA Experiment ID: 20000479 Result: Down-regulated in Transcription
  misc_feature: MA Experiment 20000479 PARAMETER Experiment Name: Zm_Drought_P Parameter: Age (day) Value: 10
  misc_feature: MA Experiment 20000479 PARAMETER Experiment Name: Zm_Drought_P Parameter: Organism Value: Zea mays
  misc_feature: MA Experiment 20000479 PARAMETER Experiment Name: Zm_Drought_P Parameter: Plant Line Value: 35A19
  misc_feature: MA Experiment 20000479 PARAMETER Experiment Name: Zm_Drought_P Parameter: Timepoint (hr) Value: 48
  misc_feature: MA Experiment 20000479 PARAMETER Experiment Name: Zm_Drought_P Parameter: Tissue Value: Aerial
  misc_feature: MA Experiment 20000479 PARAMETER Experiment Name: Zm_Drought_P Parameter: Treatment Value: Drought vs. No Drought
  misc_feature: MA Experiment ID: 20000480 Result: Down-regulated in Transcription
  misc_feature: MA Experiment 20000480 PARAMETER Experiment Name: Zm_Drought_P Parameter: Age (day) Value: 11
  misc_feature: MA Experiment 20000480 PARAMETER Experiment Name: Zm_Drought_P Parameter: Organism Value: Zea mays
  misc_feature: MA Experiment 20000480 PARAMETER Experiment Name: Zm_Drought_P Parameter: Plant Line Value: 35A19
  misc_feature: MA Experiment 20000480 PARAMETER Experiment Name: Zm_Drought_P Parameter: Timepoint (hr) Value: 72
  misc_feature: MA Experiment 20000480 PARAMETER Experiment Name: Zm_Drought_P Parameter: Tissue Value: Aerial
  misc_feature: MA Experiment 20000480 PARAMETER Experiment Name: Zm_Drought_P Parameter: Treatment Value: Drought vs. No Drought
  misc_feature: MA Experiment ID: 20000535 Result: Down-regulated in Transcription
  misc_feature: MA Experiment 20000535 PARAMETER Experiment Name: Zm_Hybrid_Seed_Dev_P Parameter: DAP Value: 30 vs. 12
  misc_feature: MA Experiment 20000535 PARAMETER Experiment Name: Zm_Hybrid_Seed_Dev_P Parameter: Organism Value: Zea mays
  misc_feature: MA Experiment 20000535 PARAMETER Experiment Name: Zm_Hybrid_Seed_Dev_P Parameter: Plant Line Value: 35A19
  misc_feature: MA Experiment 20000535 PARAMETER Experiment Name: Zm_Hybrid_Seed_Dev_P Parameter: Tissue Value: Embryo vs. Unfert Floret
  misc_feature: MA Experiment ID: 20000626 Result: Down-regulated in Transcription
  misc_feature: MA Experiment 20000626 PARAMETER Experiment Name: Zm_Herbicide-Treatments_P Parameter: Timepoint (hr) Value: 12
  misc_feature: MA Experiment 20000626 PARAMETER Experiment Name: Zm_Herbicide-Treatments_P Parameter: Tissue Value: Aerial
  misc_feature: MA Experiment 20000626 PARAMETER Experiment Name: Zm_Herbicide-Treatments_P Parameter: Treatment Value: Roundup vs. No Treatment
gcataacgccgctgccggaggtctccaaggccagcgacgtcgccggcggcgcggtgaagagatggccgcagcggctcacggccgtgccgcccagggtctcccgcggcaccgtcaggggcgtcacggccaggtcgttcgcgcaggacacggagctgtggcggaggagggtccggcactacaagtcggtggccagccagctcgagcagaaggggcggtaccgcaacgtgctggacatgaacgcgcgcctgggcgggttcgccgcggcgctggcgctggcgggcgacccgctgtgggtcatgaacatggtcccgaccgtggcgaacgcgaccacgctcggggccatctacgagcgcgggctcatcggaagctaccaggactggtgcgagggcatgtctacctacccgaggacctacgacctcatccatgcggattcggtgttcaccctgtacaaggacaggtgtgagatggaccgcatcctcctggagatggacaggatcctgaggcccaggggcacggtgatcgtcagggaagacgtggacatgctggtgaaggtcaagagcctggcggacgggatgaggtgggagagccagatcgtcgaccacgaatacggcccgctcgtcagggagaagatcctcctggttgtcaagacgtactggactgcccaggaccaagaccagtagcaggaccggacttgtcaagcgaagttcagcaatgttgataagcatttttcttgcttcgaattgcattggatcgccatttctagctccttgagctagtagtgttctctgtttgtttgctgttccttttggactgtacttgctcagataggaaatttgtatcctaaggtgtaacagggggaaatggaagggcttaggtaaaacccctggcccctgcaaagttttttttttttgttttccttcaattgcgaaattgtggcaagtggtaaatagaaagtcactgttgcgagtcatcccg

SEQ ID NO: 9491 - protein, 225 aa, Zea mays subsp. mays
  peptide (1)..(225): Ceres Seq. ID no. 12367672
  misc_feature (1)..(215): Pfam Name: Putative methyltransferase Pfam Description: Putative methyltransferase
  misc_feature (1)..(225): Homolog of NCBI NO: 38567915 NR Description: OSJNBa0088I22.11 [Oryza sativa (japonica
  misc_feature (1)..(220): Homolog of NCBI NO: 34898042 NR Description: OSJNBa0038F22.19 [Oryza sativa (japonica >gi|5734619|dbj|BAA83350.1| Similar to Arabidopsis thaliana BAC
  misc_feature (1)..(225): Homolog of NCBI NO: 15236921 NR Description: hypothetical protein; protein id: At4g00750.1
  misc_feature (1)..(225): Homolog of NCBI NO: 15225560 NR Description: hypothetical protein; protein id: At2g45750.1
  misc_feature (1)..(225): Homolog of NCBI NO: 37535962 NR Description: unknown protein [Oryza sativa (japonica
  misc_feature (1)..(221): Homolog of NCBI NO: 24413975 NR Description: hypothetical protein~similar to Oryza sativa
  misc_feature (1)..(225): Homolog of NCBI NO: 15235080 NR Description: putative protein; protein id: At4g10440.1
  misc_feature (1)..(218): Homolog of NCBI NO: 18396075 NR Description: expressed protein; protein id: At1g26850.1, by cDNA: gi_14335101 [Arabidopsis thaliana] At1g26850/T2P11_4 [Arabidopsis thaliana]
  misc_feature (1)..(223): Homolog of NCBI NO: 18071395 NR Description: hypothetical protein [Oryza sativa]
  misc_feature (1)..(219): Homolog of NCBI NO: 9665165 NR Description: Unknown Protein [Arabidopsis thaliana]
ITPLPEVSKASDVAGGAVKRWPQRLTAVPPRVSRGTVRGVTARSFAQDTELWRRRVRHYKSVASQLEQKGRYRNVLDMNARLGGFAAALALAGDPLWVMNMVPTVANATTLGAIYERGLIGSYQDWCEGMSTYPRTYDLIHADSVFTLYKDRCEMDRILLEMDRILRPRGTVIVREDVDMLVKVKSLADGMRWESQIVDHEYGPLVREKILLVVKTYWTAQDQDQ

SEQ ID NO: 9492 - protein, 153 aa, Zea mays subsp. mays
  peptide (1)..(153): Ceres Seq. ID no. 12367673
HNAAAGGLQGQRRRRRRGEEMAAAAHGRAAQGLPRHRQGRHGQVVRAGHGAVAEEGPALQVGGQPARAEGAVPQRAGHERAPGRVRRGAGAGGRPAVGHEHGPDRGERDHARGHLRARAHRKLPGLVRGHVYLPEDLRPHPCGFGVHPVQGQV

SEQ ID NO: 9493 - protein, 148 aa, Zea mays subsp. mays
  peptide (1)..(148): Ceres Seq. ID no. 12367674
  misc_feature (1)..(138): Pfam Name: Putative methyltransferase Pfam Description: Putative methyltransferase
  misc_feature (1)..(148): Homolog of NCBI NO: 38567915 NR Description: OSJNBa0088I22.11 [Oryza sativa (japonica
  misc_feature (1)..(143): Homolog of NCBI NO: 34898042 NR Description: OSJNBa0038F22.19 [Oryza sativa (japonica >gi|5734619|dbj|BAA83350.1| Similar to Arabidopsis thaliana BAC
  misc_feature (1)..(148): Homolog of NCBI NO: 15236921 NR Description: hypothetical protein; protein id: At4g00750.1
  misc_feature (1)..(148): Homolog of NCBI NO: 15225560 NR Description: hypothetical protein; protein id: At2g45750.1
  misc_feature (1)..(148): Homolog of NCBI NO: 37535962 NR Description: unknown protein [Oryza sativa (japonica
  misc_feature (1)..(144): Homolog of NCBI NO: 24413975 NR Description: hypothetical protein~similar to Oryza sativa
  misc_feature (1)..(148): Homolog of NCBI NO: 15235080 NR Description: putative protein; protein id: At4g10440.1
  misc_feature (1)..(141): Homolog of NCBI NO: 18396075 NR Description: expressed protein; protein id: At1g26850.1, by cDNA: gi_14335101 [Arabidopsis thaliana] At1g26850/T2P11_4 [Arabidopsis thaliana]
  misc_feature (1)..(146): Homolog of NCBI NO: 18071395 NR Description: hypothetical protein [Oryza sativa]
  misc_feature (1)..(142): Homolog of NCBI NO: 9665165 NR Description: Unknown Protein [Arabidopsis thaliana]
MNARLGGFAAALALAGDPLWVMNMVPTVANATTLGAIYERGLIGSYQDWCEGMSTYPRTYDLIHADSVFTLYKDRCEMDRILLEMDRILRPRGTVIVREDVDMLVKVKSLADGMRWESQIVDHEYGPLVREKILLVVKTYWTAQDQDQ

SEQ ID NO: 9494 - DNA, 1203 bp, Zea mays subsp. mays
  misc_feature (1)..(1203): Ceres Seq. ID no. 12374808
  misc_feature: MA Experiment ID: 108522 Result: Down-regulated in Transcription
  misc_feature: MA Experiment 108522 PARAMETER Experiment Name: Zm_42deg_Heat_P Parameter: Age (day) Value: 8
  misc_feature: MA Experiment 108522 PARAMETER Experiment Name: Zm_42deg_Heat_P Parameter: Organism Value: Zea mays
  misc_feature: MA Experiment 108522 PARAMETER Experiment Name: Zm_42deg_Heat_P Parameter: Plant Line Value: 35A19
  misc_feature: MA Experiment 108522 PARAMETER Experiment Name: Zm_42deg_Heat_P Parameter: Temperature (deg C) Value: 42 vs. 22
  misc_feature: MA Experiment 108522 PARAMETER Experiment Name: Zm_42deg_Heat_P Parameter: Timepoint (hr) Value: 1
  misc_feature: MA Experiment 108522 PARAMETER Experiment Name: Zm_42deg_Heat_P Parameter: Tissue Value: Aerial
  misc_feature: MA Experiment ID: 108523 Result: Down-regulated in Transcription
  misc_feature: MA Experiment 108523 PARAMETER Experiment Name: Zm_42deg_Heat_P Parameter: Age (day) Value: 8
  misc_feature: MA Experiment 108523 PARAMETER Experiment Name: Zm_42deg_Heat_P Parameter: Organism Value: Zea mays
  misc_feature: MA Experiment 108523 PARAMETER Experiment Name: Zm_42deg_Heat_P Parameter: Plant Line Value: 35A19
  misc_feature: MA Experiment 108523 PARAMETER Experiment Name: Zm_42deg_Heat_P Parameter: Temperature (deg C) Value: 42 vs. 22
  misc_feature: MA Experiment 108523 PARAMETER Experiment Name: Zm_42deg_Heat_P Parameter: Timepoint (hr) Value: 6
  misc_feature: MA Experiment 108523 PARAMETER Experiment Name: Zm_42deg_Heat_P Parameter: Tissue Value: Aerial
  misc_feature: MA Experiment ID: 108530 Result: Down-regulated in Transcription
  misc_feature: MA Experiment 108530 PARAMETER Experiment Name: Zm_Imbibed_Seeds_P Parameter: Age (day) Value: 6 vs. 2
  misc_feature: MA Experiment 108530 PARAMETER Experiment Name: Zm_Imbibed_Seeds_P Parameter: Organism Value: Zea mays
  misc_feature: MA Experiment 108530 PARAMETER Experiment Name: Zm_Imbibed_Seeds_P Parameter: Plant Line Value: 35A19
  misc_feature: MA Experiment 108530 PARAMETER Experiment Name: Zm_Imbibed_Seeds_P Parameter: Tissue Value: Aerial vs. Embryo
  misc_feature: MA Experiment ID: 108543 Result: Up-regulated in Transcription
  misc_feature: MA Experiment ID: 108544 Result: Down-regulated in Transcription
  misc_feature: MA Experiment ID: 108559 Result: Down-regulated in Transcription
  misc_feature: MA Experiment 108559 PARAMETER Experiment Name: Zm_5mM_NO_P Parameter: Age (day) Value: 8
  misc_feature: MA Experiment 108559 PARAMETER Experiment Name: Zm_5mM_NO_P Parameter: Organism Value: Zea mays
  misc_feature: MA Experiment 108559 PARAMETER Experiment Name: Zm_5mM_NO_P Parameter: Plant Line Value: 35A19
  misc_feature: MA Experiment 108559 PARAMETER Experiment Name: Zm_5mM_NO_P Parameter: Timepoint (hr) Value: 12
  misc_feature: MA Experiment 108559 PARAMETER Experiment Name: Zm_5mM_NO_P Parameter: Tissue Value: Aerial
  misc_feature: MA Experiment 108559 PARAMETER Experiment Name: Zm_5mM_NO_P Parameter: Treatment Value: 5mM NO vs. No Treatment
  misc_feature: MA Experiment ID: 20000535 Result: Up-regulated in Transcription
  misc_feature: MA Experiment 20000535 PARAMETER Experiment Name: Zm_Hybrid_Seed_Dev_P Parameter: DAP Value: 30 vs. 12
  misc_feature: MA Experiment 20000535 PARAMETER Experiment Name: Zm_Hybrid_Seed_Dev_P Parameter: Organism Value: Zea mays
  misc_feature: MA Experiment 20000535 PARAMETER Experiment Name: Zm_Hybrid_Seed_Dev_P Parameter: Plant Line Value: 35A19
  misc_feature: MA Experiment 20000535 PARAMETER Experiment Name: Zm_Hybrid_Seed_Dev_P Parameter: Tissue Value: Embryo vs. Unfert Floret
atcaatggtagaattgcaggaagtgcacaaggtagtgcaagcagctcactcatctcatggcagaaaccaattgaacttgtacctgggaagaacaaaatagatcttctaagtgcaacagttgggctgtcgaattatggtgcattctttgacctggtaggtgctggaattactggcccagtaaaactgagtggactaaacggtgcgctatctgtcttctgcagaatggacatatcagattggactcagaggagaagatttgcacctatatgatccttcagaagcttcaccagaatgggtctcagccaatgcttatccaatcaatcatccactgatttggtacaagaccaagttcacacctcctgcaggtgatgatcctgtcgcgattgacttcacgggaatggggaaaggtgaagcatgggtgaatggacagagcattggtcgatactggccaacaaatctggctccacagagcggttgcgtcaactcttgcaactatagaggagcctacagttcaagcaaatgcctcaagaagtgtggccagccatcacagactttgtaccatgttccccgttcgtttctccaaccaggcagcaatgatctagtccttttcgagcattttggtggtgacccaagcaagatatcctttgtgatgaggcagacaggaagtgtgtgcgcacaagtatcagaggcacatccagcccaaattgatagttggagttctcaacagccgatgcagagatttggacctgcacttcgcctggaatgcccaaaagaaggccaggtcatcagcagcgtcaagtttgcaagctttgggacaccgagtggcacatgtggaagctacagccatggcgaatgcagcagcactcaggctctctcagttgttcaggaggcttgcatcggagtgagcagctgcagcgtgccagtgtcgtcgaattattttggaaatccatgtacaggggtcacaaaaagccttgcagttgaagctgcatgctcgtgacatgtctgattaatattgattcataggaagcaaatcacctaggacaaggtgaaaccttctctgtaggcaagcaggcaaaaaggaataaatgttcccatcctaatcaaaaggaataaaaatattctgaaaattgccacatccaagctattagatggtatgcttatgaagtagtgttatcgttaagatataaatccatccatcatgac

SEQ ID NO: 9495 - protein, 199 aa, Zea mays subsp. mays
  peptide (1)..(199): Ceres Seq. ID no. 12374809
  misc_feature (1)..(87): Pfam Name: Glycosyl hydrolases family 35 Pfam Description: Glycosyl hydrolases family 35
  misc_feature (1)..(199): Homolog of NCBI NO: 7939623 NR Description: putative beta-galactosidase [Lycopersicon
  misc_feature (1)..(198): Homolog of NCBI NO: 14970841 NR Description: beta-galactosidase [Fragaria x ananassa]
  misc_feature (1)..(199): Homolog of NCBI NO: 25326167 NR Description: probable beta-galactosidase [imported] -
  misc_feature (1)..(199): Homolog of NCBI NO: 30683905 NR Description: glycosyl hydrolase family 35 (beta-galactosidase)
  misc_feature (1)..(199): Homolog of NCBI NO: 6686888 NR Description: putative beta-galactosidase [Arabidopsis thaliana]
  misc_feature (1)..(199): Homolog of NCBI NO: 7939617 NR Description: beta-galactosidase [Lycopersicon esculentum]
  misc_feature (1)..(199): Homolog of NCBI NO: 4138137 NR Description: ss-galactosidase [Lycopersicon esculentum]
  misc_feature (1)..(199): Homolog of NCBI NO: 18419821 NR Description: glycosyl hydrolase family 35 protein id: At4g36360.1, supported by cDNA: gi_15810492,
  misc_feature (1)..(199): Homolog of NCBI NO: 25326166 NR Description: beta-galactosidase like protein [imported] -
  misc_feature (1)..(199): Homolog of NCBI NO: 15231354 NR Description: glycosyl hydrolase family 35 protein id: At3g13750.1, supported by cDNA: gi_20260595
MGKGEAWVNGQSIGRYWPTNLAPQSGCVNSCNYRGAYSSSKCLKKCGQPSQTLYHVPRSFLQPGSNDLVLFEHFGGDPSKISFVMRQTGSVCAQVSEAHPAQIDSWSSQQPMQRFGPALRLECPKEGQVISSVKFASFGTPSGTCGSYSHGECSSTQALSVVQEACIGVSSCSVPVSSNYFGNPCTGVTKSLAVEAACS

SEQ ID NO: 9496 - protein, 115 aa, Zea mays subsp. mays
  peptide (1)..(115): Ceres Seq. ID no. 12374810
  misc_feature (37)..(114): Pfam Name: Galactose binding lectin domain Pfam Description: Galactose binding lectin domain
  misc_feature (1)..(114): Homolog of NCBI NO: 14970841 NR Description: beta-galactosidase [Fragaria x ananassa]
  misc_feature (1)..(115): Homolog of NCBI NO: 25326167 NR Description: probable beta-galactosidase [imported] -
  misc_feature (1)..(115): Homolog of NCBI NO: 30683905 NR Description: glycosyl hydrolase family 35 (beta-galactosidase)
  misc_feature (1)..(115): Homolog of NCBI NO: 6686888 NR Description: putative beta-galactosidase [Arabidopsis thaliana]
  misc_feature (1)..(115): Homolog of NCBI NO: 7939617 NR Description: beta-galactosidase [Lycopersicon esculentum]
  misc_feature (1)..(115): Homolog of NCBI NO: 7939623 NR Description: putative beta-galactosidase [Lycopersicon
  misc_feature (1)..(115): Homolog of NCBI NO: 4138137 NR Description: ss-galactosidase [Lycopersicon esculentum]
  misc_feature (1)..(115): Homolog of NCBI NO: 18419821 NR Description: glycosyl hydrolase family 35 protein id: At4g36360.1, supported by cDNA: gi_15810492,
  misc_feature (1)..(115): Homolog of NCBI NO: 25326166 NR Description: beta-galactosidase like protein [imported] -
  misc_feature (1)..(115): Homolog of NCBI NO: 15231354 NR Description: glycosyl hydrolase family 35 protein id: At3g13750.1, supported by cDNA: gi_20260595
MRQTGSVCAQVSEAHPAQIDSWSSQQPMQRFGPALRLECPKEGQVISSVKFASFGTPSGTCGSYSHGECSSTQALSVVQEACIGVSSCSVPVSSNYFGNPCTGVTKSLAVEAACS

SEQ ID NO: 9497 - DNA, 974 bp, Zea mays subsp. mays
  misc_feature (1)..(974): Ceres Seq. ID no. 12356906
  misc_feature: MA Experiment ID: 108535 Result: Up-regulated in Transcription
  misc_feature: MA Experiment 108535 PARAMETER Experiment Name: Zm_Meristem_P Parameter: Age (day) Value: 8
  misc_feature: MA Experiment 108535 PARAMETER Experiment Name: Zm_Meristem_P Parameter: Organism Value: Zea mays
  misc_feature: MA Experiment 108535 PARAMETER Experiment Name: Zm_Meristem_P Parameter: Plant Line Value: 35A19
  misc_feature: MA Experiment 108535 PARAMETER Experiment Name: Zm_Meristem_P Parameter: Tissue Value: Root Meristem vs. Above Root Meristem
  misc_feature: MA Experiment ID: 108536 Result: Up-regulated in Transcription
  misc_feature: MA Experiment 108536 PARAMETER Experiment Name: Zm_Meristem_P Parameter: Age (day) Value: 8
  misc_feature: MA Experiment 108536 PARAMETER Experiment Name: Zm_Meristem_P Parameter: Organism Value: Zea mays
  misc_feature: MA Experiment 108536 PARAMETER Experiment Name: Zm_Meristem_P Parameter: Plant Line Value: 35A19
  misc_feature: MA Experiment 108536 PARAMETER Experiment Name: Zm_Meristem_P Parameter: Tissue Value: Shoot Meristem vs. Above Shoot Meristem
  misc_feature: MA Experiment ID: 20000479 Result: Up-regulated in Transcription
  misc_feature: MA Experiment 20000479 PARAMETER Experiment Name: Zm_Drought_P Parameter: Age (day) Value: 10
  misc_feature: MA Experiment 20000479 PARAMETER Experiment Name: Zm_Drought_P Parameter: Organism Value: Zea mays
  misc_feature: MA Experiment 20000479 PARAMETER Experiment Name: Zm_Drought_P Parameter: Plant Line Value: 35A19
  misc_feature: MA Experiment 20000479 PARAMETER Experiment Name: Zm_Drought_P Parameter: Timepoint (hr) Value: 48
  misc_feature: MA Experiment 20000479 PARAMETER Experiment Name: Zm_Drought_P Parameter: Tissue Value: Aerial
  misc_feature: MA Experiment 20000479 PARAMETER Experiment Name: Zm_Drought_P Parameter: Treatment Value: Drought vs. No Drought
  misc_feature: MA Experiment ID: 20000534 Result: Up-regulated in Transcription
  misc_feature: MA Experiment 20000534 PARAMETER Experiment Name: Zm_Hybrid_Pollen_P Parameter: Age (day) Value: 8
  misc_feature: MA Experiment 20000534 PARAMETER Experiment Name: Zm_Hybrid_Pollen_P Parameter: Organism Value: Zea mays
  misc_feature: MA Experiment 20000534 PARAMETER Experiment Name: Zm_Hybrid_Pollen_P Parameter: Plant Line Value: 35A19
  misc_feature: MA Experiment 20000534 PARAMETER Experiment Name: Zm_Hybrid_Pollen_P Parameter: Tissue Value: Pollen vs. Aerial
acacacgcgcaccaaagccaagcgcccaagcccagcactcgacaccaccacagcgcgcagccacgctcacgcacaccgagctgcgggagtggagtagtggaccgatggggagcagcgggggcagcagcgagcacttcctgcggcagctgagttcgagcgacggcggcagcgcgccgcaccatctgctgcagcgagagtgggagtgcggcggcgtcaccggcagcggcagcaggcgcgggtcgcggaagaagaccagggcgcggggacaccgccgccgcggcggcgggttctgcagggcggaggaggctgcgccggggcggaagcgggtaatgtggtggtggaccagagctccggcgccaagcacgccatgttgtgggcgctcacccacgtggccaacaagggcgacttcctcaccctgctccacgtcctgccgccggagagcggccacagcagccgcggtgctgcggaggacgcctccgcgctcgccaactccctcggcgcgctttgcaaggcctgcaagcctgaggtcgaggtggaggcgcctgtgatccaggggcccaagctgccgaccatcctcagccaggtgaagaagctggaggcgtccgtgctggtgctgagccaacgcagcccctcgcctttctgctgcttcccgcggagcagcagcgaggagctcgtggaggagtgcatcgaccgggcggagtgcctgacgctggcagtgcggcggcaaagcaagggcgtcggcggctacctcgtcagcacccggtggcagaagaacttctggctcctcgcgtgatccacaaccatattcccccccttctttggaaggcgtttggtttgagtctgaaagcatgggatggaacggaacgggctgggaaatggcgtttggttcagggacaagagggttgggaattgggatcgcctacaggtcggagggacgggatagtcctctatatatgaaagtcgtttcttccgcc

SEQ ID NO: 9498 - protein, 181 aa, Zea mays subsp. mays
  peptide (1)..(181): Ceres Seq. ID no. 12356907
TRAPKPSAQAQHSTPPQRAATLTHTELREWSSGPMGSSGGSSEHFLRQLSSSDGGSAPHHLLQREWECGGVTGSGSRRGSRKKTRARGHRRRGGGFCRAEEAAPGRKRVMWWWTRAPAPSTPCCGRSPTWPTRATSSPCSTSCRRRAATAAAVLRRTPPRSPTPSARFARPASLRSRWRRL

SEQ ID NO: 9499 - protein, 147 aa, Zea mays subsp. mays
  peptide (1)..(147): Ceres Seq. ID no. 12356908
MGSSGGSSEHFLRQLSSSDGGSAPHHLLQREWECGGVTGSGSRRGSRKKTRARGHRRRGGGFCRAEEAAPGRKRVMWWWTRAPAPSTPCCGRSPTWPTRATSSPCSTSCRRRAATAAAVLRRTPPRSPTPSARFARPASLRSRWRRL

SEQ ID NO: 9500 - protein, 141 aa, Zea mays subsp. mays
  peptide (1)..(141): Ceres Seq. ID no. 12356909
  misc_feature (1)..(118): Pfam Name: Universal stress protein family Pfam Description: Universal stress protein family
  misc_feature (1)..(141): Homolog of NCBI NO: 34907308 NR Description: hypothetical protein~similar to Arabidopsis
  misc_feature (1)..(141): Homolog of NCBI NO: 15219439 NR Description: hypothetical protein; protein id: At1g44760.1, by cDNA: gi_17380775 [Arabidopsis thaliana]
  misc_feature (1)..(141): Homolog of NCBI NO: 15237955 NR Description: putative protein; protein id: At5g17390.1
  misc_feature (1)..(141): Homolog of NCBI NO: 15227695 NR Description: unknown protein; protein id: At2g03720.1
  misc_feature (1)..(141): Homolog of NCBI NO: 15228516 NR Description: hypothetical protein; protein id: At3g03290.1 thaliana] >gi|6714411|gb|AAF26099.1|AC012328_2 hypothetical
  misc_feature (36)..(141): Homolog of NCBI NO: 18409190 NR Description: expressed protein; protein id: At1g69080.1, by cDNA: 22327. [Arabidopsis thaliana]
  misc_feature (36)..(141): Homolog of NCBI NO: 21592322 NR Description: unknown [Arabidopsis thaliana]
  misc_feature (1)..(86): Homolog of NCBI NO: 18409190 NR Description: expressed protein; protein id: At1g69080.1, by cDNA: 22327. [Arabidopsis thaliana]
  misc_feature (1)..(86): Homolog of NCBI NO: 21592322 NR Description: unknown [Arabidopsis thaliana]
MLWALTHVANKGDFLTLLHVLPPESGHSSRGAAEDASALANSLGALCKACKPEVEVEAPVIQGPKLPTILSQVKKLEASVLVLSQRSPSPFCCFPRSSSEELVEECIDRAECLTLAVRRQSKGVGGYLVSTRWQKNFWLLA

SEQ ID NO: 9501 - DNA, 1230 bp, Zea mays subsp. mays
  misc_feature (1)..(1230): Ceres Seq. ID no. 12369252
  misc_feature: MA Experiment ID: 108543 Result: Down-regulated in Transcription
  misc_feature: MA Experiment ID: 108544 Result: Up-regulated in Transcription
acgaacaagcaatggcgcgcaccatggcagccatcgcgatcttgctcgccgccttcttcgtcctcgctccggatctggccaccgcagcggcagcggcagcggcgcagagcgccatcccggccgtgttcgcgttcggggactccacgctggacccgggcaacaacaacggcctgggccacgctggtgcgcgccgaccacgcgccctacggccgcggcttcccgggcggcgcggccacgggccgcttctcggacggcaagctcatcaccgactacatcgtcgagtcgctcggcatcaaggacctcctgccggcgtaccgcggcagcggcctcaccgtggcggaggcgtccacgggggtcagcttcgcgtcgggcgggtccggcctcgacgacctgaccgcgcagaccgccatggtgtccacgttcggctcgcagatcaccgacttccaggccctgctcggcaggatcggcatgcccaaggtcgccgggatcgccaacaggtcgctctacgtggtctccgccggcaccaacgacgtcaccatgaactacttcgtcctgccggtccggaccatcagcttccccaccgtcgaccagtacagtgcctacctcatcggcaggctccagggatacatccagagcttgtacaagctgggagcccggaacttcatggtgtccggcctgccgccggtggggtgcctgccgatcacgaagagcctccacagtctcgggtcgggaggttgcgtcgccgaccagaacgcggccgcggagcggtacaacgcggcgctgcggcagatgctgaccagggctggaggccgcgtcccccggcgccgcgctcgcgtacgtcgacgtgtacaccccgttgatggacatggtcgcgcagccccagaaatacggtttcaccgagacgagccgaggctgctgcgggaacggtctgccggcgatgggggcgctctgcaccagcgcgctgccgcagtgccggtcgccggcgcagttcatgttcttcgactcggtgcacccgacgcaggccacctacaaggcgctcgccgaccacatcgtccagtcacaaaaacctaagacttagattagcattagattagcattagctgcaggaggaacggcattgcacatgaagctggctacctcggtgctttttgtagatccatttatttgcacatgcagagatggatgtttacatagcgaagtttttaatatacagagagtcgtttattttgc

SEQ ID NO: 9502 - protein, 356 aa, Zea mays subsp. mays
  peptide (1)..(356): Ceres Seq. ID no. 12369253
  misc_feature (60)..(277): Pfam Name: GDSL-like Lipase/Acylhydrolase Pfam Description: GDSL-like Lipase/Acylhydrolase
  misc_feature (60)..(277): Homolog of NCBI NO: 34907984 NR Description: P0446G04.24 [Oryza sativa (japonica
  misc_feature (60)..(273): Homolog of NCBI NO: 21537117 NR Description: putative GDSL-motif lipase/hydrolase [Arabidopsis
  misc_feature (60)..(273): Homolog of NCBI NO: 15225096 NR Description: putative GDSL-motif lipase/hydrolase; protein id:
  misc_feature (63)..(273): Homolog of NCBI NO: 15227723 NR Description: putative GDSL-motif lipase hydrolase; protein id:
  misc_feature (150)..(273): Homolog of NCBI NO: 25336273 NR Description: probable GDSL-motif lipase/hydrolase [imported] -
  misc_feature (60)..(125): Homolog of NCBI NO: 25336273 NR Description: probable GDSL-motif lipase/hydrolase [imported] -
  misc_feature (60)..(265): Homolog of NCBI NO: 4587999 NR Description: hypothetical APG protein [Arabidopsis thaliana]
  misc_feature (60)..(265): Homolog of NCBI NO: 15225668 NR Description: putative GDSL-motif lipase hydrolase; protein id:
  misc_feature (60)..(273): Homolog of NCBI NO: 15227734 NR Description: putative GDSL-motif lipase/hydrolase; protein id:
  misc_feature (60)..(265): Homolog of NCBI NO: 21592974 NR Description: proline-rich protein, putative [Arabidopsis
TNKQWRAPWQPSRSCSPPSSSSLRIWPPQRQRQRRRAPSRPCSRSGTPRWTRATTTAWATLVRADHAPYGRGFPGGAATGRFSDGKLITDYIVESLGIKDLLPAYRGSGLTVAEASTGVSFASGGSGLDDLTAQTAMVSTFGSQITDFQALLGRIGMPKVAGIANRSLYVVSAGTNDVTMNYFVLPVRTISFPTVDQYSAYLIGRLQGYIQSLYKLGARNFMVSGLPPVGCLPITKSLHSLGSGGCVADQNAAAERYNAALRQMLTRAGGRVPRRRARVRRRVHPVDGHGRAAPEIRFHRDEPRLLRERSAGDGGALHQRAAAVPVAGAVHVLRLGAPDAGHLQGARRPHRPVTKT

SEQ ID NO: 9503 - protein, 285 aa, Zea mays subsp. mays
  peptide (1)..(285): Ceres Seq. ID no. 12369254
  misc_feature (3)..(57): Homolog of NCBI NO: 34907984 NR Description: P0446G04.24 [Oryza sativa (japonica
  misc_feature (4)..(55): Homolog of NCBI NO: 21537117 NR Description: putative GDSL-motif lipase/hydrolase [Arabidopsis
  misc_feature (4)..(55): Homolog of NCBI NO: 15225096 NR Description: putative GDSL-motif lipase/hydrolase; protein id:
  misc_feature (14)..(79): Homolog of NCBI NO: 15227723 NR Description: putative GDSL-motif lipase hydrolase; protein id:
  misc_feature (7)..(55): Homolog of NCBI NO: 25336273 NR Description: probable GDSL-motif lipase/hydrolase [imported] -
  misc_feature (32)..(55): Homolog of NCBI NO: 4587999 NR Description: hypothetical APG protein [Arabidopsis thaliana]
  misc_feature (32)..(55): Homolog of NCBI NO: 15225668 NR Description: putative GDSL-motif lipase hydrolase; protein id:
  misc_feature (29)..(55): Homolog of NCBI NO: 15227734 NR Description: putative GDSL-motif lipase/hydrolase; protein id:
  misc_feature (18)..(55): Homolog of NCBI NO: 21592974 NR Description: proline-rich protein, putative [Arabidopsis
  misc_feature (28)..(55): Homolog of NCBI NO: 15217963 NR Description: proline-rich protein, putative; protein id:
EQAMARTMAAIAILLAAFFVLAPDLATAAAAAAAQSAIPAVFAFGDSTLDPGNNNGLGHAGARRPRALRPRLPGRRGHGPLLGRQAHHRLHRRVARHQGPPAGVPRQRPHRGGGVHGGQLRVGRVRPRRPDRADRHGVHVRLADHRLPGPARQDRHAQGRRDRQQVALRGLRRHQRRHHELLRPAGPDHQLPHRRPVQCLPHRQAPGIHPELVQAGSPELHGVRPAAGGVPADHEEPPQSRVGRLRRRPERGRGAVQRGAAADADQGWRPRPPAPRSRTSTCTPR

SEQ ID NO: 9504 - protein, 282 aa, Zea mays subsp. mays
  peptide (1)..(282): Ceres Seq. ID no. 12369255
  misc_feature (1)..(54): Homolog of NCBI NO: 34907984 NR Description: P0446G04.24 [Oryza sativa (japonica
  misc_feature (1)..(52): Homolog of NCBI NO: 21537117 NR Description: putative GDSL-motif lipase/hydrolase [Arabidopsis
  misc_feature (1)..(52): Homolog of NCBI NO: 15225096 NR Description: putative GDSL-motif lipase/hydrolase; protein id:
  misc_feature (11)..(76): Homolog of NCBI NO: 15227723 NR Description: putative GDSL-motif lipase hydrolase; protein id:
  misc_feature (4)..(52): Homolog of NCBI NO: 25336273 NR Description: probable GDSL-motif lipase/hydrolase [imported] -
  misc_feature (29)..(52): Homolog of NCBI NO: 4587999 NR Description: hypothetical APG protein [Arabidopsis thaliana]
  misc_feature (29)..(52): Homolog of NCBI NO: 15225668 NR Description: putative GDSL-motif lipase hydrolase; protein id:
  misc_feature (26)..(52): Homolog of NCBI NO: 15227734 NR Description: putative GDSL-motif lipase/hydrolase; protein id:
  misc_feature (15)..(52): Homolog of NCBI NO: 21592974 NR Description: proline-rich protein, putative [Arabidopsis
  misc_feature (25)..(52): Homolog of NCBI NO: 15217963 NR Description: proline-rich protein, putative; protein id:
MARTMAAIAILLAAFFVLAPDLATAAAAAAAQSAIPAVFAFGDSTLDPGNNNGLGHAGARRPRALRPRLPGRRGHGPLLGRQAHHRLHRRVARHQGPPAGVPRQRPHRGGGVHGGQLRVGRVRPRRPDRADRHGVHVRLADHRLPGPARQDRHAQGRRDRQQVALRGLRRHQRRHHELLRPAGPDHQLPHRRPVQCLPHRQAPGIHPELVQAGSPELHGVRPAAGGVPADHEEPPQSRVGRLRRRPERGRGAVQRGAAADADQGWRPRPPAPRSRTSTCTPR

SEQ ID NO: 9505 - DNA, 2064 bp, Zea mays subsp. mays
  misc_feature (1)..(2064): Ceres Seq. ID no. 13622175
  misc_feature: MA Experiment ID: 108527 Result: Down-regulated in Transcription
  misc_feature: MA Experiment 108527 PARAMETER Experiment Name: Zm_5mM_NO_P Parameter: Age (day) Value: 8
  misc_feature: MA Experiment 108527 PARAMETER Experiment Name: Zm_5mM_NO_P Parameter: Organism Value: Zea mays
  misc_feature: MA Experiment 108527 PARAMETER Experiment Name: Zm_5mM_NO_P Parameter: Plant Line Value: 35A19
  misc_feature: MA Experiment 108527 PARAMETER Experiment Name: Zm_5mM_NO_P Parameter: Timepoint (hr) Value: 6
  misc_feature: MA Experiment 108527 PARAMETER Experiment Name: Zm_5mM_NO_P Parameter: Tissue Value: Aerial
  misc_feature: MA Experiment 108527 PARAMETER Experiment Name: Zm_5mM_NO_P Parameter: Treatment Value: 5mM NO vs. No Treatment
  misc_feature: MA Experiment ID: 108528 Result: Up-regulated in Transcription
  misc_feature: MA Experiment 108528 PARAMETER Experiment Name: Zm_Imbibed_Seeds_P Parameter: Age (day) Value: 5 vs. 2
  misc_feature: MA Experiment 108528 PARAMETER Experiment Name: Zm_Imbibed_Seeds_P Parameter: Organism Value: Zea mays
  misc_feature: MA Experiment 108528 PARAMETER Experiment Name: Zm_Imbibed_Seeds_P Parameter: Plant Line Value: 35A19
  misc_feature: MA Experiment 108528 PARAMETER Experiment Name: Zm_Imbibed_Seeds_P Parameter: Tissue Value: Aerial vs. Embryo
  misc_feature: MA Experiment ID: 108530 Result: Up-regulated in Transcription
  misc_feature: MA Experiment 108530 PARAMETER Experiment Name: Zm_Imbibed_Seeds_P Parameter: Age (day) Value: 6 vs. 2
  misc_feature: MA Experiment 108530 PARAMETER Experiment Name: Zm_Imbibed_Seeds_P Parameter: Organism Value: Zea mays
  misc_feature: MA Experiment 108530 PARAMETER Experiment Name: Zm_Imbibed_Seeds_P Parameter: Plant Line Value: 35A19
  misc_feature: MA Experiment 108530 PARAMETER Experiment Name: Zm_Imbibed_Seeds_P Parameter: Tissue Value: Aerial vs. Embryo
  misc_feature: MA Experiment ID: 108547 Result: Up-regulated in Transcription
  misc_feature: MA Experiment 108547 PARAMETER Experiment Name: Zm_Imbibed_Seeds_P Parameter: Age (day) Value: 4 vs. 2
  misc_feature: MA Experiment 108547 PARAMETER Experiment Name: Zm_Imbibed_Seeds_P Parameter: Organism Value: Zea mays
  misc_feature: MA Experiment 108547 PARAMETER Experiment Name: Zm_Imbibed_Seeds_P Parameter: Plant Line Value: 35A19
  misc_feature: MA Experiment 108547 PARAMETER Experiment Name: Zm_Imbibed_Seeds_P Parameter: Tissue Value: Aerial vs. Embryo
  misc_feature: MA Experiment ID: 20000487 Result: Up-regulated in Transcription
  misc_feature: MA Experiment 20000487 PARAMETER Experiment Name: Zm_50mM_NH4NO3_L_to_H_P Parameter: Organism Value: Zea mays
  misc_feature: MA Experiment 20000487 PARAMETER Experiment Name: Zm_50mM_NH4NO3_L_to_H_P Parameter: Timepoint (hr) Value: 4
  misc_feature: MA Experiment 20000487 PARAMETER Experiment Name: Zm_50mM_NH4NO3_L_to_H_P Parameter: Tissue Value: Leaves
  misc_feature: MA Experiment 20000487 PARAMETER Experiment Name: Zm_50mM_NH4NO3_L_to_H_P Parameter: Treatment Value: 50mM NH4NO3 vs. 100mM Mannitol
  misc_feature: MA Experiment ID: 20000535 Result: Up-regulated in Transcription
  misc_feature: MA Experiment 20000535 PARAMETER Experiment Name: Zm_Hybrid_Seed_Dev_P Parameter: DAP Value: 30 vs. 12
  misc_feature: MA Experiment 20000535 PARAMETER Experiment Name: Zm_Hybrid_Seed_Dev_P Parameter: Organism Value: Zea mays
  misc_feature: MA Experiment 20000535 PARAMETER Experiment Name: Zm_Hybrid_Seed_Dev_P Parameter: Plant Line Value: 35A19
  misc_feature: MA Experiment 20000535 PARAMETER Experiment Name: Zm_Hybrid_Seed_Dev_P Parameter: Tissue Value: Embryo vs. Unfert Floret
acggcaccagtgacgcgaaagcaaaacgccaaacaggctcctctgaaactcccagagccggtagaggcacgccactccgcagtgtcagtcactgcccccccatcacgccgcccgccctttctcggccgttgccgcgagctcgcttcgacccaccgccgatggcgacggcgatgggcgcgatggccgccacctgcatggcctcgatcccggccgccgctacgttccccggtgatctcggcgtcggacgacgccgagcggttgtaccagggtggcgcgccggtgggagacggctgcgtgcgacgccgcctgcccggaggccgttcctgttctcgccgaagggcgtttcggactcgcggagctcgcaaacgtgccttgatccggacgccagcacgagtgttcttgggatcatccttggagggggtgctgggacaaggctgtatccactgacgaagaagagggcgaaaccagcagtgccgttgggcgccaactacaggctcatagatatccctgtcagcaactgtctcaacagtaacgtctccaagatatatgtgctaacacagttcaactctgcttcgctcaaccgccacctctcgagggcctatggaaacaacattgccgggtacaagaatgagggattcgttgaggtccttgcagcacaacagagtccagagaatcccaactggtttcagggtactgcagatgccgtgcgtcaatatatgtggctatttgaggagcataatatcatggagttccttattctggctggagatcatctgtaccgtatggattaccaaaagttcattcaagctcatagagaaacagatgctgatataacagttgcagccctgccaatggatgaacaacgtgcaactgcatttggtcttatgaaaattgatgatgaagggaggatagttgagtttgcagaaaaaccaaaaggagagaagctgagatcaatgatggtagacaccactatattgggccttgatcctgaaagggccaaagaactgccttatattgccagtatgggaatctatgtttttagcaaagatgtgatgcttcgtcttctcagagaaaattttcctgcagcaaatgactttggaagtgaggttattcctggcgcaacagaaattggattaagggtgcaagcttacttatatgatggttactgggaagatattggtactattgaagcattttataatgcaaacttgggaataaccaagaagcctgtaccggattttagcttctatgatcgttctgctccaatttatacgcaacctagatatttgcctccttcgaaggttcttgatgctgatgtgacagacagtgttattggagaagggtgtgttattaaacattgcacaatcaatcattccgtagttggactccgttcctgcatttctgaaggtgcagttatagaggactctttgctaatgggtgcagactattacgagactgagaatgataagaatgtcctttctgagactggtggcattcccattggtattgggaaaaattcacatatcagaaaagcaataattgacaaaaatgctcgcattggagaaaatgtgaagataatcaattttgataatgtccaagaagcagtaagggagacagaaggatattttatcaaaagtggaattgtcacggtgattaaagatgctttaattcctagtggaacaatcatataaagtcagccaacaccatgtatataaggttgggttgcatcatatggtgatcgccaatgcgcatcaagttctctcatcccttgcgagaccatgcttatttccattgcaaaatcatcaagctctgcatcaacttgttgtggataataatgaaataataaatggtgccattccatggcaacatttttctgtcactagtatgaggcactgttctaaatgtactgttgagtggaatttgaatatgtatgcttttgcaatcgcacacctaaataccttgtgcttatactccttgttacctaaatatgctcactgcattgcccaaggaatcagattaaaaatgtcatgcataacatgatttttgttagattgttgtaaagct

SEQ ID NO: 9506 - protein, 562 aa, Zea mays subsp. mays
  peptide (1)..(562): Ceres Seq. ID no. 13622176
  misc_feature (133)..(408): Pfam Name: Nucleotidyl transferase Pfam Description: Nucleotidyl transferase
  misc_feature (133)..(408): Pfam Name: Nucleotidyl transferase Pfam Description: Nucleotidyl transferase
  misc_feature (133)..(408): Pfam Name: Nucleotidyl transferase Pfam Description: Nucleotidyl transferase
  misc_feature (53)..(562): Homolog of NCBI NO: 13892040 NR Description: ADP-glucose pyrophosphorylase small subunit [Zea
  misc_feature (56)..(562): Homolog of NCBI NO: 13508485 NR Description: ADP-glucose pyrophosphorylase small subunit
  misc_feature (53)..(562): Homolog of NCBI NO: 27464770 NR Description: ADP-glucose pyrophosphorylase small subunit
  misc_feature (56)..(562): Homolog of NCBI NO: 14582768 NR Description: ADP-glucose pyrophosphorylase small subunit [Zea
  misc_feature (53)..(562): Homolog of NCBI NO: 38423972 NR Description: putative glucose-1-phosphate adenylyltransferase
  misc_feature (56)..(562): Homolog of NCBI NO: 13508485 NR Description: ADP-glucose pyrophosphorylase small subunit
  misc_feature (56)..(562): Homolog of NCBI NO: 14582768 NR Description: ADP-glucose pyrophosphorylase small subunit [Zea
  misc_feature (53)..(562): Homolog of NCBI NO: 27464770 NR Description: ADP-glucose pyrophosphorylase small subunit
  misc_feature (56)..(562): Homolog of NCBI NO: 13508485 NR Description: ADP-glucose pyrophosphorylase small subunit
  misc_feature (53)..(562): Homolog of NCBI NO: 13892040 NR Description: ADP-glucose pyrophosphorylase small subunit [Zea
  misc_feature (104)..(562): Homolog of NCBI NO: 17865468 NR Description: Glucose-1-phosphate adenylyltransferase small
  misc_feature (51)..(562): Homolog of NCBI NO: 1237080 NR Description: ADP-glucose pyrophosphorylase [Pisum sativum]
  misc_feature (96)..(562): Homolog of NCBI NO: 15238933 NR Description: glucose-1-phosphate adenylyltransferase, small
  misc_feature (104)..(562): Homolog of NCBI NO: 21666502 NR Description: ADP-glucose pyrophosphorylase small subunit
  misc_feature (56)..(562): Homolog of NCBI NO: 1707940 NR Description: Glucose-1-phosphate adenylyltransferase small
  misc_feature (53)..(562): Homolog of NCBI NO: 38423972 NR Description: putative glucose-1-phosphate adenylyltransferase
  misc_feature (104)..(562): Homolog of NCBI NO: 17865468 NR Description: Glucose-1-phosphate adenylyltransferase small
  misc_feature (51)..(562): Homolog of NCBI NO: 1237080 NR Description: ADP-glucose pyrophosphorylase [Pisum sativum]
  misc_feature (96)..(562): Homolog of NCBI NO: 15238933 NR Description: glucose-1-phosphate adenylyltransferase, small
  misc_feature (104)..(562): Homolog of NCBI NO: 21666502 NR Description: ADP-glucose pyrophosphorylase small subunit
  misc_feature (56)..(562): Homolog of NCBI NO: 1707940 NR Description: Glucose-1-phosphate adenylyltransferase small
  misc_feature (53)..(562): Homolog of NCBI NO: 38423972 NR Description: putative glucose-1-phosphate adenylyltransferase
  misc_feature (56)..(562): Homolog of NCBI NO: 14582768 NR Description: ADP-glucose pyrophosphorylase small subunit [Zea
  misc_feature (53)..(562): Homolog of NCBI NO: 27464770 NR Description: ADP-glucose pyrophosphorylase small subunit
  misc_feature (53)..(562): Homolog of NCBI NO: 13892040 NR Description: ADP-glucose pyrophosphorylase small subunit [Zea
  misc_feature (56)..(562): Homolog of NCBI NO: 1707940 NR Description: Glucose-1-phosphate adenylyltransferase small
  misc_feature (104)..(562): Homolog of NCBI NO: 21666502 NR Description: ADP-glucose pyrophosphorylase small subunit
  misc_feature (96)..(562): Homolog of NCBI NO: 15238933 NR Description: glucose-1-phosphate adenylyltransferase, small
  misc_feature (51)..(562): Homolog of NCBI NO: 1237080 NR Description: ADP-glucose pyrophosphorylase [Pisum sativum]
  misc_feature (104)..(562): Homolog of NCBI NO: 17865468 NR Description: Glucose-1-phosphate adenylyltransferase small
GTSDAKAKRQTGSSETPRAGRGTPLRSVSHCPPITPPALSRPLPRARFDPPPMATAMGAMAATCMASIPAAATFPGDLGVGRRRAVVPGWRAGGRRLRATPPARRPFLFSPKGVSDSRSSQTCLDPDASTSVLGIILGGGAGTRLYPLTKKRAKPAVPLGANYRLIDIPVSNCLNSNVSKIYVLTQFNSASLNRHLSRAYGNNIAGYKNEGFVEVLAAQQSPENPNWFQGTADAVRQYMWLFEEHNIMEFLILAGDHLYRMDYQKFIQAHRETDADITVAALPMDEQRATAFGLMKIDDEGRIVEFAEKPKGEKLRSMMVDTTILGLDPERAKELPYIASMGIYVFSKDVMLRLLRENFPAANDFGSEVIPGATEIGLRVQAYLYDGYWEDIGTIEAFYNANLGITKKPVPDFSFYDRSAPIYTQPRYLPPSKVLDADVTDSVIGEGCVIKHCTINHSVVGLRSCISEGAVIEDSLLMGADYYETENDKNVLSETGGIPIGIGKNSHIRKAIIDKNARIGENVKIINFDNVQEAVRETEGYFIKSGIVTVIKDALIPSGTII

SEQ ID NO: 9507 - protein, 510 aa, Zea mays subsp. mays
  peptide (1)..(510): Ceres Seq. ID no. 13622177
  misc_feature (81)..(356): Pfam Name: Nucleotidyl transferase Pfam Description: Nucleotidyl transferase
  misc_feature (81)..(356): Pfam Name: Nucleotidyl transferase Pfam Description: Nucleotidyl transferase
  misc_feature (81)..(356): Pfam Name: Nucleotidyl transferase Pfam Description: Nucleotidyl transferase
  misc_feature (1)..(510): Homolog of NCBI NO: 13892040 NR Description: ADP-glucose pyrophosphorylase small subunit [Zea
  misc_feature (4)..(510): Homolog of NCBI NO: 13508485 NR Description: ADP-glucose pyrophosphorylase small subunit
  misc_feature (1)..(510): Homolog of NCBI NO: 27464770 NR Description: ADP-glucose pyrophosphorylase small subunit
  misc_feature (4)..(510): Homolog of NCBI NO: 14582768 NR Description: ADP-glucose pyrophosphorylase small subunit [Zea
  misc_feature (1)..(510): Homolog of NCBI NO: 38423972 NR Description: putative glucose-1-phosphate adenylyltransferase
  misc_feature (4)..(510): Homolog of NCBI NO: 13508485 NR Description: ADP-glucose pyrophosphorylase small subunit
  misc_feature (4)..(510): Homolog of NCBI NO: 14582768 NR Description: ADP-glucose pyrophosphorylase small subunit [Zea
  misc_feature (1)..(510): Homolog of NCBI NO: 27464770 NR Description: ADP-glucose pyrophosphorylase small subunit
  misc_feature (4)..(510): Homolog of NCBI NO: 13508485 NR Description: ADP-glucose pyrophosphorylase small subunit
  misc_feature (1)..(510): Homolog of NCBI NO: 13892040 NR Description: ADP-glucose pyrophosphorylase small subunit [Zea
  misc_feature (52)..(510): Homolog of NCBI NO: 17865468 NR Description: Glucose-1-phosphate adenylyltransferase small
  misc_feature (1)..(510): Homolog of NCBI NO: 1237080 NR Description: ADP-glucose pyrophosphorylase [Pisum sativum]
  misc_feature (44)..(510): Homolog of NCBI NO: 15238933 NR Description: glucose-1-phosphate adenylyltransferase, small
  misc_feature (52)..(510): Homolog of NCBI NO: 21666502 NR Description: ADP-glucose pyrophosphorylase small subunit
  misc_feature (4)..(510): Homolog of NCBI NO: 1707940 NR Description: Glucose-1-phosphate adenylyltransferase small
  misc_feature (1)..(510): Homolog of NCBI NO: 38423972 NR Description: putative glucose-1-phosphate adenylyltransferase
  misc_feature (52)..(510): Homolog of NCBI NO: 17865468 NR Description: Glucose-1-phosphate adenylyltransferase small
  misc_feature (1)..(510): Homolog of NCBI NO: 1237080 NR Description: ADP-glucose pyrophosphorylase [Pisum sativum]
  misc_feature (44)..(510): Homolog of NCBI NO: 15238933 NR Description: glucose-1-phosphate adenylyltransferase, small
  misc_feature (52)..(510): Homolog of NCBI NO: 21666502 NR Description: ADP-glucose pyrophosphorylase small subunit
  misc_feature (4)..(510): Homolog of NCBI NO: 1707940 NR Description: Glucose-1-phosphate adenylyltransferase small
  misc_feature (1)..(510): Homolog of NCBI NO: 38423972 NR Description: putative glucose-1-phosphate adenylyltransferase
  misc_feature (4)..(510): Homolog of NCBI NO: 14582768 NR Description: ADP-glucose pyrophosphorylase small subunit [Zea
  misc_feature (1)..(510): Homolog of NCBI NO: 27464770 NR Description: ADP-glucose pyrophosphorylase small subunit
  misc_feature (1)..(510): Homolog of NCBI NO: 13892040 NR Description: ADP-glucose pyrophosphorylase small subunit [Zea
  misc_feature (4)..(510): Homolog of NCBI NO: 1707940 NR Description: Glucose-1-phosphate adenylyltransferase small
  misc_feature (52)..(510): Homolog of NCBI NO: 21666502 NR Description: ADP-glucose pyrophosphorylase small subunit
  misc_feature (44)..(510): Homolog of NCBI NO: 15238933 NR Description: glucose-1-phosphate adenylyltransferase, small
  misc_feature (1)..(510): Homolog of NCBI NO: 1237080 NR Description: ADP-glucose pyrophosphorylase [Pisum sativum]
  misc_feature (52)..(510): Homolog of NCBI NO: 17865468 NR Description: Glucose-1-phosphate adenylyltransferase small
MATAMGAMAATCMASIPAAATFPGDLGVGRRRAVVPGWRAGGRRLRATPPARRPFLFSPKGVSDSRSSQTCLDPDASTSVLGIILGGGAGTRLYPLTKKRAKPAVPLGANYRLIDIPVSNCLNSNVSKIYVLTQFNSASLNRHLSRAYGNNIAGYKNEGFVEVLAAQQSPENPNWFQGTADAVRQYMWLFEEHNIMEFLILAGDHLYRMDYQKFIQAHRETDADITVAALPMDEQRATAFGLMKIDDEGRIVEFAEKPKGEKLRSMMVDTTILGLDPERAKELPYIASMGIYVFSKDVMLRLLRENFPAANDFGSEVIPGATEIGLRVQAYLYDGYWEDIGTIEAFYNANLGITKKPVPDFSFYDRSAPIYTQPRYLPPSKVLDADVTDSVIGEGCVIKHCTINHSVVGLRSCISEGAVIEDSLLMGADYYETENDKNVLSETGGIPIGIGKNSHIRKAIIDKNARIGENVKIINFDNVQEAVRETEGYFIKSGIVTVIKDALIPSGTII

SEQ ID NO: 9508 - protein, 506 aa, Zea mays subsp. mays
  peptide (1)..(506): Ceres Seq. ID no. 13622178
  misc_feature (77)..(352): Pfam Name: Nucleotidyl transferase Pfam Description: Nucleotidyl transferase
  misc_feature (77)..(352): Pfam Name: Nucleotidyl transferase Pfam Description: Nucleotidyl transferase
  misc_feature (77)..(352): Pfam Name: Nucleotidyl transferase Pfam Description: Nucleotidyl transferase
  misc_feature (1)..(506): Homolog of NCBI NO: 13892040 NR Description: ADP-glucose pyrophosphorylase small subunit [Zea
  misc_feature (1)..(506): Homolog of NCBI NO: 13508485 NR Description: ADP-glucose pyrophosphorylase small subunit
  misc_feature (1)..(506): Homolog of NCBI NO: 27464770 NR Description: ADP-glucose pyrophosphorylase small subunit
  misc_feature (1)..(506): Homolog of NCBI NO: 14582768 NR Description: ADP-glucose pyrophosphorylase small subunit [Zea
  misc_feature (1)..(506): Homolog of NCBI NO: 38423972 NR Description: putative glucose-1-phosphate adenylyltransferase
  misc_feature (1)..(506): Homolog of NCBI NO: 13508485 NR Description: ADP-glucose pyrophosphorylase small subunit
  misc_feature (1)..(506): Homolog of NCBI NO: 14582768 NR Description: ADP-glucose pyrophosphorylase small subunit [Zea
  misc_feature (1)..(506): Homolog of NCBI NO: 27464770 NR Description: ADP-glucose pyrophosphorylase small subunit
  misc_feature (1)..(506): Homolog of NCBI NO: 13508485 NR Description: ADP-glucose pyrophosphorylase small subunit
  misc_feature (1)..(506): Homolog of NCBI NO: 13892040 NR Description: ADP-glucose pyrophosphorylase small subunit [Zea
  misc_feature (48)..(506): Homolog of NCBI NO: 17865468 NR Description: Glucose-1-phosphate adenylyltransferase small
  misc_feature (1)..(506): Homolog of NCBI NO: 1237080 NR Description: ADP-glucose pyrophosphorylase [Pisum sativum]
  misc_feature (40)..(506): Homolog of NCBI NO: 15238933 NR Description: glucose-1-phosphate adenylyltransferase, small
  misc_feature (48)..(506): Homolog of NCBI NO: 21666502 NR Description: ADP-glucose pyrophosphorylase small subunit
  misc_feature (1)..(506): Homolog of NCBI NO: 1707940 NR Description: Glucose-1-phosphate adenylyltransferase small
  misc_feature (1)..(506): Homolog of NCBI NO: 38423972 NR Description: putative glucose-1-phosphate adenylyltransferase
  misc_feature (48)..(506): Homolog of NCBI NO: 17865468 NR Description: Glucose-1-phosphate adenylyltransferase small
  misc_feature (1)..(506): Homolog of NCBI NO: 1237080 NR Description: ADP-glucose pyrophosphorylase [Pisum sativum]
  misc_feature (40)..(506): Homolog of NCBI NO: 15238933 NR Description: glucose-1-phosphate adenylyltransferase, small
  misc_feature (48)..(506): Homolog of NCBI NO: 21666502 NR Description: ADP-glucose pyrophosphorylase small subunit
  misc_feature (1)..(506): Homolog of NCBI NO: 1707940 NR Description: Glucose-1-phosphate adenylyltransferase small
  misc_feature (1)..(506): Homolog of NCBI NO: 38423972 NR Description: putative glucose-1-phosphate adenylyltransferase
  misc_feature (1)..(506): Homolog of NCBI NO: 14582768 NR Description: ADP-glucose pyrophosphorylase small subunit [Zea
  misc_feature (1)..(506): Homolog of NCBI NO: 27464770 NR Description: ADP-glucose pyrophosphorylase small subunit
  misc_feature (1)..(506): Homolog of NCBI NO: 13892040 NR Description: ADP-glucose pyrophosphorylase small subunit [Zea
  misc_feature (1)..(506): Homolog of NCBI NO: 1707940 NR Description: Glucose-1-phosphate adenylyltransferase small
  misc_feature (48)..(506): Homolog of NCBI NO: 21666502 NR Description: ADP-glucose pyrophosphorylase small subunit
  misc_feature (40)..(506): Homolog of NCBI NO: 15238933 NR Description: glucose-1-phosphate adenylyltransferase, small
  misc_feature (1)..(506): Homolog of NCBI NO: 1237080 NR Description: ADP-glucose pyrophosphorylase [Pisum sativum]
  misc_feature (48)..(506): Homolog of NCBI NO: 17865468 NR Description: Glucose-1-phosphate adenylyltransferase small
MGAMAATCMASIPAAATFPGDLGVGRRRAVVPGWRAGGRRLRATPPARRPFLFSPKGVSDSRSSQTCLDPDASTSVLGIILGGGAGTRLYPLTKKRAKPAVPLGANYRLIDIPVSNCLNSNVSKIYVLTQFNSASLNRHLSRAYGNNIAGYKNEGFVEVLAAQQSPENPNWFQGTADAVRQYMWLFEEHNIMEFLILAGDHLYRMDYQKFIQAHRETDADITVAALPMDEQRATAFGLMKIDDEGRIVEFAEKPKGEKLRSMMVDTTILGLDPERAKELPYIASMGIYVFSKDVMLRLLRENFPAANDFGSEVIPGATEIGLRVQAYLYDGYWEDIGTIEAFYNANLGITKKPVPDFSFYDRSAPIYTQPRYLPPSKVLDADVTDSVIGEGCVIKHCTINHSVVGLRSCISEGAVIEDSLLMGADYYETENDKNVLSETGGIPIGIGKNSHIRKAIIDKNARIGENVKIINFDNVQEAVRETEGYFIKSGIVTVIKDALIPSGTII

SEQ ID NO: 9509 - DNA, 1794 bp, Zea mays subsp. mays
  misc_feature (1)..(1794): Ceres Seq. ID no. 12365974
  misc_feature: MA Experiment ID: 20000535 Result: Up-regulated in Transcription
  misc_feature: MA Experiment 20000535 PARAMETER Experiment Name: Zm_Hybrid_Seed_Dev_P Parameter: DAP Value: 30 vs. 12
  misc_feature: MA Experiment 20000535 PARAMETER Experiment Name: Zm_Hybrid_Seed_Dev_P Parameter: Organism Value: Zea mays
  misc_feature: MA Experiment 20000535 PARAMETER Experiment Name: Zm_Hybrid_Seed_Dev_P Parameter: Plant Line Value: 35A19
  misc_feature: MA Experiment 20000535 PARAMETER Experiment Name: Zm_Hybrid_Seed_Dev_P Parameter: Tissue Value: Embryo vs. Unfert Floret
aaaaaacttttttaaaaaaaaaaaatcactcccacgtcgcctcgcccgctgcgacagcgcatacgccaccctcccgttgcgtacaccgtatgtatctacggtgactcggggggcacgcagacgcagtgggggagagcgagagcgagagcgaccgaccgaccgagcaagggtttcttctccggcggctgcagcggcggcggcggaggcggatctgggagggatggggaaccggataggcgggaggcggaagtcgggtgtggaggagcggttcacgcggccgcacgggctctacgagcacaaggatatcgaccagaagaagctgcgcaagctgatcctcgaggccaagctcgcgccctgctacccgggcgccgacgacgccgcggccggtggaggggacctcgaccttgaggagtgccccatctgcttcctgtactacccaagcctcaaccgttcaaagtgttgctcaaaggggatatgtacagagtgttttcttcaaatgaaaccgactcatactgctcggcctacacagtgcccattctgcaaaacgcccaattatgctgtggagtatcgtggcgtcaaaacaaaggaggaaaggagcatagagcagtttgaagaacagaaagtcatagaagcacaattgaggatgcgccaaaaagaactccaagatgaagaggctaaaatgaaaagaaaacagagcaggtgttcttctagcagaacagtaaccccaacaacagaagttgagtatcgagatatttgcagcacatccttttcagtgccatcatatcaatgtactgaacaaggaaatgaatgctgttcatctgaaccctcatgctctagccaggctaacatgcggcctttccattctaggcacaaccgtgatgataatgttgacatgaatctggaggatatgatggttatggaagcaatttggcgttccattcaggaacaagggcatctagtaaatcctgtctgtggcagctactttcctgtaatcgagccaccatcacgtgagaggcaggcatttgttccggctgctcctctagaaatgcctcatccaggtggatattcgtgtgcagttgcggctttggctgagcaccaggcaccaagcatggatttctcttacatgagtggcagtagcacatacccagtctttgacatgatccgacggccatgcaacatgtccagtggaagcctgtgcggcgccgagaacagttcactggacacctggagcgggatagcgccaagttgcagcagggaagtggtaagagacgagggagagtgctcggccgaccactggtcggagggcgcggaggcaggaacaagcctacgccggatcggacatcatggcggatgcaggggccatgcagccgctgcctttcgccgagaactttgccatgggtccaagccacttccgcccggagagcgtcgaggagcagatgatgttttccatggccgtgtcactggcagaagctcatcacggtaggacgcaggcgcaagggctggcatggttgtaagttgtaacactaattttgacgcttcggtgcccccctgcccccttcctgttgcgctgccgttccacttgccccgccccgcttctctgttttttttttttttttttggtgccaccttgtttggcattttgctcttttctttctttctctctttttttttgcatgtgttgcttcatggcttgatatagatcttgctatagccctccattgccattgcttatatgtatgtaaaatggaatatgtggaaataggaaagaaaatgggtcagagttcttttgccggc

SEQ ID NO: 9510 - protein, 493 aa, Zea mays subsp. mays
  peptide (1)..(493): Ceres Seq. ID no. 12365975
  misc_feature (74)..(366): Homolog of NCBI NO: 18411948 NR Description: expressed protein; protein id: At1g78420.1, by cDNA: gi_16604612, supported by cDNA: gi_20259242 [Arabidopsis >gi|16604613|gb|AAL24099.1| unknown protein [Arabidopsis
  misc_feature (74)..(317): Homolog of NCBI NO: 18394446 NR Description: Expressed protein; protein id: At1g17145.1, by cDNA: 6612., supported by cDNA: gi_15451137 [Arabidopsis >gi|15451138|gb|AAK96840.1| Unknown protein [Arabidopsis
  misc_feature (74)..(366): Homolog of NCBI NO: 8052547 NR Description: F3F9.7 [Arabidopsis thaliana]
  misc_feature (74)..(366): Homolog of NCBI NO: 25373045 NR Description: F20D23.17 protein - Arabidopsis thaliana
KNFFKKKKSLPRRLARCDSAYATLPLRTPYVSTVTRGARRRSGGERERERPTDRARVSSPAAAAAAAEADLGGMGNRIGGRRKSGVEERFTRPHGLYEHKDIDQKKLRKLILEAKLAPCYPGADDAAAGGGDLDLEECPICFLYYPSLNRSKCCSKGICTECFLQMKPTHTARPTQCPFCKTPNYAVEYRGVKTKEERSIEQFEEQKVIEAQLRMRQKELQDEEAKMKRKQSRCSSSRTVTPTTEVEYRDICSTSFSVPSYQCTEQGNECCSSEPSCSSQANMRPFHSRHNRDDNVDMNLEDMMVMEAIWRSIQEQGHLVNPVCGSYFPVIEPPSRERQAFVPAAPLEMPHPGGYSCAVAALAEHQAPSMDFSYMSGSSTYPVFDMIRRPCNMSSGSLCGAENSSLDTWSGIAPSCSREVVRDEGECSADHWSEGAEAGTSLRRIGHHGGCRGHAAAAFRRELCHGSKPLPPGERRGADDVFHGRVTGRSSSR

SEQ ID NO: 9511 - protein, 420 aa, Zea mays subsp. mays
  peptide (1)..(420): Ceres Seq. ID no. 12365976
  misc_feature (1)..(293): Homolog of NCBI NO: 18411948 NR Description: expressed protein; protein id: At1g78420.1, by cDNA: gi_16604612, supported by cDNA: gi_20259242 [Arabidopsis >gi|16604613|gb|AAL24099.1| unknown protein [Arabidopsis
  misc_feature (1)..(244): Homolog of NCBI NO: 18394446 NR Description: Expressed protein; protein id: At1g17145.1, by cDNA: 6612., supported by cDNA: gi_15451137 [Arabidopsis >gi|15451138|gb|AAK96840.1| Unknown protein [Arabidopsis
  misc_feature (1)..(293): Homolog of NCBI NO: 8052547 NR Description: F3F9.7 [Arabidopsis thaliana]
  misc_feature (1)..(293): Homolog of NCBI NO: 25373045 NR Description: F20D23.17 protein - Arabidopsis thaliana
MGNRIGGRRKSGVEERFTRPHGLYEHKDIDQKKLRKLILEAKLAPCYPGADDAAAGGGDLDLEECPICFLYYPSLNRSKCCSKGICTECFLQMKPTHTARPTQCPFCKTPNYAVEYRGVKTKEERSIEQFEEQKVIEAQLRMRQKELQDEEAKMKRKQSRCSSSRTVTPTTEVEYRDICSTSFSVPSYQCTEQGNECCSSEPSCSSQANMRPFHSRHNRDDNVDMNLEDMMVMEAIWRSIQEQGHLVNPVCGSYFPVIEPPSRERQAFVPAAPLEMPHPGGYSCAVAALAEHQAPSMDFSYMSGSSTYPVFDMIRRPCNMSSGSLCGAENSSLDTWSGIAPSCSREVVRDEGECSADHWSEGAEAGTSLRRIGHHGGCRGHAAAAFRRELCHGSKPLPPGERRGADDVFHGRVTGRSSSR

SEQ ID NO: 9512 - protein, 328 aa, Zea mays subsp. mays
  peptide (1)..(328): Ceres Seq. ID no. 12365977
  misc_feature (1)..(201): Homolog of NCBI NO: 18411948 NR Description: expressed protein; protein id: At1g78420.1, by cDNA: gi_16604612, supported by cDNA: gi_20259242 [Arabidopsis >gi|16604613|gb|AAL24099.1| unknown protein [Arabidopsis
  misc_feature (1)..(152): Homolog of NCBI NO: 18394446 NR Description: Expressed protein; protein id: At1g17145.1, by cDNA: 6612., supported by cDNA: gi_15451137 [Arabidopsis >gi|15451138|gb|AAK96840.1| Unknown protein [Arabidopsis
  misc_feature (1)..(201): Homolog of NCBI NO: 8052547 NR Description: F3F9.7 [Arabidopsis thaliana]
  misc_feature (1)..(201): Homolog of NCBI NO: 25373045 NR Description: F20D23.17 protein - Arabidopsis thaliana
MKPTHTARPTQCPFCKTPNYAVEYRGVKTKEERSIEQFEEQKVIEAQLRMRQKELQDEEAKMKRKQSRCSSSRTVTPTTEVEYRDICSTSFSVPSYQCTEQGNECCSSEPSCSSQANMRPFHSRHNRDDNVDMNLEDMMVMEAIWRSIQEQGHLVNPVCGSYFPVIEPPSRERQAFVPAAPLEMPHPGGYSCAVAALAEHQAPSMDFSYMSGSSTYPVFDMIRRPCNMSSGSLCGAENSSLDTWSGIAPSCSREVVRDEGECSADHWSEGAEAGTSLRRIGHHGGCRGHAAAAFRRELCHGSKPLPPGERRGADDVFHGRVTGRSSSR

SEQ ID NO: 9513 - DNA, 1402 bp, Zea mays subsp. mays
  misc_feature (1)..(1402): Ceres Seq. ID no. 13493652
  misc_feature: MA Experiment ID: 108543 Result: Down-regulated in Transcription
  misc_feature: MA Experiment ID: 20000535 Result: Up-regulated in Transcription
  misc_feature: MA Experiment 20000535 PARAMETER Experiment Name: Zm_Hybrid_Seed_Dev_P Parameter: DAP Value: 30 vs. 12
  misc_feature: MA Experiment 20000535 PARAMETER Experiment Name: Zm_Hybrid_Seed_Dev_P Parameter: Organism Value: Zea mays
  misc_feature: MA Experiment 20000535 PARAMETER Experiment Name: Zm_Hybrid_Seed_Dev_P Parameter: Plant Line Value: 35A19
  misc_feature: MA Experiment 20000535 PARAMETER Experiment Name: Zm_Hybrid_Seed_Dev_P Parameter: Tissue Value: Embryo vs. Unfert Floret
aaaaaattctagggaacccccactacgcctgcacgcgcccactagctagccaccttagatcggtcgatacagctagctatacccgctagctgcacctctcgctgccgccgcccggccgggccgcgcgagaccgctcaaaattcgcgcgcaccgccacgcggcgcggacatgctgcgggcggcggggagcagctagcaggtagccgagcacggcagggcgacccggcgcgcgatccgccgctgcccgcgtgggcggccgcctatggatctggccgcatggcgggcttccctctaggcggaggaggccacggccgcggcgaccaccaccaccctcacgtgaacccttcctccggctccggctccgactccgcggccgccgcctacctctacacggccgccgccgcgccgcgcggcggcttccagctatggccgcctcacccggcgcaggagcaccaccaccacttctacgcccccaacatcatccgcttcgccgatgaccccgccgcgggctcctcgcgcggcggcaggggctccgccagcggcgccggcgcgggcaccatcagctgccaggactgcggcaaccaggccaagaaggactgcgtccacatgcgctgccgcacctgctgcaagagccggggcttcgactgccccacccatgtcaagtccacctgggtgcccgccgccaagcgccgggagcgccagcagcagcaggccaccggcgccgccgagccctccaagcgccaccgtgacgccgctaccggtgcccagccctcctctaccaccgccacaaccacttcctcgggtgagcagcagcagatggcggtggtggcggagcggttcccgcgggaagtgagctcggaggcgctgttccgctgcgtccgcctgggcccggtcgacgagcccgacgccgaggtggcgtaccagaccagcgtcagcatcgccggccacgtcttcaagggcatcctgcacgacgtcggcccggagccgtcgacggtcgctgcgggcggcggcttccgccacgccaccgaggggtcctcccctagcacggccgcggcgggcgaaggcagcgtcgtggggcccgtctcgtcatcggctgtggtcatggacccgtacccgacgcccggcccgtacggcgccgctcatttcttccacggccatccgaggtgatgatcaaacggccaccatgattgacacggctagctagcctagctgaatctgatgggtttcgttccctttggacatgccatgcatctttccatccactgcttcaatatttgctttactagagggattatcgatcgtcacaaaattgttactagtagcttttatttgtctccgtcctccatccctgttctcgacgatcgatgcataaactgatgagcaccattcatcactgtttcttt

SEQ ID NO: 9514 - protein, 296 aa, Zea mays subsp. mays
  peptide (1)..(296): Ceres Seq. ID no. 13493653
  misc_feature (88)..(235): Pfam Name: Domain of unknown function (DUF702) Pfam Description: Domain of unknown function (DUF702)
  misc_feature (88)..(291): Homolog of NCBI NO: 15239350 NR Description: zinc finger protein SHI-related [Arabidopsis >gi|4929803|gb|AAD34162.1|AF152555_1 putative zinc finger protein
  misc_feature (1)..(268): Homolog of NCBI NO: 15234365 NR Description: expressed protein [Arabidopsis thaliana]
  misc_feature (16)..(267): Homolog of NCBI NO: 34906658 NR Description: putative LRP(lateral root primordia) 1 [Oryza
  misc_feature (31)..(235): Homolog of NCBI NO: 15223669 NR Description: hypothetical protein [Arabidopsis thaliana]
  misc_feature (94)..(236): Homolog of NCBI NO: 15224110 NR Description: expressed protein [Arabidopsis thaliana]
  misc_feature (97)..(290): Homolog of NCBI NO: 33945875 NR Description: hypothetical protein [Lotus corniculatus var.
  misc_feature (172)..(234): Homolog of NCBI NO: 15226540 NR Description: expressed protein [Arabidopsis thaliana]
  misc_feature (97)..(152): Homolog of NCBI NO: 15226540 NR Description: expressed protein [Arabidopsis thaliana]
  misc_feature (84)..(201): Homolog of NCBI NO: 15230389 NR Description: expressed protein [Arabidopsis thaliana]
  misc_feature (172)..(234): Homolog of NCBI NO: 26984075 NR Description: hypothetical protein [Arabidopsis thaliana]
MAGFPLGGGGHGRGDHHHPHVNPSSGSGSDSAAAAYLYTAAAAPRGGFQLWPPHPAQEHHHHFYAPNIIRFADDPAAGSSRGGRGSASGAGAGTISCQDCGNQAKKDCVHMRCRTCCKSRGFDCPTHVKSTWVPAAKRRERQQQQATGAAEPSKRHRDAATGAQPSSTTATTTSSGEQQQMAVVAERFPREVSSEALFRCVRLGPVDEPDAEVAYQTSVSIAGHVFKGILHDVGPEPSTVAAGGGFRHATEGSSPSTAAAGEGSVVGPVSSSAVVMDPYPTPGPYGAAHFFHGHPR

SEQ ID NO: 9515 - protein, 186 aa, Zea mays subsp. mays
  peptide (1)..(186): Ceres Seq. ID no. 13493654
  misc_feature (1)..(125): Pfam Name: Domain of unknown function (DUF702) Pfam Description: Domain of unknown function (DUF702)
  misc_feature (1)..(181): Homolog of NCBI NO: 15239350 NR Description: zinc finger protein SHI-related [Arabidopsis >gi|4929803|gb|AAD34162.1|AF152555_1 putative zinc finger protein
  misc_feature (1)..(158): Homolog of NCBI NO: 15234365 NR Description: expressed protein [Arabidopsis thaliana]
  misc_feature (1)..(157): Homolog of NCBI NO: 34906658 NR Description: putative LRP(lateral root primordia) 1 [Oryza
  misc_feature (1)..(125): Homolog of NCBI NO: 15223669 NR Description: hypothetical protein [Arabidopsis thaliana]
  misc_feature (1)..(126): Homolog of NCBI NO: 15224110 NR Description: expressed protein [Arabidopsis thaliana]
  misc_feature (1)..(180): Homolog of NCBI NO: 33945875 NR Description: hypothetical protein [Lotus corniculatus var.
  misc_feature (62)..(124): Homolog of NCBI NO: 15226540 NR Description: expressed protein [Arabidopsis thaliana]
  misc_feature (1)..(42): Homolog of NCBI NO: 15226540 NR Description: expressed protein [Arabidopsis thaliana]
  misc_feature (1)..(91): Homolog of NCBI NO: 15230389 NR Description: expressed protein [Arabidopsis thaliana]
  misc_feature (62)..(124): Homolog of NCBI NO: 26984075 NR Description: hypothetical protein [Arabidopsis thaliana]
MRCRTCCKSRGFDCPTHVKSTWVPAAKRRERQQQQATGAAEPSKRHRDAATGAQPSSTTATTTSSGEQQQMAVVAERFPREVSSEALFRCVRLGPVDEPDAEVAYQTSVSIAGHVFKGILHDVGPEPSTVAAGGGFRHATEGSSPSTAAAGEGSVVGPVSSSAVVMDPYPTPGPYGAAHFFHGHPR

SEQ ID NO: 9516 - DNA, 1097 bp, Zea mays subsp. mays
  misc_feature (1)..(1097): Ceres Seq. ID no. 13496171
  misc_feature: MA Experiment ID: 108543 Result: Up-regulated in Transcription
  misc_feature: MA Experiment ID: 108544 Result: Down-regulated in Transcription
  misc_feature: MA Experiment ID: 108559 Result: Down-regulated in Transcription
  misc_feature: MA Experiment 108559 PARAMETER Experiment Name: Zm_5mM_NO_P Parameter: Age (day) Value: 8
  misc_feature: MA Experiment 108559 PARAMETER Experiment Name: Zm_5mM_NO_P Parameter: Organism Value: Zea mays
  misc_feature: MA Experiment 108559 PARAMETER Experiment Name: Zm_5mM_NO_P Parameter: Plant Line Value: 35A19
  misc_feature: MA Experiment 108559 PARAMETER Experiment Name: Zm_5mM_NO_P Parameter: Timepoint (hr) Value: 12
  misc_feature: MA Experiment 108559 PARAMETER Experiment Name: Zm_5mM_NO_P Parameter: Tissue Value: Aerial
  misc_feature: MA Experiment 108559 PARAMETER Experiment Name: Zm_5mM_NO_P Parameter: Treatment Value: 5mM NO vs. No Treatment
  misc_feature: MA Experiment ID: 108687 Result: Down-regulated in Transcription
  misc_feature: MA Experiment 108687 PARAMETER Experiment Name: Zm_Embryos-Flowers__P Parameter: Tissue Value: Embryo vs. Aerial+
  misc_feature: MA Experiment ID: 108688 Result: Down-regulated in Transcription
  misc_feature: MA Experiment 108688 PARAMETER Experiment Name: Zm_Embryos-Flowers__P Parameter: Tissue Value: Immature Flowers vs. Aerial+
  misc_feature: MA Experiment ID: 20000477 Result: Down-regulated in Transcription
  misc_feature: MA Experiment 20000477 PARAMETER Experiment Name: Zm_5mM_SA_P Parameter: Age (day) Value: 10
  misc_feature: MA Experiment 20000477 PARAMETER Experiment Name: Zm_5mM_SA_P Parameter: Organism Value: Zea mays
  misc_feature: MA Experiment 20000477 PARAMETER Experiment Name: Zm_5mM_SA_P Parameter: Plant Line Value: 35A19
  misc_feature: MA Experiment 20000477 PARAMETER Experiment Name: Zm_5mM_SA_P Parameter: Timepoint (hr) Value: 48
  misc_feature: MA Experiment 20000477 PARAMETER Experiment Name: Zm_5mM_SA_P Parameter: Tissue Value: Aerial
  misc_feature: MA Experiment 20000477 PARAMETER Experiment Name: Zm_5mM_SA_P Parameter: Treatment Value: 5mM SA vs. No Treatment
  misc_feature: MA Experiment ID: 20000478 Result: Down-regulated in Transcription
  misc_feature: MA Experiment 20000478 PARAMETER Experiment Name: Zm_5mM_SA_P Parameter: Age (day) Value: 11
  misc_feature: MA Experiment 20000478 PARAMETER Experiment Name: Zm_5mM_SA_P Parameter: Organism Value: Zea mays
  misc_feature: MA Experiment 20000478 PARAMETER Experiment Name: Zm_5mM_SA_P Parameter: Plant Line Value: 35A19
  misc_feature: MA Experiment 20000478 PARAMETER Experiment Name: Zm_5mM_SA_P Parameter: Timepoint (hr) Value: 72
  misc_feature: MA Experiment 20000478 PARAMETER Experiment Name: Zm_5mM_SA_P Parameter: Tissue Value: Aerial
  misc_feature: MA Experiment 20000478 PARAMETER Experiment Name: Zm_5mM_SA_P Parameter: Treatment Value: 5mM SA vs. No Treatment
  misc_feature: MA Experiment ID: 20000492 Result: Down-regulated in Transcription
  misc_feature: MA Experiment 20000492 PARAMETER Experiment Name: Zm_Hybrid_Seed_Dev_P Parameter: DAP Value: 12
  misc_feature: MA Experiment 20000492 PARAMETER Experiment Name: Zm_Hybrid_Seed_Dev_P Parameter: Organism Value: Zea mays
  misc_feature: MA Experiment 20000492 PARAMETER Experiment Name: Zm_Hybrid_Seed_Dev_P Parameter: Plant Line Value: 35A19
  misc_feature: MA Experiment 20000492 PARAMETER Experiment Name: Zm_Hybrid_Seed_Dev_P Parameter: Tissue Value: Fert Kernel vs. Unfert Floret
  misc_feature: MA Experiment ID: 20000535 Result: Down-regulated in Transcription
  misc_feature: MA Experiment 20000535 PARAMETER Experiment Name: Zm_Hybrid_Seed_Dev_P Parameter: DAP Value: 30 vs. 12
  misc_feature: MA Experiment 20000535 PARAMETER Experiment Name: Zm_Hybrid_Seed_Dev_P Parameter: Organism Value: Zea mays
  misc_feature: MA Experiment 20000535 PARAMETER Experiment Name: Zm_Hybrid_Seed_Dev_P Parameter: Plant Line Value: 35A19
  misc_feature: MA Experiment 20000535 PARAMETER Experiment Name: Zm_Hybrid_Seed_Dev_P Parameter: Tissue Value: Embryo vs. Unfert Floret
gacctcacttgatccgctcccttcgccgcgacgacgttcctacgcagctgcggtcgacgcgcgcacggcagctcgctcgctagctgatcacgacagctcgctcggctcgaccgaatggcgccgcggctgctggcgtgcttcgggcgcggcgtcgcggcggcgccggacgacgcgactggcgagggccagctggaggcgccccccgctggcccggtgctggtggagctgttcgggtcgcaggggtgcggggcgtcgcccgaggcggacgccgtggcggcgcggctggcgcaggactccgggtccggggacggcgccgtcgtggtgctggcgttccacgtcgactactgggactaccgcgggtggaaggaccccttcgcgtccagcgcctggaccgtgcgccagaaggcctacgtggaggcgctccgcctcgacacgctcttcacgccgcaggtcgtcctgcagggccgcgcgcactgcgtcggcaccgaccaggacgcgctcgcgctggccgtccgcgacgccccgcgctaccccgcgcccgccatcaaggtcacgttccagcggccgagccccgcaacactgcaggcgtcgttcacgggcaccctgcgcagccgcgtggagggcccaggcggcgcgagcgtgctggtggcgctgtacgagagcgggctggtgaccgactgcgggcgcggcgagaacaagggcaagtcgctgctcaacgaccacgtggtgcgccgtctcgagaaggtggccgccgtgcgggagggcgcctcgccgaagaagaccgtgtcgggcaccgtccagttcccgctctgggacggctttcgcgccaccaagtgcggcctcgtgctcttcgtccagaacgccgcgctgcaggtgctcgacgtccagcacttcgacctgcctgacaacgtctgagctcgtgacgcggtggggcgcgcgcgcgttccgcgttggctgcctccctgcggcgggcgtcacattctttgtatcactgtatgtagtacatcactggatggtatttagatggaaaacctgagtattctttatctccacgtatgttcttgttctgcattatggcaatggatcttctgttttgc

SEQ ID NO: 9517 - protein, 266 aa, Zea mays subsp. mays
  peptide (1)..(266): Ceres Seq. ID no. 13496172
  misc_feature (1)..(266): Homolog of NCBI NO: 34394018 NR Description: membrane lipoprotein lipid attachment
  misc_feature (1)..(266): Homolog of NCBI NO: 15234089 NR Description: membrane lipo protein lipid attachment expressed protein [Arabidopsis thaliana] >gi|7460217|pir||T05759
  misc_feature (1)..(266): Homolog of NCBI NO: 21593063 NR Description: unknown [Arabidopsis thaliana]
  misc_feature (1)..(266): Homolog of NCBI NO: 13265463 NR Description: AT4g27350 [Arabidopsis thaliana]
  misc_feature (32)..(266): Homolog of NCBI NO: 15239579 NR Description: expressed protein [Arabidopsis thaliana] gene_id:MDK4.6~pir||T05759~strong similarity to unknown protein
  misc_feature (14)..(248): Homolog of NCBI NO: 17546308 NR Description: HYPOTHETICAL PROTEIN [Ralstonia solanacearum]
  misc_feature (33)..(207): Homolog of NCBI NO: 23014426 NR Description: hypothetical protein [Magnetospirillum
  misc_feature (15)..(245): Homolog of NCBI NO: 15966981 NR Description: HYPOTHETICAL PROTEIN [Sinorhizobium meliloti]
  misc_feature (35)..(251): Homolog of NCBI NO: 22962198 NR Description: hypothetical protein [Rhodopseudomonas palustris]
  misc_feature (33)..(211): Homolog of NCBI NO: 16127896 NR Description: conserved hypothetical protein [Caulobacter
MAPRLLACFGRGVAAAPDDATGEGQLEAPPAGPVLVELFGSQGCGASPEADAVAARLAQDSGSGDGAVVVLAFHVDYWDYRGWKDPFASSAWTVRQKAYVEALRLDTLFTPQVVLQGRAHCVGTDQDALALAVRDAPRYPAPAIKVTFQRPSPATLQASFTGTLRSRVEGPGGASVLVALYESGLVTDCGRGENKGKSLLNDHVVRRLEKVAAVREGASPKKTVSGTVQFPLWDGFRATKCGLVLFVQNAALQVLDVQHFDLPDNV

SEQ ID NO: 9518 - protein, 223 aa, Zea mays subsp. mays
  peptide (1)..(223): Ceres Seq. ID no. 13496173
  misc_feature (46)..(223): Homolog of NCBI NO: 5821145 NR Description: RNA binding protein [Homo sapiens]
  misc_feature (46)..(223): Homolog of NCBI NO: 5821143 NR Description: RNA binding protein [Homo sapiens]
  misc_feature (46)..(223): Homolog of NCBI NO: 6649242 NR Description: splicing coactivator subunit SRm300 [Homo sapiens]
  misc_feature (46)..(223): Homolog of NCBI NO: 19923466 NR Description: splicing coactivator subunit SRm300; RNA binding
  misc_feature (46)..(223): Homolog of NCBI NO: 30424862 NR Description: RIKEN cDNA 5033413A03 [Mus musculus]
  misc_feature (8)..(223): Homolog of NCBI NO: 5821151 NR Description: RNA binding protein [Homo sapiens]
  misc_feature (8)..(223): Homolog of NCBI NO: 6634015 NR Description: KIAA0324 protein [Homo sapiens]
  misc_feature (8)..(223): Homolog of NCBI NO: 7512967 NR Description: hypothetical protein KIAA0324 - human (fragment)
  misc_feature (8)..(223): Homolog of NCBI NO: 19923466 NR Description: splicing coactivator subunit SRm300; RNA binding
  misc_feature (47)..(223): Homolog of NCBI NO: 5821151 NR Description: RNA binding protein [Homo sapiens]
TSLDPLPSPRRRSYAAAVDARTAARSLADHDSSLGSTEWRRGCWRASGAASRRRRTTRLARASWRRPPLARCWWSCSGRRGAGRRPRRTPWRRGWRRTPGPGTAPSWCWRSTSTTGTTAGGRTPSRPAPGPCARRPTWRRSASTRSSRRRSSCRAARTASAPTRTRSRWPSATPRATPRPPSRSRSSGRAPQHCRRRSRAPCAAAWRAQAARACWWRCTRAGW

SEQ ID NO: 9519 - DNA, 1017 bp, Zea mays subsp. mays
  misc_feature (1)..(1017): Ceres Seq. ID no. 12357240
  misc_feature: MA Experiment ID: 108504 Result: Up-regulated in Transcription
  misc_feature: MA Experiment 108504 PARAMETER Experiment Name: Zm_Drought_P Parameter: Age (day) Value: 8
  misc_feature: MA Experiment 108504 PARAMETER Experiment Name: Zm_Drought_P Parameter: Organism Value: Zea mays
  misc_feature: MA Experiment 108504 PARAMETER Experiment Name: Zm_Drought_P Parameter: Plant Line Value: 35A19
  misc_feature: MA Experiment 108504 PARAMETER Experiment Name: Zm_Drought_P Parameter: Timepoint (hr) Value: 12
  misc_feature: MA Experiment 108504 PARAMETER Experiment Name: Zm_Drought_P Parameter: Tissue Value: Aerial
  misc_feature: MA Experiment 108504 PARAMETER Experiment Name: Zm_Drought_P Parameter: Treatment Value: Drought vs. No Drought
  misc_feature: MA Experiment ID: 108527 Result: Up-regulated in Transcription
  misc_feature: MA Experiment 108527 PARAMETER Experiment Name: Zm_5mM_NO_P Parameter: Age (day) Value: 8
  misc_feature: MA Experiment 108527 PARAMETER Experiment Name: Zm_5mM_NO_P Parameter: Organism Value: Zea mays
  misc_feature: MA Experiment 108527 PARAMETER Experiment Name: Zm_5mM_NO_P Parameter: Plant Line Value: 35A19
  misc_feature: MA Experiment 108527 PARAMETER Experiment Name: Zm_5mM_NO_P Parameter: Timepoint (hr) Value: 6
  misc_feature: MA Experiment 108527 PARAMETER Experiment Name: Zm_5mM_NO_P Parameter: Tissue Value: Aerial
  misc_feature: MA Experiment 108527 PARAMETER Experiment Name: Zm_5mM_NO_P Parameter: Treatment Value: 5mM NO vs. No Treatment
  misc_feature: MA Experiment ID: 108529 Result: Up-regulated in Transcription
  misc_feature: MA Experiment 108529 PARAMETER Experiment Name: Zm_Imbibed_Seeds_P Parameter: Age (day) Value: 5 vs. 2
  misc_feature: MA Experiment 108529 PARAMETER Experiment Name: Zm_Imbibed_Seeds_P Parameter: Organism Value: Zea mays
  misc_feature: MA Experiment 108529 PARAMETER Experiment Name: Zm_Imbibed_Seeds_P Parameter: Plant Line Value: 35A19
  misc_feature: MA Experiment 108529 PARAMETER Experiment Name: Zm_Imbibed_Seeds_P Parameter: Tissue Value: Roots vs. Embryo
  misc_feature: MA Experiment ID: 108536 Result: Up-regulated in Transcription
  misc_feature: MA Experiment 108536 PARAMETER Experiment Name: Zm_Meristem_P Parameter: Age (day) Value: 8
  misc_feature: MA Experiment 108536 PARAMETER Experiment Name: Zm_Meristem_P Parameter: Organism Value: Zea mays
  misc_feature: MA Experiment 108536 PARAMETER Experiment Name: Zm_Meristem_P Parameter: Plant Line Value: 35A19
  misc_feature: MA Experiment 108536 PARAMETER Experiment Name: Zm_Meristem_P Parameter: Tissue Value: Shoot Meristem vs. Above Shoot Meristem
  misc_feature: MA Experiment ID: 108543 Result: Down-regulated in Transcription
  misc_feature: MA Experiment ID: 108544 Result: Up-regulated in Transcription
  misc_feature: MA Experiment ID: 108545 Result: Down-regulated in Transcription
  misc_feature: MA Experiment 108545 PARAMETER Experiment Name: Zm_Imbibed_Seeds_P Parameter: Age (day) Value: 3 vs. 2
  misc_feature: MA Experiment 108545 PARAMETER Experiment Name: Zm_Imbibed_Seeds_P Parameter: Organism Value: Zea mays
  misc_feature: MA Experiment 108545 PARAMETER Experiment Name: Zm_Imbibed_Seeds_P Parameter: Plant Line Value: 35A19
  misc_feature: MA Experiment 108545 PARAMETER Experiment Name: Zm_Imbibed_Seeds_P Parameter: Tissue Value: Aerial vs. Embryo
  misc_feature: MA Experiment ID: 108556 Result: Up-regulated in Transcription
  misc_feature: MA Experiment 108556 PARAMETER Experiment Name: Zm_Drought_P Parameter: Age (day) Value: 9
  misc_feature: MA Experiment 108556 PARAMETER Experiment Name: Zm_Drought_P Parameter: Organism Value: Zea mays
  misc_feature: MA Experiment 108556 PARAMETER Experiment Name: Zm_Drought_P Parameter: Plant Line Value: 35A19
  misc_feature: MA Experiment 108556 PARAMETER Experiment Name: Zm_Drought_P Parameter: Timepoint (hr) Value: 24
  misc_feature: MA Experiment 108556 PARAMETER Experiment Name: Zm_Drought_P Parameter: Tissue Value: Aerial
  misc_feature: MA Experiment 108556 PARAMETER Experiment Name: Zm_Drought_P Parameter: Treatment Value: Drought vs. No Drought
  misc_feature: MA Experiment ID: 108597 Result: Up-regulated in Transcription
  misc_feature: MA Experiment 108597 PARAMETER Experiment Name: Zm_100uM_ABA_P Parameter: Age (day) Value: 9
  misc_feature: MA Experiment 108597 PARAMETER Experiment Name: Zm_100uM_ABA_P Parameter: Organism Value: Zea mays
  misc_feature: MA Experiment 108597 PARAMETER Experiment Name: Zm_100uM_ABA_P Parameter: Plant Line Value: 35A19
  misc_feature: MA Experiment 108597 PARAMETER Experiment Name: Zm_100uM_ABA_P Parameter: Timepoint (hr) Value: 24
  misc_feature: MA Experiment 108597 PARAMETER Experiment Name: Zm_100uM_ABA_P Parameter: Tissue Value: Aerial
  misc_feature: MA Experiment 108597 PARAMETER Experiment Name: Zm_100uM_ABA_P Parameter: Treatment Value: 100uM ABA vs. No Treatment
  misc_feature: MA Experiment ID: 108687 Result: Down-regulated in Transcription
  misc_feature: MA Experiment 108687 PARAMETER Experiment Name: Zm_Embryos-Flowers__P Parameter: Tissue Value: Embryo vs. Aerial+
  misc_feature: MA Experiment ID: 108689 Result: Up-regulated in Transcription
  misc_feature: MA Experiment 108689 PARAMETER Experiment Name: Zm_Drought_Roots_P Parameter: Age (day) Value: 9
  misc_feature: MA Experiment 108689 PARAMETER Experiment Name: Zm_Drought_Roots_P Parameter: Organism Value: Zea mays
  misc_feature: MA Experiment 108689 PARAMETER Experiment Name: Zm_Drought_Roots_P Parameter: Plant Line Value: 35A19
  misc_feature: MA Experiment 108689 PARAMETER Experiment Name: Zm_Drought_Roots_P Parameter: Timepoint (hr) Value: 24
  misc_feature: MA Experiment 108689 PARAMETER Experiment Name: Zm_Drought_Roots_P Parameter: Tissue Value: Roots
  misc_feature: MA Experiment 108689 PARAMETER Experiment Name: Zm_Drought_Roots_P Parameter: Treatment Value: Drought vs. No Drought
  misc_feature: MA Experiment ID: 20000477 Result: Up-regulated in Transcription
  misc_feature: MA Experiment 20000477 PARAMETER Experiment Name: Zm_5mM_SA_P Parameter: Age (day) Value: 10
  misc_feature: MA Experiment 20000477 PARAMETER Experiment Name: Zm_5mM_SA_P Parameter: Organism Value: Zea mays
  misc_feature: MA Experiment 20000477 PARAMETER Experiment Name: Zm_5mM_SA_P Parameter: Plant Line Value: 35A19
  misc_feature: MA Experiment 20000477 PARAMETER Experiment Name: Zm_5mM_SA_P Parameter: Timepoint (hr) Value: 48
  misc_feature: MA Experiment 20000477 PARAMETER Experiment Name: Zm_5mM_SA_P Parameter: Tissue Value: Aerial
  misc_feature: MA Experiment 20000477 PARAMETER Experiment Name: Zm_5mM_SA_P Parameter: Treatment Value: 5mM SA vs. No Treatment
  misc_feature: MA Experiment ID: 20000492 Result: Down-regulated in Transcription
  misc_feature: MA Experiment 20000492 PARAMETER Experiment Name: Zm_Hybrid_Seed_Dev_P Parameter: DAP Value: 12
  misc_feature: MA Experiment 20000492 PARAMETER Experiment Name: Zm_Hybrid_Seed_Dev_P Parameter: Organism Value: Zea mays
  misc_feature: MA Experiment 20000492 PARAMETER Experiment Name: Zm_Hybrid_Seed_Dev_P Parameter: Plant Line Value: 35A19
  misc_feature: MA Experiment 20000492 PARAMETER Experiment Name: Zm_Hybrid_Seed_Dev_P Parameter: Tissue Value: Fert Kernel vs. Unfert Floret
  misc_feature: MA Experiment ID: 20000535 Result: Down-regulated in Transcription
  misc_feature: MA Experiment 20000535 PARAMETER Experiment Name: Zm_Hybrid_Seed_Dev_P Parameter: DAP Value: 30 vs. 12
  misc_feature: MA Experiment 20000535 PARAMETER Experiment Name: Zm_Hybrid_Seed_Dev_P Parameter: Organism Value: Zea mays
  misc_feature: MA Experiment 20000535 PARAMETER Experiment Name: Zm_Hybrid_Seed_Dev_P Parameter: Plant Line Value: 35A19
  misc_feature: MA Experiment 20000535 PARAMETER Experiment Name: Zm_Hybrid_Seed_Dev_P Parameter: Tissue Value: Embryo vs. Unfert Floret
  misc_feature: MA Experiment ID: 20000626 Result: Up-regulated in Transcription
  misc_feature: MA Experiment 20000626 PARAMETER Experiment Name: Zm_Herbicide-Treatments_P Parameter: Timepoint (hr) Value: 12
  misc_feature: MA Experiment 20000626 PARAMETER Experiment Name: Zm_Herbicide-Treatments_P Parameter: Tissue Value: Aerial
  misc_feature: MA Experiment 20000626 PARAMETER Experiment Name: Zm_Herbicide-Treatments_P Parameter: Treatment Value: Roundup vs. No Treatment
  misc_feature: MA Experiment ID: 20000630 Result: Up-regulated in Transcription
  misc_feature: MA Experiment 20000630 PARAMETER Experiment Name: Zm_Herbicide-Treatments_P Parameter: Timepoint (hr) Value: 4
  misc_feature: MA Experiment 20000630 PARAMETER Experiment Name: Zm_Herbicide-Treatments_P Parameter: Tissue Value: Aerial
  misc_feature: MA Experiment 20000630 PARAMETER Experiment Name: Zm_Herbicide-Treatments_P Parameter: Treatment Value: Roundup vs. No Treatment
actctcgctgtttcctgcgtgatctgcttgtgtagctactagctagctagcggagcggaacccatgggctgcgaggaggaagagaggctgctgttcccgtccttcgtctttcccgagagcttcgcggaggccgccacccccggctccggtggtgagcagaagaaggctcggcagcgtcggaggcgcaagccgcggccggcggagggcggcgagggcgcggacgagcaggccaggaagcggcggctgagcgacgaccaggcgcggttcctggagctcagcttcaggaaggagcgcaagctggagacgccccgcaaggtgcagctggccgccgatctgggcctcgacgccaagcaggtggccgtctggttccagaaccgccgcgcccgccacaagagcaagctcatggaggaggagttctccaagctccgcgccgcgcacgacgccgtcgtcctccacaactgccacctcgagaccgagctgctgaagatgaaggacaggctggcggaggtggaggaggagaagacgaagctcgtcgcggcggcggcggcggcggccggcggcgcagcgggcgcagggagcagcagcccgagctcgtcgtcgttctcgacggtgacgcaccacccggccgcggcgctgcaggtggggcagttcggggtggagccggaggaggccgccgacctcgcctacatgaccgagtacgcctacaacagctacatgaacatgatggacctcgcgcccggctacttcggcggagtcgtctacgactacgaccacttcaactgatccacgagcatgcaggaggaggaggagggaagctacaagacgaaggaaggattgactggcctatcagctaggtactattttcgtgttaatggatggatggaccgatttgcagggcgcgcgtagcagtagtagcaatcaaggtcactagtatagtctgtcagtacgacgacgtcgatcagtcaatgtctcccctgacgataattattaagtcgatctattcagtagtaacttgtt

SEQ ID NO: 9520 - protein, 239 aa, Zea mays subsp. mays
  peptide (1)..(239): Ceres Seq. ID no. 12357241
  misc_feature (57)..(111): Pfam Name: Homeobox domain Pfam Description: Homeobox domain
  misc_feature (2)..(223): Homolog of NCBI NO: 33146844 NR Description: homeodomain protein-like [Oryza sativa (japonica
  misc_feature (5)..(212): Homolog of NCBI NO: 15224190 NR Description: homeodomain protein; protein id: At2g18550.1 thaliana] >gi|25411880|pir||F84565 probable homeodomain
  misc_feature (5)..(181): Homolog of NCBI NO: 15234508 NR Description: homeodomain protein; protein id: At4g36740.1
  misc_feature (29)..(156): Homolog of NCBI NO: 15240052 NR Description: homeodomain transcription factor-like; protein At5g66700.1 [Arabidopsis thaliana] >gi|8843728|dbj|BAA97276.1|
  misc_feature (12)..(207): Homolog of NCBI NO: 5006853 NR Description: homeodomain leucine zipper protein [Oryza sativa]
  misc_feature (16)..(169): Homolog of NCBI NO: 5006857 NR Description: homeodomain leucine zipper protein [Oryza sativa]
  misc_feature (42)..(214): Homolog of NCBI NO: 18034443 NR Description: homeodomain leucine zipper protein CPHB-6
  misc_feature (47)..(222): Homolog of NCBI NO: 7446244 NR Description: homeotic protein - carrot
MGCEEEERLLFPSFVFPESFAEAATPGSGGEQKKARQRRRRKPRPAEGGEGADEQARKRRLSDDQARFLELSFRKERKLETPRKVQLAADLGLDAKQVAVWFQNRRARHKSKLMEEEFSKLRAAHDAVVLHNCHLETELLKMKDRLAEVEEEKTKLVAAAAAAAGGAAGAGSSSPSSSSFSTVTHHPAAALQVGQFGVEPEEAADLAYMTEYAYNSYMNMMDLAPGYFGGVVYDYDHFN

SEQ ID NO: 9521 - protein, 126 aa, Zea mays subsp. mays
  peptide (1)..(126): Ceres Seq. ID no. 12357242
  misc_feature (1)..(110): Homolog of NCBI NO: 33146844 NR Description: homeodomain protein-like [Oryza sativa (japonica
  misc_feature (1)..(99): Homolog of NCBI NO: 15224190 NR Description: homeodomain protein; protein id: At2g18550.1 thaliana] >gi|25411880|pir||F84565 probable homeodomain
  misc_feature (1)..(68): Homolog of NCBI NO: 15234508 NR Description: homeodomain protein; protein id: At4g36740.1
  misc_feature (1)..(43): Homolog of NCBI NO: 15240052 NR Description: homeodomain transcription factor-like; protein At5g66700.1 [Arabidopsis thaliana] >gi|8843728|dbj|BAA97276.1|
  misc_feature (1)..(94): Homolog of NCBI NO: 5006853 NR Description: homeodomain leucine zipper protein [Oryza sativa]
  misc_feature (1)..(56): Homolog of NCBI NO: 5006857 NR Description: homeodomain leucine zipper protein [Oryza sativa]
  misc_feature (1)..(101): Homolog of NCBI NO: 18034443 NR Description: homeodomain leucine zipper protein CPHB-6
  misc_feature (1)..(109): Homolog of NCBI NO: 7446244 NR Description: homeotic protein - carrot
MEEEFSKLRAAHDAVVLHNCHLETELLKMKDRLAEVEEEKTKLVAAAAAAAGGAAGAGSSSPSSSSFSTVTHHPAAALQVGQFGVEPEEAADLAYMTEYAYNSYMNMMDLAPGYFGGVVYDYDHFN

SEQ ID NO: 9522 - DNA, 1695 bp, Zea mays subsp. mays
  misc_feature (1)..(1695): Ceres Seq. ID no. 12374922
  misc_feature: MA Experiment ID: 108504 Result: Up-regulated in Transcription
  misc_feature: MA Experiment 108504 PARAMETER Experiment Name: Zm_Drought_P Parameter: Age (day) Value: 8
  misc_feature: MA Experiment 108504 PARAMETER Experiment Name: Zm_Drought_P Parameter: Organism Value: Zea mays
  misc_feature: MA Experiment 108504 PARAMETER Experiment Name: Zm_Drought_P Parameter: Plant Line Value: 35A19
  misc_feature: MA Experiment 108504 PARAMETER Experiment Name: Zm_Drought_P Parameter: Timepoint (hr) Value: 12
  misc_feature: MA Experiment 108504 PARAMETER Experiment Name: Zm_Drought_P Parameter: Tissue Value: Aerial
  misc_feature: MA Experiment 108504 PARAMETER Experiment Name: Zm_Drought_P Parameter: Treatment Value: Drought vs. No Drought
  misc_feature: MA Experiment ID: 108527 Result: Up-regulated in Transcription
  misc_feature: MA Experiment 108527 PARAMETER Experiment Name: Zm_5mM_NO_P Parameter: Age (day) Value: 8
  misc_feature: MA Experiment 108527 PARAMETER Experiment Name: Zm_5mM_NO_P Parameter: Organism Value: Zea mays
  misc_feature: MA Experiment 108527 PARAMETER Experiment Name: Zm_5mM_NO_P Parameter: Plant Line Value: 35A19
  misc_feature: MA Experiment 108527 PARAMETER Experiment Name: Zm_5mM_NO_P Parameter: Timepoint (hr) Value: 6
  misc_feature: MA Experiment 108527 PARAMETER Experiment Name: Zm_5mM_NO_P Parameter: Tissue Value: Aerial
  misc_feature: MA Experiment 108527 PARAMETER Experiment Name: Zm_5mM_NO_P Parameter: Treatment Value: 5mM NO vs. No Treatment
  misc_feature: MA Experiment ID: 108528 Result: Down-regulated in Transcription
  misc_feature: MA Experiment 108528 PARAMETER Experiment Name: Zm_Imbibed_Seeds_P Parameter: Age (day) Value: 5 vs. 2
  misc_feature: MA Experiment 108528 PARAMETER Experiment Name: Zm_Imbibed_Seeds_P Parameter: Organism Value: Zea mays
  misc_feature: MA Experiment 108528 PARAMETER Experiment Name: Zm_Imbibed_Seeds_P Parameter: Plant Line Value: 35A19
  misc_feature: MA Experiment 108528 PARAMETER Experiment Name: Zm_Imbibed_Seeds_P Parameter: Tissue Value: Aerial vs. Embryo
  misc_feature: MA Experiment ID: 108529 Result: Down-regulated in Transcription
  misc_feature: MA Experiment 108529 PARAMETER Experiment Name: Zm_Imbibed_Seeds_P Parameter: Age (day) Value: 5 vs. 2
  misc_feature: MA Experiment 108529 PARAMETER Experiment Name: Zm_Imbibed_Seeds_P Parameter: Organism Value: Zea mays
  misc_feature: MA Experiment 108529 PARAMETER Experiment Name: Zm_Imbibed_Seeds_P Parameter: Plant Line Value: 35A19
  misc_feature: MA Experiment 108529 PARAMETER Experiment Name: Zm_Imbibed_Seeds_P Parameter: Tissue Value: Roots vs. Embryo
  misc_feature: MA Experiment ID: 108530 Result: Down-regulated in Transcription
  misc_feature: MA Experiment 108530 PARAMETER Experiment Name: Zm_Imbibed_Seeds_P Parameter: Age (day) Value: 6 vs. 2
  misc_feature: MA Experiment 108530 PARAMETER Experiment Name: Zm_Imbibed_Seeds_P Parameter: Organism Value: Zea mays
  misc_feature: MA Experiment 108530 PARAMETER Experiment Name: Zm_Imbibed_Seeds_P Parameter: Plant Line Value: 35A19
  misc_feature: MA Experiment 108530 PARAMETER Experiment Name: Zm_Imbibed_Seeds_P Parameter: Tissue Value: Aerial vs. Embryo
  misc_feature: MA Experiment ID: 108535 Result: Down-regulated in Transcription
  misc_feature: MA Experiment 108535 PARAMETER Experiment Name: Zm_Meristem_P Parameter: Age (day) Value: 8
  misc_feature: MA Experiment 108535 PARAMETER Experiment Name: Zm_Meristem_P Parameter: Organism Value: Zea mays
  misc_feature: MA Experiment 108535 PARAMETER Experiment Name: Zm_Meristem_P Parameter: Plant Line Value: 35A19
  misc_feature: MA Experiment 108535 PARAMETER Experiment Name: Zm_Meristem_P Parameter: Tissue Value: Root Meristem vs. Above Root Meristem
  misc_feature: MA Experiment ID: 108542 Result: Up-regulated in Transcription
  misc_feature: MA Experiment 108542 PARAMETER Experiment Name: Zm_150mM_NaCl_P Parameter: Age (day) Value: 8
  misc_feature: MA Experiment 108542 PARAMETER Experiment Name: Zm_150mM_NaCl_P Parameter: Organism Value: Zea mays
  misc_feature: MA Experiment 108542 PARAMETER Experiment Name: Zm_150mM_NaCl_P Parameter: Plant Line Value: 35A19
  misc_feature: MA Experiment 108542 PARAMETER Experiment Name: Zm_150mM_NaCl_P Parameter: Timepoint (hr) Value: 6
  misc_feature: MA Experiment 108542 PARAMETER Experiment Name: Zm_150mM_NaCl_P Parameter: Tissue Value: Aerial
  misc_feature: MA Experiment 108542 PARAMETER Experiment Name: Zm_150mM_NaCl_P Parameter: Treatment Value: 150mM NaCl vs. No Treatment
  misc_feature: MA Experiment ID: 108544 Result: Up-regulated in Transcription
  misc_feature: MA Experiment ID: 108556 Result: Up-regulated in Transcription
  misc_feature: MA Experiment 108556 PARAMETER Experiment Name: Zm_Drought_P Parameter: Age (day) Value: 9
  misc_feature: MA Experiment 108556 PARAMETER Experiment Name: Zm_Drought_P Parameter: Organism Value: Zea mays
  misc_feature: MA Experiment 108556 PARAMETER Experiment Name: Zm_Drought_P Parameter: Plant Line Value: 35A19
  misc_feature: MA Experiment 108556 PARAMETER Experiment Name: Zm_Drought_P Parameter: Timepoint (hr) Value: 24
  misc_feature: MA Experiment 108556 PARAMETER Experiment Name: Zm_Drought_P Parameter: Tissue Value: Aerial
  misc_feature: MA Experiment 108556 PARAMETER Experiment Name: Zm_Drought_P Parameter: Treatment Value: Drought vs. No Drought
  misc_feature: MA Experiment ID: 108559 Result: Up-regulated in Transcription
  misc_feature: MA Experiment 108559 PARAMETER Experiment Name: Zm_5mM_NO_P Parameter: Age (day) Value: 8
  misc_feature: MA Experiment 108559 PARAMETER Experiment Name: Zm_5mM_NO_P Parameter: Organism Value: Zea mays
  misc_feature: MA Experiment 108559 PARAMETER Experiment Name: Zm_5mM_NO_P Parameter: Plant Line Value: 35A19
  misc_feature: MA Experiment 108559 PARAMETER Experiment Name: Zm_5mM_NO_P Parameter: Timepoint (hr) Value: 12
  misc_feature: MA Experiment 108559 PARAMETER Experiment Name: Zm_5mM_NO_P Parameter: Tissue Value: Aerial
  misc_feature: MA Experiment 108559 PARAMETER Experiment Name: Zm_5mM_NO_P Parameter: Treatment Value: 5mM NO vs. No Treatment
  misc_feature: MA Experiment ID: 20000477 Result: Up-regulated in Transcription
  misc_feature: MA Experiment 20000477 PARAMETER Experiment Name: Zm_5mM_SA_P Parameter: Age (day) Value: 10
  misc_feature: MA Experiment 20000477 PARAMETER Experiment Name: Zm_5mM_SA_P Parameter: Organism Value: Zea mays
  misc_feature: MA Experiment 20000477 PARAMETER Experiment Name: Zm_5mM_SA_P Parameter: Plant Line Value: 35A19
  misc_feature: MA Experiment 20000477 PARAMETER Experiment Name: Zm_5mM_SA_P Parameter: Timepoint (hr) Value: 48
  misc_feature: MA Experiment 20000477 PARAMETER Experiment Name: Zm_5mM_SA_P Parameter: Tissue Value: Aerial
  misc_feature: MA Experiment 20000477 PARAMETER Experiment Name: Zm_5mM_SA_P Parameter: Treatment Value: 5mM SA vs. No Treatment
  misc_feature: MA Experiment ID: 20000478 Result: Up-regulated in Transcription
  misc_feature: MA Experiment 20000478 PARAMETER Experiment Name: Zm_5mM_SA_P Parameter: Age (day) Value: 11
  misc_feature: MA Experiment 20000478 PARAMETER Experiment Name: Zm_5mM_SA_P Parameter: Organism Value: Zea mays
  misc_feature: MA Experiment 20000478 PARAMETER Experiment Name: Zm_5mM_SA_P Parameter: Plant Line Value: 35A19
  misc_feature: MA Experiment 20000478 PARAMETER Experiment Name: Zm_5mM_SA_P Parameter: Timepoint (hr) Value: 72
  misc_feature: MA Experiment 20000478 PARAMETER Experiment Name: Zm_5mM_SA_P Parameter: Tissue Value: Aerial
  misc_feature: MA Experiment 20000478 PARAMETER Experiment Name: Zm_5mM_SA_P Parameter: Treatment Value: 5mM SA vs. No Treatment
  misc_feature: MA Experiment ID: 20000492 Result: Down-regulated in Transcription
  misc_feature: MA Experiment 20000492 PARAMETER Experiment Name: Zm_Hybrid_Seed_Dev_P Parameter: DAP Value: 12
  misc_feature: MA Experiment 20000492 PARAMETER Experiment Name: Zm_Hybrid_Seed_Dev_P Parameter: Organism Value: Zea mays
  misc_feature: MA Experiment 20000492 PARAMETER Experiment Name: Zm_Hybrid_Seed_Dev_P Parameter: Plant Line Value: 35A19
  misc_feature: MA Experiment 20000492 PARAMETER Experiment Name: Zm_Hybrid_Seed_Dev_P Parameter: Tissue Value: Fert Kernel vs. Unfert Floret
catccggatgagggggaaggaagacgataccagacgctactcctacaactcaccaccactacactatcccctccgctctctctccgcactactgcgtattaggtagcctctcgcattgacaagccagccggtggtttggttcgctttgctttgcttacgtgctgcgctgcgcgctccgaccaggcccgccccgaccggcgatgcagcggtggctcccggcgctcctccgccgcgcggcgcccggcggcggcgcggcgcggctcctcgccacgtcctccctcctcttcgacgacacgcaggagcagttcaaggagagcgtgcgcaagttcgcgcaggaggccatcgcgccgcgcgccgcggccatcgacgcctccaaccacttcccgcgggacgtggacctgtggaggctcatgggggacttcaacctccacggcctcaccgcgcccgaggagtacggcgggatggggctcgggtacatgtaccactgcatcgccatggaggagatcaccagggcatccggcgccgtcggcctctcctacggcgcgcactccaacctctgcatcaaccagctcgtccggcacggaaacccggagcagaagctcaagtatctgcccaagctgatcagtggggagcatatcggggcactggcgatgagtgaacccaactctggctctgatgtcgtcagcatgaagtgcaaagctgagaaagtggacggtggctatgtccttaatgggaataagatgtggtgcaccaatggcccgtctgctcagacactggttgtttacgcaaaaacagatctagctgcagggtcaaaaggaataactgcattcataatcgagaaagggatgcccgggttcagtactgctcagaagttggacaaacttggcatgagaggaagcgacacgtgtgagcttgtttttgagaactgctttgtgccatgcgaaaatgtcctcggtgaagaaggcaaaggtgtttatgtcatgatgtcagggcttgatctggaaaggcttgtattagctgcgggccctattggccttatgcaggcatgccttgatgttgtacttccatatgttcgccagagggagcaattcggccgtccaattggtgaatttcagttcatacaggggaaaatggctgatatgtacacttcgttgcagtcgtcaagatcatttgtatactcagttgctagggactgcgataatggcaaagttgatcgcaaggattgtgcaggagtaattctctttgctgctgaaaatgcaacccaagttgcacttcaggcaatccagtgtcttggtggaaatgggtacataaatgagtacccaactggtcgtctcctgagagatgcaaaattgtttgagattggtgccggtactagtgaggtaagaagaatgataattggccgtgagctcttcaaagaggactgaaacttctattttgcaagccagatatcagagcatattgttagctggaggaggtgagggcgatttagatatttagcaaatcacccctgtggttcaatgcttttgtataaccgcagacatacatcaaataaagttcacttgtacttgctgcttgcagtggctctatttttctgtcaataaagttttttatgtctctgacttatgcaatgttgttcagttgcattttactatattagtgtagacaagacagtaatataaatgtttcaatgagtgc

SEQ ID NO: 9523 - protein, 407 aa, Zea mays subsp. mays
  peptide (1)..(407): Ceres Seq. ID no. 12374923
  misc_feature (255)..(404): Pfam Name: Acyl-CoA dehydrogenase, C-terminal domain Pfam Description: Acyl-CoA dehydrogenase, C-terminal domain
  misc_feature (24)..(407): Homolog of NCBI NO: 25090618 NR Description: Isovaleryl-CoA dehydrogenase, mitochondrial
  misc_feature (24)..(407): Homolog of NCBI NO: 15230664 NR Description: isovaleryl-CoA-dehydrogenase precursor (IVD); id: At3g45300.1, supported by cDNA: 33674., supported by cDNA: supported by cDNA: gi_5596621 [Arabidopsis thaliana]
  misc_feature (24)..(407): Homolog of NCBI NO: 17064982 NR Description: isovaleryl-CoA-dehydrogenase precursor (IVD)
  misc_feature (24)..(406): Homolog of NCBI NO: 5869965 NR Description: Isovaleryl-CoA Dehydrogenase; auxin binding
  misc_feature (24)..(406): Homolog of NCBI NO: 5869967 NR Description: auxin binding protein (ABP44); isovaleryl-CoA
  misc_feature (24)..(406): Homolog of NCBI NO: 25453061 NR Description: Isovaleryl-CoA dehydrogenase 2, mitochondrial
  misc_feature (24)..(405): Homolog of NCBI NO: 25453062 NR Description: Isovaleryl-CoA dehydrogenase 1, mitochondrial
  misc_feature (34)..(406): Homolog of NCBI NO: 23500935 NR Description: isovaleryl-CoA dehydrogenase [Brucella suis 1330]
  misc_feature (23)..(404): Homolog of NCBI NO: 22963587 NR Description: hypothetical protein [Rhodopseudomonas palustris]
  misc_feature (34)..(406): Homolog of NCBI NO: 17988206 NR Description: ISOVALERYL-COA DEHYDROGENASE [Brucella melitensis]
MQRWLPALLRRAAPGGGAARLLATSSLLFDDTQEQFKESVRKFAQEAIAPRAAAIDASNHFPRDVDLWRLMGDFNLHGLTAPEEYGGMGLGYMYHCIAMEEITRASGAVGLSYGAHSNLCINQLVRHGNPEQKLKYLPKLISGEHIGALAMSEPNSGSDVVSMKCKAEKVDGGYVLNGNKMWCTNGPSAQTLVVYAKTDLAAGSKGITAFIIEKGMPGFSTAQKLDKLGMRGSDTCELVFENCFVPCENVLGEEGKGVYVMMSGLDLERLVLAAGPIGLMQACLDVVLPYVRQREQFGRPIGEFQFIQGKMADMYTSLQSSRSFVYSVARDCDNGKVDRKDCAGVILFAAENATQVALQAIQCLGGNGYINEYPTGRLLRDAKLFEIGAGTSEVRRMIIGRELFKED

SEQ ID NO: 9524 - protein, 337 aa, Zea mays subsp. mays
  peptide (1)..(337): Ceres Seq. ID no. 12374924
  misc_feature (185)..(334): Pfam Name: Acyl-CoA dehydrogenase, C-terminal domain Pfam Description: Acyl-CoA dehydrogenase, C-terminal domain
  misc_feature (1)..(337): Homolog of NCBI NO: 25090618 NR Description: Isovaleryl-CoA dehydrogenase, mitochondrial
  misc_feature (1)..(337): Homolog of NCBI NO: 15230664 NR Description: isovaleryl-CoA-dehydrogenase precursor (IVD); id: At3g45300.1, supported by cDNA: 33674., supported by cDNA: supported by cDNA: gi_5596621 [Arabidopsis thaliana]
  misc_feature (1)..(337): Homolog of NCBI NO: 17064982 NR Description: isovaleryl-CoA-dehydrogenase precursor (IVD)
  misc_feature (1)..(336): Homolog of NCBI NO: 5869965 NR Description: Isovaleryl-CoA Dehydrogenase; auxin binding
  misc_feature (1)..(336): Homolog of NCBI NO: 5869967 NR Description: auxin binding protein (ABP44); isovaleryl-CoA
  misc_feature (1)..(336): Homolog of NCBI NO: 25453061 NR Description: Isovaleryl-CoA dehydrogenase 2, mitochondrial
  misc_feature (1)..(335): Homolog of NCBI NO: 25453062 NR Description: Isovaleryl-CoA dehydrogenase 1, mitochondrial
  misc_feature (1)..(336): Homolog of NCBI NO: 23500935 NR Description: isovaleryl-CoA dehydrogenase [Brucella suis 1330]
  misc_feature (1)..(334): Homolog of NCBI NO: 22963587 NR Description: hypothetical protein [Rhodopseudomonas palustris]
  misc_feature (1)..(336): Homolog of NCBI NO: 17988206 NR Description: ISOVALERYL-COA DEHYDROGENASE [Brucella melitensis]
MGDFNLHGLTAPEEYGGMGLGYMYHCIAMEEITRASGAVGLSYGAHSNLCINQLVRHGNPEQKLKYLPKLISGEHIGALAMSEPNSGSDVVSMKCKAEKVDGGYVLNGNKMWCTNGPSAQTLVVYAKTDLAAGSKGITAFIIEKGMPGFSTAQKLDKLGMRGSDTCELVFENCFVPCENVLGEEGKGVYVMMSGLDLERLVLAAGPIGLMQACLDVVLPYVRQREQFGRPIGEFQFIQGKMADMYTSLQSSRSFVYSVARDCDNGKVDRKDCAGVILFAAENATQVALQAIQCLGGNGYINEYPTGRLLRDAKLFEIGAGTSEVRRMIIGRELFKED

SEQ ID NO: 9525 - protein, 320 aa, Zea mays subsp. mays
  peptide (1)..(320): Ceres Seq. ID no. 12374925
  misc_feature (168)..(317): Pfam Name: Acyl-CoA dehydrogenase, C-terminal domain Pfam Description: Acyl-CoA dehydrogenase, C-terminal domain
  misc_feature (1)..(320): Homolog of NCBI NO: 25090618 NR Description: Isovaleryl-CoA dehydrogenase, mitochondrial
  misc_feature (1)..(320): Homolog of NCBI NO: 15230664 NR Description: isovaleryl-CoA-dehydrogenase precursor (IVD); id: At3g45300.1, supported by cDNA: 33674., supported by cDNA: supported by cDNA: gi_5596621 [Arabidopsis thaliana]
  misc_feature (1)..(320): Homolog of NCBI NO: 17064982 NR Description: isovaleryl-CoA-dehydrogenase precursor (IVD)
  misc_feature (1)..(319): Homolog of NCBI NO: 5869965 NR Description: Isovaleryl-CoA Dehydrogenase; auxin binding
  misc_feature (1)..(319): Homolog of NCBI NO: 5869967 NR Description: auxin binding protein (ABP44); isovaleryl-CoA
  misc_feature (1)..(319): Homolog of NCBI NO: 25453061 NR Description: Isovaleryl-CoA dehydrogenase 2, mitochondrial
  misc_feature (1)..(318): Homolog of NCBI NO: 25453062 NR Description: Isovaleryl-CoA dehydrogenase 1, mitochondrial
  misc_feature (1)..(319): Homolog of NCBI NO: 23500935 NR Description: isovaleryl-CoA dehydrogenase [Brucella suis 1330]
  misc_feature (1)..(317): Homolog of NCBI NO: 22963587 NR Description: hypothetical protein [Rhodopseudomonas palustris]
  misc_feature (1)..(319): Homolog of NCBI NO: 17988206 NR Description: ISOVALERYL-COA DEHYDROGENASE [Brucella melitensis]
MGLGYMYHCIAMEEITRASGAVGLSYGAHSNLCINQLVRHGNPEQKLKYLPKLISGEHIGALAMSEPNSGSDVVSMKCKAEKVDGGYVLNGNKMWCTNGPSAQTLVVYAKTDLAAGSKGITAFIIEKGMPGFSTAQKLDKLGMRGSDTCELVFENCFVPCENVLGEEGKGVYVMMSGLDLERLVLAAGPIGLMQACLDVVLPYVRQREQFGRPIGEFQFIQGKMADMYTSLQSSRSFVYSVARDCDNGKVDRKDCAGVILFAAENATQVALQAIQCLGGNGYINEYPTGRLLRDAKLFEIGAGTSEVRRMIIGRELFKED

SEQ ID NO: 9526 - DNA, 1058 bp, Zea mays subsp. mays
  misc_feature (1)..(1058): Ceres Seq. ID no. 12381373
  misc_feature: MA Experiment ID: 108504 Result: Down-regulated in Transcription
  misc_feature: MA Experiment 108504 PARAMETER Experiment Name: Zm_Drought_P Parameter: Age (day) Value: 8
  misc_feature: MA Experiment 108504 PARAMETER Experiment Name: Zm_Drought_P Parameter: Organism Value: Zea mays
  misc_feature: MA Experiment 108504 PARAMETER Experiment Name: Zm_Drought_P Parameter: Plant Line Value: 35A19
  misc_feature: MA Experiment 108504 PARAMETER Experiment Name: Zm_Drought_P Parameter: Timepoint (hr) Value: 12
  misc_feature: MA Experiment 108504 PARAMETER Experiment Name: Zm_Drought_P Parameter: Tissue Value: Aerial
  misc_feature: MA Experiment 108504 PARAMETER Experiment Name: Zm_Drought_P Parameter: Treatment Value: Drought vs. No Drought
  misc_feature: MA Experiment ID: 108543 Result: Up-regulated in Transcription
  misc_feature: MA Experiment ID: 108544 Result: Down-regulated in Transcription
  misc_feature: MA Experiment ID: 108556 Result: Down-regulated in Transcription
  misc_feature: MA Experiment 108556 PARAMETER Experiment Name: Zm_Drought_P Parameter: Age (day) Value: 9
  misc_feature: MA Experiment 108556 PARAMETER Experiment Name: Zm_Drought_P Parameter: Organism Value: Zea mays
  misc_feature: MA Experiment 108556 PARAMETER Experiment Name: Zm_Drought_P Parameter: Plant Line Value: 35A19
  misc_feature: MA Experiment 108556 PARAMETER Experiment Name: Zm_Drought_P Parameter: Timepoint (hr) Value: 24
  misc_feature: MA Experiment 108556 PARAMETER Experiment Name: Zm_Drought_P Parameter: Tissue Value: Aerial
  misc_feature: MA Experiment 108556 PARAMETER Experiment Name: Zm_Drought_P Parameter: Treatment Value: Drought vs. No Drought
  misc_feature: MA Experiment ID: 108597 Result: Down-regulated in Transcription
  misc_feature: MA Experiment 108597 PARAMETER Experiment Name: Zm_100uM_ABA_P Parameter: Age (day) Value: 9
  misc_feature: MA Experiment 108597 PARAMETER Experiment Name: Zm_100uM_ABA_P Parameter: Organism Value: Zea mays
  misc_feature: MA Experiment 108597 PARAMETER Experiment Name: Zm_100uM_ABA_P Parameter: Plant Line Value: 35A19
  misc_feature: MA Experiment 108597 PARAMETER Experiment Name: Zm_100uM_ABA_P Parameter: Timepoint (hr) Value: 24
  misc_feature: MA Experiment 108597 PARAMETER Experiment Name: Zm_100uM_ABA_P Parameter: Tissue Value: Aerial
  misc_feature: MA Experiment 108597 PARAMETER Experiment Name: Zm_100uM_ABA_P Parameter: Treatment Value: 100uM ABA vs. No Treatment
  misc_feature: MA Experiment ID: 108687 Result: Down-regulated in Transcription
  misc_feature: MA Experiment 108687 PARAMETER Experiment Name: Zm_Embryos-Flowers__P Parameter: Tissue Value: Embryo vs. Aerial+
  misc_feature: MA Experiment ID: 108689 Result: Down-regulated in Transcription
  misc_feature: MA Experiment 108689 PARAMETER Experiment Name: Zm_Drought_Roots_P Parameter: Age (day) Value: 9
  misc_feature: MA Experiment 108689 PARAMETER Experiment Name: Zm_Drought_Roots_P Parameter: Organism Value: Zea mays
  misc_feature: MA Experiment 108689 PARAMETER Experiment Name: Zm_Drought_Roots_P Parameter: Plant Line Value: 35A19
  misc_feature: MA Experiment 108689 PARAMETER Experiment Name: Zm_Drought_Roots_P Parameter: Timepoint (hr) Value: 24
  misc_feature: MA Experiment 108689 PARAMETER Experiment Name: Zm_Drought_Roots_P Parameter: Tissue Value: Roots
  misc_feature: MA Experiment 108689 PARAMETER Experiment Name: Zm_Drought_Roots_P Parameter: Treatment Value: Drought vs. No Drought
  misc_feature: MA Experiment ID: 20000478 Result: Down-regulated in Transcription
  misc_feature: MA Experiment 20000478 PARAMETER Experiment Name: Zm_5mM_SA_P Parameter: Age (day) Value: 11
  misc_feature: MA Experiment 20000478 PARAMETER Experiment Name: Zm_5mM_SA_P Parameter: Organism Value: Zea mays
  misc_feature: MA Experiment 20000478 PARAMETER Experiment Name: Zm_5mM_SA_P Parameter: Plant Line Value: 35A19
  misc_feature: MA Experiment 20000478 PARAMETER Experiment Name: Zm_5mM_SA_P Parameter: Timepoint (hr) Value: 72
  misc_feature: MA Experiment 20000478 PARAMETER Experiment Name: Zm_5mM_SA_P Parameter: Tissue Value: Aerial
  misc_feature: MA Experiment 20000478 PARAMETER Experiment Name: Zm_5mM_SA_P Parameter: Treatment Value: 5mM SA vs. No Treatment
  misc_feature: MA Experiment ID: 20000479 Result: Down-regulated in Transcription
  misc_feature: MA Experiment 20000479 PARAMETER Experiment Name: Zm_Drought_P Parameter: Age (day) Value: 10
  misc_feature: MA Experiment 20000479 PARAMETER Experiment Name: Zm_Drought_P Parameter: Organism Value: Zea mays
  misc_feature: MA Experiment 20000479 PARAMETER Experiment Name: Zm_Drought_P Parameter: Plant Line Value: 35A19
  misc_feature: MA Experiment 20000479 PARAMETER Experiment Name: Zm_Drought_P Parameter: Timepoint (hr) Value: 48
  misc_feature: MA Experiment 20000479 PARAMETER Experiment Name: Zm_Drought_P Parameter: Tissue Value: Aerial
  misc_feature: MA Experiment 20000479 PARAMETER Experiment Name: Zm_Drought_P Parameter: Treatment Value: Drought vs. No Drought
  misc_feature: MA Experiment ID: 20000535 Result: Down-regulated in Transcription
  misc_feature: MA Experiment 20000535 PARAMETER Experiment Name: Zm_Hybrid_Seed_Dev_P Parameter: DAP Value: 30 vs. 12
  misc_feature: MA Experiment 20000535 PARAMETER Experiment Name: Zm_Hybrid_Seed_Dev_P Parameter: Organism Value: Zea mays
  misc_feature: MA Experiment 20000535 PARAMETER Experiment Name: Zm_Hybrid_Seed_Dev_P Parameter: Plant Line Value: 35A19
  misc_feature: MA Experiment 20000535 PARAMETER Experiment Name: Zm_Hybrid_Seed_Dev_P Parameter: Tissue Value: Embryo vs. Unfert Floret
acacccttctactagagcagctgagctgagagtgacagcagcggagcggcaatggcgcagatgctcctcctcctcctcctccttgccgcacccacagtgccagcggaggcagcagccaccgcctccactccgacgctcgtgttcctcctggccgggcagtccaacatgggcggccgcggcggcgccaccaacggcacctgggacggcgtggtgccgcccgcgtgcgcgccttccccgcgcatcctccgcctctccccgtccctgcgctgggaggaggccagggagccgctgcacgccggcattgacctgcacaacgtgctcggcgtgggccccgggatgcccttcgcgcacgcgctcctccgctcctggcgccgctccggccgccgccccgccgtggtggggctggtcccctgcgcgcagggcgccacgcccatcgccagctggtcccgcggcacgccgctgtacgaccgcatgctcgcgcgcgcaagggccgccgtcgcccgcgggcccgccaccaggctggccgcgctgctctggtaccagggcgaggccgacaccatcaggcgccaggacgccgacgcctacacgccccgcatggaggccttggtccgcgacgtccgccgggacctgggcatgccggacctgctggtcatccaggtggggctggccacggggcagggcaggttcgtggacatcgtcagggaggcgcagaggagggtcagcctccgcaacgtcaggtacgtggacgccaagggcctgcccgtcgccaacgactacacgcatctgacaacgccggcgcaggtcaagctcggcaacatgctcgccgccgcctacatggcagcgacacacacgcactgactgagccatctactacctcgattcttaatcaattctacttgactactcagtaattgagccagcaagcagcaagcaacgctacgccgttctactttaattttgttctgcacatgtccttactatgcataacatcctttgctttgacgatgatgatttagcatcctttgatgatggtactcaaatagaatattcttcttttt

SEQ ID NO: 9527 - protein, 268 aa, Zea mays subsp. mays
  peptide (1)..(268): Ceres Seq. ID no. 12381374
  misc_feature (3)..(263): Homolog of NCBI NO: 30102977 NR Description: hypothetical protein [Oryza sativa (japonica
  misc_feature (1)..(262): Homolog of NCBI NO: 30102980 NR Description: unknown protein [Oryza sativa (japonica
  misc_feature (1)..(262): Homolog of NCBI NO: 38345580 NR Description: OSJNBa0027H06.16 [Oryza sativa (japonica
  misc_feature (30)..(263): Homolog of NCBI NO: 38347110 NR Description: OSJNBa0009K15.7 [Oryza sativa (japonica
  misc_feature (27)..(263): Homolog of NCBI NO: 21594009 NR Description: unknown [Arabidopsis thaliana]
  misc_feature (27)..(263): Homolog of NCBI NO: 18418402 NR Description: Expressed protein; protein id: At4g34215.1,
  misc_feature (7)..(203): Homolog of NCBI NO: 30693749 NR Description: expressed protein [Arabidopsis thaliana]
  misc_feature (27)..(206): Homolog of NCBI NO: 7488258 NR Description: protein kinase homolog F28A23.20 - Arabidopsis
  misc_feature (39)..(203): Homolog of NCBI NO: 11357879 NR Description: hypothetical protein F8J2.180 - Arabidopsis >gi|7529725|emb|CAB86905.1| putative protein [Arabidopsis
MAQMLLLLLLLAAPTVPAEAAATASTPTLVFLLAGQSNMGGRGGATNGTWDGVVPPACAPSPRILRLSPSLRWEEAREPLHAGIDLHNVLGVGPGMPFAHALLRSWRRSGRRPAVVGLVPCAQGATPIASWSRGTPLYDRMLARARAAVARGPATRLAALLWYQGEADTIRRQDADAYTPRMEALVRDVRRDLGMPDLLVIQVGLATGQGRFVDIVREAQRRVSLRNVRYVDAKGLPVANDYTHLTTPAQVKLGNMLAAAYMAATHTH

SEQ ID NO: 9528 - protein, 265 aa, Zea mays subsp. mays
  peptide (1)..(265): Ceres Seq. ID no. 12381375
  misc_feature (1)..(260): Homolog of NCBI NO: 30102977 NR Description: hypothetical protein [Oryza sativa (japonica
  misc_feature (1)..(259): Homolog of NCBI NO: 30102980 NR Description: unknown protein [Oryza sativa (japonica
  misc_feature (1)..(259): Homolog of NCBI NO: 38345580 NR Description: OSJNBa0027H06.16 [Oryza sativa (japonica
  misc_feature (27)..(260): Homolog of NCBI NO: 38347110 NR Description: OSJNBa0009K15.7 [Oryza sativa (japonica
  misc_feature (24)..(260): Homolog of NCBI NO: 21594009 NR Description: unknown [Arabidopsis thaliana]
  misc_feature (24)..(260): Homolog of NCBI NO: 18418402 NR Description: Expressed protein; protein id: At4g34215.1,
  misc_feature (4)..(200): Homolog of NCBI NO: 30693749 NR Description: expressed protein [Arabidopsis thaliana]
  misc_feature (24)..(203): Homolog of NCBI NO: 7488258 NR Description: protein kinase homolog F28A23.20 - Arabidopsis
  misc_feature (36)..(200): Homolog of NCBI NO: 11357879 NR Description: hypothetical protein F8J2.180 - Arabidopsis >gi|7529725|emb|CAB86905.1| putative protein [Arabidopsis
MLLLLLLLAAPTVPAEAAATASTPTLVFLLAGQSNMGGRGGATNGTWDGVVPPACAPSPRILRLSPSLRWEEAREPLHAGIDLHNVLGVGPGMPFAHALLRSWRRSGRRPAVVGLVPCAQGATPIASWSRGTPLYDRMLARARAAVARGPATRLAALLWYQGEADTIRRQDADAYTPRMEALVRDVRRDLGMPDLLVIQVGLATGQGRFVDIVREAQRRVSLRNVRYVDAKGLPVANDYTHLTTPAQVKLGNMLAAAYMAATHTH

SEQ ID NO: 9529 - protein, 261 aa, Zea mays subsp. mays
  peptide (1)..(261): Ceres Seq. ID no. 12381376
  misc_feature (45)..(261): Homolog of NCBI NO: 7248459 NR Description: arabinogalactan protein [Zea mays]
  misc_feature (22)..(210): Homolog of NCBI NO: 29828765 NR Description: putative protoporphyrinogen oxidase [Streptomyces
  misc_feature (31)..(259): Homolog of NCBI NO: 27375632 NR Description: blr0521 [Bradyrhizobium japonicum]
  misc_feature (39)..(256): Homolog of NCBI NO: 27375632 NR Description: blr0521 [Bradyrhizobium japonicum]
  misc_feature (1)..(201): Homolog of NCBI NO: 3044086 NR Description: unknown [Myxococcus xanthus]
  misc_feature (31)..(254): Homolog of NCBI NO: 27375632 NR Description: blr0521 [Bradyrhizobium japonicum]
  misc_feature (107)..(220): Homolog of NCBI NO: 12862550 NR Description: alpha-amylase [Drosophila melanogaster]
  misc_feature (22)..(206): Homolog of NCBI NO: 23017082 NR Description: hypothetical protein [Thermobifida fusca]
  misc_feature (51)..(256): Homolog of NCBI NO: 19553189 NR Description: translation initiation factor 2 [Corynebacterium ATCC 13032] >gi|21324755|dbj|BAB99378.1| Translation initiation
  misc_feature (39)..(201): Homolog of NCBI NO: 9629749 NR Description: 24 [Equine herpesvirus 4]
HPSTRAAELRVTAAERQWRRCSSSSSSLPHPQCQRRQQPPPPLRRSCSSWPGSPTWAAAAAPPTAPGTAWCRPRARLPRASSASPRPCAGRRPGSRCTPALTCTTCSAWAPGCPSRTRSSAPGAAPAAAPPWWGWSPARRAPRPSPAGPAARRCTTACSRAQGPPSPAGPPPGWPRCSGTRARPTPSGARTPTPTRPAWRPWSATSAGTWACRTCWSSRWGWPRGRAGSWTSSGRRRGGSASATSGTWTPRACPSPTTTRI

SEQ ID NO: 9530 - DNA, 1784 bp, Zea mays subsp. mays
  misc_feature (1)..(1784): Ceres Seq. ID no. 12414416
  misc_feature: MA Experiment ID: 20000492 Result: Down-regulated in Transcription
  misc_feature: MA Experiment 20000492 PARAMETER Experiment Name: Zm_Hybrid_Seed_Dev_P Parameter: DAP Value: 12
  misc_feature: MA Experiment 20000492 PARAMETER Experiment Name: Zm_Hybrid_Seed_Dev_P Parameter: Organism Value: Zea mays
  misc_feature: MA Experiment 20000492 PARAMETER Experiment Name: Zm_Hybrid_Seed_Dev_P Parameter: Plant Line Value: 35A19
  misc_feature: MA Experiment 20000492 PARAMETER Experiment Name: Zm_Hybrid_Seed_Dev_P Parameter: Tissue Value: Fert Kernel vs. Unfert Floret
gcacgagaccattacctagaacatcctaatcaaaaaaccacactctcgtctccctcctccccgttccttattcgccagaccggagggaggggtacgagcttcaccgctttcatcccgcccgcgctcctccccagatctcgtctccattaaagccgaccttgcccagattcgcgccctcctcgctcatatctgaaagcggctctgattttccaatccgaccgcaggagcggtgcaccgggccgcgtgattccggcggcttgatttggaatttgtgatctttcggggcattcgtcggtttgtctgtcggtgccggtggtgctgcgttttcgagggcagcgaagatgggtgtcggcggagagaagttccagctggggacggtgggggcgctgagcctatccgtggtctcctccgtctccattgtcatctgcaacaaggccctcatgagctccctcggctttaacttcgccactaccttgacaagctggcatctgctggttacattctgctcccttcatgtggcattatggatgaaattctttgagcataagccttttgattcaagaactgtcatgggatttggagtacttaatggaatctccattgggctcctcaacttgagtcttggcttcaactctgttgggttttaccagatgactaagctggcgatcatcccgtgcactgtcatcttagagacacttttcttcaggaagaagttcagtcggagtatccagatgtccctttctgtgctccttcttggtgttggtgttgcaactgtcactgatctgcaactcaatgctgtgggatccatactctccttgctggcaattatcacgacttgcattgctcaaattatgacaaacactatccagaagaagttcaaggtctcatcgacccaactgctctaccagtcttgcccttatcaatcactgaccctgtttctcattggccccttccttgatggctttttgactaaccaaaacgtctttgcttttaattatacatcacaagttgtgtttttcattgtgttgtcatgcctgatatcggtctcagtgaacttcagcacttttcttgtgattggaaagacgtctcctgttacttaccaagtcctgggccatcttaaaacatgccttgttcttacctttggttatgttttgcttcatgacccatttagctggagaaacatacttgggatcctaattgcagtagttggaatggtcttatattcatacttctgcacagtggagacccagcataagaacactgaagtctccccacagcaggtgaaagaaagtgaggcagcccctttgatctcagactctttgagcaaagttgaaaatgggggcggtgttgttgatgacgagcctttgaaggtacccatgtggagctcaaagtattcgcgggagtgaaattttctcccgctagacggtggcatcatacaggattcagtttagtaggcagatagtagggttggaagccaacccagagtgtaatgaacatttgagttacattttttggccttttttagcgtcacgatctactactggtaaaagggtctgtttcttgggaggatcttaccttcaggattgccagatatacattgaaactagacggcagatattgtatgatttgtatctggacatgttccacatcgtctaactgtaacttccaactggtacatggcatgcctatatccaaagatagatttcatttttttttgtatcagaaagatccggacaagacttgtgcaaaatttgtagtactattggttcgagtttgttgctttc

SEQ ID NO: 9531 - protein, 354 aa, Zea mays subsp. mays
  peptide (1)..(354): Ceres Seq. ID no. 12414417
  misc_feature (1)..(353): Homolog of NCBI NO: 34896140 NR Description: P0701D05.25 [Oryza sativa (japonica >gi|13486667|dbj|BAB39904.1| contains ESTs
  misc_feature (5)..(349): Homolog of NCBI NO: 22329373 NR Description: unknown protein; protein id: At1g06890.1, by cDNA: gi_19423945 [Arabidopsis thaliana] unknown protein [Arabidopsis thaliana]
  misc_feature (6)..(349): Homolog of NCBI NO: 27311731 NR Description: putative integral membrane protein [Arabidopsis
  misc_feature (6)..(323): Homolog of NCBI NO: 30683853 NR Description: transporter-related [Arabidopsis thaliana]
  misc_feature (5)..(335): Homolog of NCBI NO: 13384378 NR Description: putative phosphate translocator [Oryza sativa
  misc_feature (104)..(349): Homolog of NCBI NO: 25406945 NR Description: hypothetical protein [imported] - Arabidopsis >gi|7523696|gb|AAF63135.1|AC011001_5 Hypothetical protein
  misc_feature (104)..(335): Homolog of NCBI NO: 37535412 NR Description: putative
  misc_feature (5)..(82): Homolog of NCBI NO: 37535412 NR Description: putative
  misc_feature (6)..(331): Homolog of NCBI NO: 18411172 NR Description: expressed protein; protein id: At1g76670.1, by cDNA: gi_14532697, supported by cDNA: gi_16604379, supported cDNA: gi_18491194 [Arabidopsis thaliana] >gi|25354481|pir||A96795
  misc_feature (1)..(353): Homolog of NCBI NO: 13699188 NR Description: putative glucose-6-phosphate/phosphate-tranlocat
  misc_feature (1)..(353): Homolog of NCBI NO: 13699188 NR Description: putative glucose-6-phosphate/phosphate-tranlocat
  misc_feature (1)..(353): Homolog of NCBI NO: 34896140 NR Description: P0701D05.25 [Oryza sativa (japonica >gi|13486667|dbj|BAB39904.1| contains ESTs
  misc_feature (5)..(349): Homolog of NCBI NO: 22329373 NR Description: unknown protein; protein id: At1g06890.1, by cDNA: gi_19423945 [Arabidopsis thaliana] unknown protein [Arabidopsis thaliana]
  misc_feature (6)..(349): Homolog of NCBI NO: 27311731 NR Description: putative integral membrane protein [Arabidopsis
  misc_feature (6)..(323): Homolog of NCBI NO: 30683853 NR Description: transporter-related [Arabidopsis thaliana]
  misc_feature (5)..(335): Homolog of NCBI NO: 13384378 NR Description: putative phosphate translocator [Oryza sativa
  misc_feature (104)..(349): Homolog of NCBI NO: 25406945 NR Description: hypothetical protein [imported] - Arabidopsis >gi|7523696|gb|AAF63135.1|AC011001_5 Hypothetical protein
  misc_feature (104)..(335): Homolog of NCBI NO: 37535412 NR Description: putative
  misc_feature (5)..(82): Homolog of NCBI NO: 37535412 NR Description: putative
  misc_feature (6)..(331): Homolog of NCBI NO: 18411172 NR Description: expressed protein; protein id: At1g76670.1, by cDNA: gi_14532697, supported by cDNA: gi_16604379, supported cDNA: gi_18491194 [Arabidopsis thaliana] >gi|25354481|pir||A96795
MGVGGEKFQLGTVGALSLSVVSSVSIVICNKALMSSLGFNFATTLTSWHLLVTFCSLHVALWMKFFEHKPFDSRTVMGFGVLNGISIGLLNLSLGFNSVGFYQMTKLAIIPCTVILETLFFRKKFSRSIQMSLSVLLLGVGVATVTDLQLNAVGSILSLLAIITTCIAQIMTNTIQKKFKVSSTQLLYQSCPYQSLTLFLIGPFLDGFLTNQNVFAFNYTSQVVFFIVLSCLISVSVNFSTFLVIGKTSPVTYQVLGHLKTCLVLTFGYVLLHDPFSWRNILGILIAVVGMVLYSYFCTVETQHKNTEVSPQQVKESEAAPLISDSLSKVENGGGVVDDEPLKVPMWSSKYSRE

SEQ ID NO: 9532 - protein, 321 aa, Zea mays subsp. mays
  peptide (1)..(321): Ceres Seq. ID no. 12414418
  misc_feature (1)..(320): Homolog of NCBI NO: 13699188 NR Description: putative glucose-6-phosphate/phosphate-tranlocat
  misc_feature (1)..(320): Homolog of NCBI NO: 34896140 NR Description: P0701D05.25 [Oryza sativa (japonica >gi|13486667|dbj|BAB39904.1| contains ESTs
  misc_feature (1)..(316): Homolog of NCBI NO: 22329373 NR Description: unknown protein; protein id: At1g06890.1, by cDNA: gi_19423945 [Arabidopsis thaliana] unknown protein [Arabidopsis thaliana]
  misc_feature (1)..(316): Homolog of NCBI NO: 27311731 NR Description: putative integral membrane protein [Arabidopsis
  misc_feature (1)..(290): Homolog of NCBI NO: 30683853 NR Description: transporter-related [Arabidopsis thaliana]
  misc_feature (1)..(302): Homolog of NCBI NO: 13384378 NR Description: putative phosphate translocator [Oryza sativa
  misc_feature (71)..(316): Homolog of NCBI NO: 25406945 NR Description: hypothetical protein [imported] - Arabidopsis >gi|7523696|gb|AAF63135.1|AC011001_5 Hypothetical protein
  misc_feature (71)..(302): Homolog of NCBI NO: 37535412 NR Description: putative
  misc_feature (1)..(49): Homolog of NCBI NO: 37535412 NR Description: putative
  misc_feature (1)..(298): Homolog of NCBI NO: 18411172 NR Description: expressed protein; protein id: At1g76670.1, by cDNA: gi_14532697, supported by cDNA: gi_16604379, supported cDNA: gi_18491194 [Arabidopsis thaliana] >gi|25354481|pir||A96795
  misc_feature (1)..(320): Homolog of NCBI NO: 13699188 NR Description: putative glucose-6-phosphate/phosphate-tranlocat
  misc_feature (1)..(320): Homolog of NCBI NO: 34896140 NR Description: P0701D05.25 [Oryza sativa (japonica >gi|13486667|dbj|BAB39904.1| contains ESTs
  misc_feature (1)..(316): Homolog of NCBI NO: 22329373 NR Description: unknown protein; protein id: At1g06890.1, by cDNA: gi_19423945 [Arabidopsis thaliana] unknown protein [Arabidopsis thaliana]
  misc_feature (1)..(316): Homolog of NCBI NO: 27311731 NR Description: putative integral membrane protein [Arabidopsis
  misc_feature (1)..(290): Homolog of NCBI NO: 30683853 NR Description: transporter-related [Arabidopsis thaliana]
  misc_feature (1)..(302): Homolog of NCBI NO: 13384378 NR Description: putative phosphate translocator [Oryza sativa
  misc_feature (71)..(316): Homolog of NCBI NO: 25406945 NR Description: hypothetical protein [imported] - Arabidopsis >gi|7523696|gb|AAF63135.1|AC011001_5 Hypothetical protein
  misc_feature (71)..(302): Homolog of NCBI NO: 37535412 NR Description: putative
  misc_feature (1)..(49): Homolog of NCBI NO: 37535412 NR Description: putative
  misc_feature (1)..(298): Homolog of NCBI NO: 18411172 NR Description: expressed protein; protein id: At1g76670.1, by cDNA: gi_14532697, supported by cDNA: gi_16604379, supported cDNA: gi_18491194 [Arabidopsis thaliana] >gi|25354481|pir||A96795
MSSLGFNFATTLTSWHLLVTFCSLHVALWMKFFEHKPFDSRTVMGFGVLNGISIGLLNLSLGFNSVGFYQMTKLAIIPCTVILETLFFRKKFSRSIQMSLSVLLLGVGVATVTDLQLNAVGSILSLLAIITTCIAQIMTNTIQKKFKVSSTQLLYQSCPYQSLTLFLIGPFLDGFLTNQNVFAFNYTSQVVFFIVLSCLISVSVNFSTFLVIGKTSPVTYQVLGHLKTCLVLTFGYVLLHDPFSWRNILGILIAVVGMVLYSYFCTVETQHKNTEVSPQQVKESEAAPLISDSLSKVENGGGVVDDEPLKVPMWSSKYSRE

SEQ ID NO: 9533 - protein, 292 aa, Zea mays subsp. mays
  peptide (1)..(292): Ceres Seq. ID no. 12414419
  misc_feature (1)..(291): Homolog of NCBI NO: 13699188 NR Description: putative glucose-6-phosphate/phosphate-tranlocat
  misc_feature (1)..(291): Homolog of NCBI NO: 34896140 NR Description: P0701D05.25 [Oryza sativa (japonica >gi|13486667|dbj|BAB39904.1| contains ESTs
  misc_feature (1)..(287): Homolog of NCBI NO: 22329373 NR Description: unknown protein; protein id: At1g06890.1, by cDNA: gi_19423945 [Arabidopsis thaliana] unknown protein [Arabidopsis thaliana]
  misc_feature (1)..(287): Homolog of NCBI NO: 27311731 NR Description: putative integral membrane protein [Arabidopsis
  misc_feature (1)..(261): Homolog of NCBI NO: 30683853 NR Description: transporter-related [Arabidopsis thaliana]
  misc_feature (1)..(273): Homolog of NCBI NO: 13384378 NR Description: putative phosphate translocator [Oryza sativa
  misc_feature (42)..(287): Homolog of NCBI NO: 25406945 NR Description: hypothetical protein [imported] - Arabidopsis >gi|7523696|gb|AAF63135.1|AC011001_5 Hypothetical protein
  misc_feature (42)..(273): Homolog of NCBI NO: 37535412 NR Description: putative
  misc_feature (1)..(20): Homolog of NCBI NO: 37535412 NR Description: putative
  misc_feature (1)..(269): Homolog of NCBI NO: 18411172 NR Description: expressed protein; protein id: At1g76670.1, by cDNA: gi_14532697, supported by cDNA: gi_16604379, supported cDNA: gi_18491194 [Arabidopsis thaliana] >gi|25354481|pir||A96795
  misc_feature (1)..(291): Homolog of NCBI NO: 13699188 NR Description: putative glucose-6-phosphate/phosphate-tranlocat
  misc_feature (1)..(291): Homolog of NCBI NO: 34896140 NR Description: P0701D05.25 [Oryza sativa (japonica >gi|13486667|dbj|BAB39904.1| contains ESTs
  misc_feature (1)..(287): Homolog of NCBI NO: 22329373 NR Description: unknown protein; protein id: At1g06890.1, by cDNA: gi_19423945 [Arabidopsis thaliana] unknown protein [Arabidopsis thaliana]
  misc_feature (1)..(287): Homolog of NCBI NO: 27311731 NR Description: putative integral membrane protein [Arabidopsis
  misc_feature (1)..(261): Homolog of NCBI NO: 30683853 NR Description: transporter-related [Arabidopsis thaliana]
  misc_feature (1)..(273): Homolog of NCBI NO: 13384378 NR Description: putative phosphate translocator [Oryza sativa
  misc_feature (42)..(287): Homolog of NCBI NO: 25406945 NR Description: hypothetical protein [imported] - Arabidopsis >gi|7523696|gb|AAF63135.1|AC011001_5 Hypothetical protein
  misc_feature (42)..(273): Homolog of NCBI NO: 37535412 NR Description: putative
  misc_feature (1)..(20): Homolog of NCBI NO: 37535412 NR Description: putative
  misc_feature (1)..(269): Homolog of NCBI NO: 18411172 NR Description: expressed protein; protein id: At1g76670.1, by cDNA: gi_14532697, supported by cDNA: gi_16604379, supported cDNA: gi_18491194 [Arabidopsis thaliana] >gi|25354481|pir||A96795
MKFFEHKPFDSRTVMGFGVLNGISIGLLNLSLGFNSVGFYQMTKLAIIPCTVILETLFFRKKFSRSIQMSLSVLLLGVGVATVTDLQLNAVGSILSLLAIITTCIAQIMTNTIQKKFKVSSTQLLYQSCPYQSLTLFLIGPFLDGFLTNQNVFAFNYTSQVVFFIVLSCLISVSVNFSTFLVIGKTSPVTYQVLGHLKTCLVLTFGYVLLHDPFSWRNILGILIAVVGMVLYSYFCTVETQHKNTEVSPQQVKESEAAPLISDSLSKVENGGGVVDDEPLKVPMWSSKYSRE

SEQ ID NO: 9534 - DNA, 878 bp, Zea mays subsp. mays
  misc_feature (1)..(878): Ceres Seq. ID no. 12435195
  misc_feature: MA Experiment ID: 108504 Result: Up-regulated in Transcription
  misc_feature: MA Experiment 108504 PARAMETER Experiment Name: Zm_Drought_P Parameter: Age (day) Value: 8
  misc_feature: MA Experiment 108504 PARAMETER Experiment Name: Zm_Drought_P Parameter: Organism Value: Zea mays
  misc_feature: MA Experiment 108504 PARAMETER Experiment Name: Zm_Drought_P Parameter: Plant Line Value: 35A19
  misc_feature: MA Experiment 108504 PARAMETER Experiment Name: Zm_Drought_P Parameter: Timepoint (hr) Value: 12
  misc_feature: MA Experiment 108504 PARAMETER Experiment Name: Zm_Drought_P Parameter: Tissue Value: Aerial
  misc_feature: MA Experiment 108504 PARAMETER Experiment Name: Zm_Drought_P Parameter: Treatment Value: Drought vs. No Drought
  misc_feature: MA Experiment ID: 108522 Result: Up-regulated in Transcription
  misc_feature: MA Experiment 108522 PARAMETER Experiment Name: Zm_42deg_Heat_P Parameter: Age (day) Value: 8
  misc_feature: MA Experiment 108522 PARAMETER Experiment Name: Zm_42deg_Heat_P Parameter: Organism Value: Zea mays
  misc_feature: MA Experiment 108522 PARAMETER Experiment Name: Zm_42deg_Heat_P Parameter: Plant Line Value: 35A19
  misc_feature: MA Experiment 108522 PARAMETER Experiment Name: Zm_42deg_Heat_P Parameter: Temperature (deg C) Value: 42 vs. 22
  misc_feature: MA Experiment 108522 PARAMETER Experiment Name: Zm_42deg_Heat_P Parameter: Timepoint (hr) Value: 1
  misc_feature: MA Experiment 108522 PARAMETER Experiment Name: Zm_42deg_Heat_P Parameter: Tissue Value: Aerial
  misc_feature: MA Experiment ID: 108523 Result: Up-regulated in Transcription
  misc_feature: MA Experiment 108523 PARAMETER Experiment Name: Zm_42deg_Heat_P Parameter: Age (day) Value: 8
  misc_feature: MA Experiment 108523 PARAMETER Experiment Name: Zm_42deg_Heat_P Parameter: Organism Value: Zea mays
  misc_feature: MA Experiment 108523 PARAMETER Experiment Name: Zm_42deg_Heat_P Parameter: Plant Line Value: 35A19
  misc_feature: MA Experiment 108523 PARAMETER Experiment Name: Zm_42deg_Heat_P Parameter: Temperature (deg C) Value: 42 vs. 22
  misc_feature: MA Experiment 108523 PARAMETER Experiment Name: Zm_42deg_Heat_P Parameter: Timepoint (hr) Value: 6
  misc_feature: MA Experiment 108523 PARAMETER Experiment Name: Zm_42deg_Heat_P Parameter: Tissue Value: Aerial
  misc_feature: MA Experiment ID: 108527 Result: Up-regulated in Transcription
  misc_feature: MA Experiment 108527 PARAMETER Experiment Name: Zm_5mM_NO_P Parameter: Age (day) Value: 8
  misc_feature: MA Experiment 108527 PARAMETER Experiment Name: Zm_5mM_NO_P Parameter: Organism Value: Zea mays
  misc_feature: MA Experiment 108527 PARAMETER Experiment Name: Zm_5mM_NO_P Parameter: Plant Line Value: 35A19
  misc_feature: MA Experiment 108527 PARAMETER Experiment Name: Zm_5mM_NO_P Parameter: Timepoint (hr) Value: 6
  misc_feature: MA Experiment 108527 PARAMETER Experiment Name: Zm_5mM_NO_P Parameter: Tissue Value: Aerial
  misc_feature: MA Experiment 108527 PARAMETER Experiment Name: Zm_5mM_NO_P Parameter: Treatment Value: 5mM NO vs. No Treatment
  misc_feature: MA Experiment ID: 108534 Result: Up-regulated in Transcription
  misc_feature: MA Experiment 108534 PARAMETER Experiment Name: Zm_4deg_Cold_P Parameter: Age (hr) Value: 8
  misc_feature: MA Experiment 108534 PARAMETER Experiment Name: Zm_4deg_Cold_P Parameter: Organism Value: Zea mays
  misc_feature: MA Experiment 108534 PARAMETER Experiment Name: Zm_4deg_Cold_P Parameter: Plant Line Value: 35A19
  misc_feature: MA Experiment 108534 PARAMETER Experiment Name: Zm_4deg_Cold_P Parameter: Temperature (deg C) Value: 4 vs. 22
  misc_feature: MA Experiment 108534 PARAMETER Experiment Name: Zm_4deg_Cold_P Parameter: Timepoint (hr) Value: 6
  misc_feature: MA Experiment 108534 PARAMETER Experiment Name: Zm_4deg_Cold_P Parameter: Tissue Value: Aerial
  misc_feature: MA Experiment ID: 108536 Result: Up-regulated in Transcription
  misc_feature: MA Experiment 108536 PARAMETER Experiment Name: Zm_Meristem_P Parameter: Age (day) Value: 8
  misc_feature: MA Experiment 108536 PARAMETER Experiment Name: Zm_Meristem_P Parameter: Organism Value: Zea mays
  misc_feature: MA Experiment 108536 PARAMETER Experiment Name: Zm_Meristem_P Parameter: Plant Line Value: 35A19
  misc_feature: MA Experiment 108536 PARAMETER Experiment Name: Zm_Meristem_P Parameter: Tissue Value: Shoot Meristem vs. Above Shoot Meristem
  misc_feature: MA Experiment ID: 108547 Result: Up-regulated in Transcription
  misc_feature: MA Experiment 108547 PARAMETER Experiment Name: Zm_Imbibed_Seeds_P Parameter: Age (day) Value: 4 vs. 2
  misc_feature: MA Experiment 108547 PARAMETER Experiment Name: Zm_Imbibed_Seeds_P Parameter: Organism Value: Zea mays
  misc_feature: MA Experiment 108547 PARAMETER Experiment Name: Zm_Imbibed_Seeds_P Parameter: Plant Line Value: 35A19
  misc_feature: MA Experiment 108547 PARAMETER Experiment Name: Zm_Imbibed_Seeds_P Parameter: Tissue Value: Aerial vs. Embryo
  misc_feature: MA Experiment ID: 108556 Result: Up-regulated in Transcription
  misc_feature: MA Experiment 108556 PARAMETER Experiment Name: Zm_Drought_P Parameter: Age (day) Value: 9
  misc_feature: MA Experiment 108556 PARAMETER Experiment Name: Zm_Drought_P Parameter: Organism Value: Zea mays
  misc_feature: MA Experiment 108556 PARAMETER Experiment Name: Zm_Drought_P Parameter: Plant Line Value: 35A19
  misc_feature: MA Experiment 108556 PARAMETER Experiment Name: Zm_Drought_P Parameter: Timepoint (hr) Value: 24
  misc_feature: MA Experiment 108556 PARAMETER Experiment Name: Zm_Drought_P Parameter: Tissue Value: Aerial
  misc_feature: MA Experiment 108556 PARAMETER Experiment Name: Zm_Drought_P Parameter: Treatment Value: Drought vs. No Drought
  misc_feature: MA Experiment ID: 108688 Result: Down-regulated in Transcription
  misc_feature: MA Experiment 108688 PARAMETER Experiment Name: Zm_Embryos-Flowers__P Parameter: Tissue Value: Immature Flowers vs. Aerial+
acaaccatcaggacgcggacgcggacgcggctcacatcaaacacccccttcagctgtgctcagtgctcactgccgcaaaaccacagccacacaggcaacaagcgcccagcgccctttcacatcaccacatccaccgtccacgctcctccgttccatggccatgtcgagcagcgccagcaagaagcaagcccaggcccagaaggccgggcggaggcccccggcggtgtcgtcggccgcggccgcggacgcggagatgcagagggtgttctcgcgcatcgacgcggacggcgacgggcggatctcgccgtcggagctggcggcggtgtcgcgcgccatctccccgccggcgagctcctcgcacgggcggcgcgaggtggcggccatgatggaggagctggacacggaccgcgacggcttcgtggacctgggcgagttcagggcgttccacgcgcgcggcgttggcggcggcggggacgacgacgacgacgcggagctccgcgccgccttcgccgtgtacgacgccgacggcgacgggcgcatcacggcggccgagctgggcagcgtgctcgcccgcatcggcgaggggtgcagcgccgaggagtgccgccggatgatcgccggcgtcgacgccgacggcgacggctgcgtcgggttcgaggagttcaagatcatgatgcgcggcccccagccccagccccagccccaggccggcgccggactgactgccgtgccggacaaggccaagaaggagtgacgggtgtaggtgtaggtgtactcatcagggcatcagtcgggggggaaagggatcgggttcctctgcctcttctgttgctttcacctagtctggactggaggaatggaaatactcaacttcctgc

SEQ ID NO: 9535 - protein, 292 aa, Zea mays subsp. mays
  peptide (1)..(292): Ceres Seq. ID no. 12435196
  misc_feature (150)..(215): Pfam Name: TT viral orf 1 Pfam Description: TT viral orf 1
TTIRTRTRTRLTSNTPFSCAQCSLPQNHSHTGNKRPAPFHITTSTVHAPPFHGHVEQRQQEASPGPEGRAEAPGGVVGRGRGRGDAEGVLAHRRGRRRADLAVGAGGGVARHLPAGELLARAARGGGHDGGAGHGPRRLRGPGRVQGVPRARRWRRRGRRRRRGAPRRLRRVRRRRRRAHHGGRAGQRARPHRRGVQRRGVPPDDRRRRRRRRRLRRVRGVQDHDARPPAPAPAPGRRRTDCRAGQGQEGVTGVGVGVLIRASVGGERDRVPLPLLLLSPSLDWRNGNTQLP

SEQ ID NO: 9536 - protein, 250 aa, Zea mays subsp. mays
  peptide (1)..(250): Ceres Seq. ID no. 12435197
  misc_feature (124)..(152): Pfam Name: EF hand Pfam Description: EF hand
  misc_feature (48)..(225): Homolog of NCBI NO: 34895640 NR Description: OSJNBa0083M16.33 [Oryza sativa (japonica
  misc_feature (75)..(225): Homolog of NCBI NO: 15240340 NR Description: CALMODULIN-RELATED PROTEIN 2, TOUCH-INDUCED protein id: At5g37770.1, supported by cDNA: 25475. [Arabidopsis
  misc_feature (48)..(227): Homolog of NCBI NO: 19386815 NR Description: B1147A04.10 [Oryza sativa (japonica
  misc_feature (52)..(225): Homolog of NCBI NO: 14589311 NR Description: calcium binding protein [Sesbania rostrata]
  misc_feature (84)..(234): Homolog of NCBI NO: 6901654 NR Description: calcium-binding protein [Olea europaea]
  misc_feature (84)..(225): Homolog of NCBI NO: 21618074 NR Description: calmodulin-related protein [Arabidopsis thaliana]
  misc_feature (84)..(234): Homolog of NCBI NO: 14423648 NR Description: Calcium-binding allergen Ole e 8 (PCA18/PCA23)
  misc_feature (84)..(225): Homolog of NCBI NO: 18408502 NR Description: calmodulin-related protein; protein id: supported by cDNA: 95959., supported by cDNA: gi_17380757
  misc_feature (38)..(227): Homolog of NCBI NO: 21740787 NR Description: OSJNBb0091E11.1 [Oryza sativa (japonica
  misc_feature (63)..(225): Homolog of NCBI NO: 15221030 NR Description: calcium-binding protein, putative; protein id: supported by cDNA: 19462., supported by cDNA: gi_15027896, by cDNA: gi_19310788 [Arabidopsis thaliana]
QPSGRGRGRGSHQTPPSAVLSAHCRKTTATQATSAQRPFTSPHPPSTLLRSMAMSSSASKKQAQAQKAGRRPPAVSSAAAADAEMQRVFSRIDADGDGRISPSELAAVSRAISPPASSSHGRREVAAMMEELDTDRDGFVDLGEFRAFHARGVGGGGDDDDDAELRAAFAVYDADGDGRITAAELGSVLARIGEGCSAEECRRMIAGVDADGDGCVGFEEFKIMMRGPQPQPQPQAGAGLTAVPDKAKKE

SEQ ID NO: 9537 - protein, 199 aa, Zea mays subsp. mays
  peptide (1)..(199): Ceres Seq. ID no. 12435198
  misc_feature (73)..(101): Pfam Name: EF hand Pfam Description: EF hand
  misc_feature (24)..(174): Homolog of NCBI NO: 15240340 NR Description: CALMODULIN-RELATED PROTEIN 2, TOUCH-INDUCED protein id: At5g37770.1, supported by cDNA: 25475. [Arabidopsis
  misc_feature (1)..(176): Homolog of NCBI NO: 19386815 NR Description: B1147A04.10 [Oryza sativa (japonica
  misc_feature (1)..(174): Homolog of NCBI NO: 14589311 NR Description: calcium binding protein [Sesbania rostrata]
  misc_feature (33)..(183): Homolog of NCBI NO: 6901654 NR Description: calcium-binding protein [Olea europaea]
  misc_feature (33)..(174): Homolog of NCBI NO: 21618074 NR Description: calmodulin-related protein [Arabidopsis thaliana]
  misc_feature (1)..(174): Homolog of NCBI NO: 34895640 NR Description: OSJNBa0083M16.33 [Oryza sativa (japonica
  misc_feature (33)..(183): Homolog of NCBI NO: 14423648 NR Description: Calcium-binding allergen Ole e 8 (PCA18/PCA23)
  misc_feature (33)..(174): Homolog of NCBI NO: 18408502 NR Description: calmodulin-related protein; protein id: supported by cDNA: 95959., supported by cDNA: gi_17380757
  misc_feature (1)..(176): Homolog of NCBI NO: 21740787 NR Description: OSJNBb0091E11.1 [Oryza sativa (japonica
  misc_feature (12)..(174): Homolog of NCBI NO: 15221030 NR Description: calcium-binding protein, putative; protein id: supported by cDNA: 19462., supported by cDNA: gi_15027896, by cDNA: gi_19310788 [Arabidopsis thaliana]
MAMSSSASKKQAQAQKAGRRPPAVSSAAAADAEMQRVFSRIDADGDGRISPSELAAVSRAISPPASSSHGRREVAAMMEELDTDRDGFVDLGEFRAFHARGVGGGGDDDDDAELRAAFAVYDADGDGRITAAELGSVLARIGEGCSAEECRRMIAGVDADGDGCVGFEEFKIMMRGPQPQPQPQAGAGLTAVPDKAKKE

SEQ ID NO: 9538 - DNA, 807 bp, Zea mays subsp. mays
  misc_feature (1)..(807): Ceres Seq. ID no. 13496185
  misc_feature: MA Experiment ID: 108535 Result: Up-regulated in Transcription
  misc_feature: MA Experiment 108535 PARAMETER Experiment Name: Zm_Meristem_P Parameter: Age (day) Value: 8
  misc_feature: MA Experiment 108535 PARAMETER Experiment Name: Zm_Meristem_P Parameter: Organism Value: Zea mays
  misc_feature: MA Experiment 108535 PARAMETER Experiment Name: Zm_Meristem_P Parameter: Plant Line Value: 35A19
  misc_feature: MA Experiment 108535 PARAMETER Experiment Name: Zm_Meristem_P Parameter: Tissue Value: Root Meristem vs. Above Root Meristem
  misc_feature: MA Experiment ID: 108544 Result: Down-regulated in Transcription
  misc_feature: MA Experiment ID: 108556 Result: Down-regulated in Transcription
  misc_feature: MA Experiment 108556 PARAMETER Experiment Name: Zm_Drought_P Parameter: Age (day) Value: 9
  misc_feature: MA Experiment 108556 PARAMETER Experiment Name: Zm_Drought_P Parameter: Organism Value: Zea mays
  misc_feature: MA Experiment 108556 PARAMETER Experiment Name: Zm_Drought_P Parameter: Plant Line Value: 35A19
  misc_feature: MA Experiment 108556 PARAMETER Experiment Name: Zm_Drought_P Parameter: Timepoint (hr) Value: 24
  misc_feature: MA Experiment 108556 PARAMETER Experiment Name: Zm_Drought_P Parameter: Tissue Value: Aerial
  misc_feature: MA Experiment 108556 PARAMETER Experiment Name: Zm_Drought_P Parameter: Treatment Value: Drought vs. No Drought
  misc_feature: MA Experiment ID: 20000487 Result: Up-regulated in Transcription
  misc_feature: MA Experiment 20000487 PARAMETER Experiment Name: Zm_50mM_NH4NO3_L_to_H_P Parameter: Organism Value: Zea mays
  misc_feature: MA Experiment 20000487 PARAMETER Experiment Name: Zm_50mM_NH4NO3_L_to_H_P Parameter: Timepoint (hr) Value: 4
  misc_feature: MA Experiment 20000487 PARAMETER Experiment Name: Zm_50mM_NH4NO3_L_to_H_P Parameter: Tissue Value: Leaves
  misc_feature: MA Experiment 20000487 PARAMETER Experiment Name: Zm_50mM_NH4NO3_L_to_H_P Parameter: Treatment Value: 50mM NH4NO3 vs. 100mM Mannitol
  misc_feature: MA Experiment ID: 20000488 Result: Up-regulated in Transcription
  misc_feature: MA Experiment 20000488 PARAMETER Experiment Name: Zm_50mM_NH4NO3_L_to_H_P Parameter: Organism Value: Zea mays
  misc_feature: MA Experiment 20000488 PARAMETER Experiment Name: Zm_50mM_NH4NO3_L_to_H_P Parameter: Timepoint (hr) Value: 8
  misc_feature: MA Experiment 20000488 PARAMETER Experiment Name: Zm_50mM_NH4NO3_L_to_H_P Parameter: Tissue Value: Leaves
  misc_feature: MA Experiment 20000488 PARAMETER Experiment Name: Zm_50mM_NH4NO3_L_to_H_P Parameter: Treatment Value: 50mM NH4NO3 vs. 100mM Mannitol
  misc_feature: MA Experiment ID: 20000534 Result: Down-regulated in Transcription
  misc_feature: MA Experiment 20000534 PARAMETER Experiment Name: Zm_Hybrid_Pollen_P Parameter: Age (day) Value: 8
  misc_feature: MA Experiment 20000534 PARAMETER Experiment Name: Zm_Hybrid_Pollen_P Parameter: Organism Value: Zea mays
  misc_feature: MA Experiment 20000534 PARAMETER Experiment Name: Zm_Hybrid_Pollen_P Parameter: Plant Line Value: 35A19
  misc_feature: MA Experiment 20000534 PARAMETER Experiment Name: Zm_Hybrid_Pollen_P Parameter: Tissue Value: Pollen vs. Aerial
  misc_feature: MA Experiment ID: 20000626 Result: Up-regulated in Transcription
  misc_feature: MA Experiment 20000626 PARAMETER Experiment Name: Zm_Herbicide-Treatments_P Parameter: Timepoint (hr) Value: 12
  misc_feature: MA Experiment 20000626 PARAMETER Experiment Name: Zm_Herbicide-Treatments_P Parameter: Tissue Value: Aerial
  misc_feature: MA Experiment 20000626 PARAMETER Experiment Name: Zm_Herbicide-Treatments_P Parameter: Treatment Value: Roundup vs. No Treatment
acacaggcaacaagcgcccagcgccccttcacatcaccacatccacgttcctccgtttcacggccatgtcgagcagcgccagcaagaagcaggcccaggcccagaaggccgggcggaggcccccggcggtgtcgtcggccgcggccgcggccgcggacgcggagatgcagagggtgttctcgcgcatcgacgcggacggcgacgggcggatctcgccgtcggagctggcggcggtgtcgcgcgccatctccccgccggcgagctcctcgcacgggcggcgcgaggtggcggccatgatggaggagctggacacggaccgcgacggcttcgtggacctgggcgagttcagggcgttccacgcgcgcggcggcggcgtcgtcgccgccgctgtcatcgccgccgccgccccggtttccttcgtaagcccgtcgtcctccgtccgcgactctgcgcgagaagcgagagtatggacacccaagtgaagcttgctgttgtggtgaaggtgatgggaaggaccggctccaggggtcaggttacccaggtcagagtgaagttcttggatgaccagaaccgtctcatcatgaggaacgtcaagggaccggttcgcgagggagacatcctcacactgctcgagtctgagagggaggctaggaggctgcgttgaggcggaatagtgtcttggtagttttcgtatggagttggatgtcatctaattgtgctatgtttgtcaaactttggtatgaccttcaaaacacctgccttgtatgattatttgtgagcctggtgataagattgcagtttggtttt

SEQ ID NO: 9539 - protein, 220 aa, Zea mays subsp. mays
  peptide (1)..(220): Ceres Seq. ID no. 13496186
  misc_feature (156)..(220): Pfam Name: Ribosomal protein S28e Pfam Description: Ribosomal protein S28e
  misc_feature (156)..(220): Homolog of NCBI NO: 2739219 NR Description: rpS28 [Hordeum vulgare subsp. vulgare]
  misc_feature (156)..(220): Homolog of NCBI NO: 1173237 NR Description: 40S RIBOSOMAL PROTEIN S28 >gi|629860|pir||S49035
  misc_feature (156)..(220): Homolog of NCBI NO: 3947719 NR Description: ribosomal protein S28 [Prunus persica] ribosomal protein S28 [Prunus persica]
  misc_feature (156)..(220): Homolog of NCBI NO: 21902507 NR Description: ribosomal protein small subunit 28 kDa
  misc_feature (156)..(220): Homolog of NCBI NO: 3947725 NR Description: ribosomal protein S28 [Prunus persica]
  misc_feature (156)..(220): Homolog of NCBI NO: 40287500 NR Description: 28 kDa small subunit ribosomal protein [Capsicum
  misc_feature (156)..(220): Homolog of NCBI NO: 15232831 NR Description: 40S ribosomal protein S28 (RPS28A) [Arabidopsis >gi|15237548|ref|NP_196005.1| 40S ribosomal protein S28 (RPS28B)
  misc_feature (156)..(220): Homolog of NCBI NO: 15237617 NR Description: 40S ribosomal protein S28 (RPS28C) [Arabidopsis >gi|464720|sp|P34789|RS28_ARATH 40S ribosomal protein S28 ribosomal protein S28 >gi|10176962|dbj|BAB10282.1| 40S ribosomal
  misc_feature (160)..(220): Homolog of NCBI NO: 22001967 NR Description: 40S ribosomal protein S28
  misc_feature (161)..(220): Homolog of NCBI NO: 30267871 NR Description: ribosomal protein S28 [Branchiostoma belcheri
HRQQAPSAPSHHHIHVPPFHGHVEQRQQEAGPGPEGRAEAPGGVVGRGRGRGRGDAEGVLAHRRGRRRADLAVGAGGGVARHLPAGELLARAARGGGHDGGAGHGPRRLRGPGRVQGVPRARRRRRRRRCHRRRRPGFLRKPVVLRPRLCARSESMDTQVKLAVVVKVMGRTGSRGQVTQVRVKFLDDQNRLIMRNVKGPVREGDILTLLESEREARRLR

SEQ ID NO: 9540 - protein, 159 aa, Zea mays subsp. mays
  peptide (1)..(159): Ceres Seq. ID no. 13496187
  misc_feature (94)..(122): Pfam Name: EF hand Pfam Description: EF hand
  misc_feature (4)..(124): Homolog of NCBI NO: 34895640 NR Description: OSJNBa0083M16.33 [Oryza sativa (japonica
  misc_feature (19)..(128): Homolog of NCBI NO: 19386815 NR Description: B1147A04.10 [Oryza sativa (japonica
  misc_feature (54)..(118): Homolog of NCBI NO: 6901654 NR Description: calcium-binding protein [Olea europaea]
  misc_feature (54)..(118): Homolog of NCBI NO: 14423648 NR Description: Calcium-binding allergen Ole e 8 (PCA18/PCA23)
  misc_feature (54)..(125): Homolog of NCBI NO: 14423843 NR Description: Polcalcin Jun o 2 (Calcium-binding pollen Jun o 2) >gi|5391446|gb|AAC15474.2| pollen allergen Jun o 4
  misc_feature (54)..(118): Homolog of NCBI NO: 14589311 NR Description: calcium binding protein [Sesbania rostrata]
  misc_feature (54)..(124): Homolog of NCBI NO: 15240340 NR Description: calmodulin-related protein 2, touch-induced (TCH2)
  misc_feature (57)..(124): Homolog of NCBI NO: 13397927 NR Description: putative calmodulin-related protein [Medicago
  misc_feature (54)..(115): Homolog of NCBI NO: 15221030 NR Description: calcium-binding protein, putative [Arabidopsis
  misc_feature (54)..(117): Homolog of NCBI NO: 18408502 NR Description: calmodulin-related protein, putative [Arabidopsis
TGNKRPAPLHITTSTFLRFTAMSSSASKKQAQAQKAGRRPPAVSSAAAAAADAEMQRVFSRIDADGDGRISPSELAAVSRAISPPASSSHGRREVAAMMEELDTDRDGFVDLGEFRAFHARGGGVVAAAVIAAAAPVSFVSPSSSVRDSAREARVWTPK

SEQ ID NO: 9541 - protein, 138 aa, Zea mays subsp. mays
  peptide (1)..(138): Ceres Seq. ID no. 13496188
  misc_feature (73)..(101): Pfam Name: EF hand Pfam Description: EF hand
  misc_feature (1)..(103): Homolog of NCBI NO: 34895640 NR Description: OSJNBa0083M16.33 [Oryza sativa (japonica
  misc_feature (1)..(107): Homolog of NCBI NO: 19386815 NR Description: B1147A04.10 [Oryza sativa (japonica
  misc_feature (33)..(97): Homolog of NCBI NO: 6901654 NR Description: calcium-binding protein [Olea europaea]
  misc_feature (33)..(97): Homolog of NCBI NO: 14423648 NR Description: Calcium-binding allergen Ole e 8 (PCA18/PCA23)
  misc_feature (33)..(104): Homolog of NCBI NO: 14423843 NR Description: Polcalcin Jun o 2 (Calcium-binding pollen Jun o 2) >gi|5391446|gb|AAC15474.2| pollen allergen Jun o 4
  misc_feature (33)..(97): Homolog of NCBI NO: 14589311 NR Description: calcium binding protein [Sesbania rostrata]
  misc_feature (33)..(103): Homolog of NCBI NO: 15240340 NR Description: calmodulin-related protein 2, touch-induced (TCH2)
  misc_feature (36)..(103): Homolog of NCBI NO: 13397927 NR Description: putative calmodulin-related protein [Medicago
  misc_feature (33)..(94): Homolog of NCBI NO: 15221030 NR Description: calcium-binding protein, putative [Arabidopsis
  misc_feature (33)..(96): Homolog of NCBI NO: 18408502 NR Description: calmodulin-related protein, putative [Arabidopsis
MSSSASKKQAQAQKAGRRPPAVSSAAAAAADAEMQRVFSRIDADGDGRISPSELAAVSRAISPPASSSHGRREVAAMMEELDTDRDGFVDLGEFRAFHARGGGVVAAAVIAAAAPVSFVSPSSSVRDSAREARVWTPK

SEQ ID NO: 9542 - DNA, 1768 bp, Zea mays subsp. mays
  misc_feature (1)..(1768): Ceres Seq. ID no. 12416821
  misc_feature: MA Experiment ID: 108526 Result: Up-regulated in Transcription
  misc_feature: MA Experiment 108526 PARAMETER Experiment Name: Zm_5mM_NO_P Parameter: Age (day) Value: 8
  misc_feature: MA Experiment 108526 PARAMETER Experiment Name: Zm_5mM_NO_P Parameter: Organism Value: Zea mays
  misc_feature: MA Experiment 108526 PARAMETER Experiment Name: Zm_5mM_NO_P Parameter: Plant Line Value: 35A19
  misc_feature: MA Experiment 108526 PARAMETER Experiment Name: Zm_5mM_NO_P Parameter: Timepoint (hr) Value: 1
  misc_feature: MA Experiment 108526 PARAMETER Experiment Name: Zm_5mM_NO_P Parameter: Tissue Value: Aerial
  misc_feature: MA Experiment 108526 PARAMETER Experiment Name: Zm_5mM_NO_P Parameter: Treatment Value: 5mM NO vs. No Treatment
  misc_feature: MA Experiment ID: 108527 Result: Up-regulated in Transcription
  misc_feature: MA Experiment 108527 PARAMETER Experiment Name: Zm_5mM_NO_P Parameter: Age (day) Value: 8
  misc_feature: MA Experiment 108527 PARAMETER Experiment Name: Zm_5mM_NO_P Parameter: Organism Value: Zea mays
  misc_feature: MA Experiment 108527 PARAMETER Experiment Name: Zm_5mM_NO_P Parameter: Plant Line Value: 35A19
  misc_feature: MA Experiment 108527 PARAMETER Experiment Name: Zm_5mM_NO_P Parameter: Timepoint (hr) Value: 6
  misc_feature: MA Experiment 108527 PARAMETER Experiment Name: Zm_5mM_NO_P Parameter: Tissue Value: Aerial
  misc_feature: MA Experiment 108527 PARAMETER Experiment Name: Zm_5mM_NO_P Parameter: Treatment Value: 5mM NO vs. No Treatment
  misc_feature: MA Experiment ID: 108528 Result: Up-regulated in Transcription
  misc_feature: MA Experiment 108528 PARAMETER Experiment Name: Zm_Imbibed_Seeds_P Parameter: Age (day) Value: 5 vs. 2
  misc_feature: MA Experiment 108528 PARAMETER Experiment Name: Zm_Imbibed_Seeds_P Parameter: Organism Value: Zea mays
  misc_feature: MA Experiment 108528 PARAMETER Experiment Name: Zm_Imbibed_Seeds_P Parameter: Plant Line Value: 35A19
  misc_feature: MA Experiment 108528 PARAMETER Experiment Name: Zm_Imbibed_Seeds_P Parameter: Tissue Value: Aerial vs. Embryo
  misc_feature: MA Experiment ID: 108529 Result: Up-regulated in Transcription
  misc_feature: MA Experiment 108529 PARAMETER Experiment Name: Zm_Imbibed_Seeds_P Parameter: Age (day) Value: 5 vs. 2
  misc_feature: MA Experiment 108529 PARAMETER Experiment Name: Zm_Imbibed_Seeds_P Parameter: Organism Value: Zea mays
  misc_feature: MA Experiment 108529 PARAMETER Experiment Name: Zm_Imbibed_Seeds_P Parameter: Plant Line Value: 35A19
  misc_feature: MA Experiment 108529 PARAMETER Experiment Name: Zm_Imbibed_Seeds_P Parameter: Tissue Value: Roots vs. Embryo
  misc_feature: MA Experiment ID: 108530 Result: Up-regulated in Transcription
  misc_feature: MA Experiment 108530 PARAMETER Experiment Name: Zm_Imbibed_Seeds_P Parameter: Age (day) Value: 6 vs. 2
  misc_feature: MA Experiment 108530 PARAMETER Experiment Name: Zm_Imbibed_Seeds_P Parameter: Organism Value: Zea mays
  misc_feature: MA Experiment 108530 PARAMETER Experiment Name: Zm_Imbibed_Seeds_P Parameter: Plant Line Value: 35A19
  misc_feature: MA Experiment 108530 PARAMETER Experiment Name: Zm_Imbibed_Seeds_P Parameter: Tissue Value: Aerial vs. Embryo
  misc_feature: MA Experiment ID: 108533 Result: Up-regulated in Transcription
  misc_feature: MA Experiment 108533 PARAMETER Experiment Name: Zm_4deg_Cold_P Parameter: Age (hr) Value: 8
  misc_feature: MA Experiment 108533 PARAMETER Experiment Name: Zm_4deg_Cold_P Parameter: Organism Value: Zea mays
  misc_feature: MA Experiment 108533 PARAMETER Experiment Name: Zm_4deg_Cold_P Parameter: Plant Line Value: 35A19
  misc_feature: MA Experiment 108533 PARAMETER Experiment Name: Zm_4deg_Cold_P Parameter: Temperature (deg C) Value: 4 vs. 22
  misc_feature: MA Experiment 108533 PARAMETER Experiment Name: Zm_4deg_Cold_P Parameter: Timepoint (hr) Value: 1
  misc_feature: MA Experiment 108533 PARAMETER Experiment Name: Zm_4deg_Cold_P Parameter: Tissue Value: Aerial
  misc_feature: MA Experiment ID: 108535 Result: Down-regulated in Transcription
  misc_feature: MA Experiment 108535 PARAMETER Experiment Name: Zm_Meristem_P Parameter: Age (day) Value: 8
  misc_feature: MA Experiment 108535 PARAMETER Experiment Name: Zm_Meristem_P Parameter: Organism Value: Zea mays
  misc_feature: MA Experiment 108535 PARAMETER Experiment Name: Zm_Meristem_P Parameter: Plant Line Value: 35A19
  misc_feature: MA Experiment 108535 PARAMETER Experiment Name: Zm_Meristem_P Parameter: Tissue Value: Root Meristem vs. Above Root Meristem
  misc_feature: MA Experiment ID: 108547 Result: Up-regulated in Transcription
  misc_feature: MA Experiment 108547 PARAMETER Experiment Name: Zm_Imbibed_Seeds_P Parameter: Age (day) Value: 4 vs. 2
  misc_feature: MA Experiment 108547 PARAMETER Experiment Name: Zm_Imbibed_Seeds_P Parameter: Organism Value: Zea mays
  misc_feature: MA Experiment 108547 PARAMETER Experiment Name: Zm_Imbibed_Seeds_P Parameter: Plant Line Value: 35A19
  misc_feature: MA Experiment 108547 PARAMETER Experiment Name: Zm_Imbibed_Seeds_P Parameter: Tissue Value: Aerial vs. Embryo
  misc_feature: MA Experiment ID: 20000532 Result: Up-regulated in Transcription
  misc_feature: MA Experiment 20000532 PARAMETER Experiment Name: Zm_0.001percent_MeJA_P Parameter: Age (day) Value: 10
  misc_feature: MA Experiment 20000532 PARAMETER Experiment Name: Zm_0.001percent_MeJA_P Parameter: Organism Value: Zea mays
  misc_feature: MA Experiment 20000532 PARAMETER Experiment Name: Zm_0.001percent_MeJA_P Parameter: Plant Line Value: 35A19
  misc_feature: MA Experiment 20000532 PARAMETER Experiment Name: Zm_0.001percent_MeJA_P Parameter: Timepoint (hr) Value: 48
  misc_feature: MA Experiment 20000532 PARAMETER Experiment Name: Zm_0.001percent_MeJA_P Parameter: Tissue Value: Aerial
  misc_feature: MA Experiment 20000532 PARAMETER Experiment Name: Zm_0.001percent_MeJA_P Parameter: Treatment Value: 0.001percent MeJA vs. No Treatment
ctttagagaaggtgtacccccaatattccattaccggcccactgacgagagagagagagagagattttggcgtgactatccagagtccccaatcttacacctaaaaactcttctcagctaccggtgcggcatatcgcccctatcggcggcgaacatttgagttctcgcgacgtgtcctcgaggattctgtggtggaagatcggatcttttgctgcgggttccagttgccaaccagagatgtcggctctcctcgatctactgatggggatctttcgccagcagaccctcggcggcgccgccctggagctcgccgcgctggcggcgccgctctcgctcgccgccctcgtcggccttctcatcgggtgggcatggcgcccgaggtgggcgggggtcgtcgtcttcgacaacgcccaacagatggcgcagctccccgcggcggcggcgcctccggaccgcgccaccgccaccaccaccgcggtggtatctcgcaacgaggcggccgccgtcgtaccgagaactgtggtggctcatgcggcggccgaggacgagcagcagcagctggcggtcaacaccggtgacttgattcacctctggcggctcgtcgacgagaaggacggtggcccgtcgtggattcacatgatggaccgcaccttaccaaccatgaggtaccaagcctggcggagagacccaccgagtggtccaccacagtaccgcagcagcacaatcttggaagatgcgtcaccagaggttgtgagagatttcttctgggacgacgagttccggatgaacaacagctgggacgacatgcttcttcagcacgagacgctggaggagtgcaccgagactggaaccatggttgtccggtgggtcaggaagttcccgttcttctgcagcgacagggagtacatcataggccgcaggatatgggcgtctgggaagacattttactgtgtgaccaagggtgttcctcgtccctccgttccaagacaaaacaaacctcgccgtgtggacttgtactactctagctggtgcatccgtccagttgagtcgagaaaaggcgacggtgcaatgagtgcatgcgaggtgctcttgttccaccacgaggacatggggattccatgggagatcgcgaagcttggcgtccggcaggggatgtggggctgcgtcaagaggatagagcctggccttcgggcgtaccaggttgggaggaccgccggagaggctgtttccaagtgtgctgccatggcacaggtcaccaccaggttcagtgccgacgagctcgtcatcgcagggccgggcaacacggaggccagttcttcttcgtccggcgacggcgcagaggttgacaaggcgacgaagcactgggcgaacagcatacccaaggttctcatggtcggtggcgctgtggccctggcctgctgcaccttcgacggtgggttgttgaccaaggccgtcatcttcggcactgccaggaggtttgcaggagggccaggaaggcggtaggtacggtgtaacggtggacggaaagatccagcggcacaacacaaaacaagtgttgctgcactgcagcccgctgcgggttaataggttagaaatatagcatttgttacgaggaaacatagaagtattatgcaagaaaaccgctgttagataagaaatacactgctgtgtattagtagttaataacaagagttcttggtttttgtatgtaaccatattgtggatcggatccattgttcttccccatggacactactactaccagtct

SEQ ID NO: 9543 - protein, 421 aa, Zea mays subsp. mays
  peptide (1)..(421): Ceres Seq. ID no. 12416822
  misc_feature (158)..(239): Pfam Name: START domain Pfam Description: START domain
  misc_feature (1)..(421): Homolog of NCBI NO: 38344869 NR Description: OSJNBa0020P07.12 [Oryza sativa (japonica
  misc_feature (110)..(415): Homolog of NCBI NO: 15217736 NR Description: membrane related protein CP5, putative; protein
  misc_feature (23)..(50): Homolog of NCBI NO: 15217736 NR Description: membrane related protein CP5, putative; protein
  misc_feature (110)..(415): Homolog of NCBI NO: 22135902 NR Description: membrane related protein CP5, putative thaliana] >gi|23197608|gb|AAN15331.1| membrane related protein
  misc_feature (23)..(50): Homolog of NCBI NO: 22135902 NR Description: membrane related protein CP5, putative thaliana] >gi|23197608|gb|AAN15331.1| membrane related protein
  misc_feature (110)..(415): Homolog of NCBI NO: 4741929 NR Description: membrane related protein CP5 [Arabidopsis
  misc_feature (23)..(50): Homolog of NCBI NO: 4741929 NR Description: membrane related protein CP5 [Arabidopsis
  misc_feature (100)..(421): Homolog of NCBI NO: 18033654 NR Description: putative nodule membrane protein [Medicago sativa]
  misc_feature (95)..(421): Homolog of NCBI NO: 18423599 NR Description: membrane related protein-like; protein id: supported by cDNA: 37644., supported by cDNA: gi_19423949
  misc_feature (33)..(66): Homolog of NCBI NO: 18423599 NR Description: membrane related protein-like; protein id: supported by cDNA: 37644., supported by cDNA: gi_19423949
MSALLDLLMGIFRQQTLGGAALELAALAAPLSLAALVGLLIGWAWRPRWAGVVVFDNAQQMAQLPAAAAPPDRATATTTAVVSRNEAAAVVPRTVVAHAAAEDEQQQLAVNTGDLIHLWRLVDEKDGGPSWIHMMDRTLPTMRYQAWRRDPPSGPPQYRSSTILEDASPEVVRDFFWDDEFRMNNSWDDMLLQHETLEECTETGTMVVRWVRKFPFFCSDREYIIGRRIWASGKTFYCVTKGVPRPSVPRQNKPRRVDLYYSSWCIRPVESRKGDGAMSACEVLLFHHEDMGIPWEIAKLGVRQGMWGCVKRIEPGLRAYQVGRTAGEAVSKCAAMAQVTTRFSADELVIAGPGNTEASSSSSGDGAEVDKATKHWANSIPKVLMVGGAVALACCTFDGGLLTKAVIFGTARRFAGGPGRR

SEQ ID NO: 9544 - protein, 413 aa, Zea mays subsp. mays
  peptide (1)..(413): Ceres Seq. ID no. 12416823
  misc_feature (150)..(231): Pfam Name: START domain Pfam Description: START domain
  misc_feature (1)..(413): Homolog of NCBI NO: 38344869 NR Description: OSJNBa0020P07.12 [Oryza sativa (japonica
  misc_feature (102)..(407): Homolog of NCBI NO: 15217736 NR Description: membrane related protein CP5, putative; protein
  misc_feature (15)..(42): Homolog of NCBI NO: 15217736 NR Description: membrane related protein CP5, putative; protein
  misc_feature (102)..(407): Homolog of NCBI NO: 22135902 NR Description: membrane related protein CP5, putative thaliana] >gi|23197608|gb|AAN15331.1| membrane related protein
  misc_feature (15)..(42): Homolog of NCBI NO: 22135902 NR Description: membrane related protein CP5, putative thaliana] >gi|23197608|gb|AAN15331.1| membrane related protein
  misc_feature (102)..(407): Homolog of NCBI NO: 4741929 NR Description: membrane related protein CP5 [Arabidopsis
  misc_feature (15)..(42): Homolog of NCBI NO: 4741929 NR Description: membrane related protein CP5 [Arabidopsis
  misc_feature (92)..(413): Homolog of NCBI NO: 18033654 NR Description: putative nodule membrane protein [Medicago sativa]
  misc_feature (87)..(413): Homolog of NCBI NO: 18423599 NR Description: membrane related protein-like; protein id: supported by cDNA: 37644., supported by cDNA: gi_19423949
  misc_feature (25)..(58): Homolog of NCBI NO: 18423599 NR Description: membrane related protein-like; protein id: supported by cDNA: 37644., supported by cDNA: gi_19423949
MGIFRQQTLGGAALELAALAAPLSLAALVGLLIGWAWRPRWAGVVVFDNAQQMAQLPAAAAPPDRATATTTAVVSRNEAAAVVPRTVVAHAAAEDEQQQLAVNTGDLIHLWRLVDEKDGGPSWIHMMDRTLPTMRYQAWRRDPPSGPPQYRSSTILEDASPEVVRDFFWDDEFRMNNSWDDMLLQHETLEECTETGTMVVRWVRKFPFFCSDREYIIGRRIWASGKTFYCVTKGVPRPSVPRQNKPRRVDLYYSSWCIRPVESRKGDGAMSACEVLLFHHEDMGIPWEIAKLGVRQGMWGCVKRIEPGLRAYQVGRTAGEAVSKCAAMAQVTTRFSADELVIAGPGNTEASSSSSGDGAEVDKATKHWANSIPKVLMVGGAVALACCTFDGGLLTKAVIFGTARRFAGGPGRR

SEQ ID NO: 9545 - protein, 361 aa, Zea mays subsp. mays
  peptide (1)..(361): Ceres Seq. ID no. 12416824
  misc_feature (98)..(179): Pfam Name: START domain Pfam Description: START domain
  misc_feature (1)..(361): Homolog of NCBI NO: 38344869 NR Description: OSJNBa0020P07.12 [Oryza sativa (japonica
  misc_feature (50)..(355): Homolog of NCBI NO: 15217736 NR Description: membrane related protein CP5, putative; protein
  misc_feature (50)..(355): Homolog of NCBI NO: 22135902 NR Description: membrane related protein CP5, putative thaliana] >gi|23197608|gb|AAN15331.1| membrane related protein
  misc_feature (50)..(355): Homolog of NCBI NO: 4741929 NR Description: membrane related protein CP5 [Arabidopsis
  misc_feature (40)..(361): Homolog of NCBI NO: 18033654 NR Description: putative nodule membrane protein [Medicago sativa]
  misc_feature (35)..(361): Homolog of NCBI NO: 18423599 NR Description: membrane related protein-like; protein id: supported by cDNA: 37644., supported by cDNA: gi_19423949
  misc_feature (35)..(361): Homolog of NCBI NO: 21593272 NR Description: membrane related protein-like [Arabidopsis
  misc_feature (1)..(361): Homolog of NCBI NO: 10178166 NR Description: membrane related protein-like [Arabidopsis
  misc_feature (15)..(355): Homolog of NCBI NO: 18414239 NR Description: expressed protein; protein id: At4g14500.1, by cDNA: gi_16226250 [Arabidopsis thaliana] AT4g14500/dl3290w [Arabidopsis thaliana]
  misc_feature (1)..(11): Homolog of NCBI NO: 18414239 NR Description: expressed protein; protein id: At4g14500.1, by cDNA: gi_16226250 [Arabidopsis thaliana] AT4g14500/dl3290w [Arabidopsis thaliana]
MAQLPAAAAPPDRATATTTAVVSRNEAAAVVPRTVVAHAAAEDEQQQLAVNTGDLIHLWRLVDEKDGGPSWIHMMDRTLPTMRYQAWRRDPPSGPPQYRSSTILEDASPEVVRDFFWDDEFRMNNSWDDMLLQHETLEECTETGTMVVRWVRKFPFFCSDREYIIGRRIWASGKTFYCVTKGVPRPSVPRQNKPRRVDLYYSSWCIRPVESRKGDGAMSACEVLLFHHEDMGIPWEIAKLGVRQGMWGCVKRIEPGLRAYQVGRTAGEAVSKCAAMAQVTTRFSADELVIAGPGNTEASSSSSGDGAEVDKATKHWANSIPKVLMVGGAVALACCTFDGGLLTKAVIFGTARRFAGGPGRR

SEQ ID NO: 9546 - DNA, 533 bp, Zea mays subsp. mays
  misc_feature (1)..(533): Ceres Seq. ID no. 12348236
  misc_feature: MA Experiment ID: 108522 Result: Up-regulated in Transcription
  misc_feature: MA Experiment 108522 PARAMETER Experiment Name: Zm_42deg_Heat_P Parameter: Age (day) Value: 8
  misc_feature: MA Experiment 108522 PARAMETER Experiment Name: Zm_42deg_Heat_P Parameter: Organism Value: Zea mays
  misc_feature: MA Experiment 108522 PARAMETER Experiment Name: Zm_42deg_Heat_P Parameter: Plant Line Value: 35A19
  misc_feature: MA Experiment 108522 PARAMETER Experiment Name: Zm_42deg_Heat_P Parameter: Temperature (deg C) Value: 42 vs. 22
  misc_feature: MA Experiment 108522 PARAMETER Experiment Name: Zm_42deg_Heat_P Parameter: Timepoint (hr) Value: 1
  misc_feature: MA Experiment 108522 PARAMETER Experiment Name: Zm_42deg_Heat_P Parameter: Tissue Value: Aerial
  misc_feature: MA Experiment ID: 108523 Result: Up-regulated in Transcription
  misc_feature: MA Experiment 108523 PARAMETER Experiment Name: Zm_42deg_Heat_P Parameter: Age (day) Value: 8
  misc_feature: MA Experiment 108523 PARAMETER Experiment Name: Zm_42deg_Heat_P Parameter: Organism Value: Zea mays
  misc_feature: MA Experiment 108523 PARAMETER Experiment Name: Zm_42deg_Heat_P Parameter: Plant Line Value: 35A19
  misc_feature: MA Experiment 108523 PARAMETER Experiment Name: Zm_42deg_Heat_P Parameter: Temperature (deg C) Value: 42 vs. 22
  misc_feature: MA Experiment 108523 PARAMETER Experiment Name: Zm_42deg_Heat_P Parameter: Timepoint (hr) Value: 6
  misc_feature: MA Experiment 108523 PARAMETER Experiment Name: Zm_42deg_Heat_P Parameter: Tissue Value: Aerial
ctagctgatgaattgagagcaacggtcgcagatgaatttgtcaagaggcggaaagagaccgaatggttcgttgagggggattttgatacatatgtatcccatattagggagccacatgtgtggggaggcgagccagaattgttcatggcgtcccatgttcttcagatgccaataacggtttacatgcgcgacgaggatgctggcggtctgatagcaatcgcagagtatggccagcagtatggtaaagaagacccaatccaagtcctgtatcatggttttggccattacgacgcactacagatcccagcaaaggttggttcgaagaggaaactgtagacgccggcgtgagcttgaggtacgctccttgttccagtgtttatacaaccttgtcgaacacactcatgctatatgcatgcgagtgcggaagaagacagcttaacatgaaatggcgttagttcgcgccatgcataaatgttattacatgattcatgtacttccccaggagcagatgagttggaacagagcatcacttc

SEQ ID NO: 9547 - protein, 111 aa, Zea mays subsp. mays
  peptide (1)..(111): Ceres Seq. ID no. 12348237
  misc_feature (1)..(111): Homolog of NCBI NO: 11280708 NR Description: hypothetical protein T10K17.20 - Arabidopsis >gi|6729524|emb|CAB67609.1| putative protein [Arabidopsis
  misc_feature (1)..(111): Homolog of NCBI NO: 18410816 NR Description: auxin-regulated protein; protein id: At3g57810.1, by cDNA: 101256., supported by cDNA: 29384. [Arabidopsis
  misc_feature (62)..(111): Homolog of NCBI NO: 32031109 NR Description: hypothetical protein [Haemophilus somnus 2336]
LADELRATVADEFVKRRKETEWFVEGDFDTYVSHIREPHVWGGEPELFMASHVLQMPITVYMRDEDAGGLIAIAEYGQQYGKEDPIQVLYHGFGHYDALQIPAKVGSKRKL

SEQ ID NO: 9548 - protein, 70 aa, Zea mays subsp. mays
  peptide (1)..(70): Ceres Seq. ID no. 12348238
MASSMVKKTQSKSCIMVLAITTHYRSQQRLVRRGNCRRRRELEVRSLFQCLYNLVEHTHAICMRVRKKTA

SEQ ID NO: 9549 - protein, 66 aa, Zea mays subsp. mays
  peptide (1)..(66): Ceres Seq. ID no. 12348239
MVKKTQSKSCIMVLAITTHYRSQQRLVRRGNCRRRRELEVRSLFQCLYNLVEHTHAICMRVRKKTA

SEQ ID NO: 9550 - protein, 63 aa, Zea mays subsp. mays
  peptide (1)..(63): Ceres Seq. ID no. 12348240
  misc_feature (1)..(63): Homolog of NCBI NO: 11280708 NR Description: hypothetical protein T10K17.20 - Arabidopsis >gi|6729524|emb|CAB67609.1| putative protein [Arabidopsis
  misc_feature (1)..(63): Homolog of NCBI NO: 18410816 NR Description: auxin-regulated protein; protein id: At3g57810.1, by cDNA: 101256., supported by cDNA: 29384. [Arabidopsis
  misc_feature (14)..(63): Homolog of NCBI NO: 32031109 NR Description: hypothetical protein [Haemophilus somnus 2336]
MASHVLQMPITVYMRDEDAGGLIAIAEYGQQYGKEDPIQVLYHGFGHYDALQIPAKVGSKRKL

SEQ ID NO: 9551 - DNA, 1246 bp, Zea mays subsp. mays
  misc_feature (1)..(1246): Ceres Seq. ID no. 12416638
  misc_feature: MA Experiment ID: 108528 Result: Up-regulated in Transcription
  misc_feature: MA Experiment 108528 PARAMETER Experiment Name: Zm_Imbibed_Seeds_P Parameter: Age (day) Value: 5 vs. 2
  misc_feature: MA Experiment 108528 PARAMETER Experiment Name: Zm_Imbibed_Seeds_P Parameter: Organism Value: Zea mays
  misc_feature: MA Experiment 108528 PARAMETER Experiment Name: Zm_Imbibed_Seeds_P Parameter: Plant Line Value: 35A19
  misc_feature: MA Experiment 108528 PARAMETER Experiment Name: Zm_Imbibed_Seeds_P Parameter: Tissue Value: Aerial vs. Embryo
  misc_feature: MA Experiment ID: 108530 Result: Up-regulated in Transcription
  misc_feature: MA Experiment 108530 PARAMETER Experiment Name: Zm_Imbibed_Seeds_P Parameter: Age (day) Value: 6 vs. 2
  misc_feature: MA Experiment 108530 PARAMETER Experiment Name: Zm_Imbibed_Seeds_P Parameter: Organism Value: Zea mays
  misc_feature: MA Experiment 108530 PARAMETER Experiment Name: Zm_Imbibed_Seeds_P Parameter: Plant Line Value: 35A19
  misc_feature: MA Experiment 108530 PARAMETER Experiment Name: Zm_Imbibed_Seeds_P Parameter: Tissue Value: Aerial vs. Embryo
  misc_feature: MA Experiment ID: 108534 Result: Up-regulated in Transcription
  misc_feature: MA Experiment 108534 PARAMETER Experiment Name: Zm_4deg_Cold_P Parameter: Age (hr) Value: 8
  misc_feature: MA Experiment 108534 PARAMETER Experiment Name: Zm_4deg_Cold_P Parameter: Organism Value: Zea mays
  misc_feature: MA Experiment 108534 PARAMETER Experiment Name: Zm_4deg_Cold_P Parameter: Plant Line Value: 35A19
  misc_feature: MA Experiment 108534 PARAMETER Experiment Name: Zm_4deg_Cold_P Parameter: Temperature (deg C) Value: 4 vs. 22
  misc_feature: MA Experiment 108534 PARAMETER Experiment Name: Zm_4deg_Cold_P Parameter: Timepoint (hr) Value: 6
  misc_feature: MA Experiment 108534 PARAMETER Experiment Name: Zm_4deg_Cold_P Parameter: Tissue Value: Aerial
  misc_feature: MA Experiment ID: 108547 Result: Up-regulated in Transcription
  misc_feature: MA Experiment 108547 PARAMETER Experiment Name: Zm_Imbibed_Seeds_P Parameter: Age (day) Value: 4 vs. 2
  misc_feature: MA Experiment 108547 PARAMETER Experiment Name: Zm_Imbibed_Seeds_P Parameter: Organism Value: Zea mays
  misc_feature: MA Experiment 108547 PARAMETER Experiment Name: Zm_Imbibed_Seeds_P Parameter: Plant Line Value: 35A19
  misc_feature: MA Experiment 108547 PARAMETER Experiment Name: Zm_Imbibed_Seeds_P Parameter: Tissue Value: Aerial vs. Embryo
  misc_feature: MA Experiment ID: 108689 Result: Up-regulated in Transcription
  misc_feature: MA Experiment 108689 PARAMETER Experiment Name: Zm_Drought_Roots_P Parameter: Age (day) Value: 9
  misc_feature: MA Experiment 108689 PARAMETER Experiment Name: Zm_Drought_Roots_P Parameter: Organism Value: Zea mays
  misc_feature: MA Experiment 108689 PARAMETER Experiment Name: Zm_Drought_Roots_P Parameter: Plant Line Value: 35A19
  misc_feature: MA Experiment 108689 PARAMETER Experiment Name: Zm_Drought_Roots_P Parameter: Timepoint (hr) Value: 24
  misc_feature: MA Experiment 108689 PARAMETER Experiment Name: Zm_Drought_Roots_P Parameter: Tissue Value: Roots
  misc_feature: MA Experiment 108689 PARAMETER Experiment Name: Zm_Drought_Roots_P Parameter: Treatment Value: Drought vs. No Drought
  misc_feature: MA Experiment ID: 20000492 Result: Up-regulated in Transcription
  misc_feature: MA Experiment 20000492 PARAMETER Experiment Name: Zm_Hybrid_Seed_Dev_P Parameter: DAP Value: 12
  misc_feature: MA Experiment 20000492 PARAMETER Experiment Name: Zm_Hybrid_Seed_Dev_P Parameter: Organism Value: Zea mays
  misc_feature: MA Experiment 20000492 PARAMETER Experiment Name: Zm_Hybrid_Seed_Dev_P Parameter: Plant Line Value: 35A19
  misc_feature: MA Experiment 20000492 PARAMETER Experiment Name: Zm_Hybrid_Seed_Dev_P Parameter: Tissue Value: Fert Kernel vs. Unfert Floret
acgccaccggaccggaaacgcgaagcagccccacactgcccacgcggacacgctctgcaccaccacctgccggccgttgccgggctcccggctcgccgccgccgttgcgccctcgcgctcacacctccgccagcccaggtccatcgagcggagaaacccatggccccctcgccgatcctcgtccggccgccggcgctggcgaattcaccccttccgcctccccgatgcgtggccgcggtagcagcggcgccggcggttcggacggctccggcggccccattctctaggctccgtaccaagtgtaggttcgccgcatcggatgtgagagaagactactcttctactccgatagatattgtcgctgatgttaagacggagaagattgtggtgttaggaggaagtggattcgttggttctgcaatttgcagagctgctgtatctaaaggcattgaggttgtgagcttcagcaggtcaggaagaccatcttactctgattcctgggttgatcaagtcaattggctgccaggagatgttttctatgcaagatgggatgaagtattggttggggctactgctgttgtgtctacccttggagggtttggcaatgaagaacaaatgaaaaggataaatggtgaggcaaatgtcatagcagtaaatgctgcaaaagaatatggagtcccaaaattcattttaatctccgtccatgactacaaccttccatcctttcttcttacatcgggttacttcactggcaagagaaaggcagaatctgaagtcctttccaaatacccagcctcgggtgtcgtgttgaggccaggcttcatttacggtaaaaggaaagtaaatggcttcgaggtaccactcgacgctgtcggagaaccattggagaagttgctctcctctgtcgaaaacttcaccaagccgttgagctcgctgcctgcctctgacctaatccttgcaccccctgtgagcgtggatgatgttgcctatgctgtaatcaacggagtcatagacgacagcttctttggggtgttcacgattgaacagatcaaggaagccgcgtccaaggtacgagtgtgaacccggggtcttgttccacaatctctgaacgtgtgttgtaggtggaaagttcataaacttagcagtaactcattgatccttgtgttctttatttctcgctgaattttgaccatagtcaaccgttcaaaagtcagtgcagcattcttttttctgctggaatctcttg

SEQ ID NO: 9552 - protein, 359 aa, Zea mays subsp. mays
  peptide (1)..(359): Ceres Seq. ID no. 12416639
  misc_feature (54)..(359): Homolog of NCBI NO: 38346147 NR Description: OSJNBb0118P14.7 [Oryza sativa (japonica
  misc_feature (100)..(358): Homolog of NCBI NO: 18398333 NR Description: expressed protein; protein id: At1g32220.1, by cDNA: 3464. [Arabidopsis thaliana] >gi|25403150|pir||G86446
  misc_feature (125)..(341): Homolog of NCBI NO: 18416362 NR Description: putative protein; protein id: At5g10730.1, by cDNA: 10217., supported by cDNA: gi_13926272, supported by gi_16323237, supported by cDNA: gi_19698948 [Arabidopsis
  misc_feature (124)..(350): Homolog of NCBI NO: 18417824 NR Description: putative protein; protein id: At5g15910.1, by cDNA: 22994., supported by cDNA: gi_15292960, supported by gi_21280840 [Arabidopsis thaliana] >gi|15292961|gb|AAK93591.1|
  misc_feature (124)..(350): Homolog of NCBI NO: 21592373 NR Description: unknown [Arabidopsis thaliana]
  misc_feature (125)..(341): Homolog of NCBI NO: 10129651 NR Description: putative protein [Arabidopsis thaliana]
  misc_feature (206)..(350): Homolog of NCBI NO: 11346175 NR Description: hypothetical protein F1N13_50 - Arabidopsis >gi|9755637|emb|CAC01790.1| putative protein [Arabidopsis
  misc_feature (190)..(333): Homolog of NCBI NO: 8744993 NR Description: hypothetical protein P1295.07 [Leishmania major]
  misc_feature (126)..(161): Homolog of NCBI NO: 8744993 NR Description: hypothetical protein P1295.07 [Leishmania major]
  misc_feature (127)..(324): Homolog of NCBI NO: 23037289 NR Description: hypothetical protein [Oenococcus oeni MCW]
TPPDRKREAAPHCPRGHALHHHLPAVAGLPARRRRCALALTPPPAQVHRAEKPMAPSPILVRPPALANSPLPPPRCVAAVAAAPAVRTAPAAPFSRLRTKCRFAASDVREDYSSTPIDIVADVKTEKIVVLGGSGFVGSAICRAAVSKGIEVVSFSRSGRPSYSDSWVDQVNWLPGDVFYARWDEVLVGATAVVSTLGGFGNEEQMKRINGEANVIAVNAAKEYGVPKFILISVHDYNLPSFLLTSGYFTGKRKAESEVLSKYPASGVVLRPGFIYGKRKVNGFEVPLDAVGEPLEKLLSSVENFTKPLSSLPASDLILAPPVSVDDVAYAVINGVIDDSFFGVFTIEQIKEAASKVRV

SEQ ID NO: 9553 - protein, 306 aa, Zea mays subsp. mays
  peptide (1)..(306): Ceres Seq. ID no. 12416640
  misc_feature (1)..(306): Homolog of NCBI NO: 38346147 NR Description: OSJNBb0118P14.7 [Oryza sativa (japonica
  misc_feature (47)..(305): Homolog of NCBI NO: 18398333 NR Description: expressed protein; protein id: At1g32220.1, by cDNA: 3464. [Arabidopsis thaliana] >gi|25403150|pir||G86446
  misc_feature (72)..(288): Homolog of NCBI NO: 18416362 NR Description: putative protein; protein id: At5g10730.1, by cDNA: 10217., supported by cDNA: gi_13926272, supported by gi_16323237, supported by cDNA: gi_19698948 [Arabidopsis
  misc_feature (71)..(297): Homolog of NCBI NO: 18417824 NR Description: putative protein; protein id: At5g15910.1, by cDNA: 22994., supported by cDNA: gi_15292960, supported by gi_21280840 [Arabidopsis thaliana] >gi|15292961|gb|AAK93591.1|
  misc_feature (71)..(297): Homolog of NCBI NO: 21592373 NR Description: unknown [Arabidopsis thaliana]
  misc_feature (72)..(288): Homolog of NCBI NO: 10129651 NR Description: putative protein [Arabidopsis thaliana]
  misc_feature (153)..(297): Homolog of NCBI NO: 11346175 NR Description: hypothetical protein F1N13_50 - Arabidopsis >gi|9755637|emb|CAC01790.1| putative protein [Arabidopsis
  misc_feature (137)..(280): Homolog of NCBI NO: 8744993 NR Description: hypothetical protein P1295.07 [Leishmania major]
  misc_feature (73)..(108): Homolog of NCBI NO: 8744993 NR Description: hypothetical protein P1295.07 [Leishmania major]
  misc_feature (74)..(271): Homolog of NCBI NO: 23037289 NR Description: hypothetical protein [Oenococcus oeni MCW]
MAPSPILVRPPALANSPLPPPRCVAAVAAAPAVRTAPAAPFSRLRTKCRFAASDVREDYSSTPIDIVADVKTEKIVVLGGSGFVGSAICRAAVSKGIEVVSFSRSGRPSYSDSWVDQVNWLPGDVFYARWDEVLVGATAVVSTLGGFGNEEQMKRINGEANVIAVNAAKEYGVPKFILISVHDYNLPSFLLTSGYFTGKRKAESEVLSKYPASGVVLRPGFIYGKRKVNGFEVPLDAVGEPLEKLLSSVENFTKPLSSLPASDLILAPPVSVDDVAYAVINGVIDDSFFGVFTIEQIKEAASKVRV

SEQ ID NO: 9554 - DNA, 909 bp, Zea mays subsp. mays; identical to SEQ ID NO: 3686
  misc_feature (1)..(909): Ceres Seq. ID no. 12356120
  misc_feature: MA Experiment ID: 108522 Result: Down-regulated in Transcription
  misc_feature: MA Experiment 108522 PARAMETER Experiment Name: Zm_42deg_Heat_P Parameter: Age (day) Value: 8
  misc_feature: MA Experiment 108522 PARAMETER Experiment Name: Zm_42deg_Heat_P Parameter: Organism Value: Zea mays
  misc_feature: MA Experiment 108522 PARAMETER Experiment Name: Zm_42deg_Heat_P Parameter: Plant Line Value: 35A19
  misc_feature: MA Experiment 108522 PARAMETER Experiment Name: Zm_42deg_Heat_P Parameter: Temperature (deg C) Value: 42 vs. 22
  misc_feature: MA Experiment 108522 PARAMETER Experiment Name: Zm_42deg_Heat_P Parameter: Timepoint (hr) Value: 1
  misc_feature: MA Experiment 108522 PARAMETER Experiment Name: Zm_42deg_Heat_P Parameter: Tissue Value: Aerial
  misc_feature: MA Experiment ID: 108543 Result: Down-regulated in Transcription
  misc_feature: MA Experiment ID: 108689 Result: Up-regulated in Transcription
  misc_feature: MA Experiment 108689 PARAMETER Experiment Name: Zm_Drought_Roots_P Parameter: Age (day) Value: 9
  misc_feature: MA Experiment 108689 PARAMETER Experiment Name: Zm_Drought_Roots_P Parameter: Organism Value: Zea mays
  misc_feature: MA Experiment 108689 PARAMETER Experiment Name: Zm_Drought_Roots_P Parameter: Plant Line Value: 35A19
  misc_feature: MA Experiment 108689 PARAMETER Experiment Name: Zm_Drought_Roots_P Parameter: Timepoint (hr) Value: 24
  misc_feature: MA Experiment 108689 PARAMETER Experiment Name: Zm_Drought_Roots_P Parameter: Tissue Value: Roots
  misc_feature: MA Experiment 108689 PARAMETER Experiment Name: Zm_Drought_Roots_P Parameter: Treatment Value: Drought vs. No Drought
  misc_feature: MA Experiment ID: 20000479 Result: Up-regulated in Transcription
  misc_feature: MA Experiment 20000479 PARAMETER Experiment Name: Zm_Drought_P Parameter: Age (day) Value: 10
  misc_feature: MA Experiment 20000479 PARAMETER Experiment Name: Zm_Drought_P Parameter: Organism Value: Zea mays
  misc_feature: MA Experiment 20000479 PARAMETER Experiment Name: Zm_Drought_P Parameter: Plant Line Value: 35A19
  misc_feature: MA Experiment 20000479 PARAMETER Experiment Name: Zm_Drought_P Parameter: Timepoint (hr) Value: 48
  misc_feature: MA Experiment 20000479 PARAMETER Experiment Name: Zm_Drought_P Parameter: Tissue Value: Aerial
  misc_feature: MA Experiment 20000479 PARAMETER Experiment Name: Zm_Drought_P Parameter: Treatment Value: Drought vs. No Drought
  misc_feature: MA Experiment ID: 20000480 Result: Up-regulated in Transcription
  misc_feature: MA Experiment 20000480 PARAMETER Experiment Name: Zm_Drought_P Parameter: Age (day) Value: 11
  misc_feature: MA Experiment 20000480 PARAMETER Experiment Name: Zm_Drought_P Parameter: Organism Value: Zea mays
  misc_feature: MA Experiment 20000480 PARAMETER Experiment Name: Zm_Drought_P Parameter: Plant Line Value: 35A19
  misc_feature: MA Experiment 20000480 PARAMETER Experiment Name: Zm_Drought_P Parameter: Timepoint (hr) Value: 72
  misc_feature: MA Experiment 20000480 PARAMETER Experiment Name: Zm_Drought_P Parameter: Tissue Value: Aerial
  misc_feature: MA Experiment 20000480 PARAMETER Experiment Name: Zm_Drought_P Parameter: Treatment Value: Drought vs. No Drought
  misc_feature: MA Experiment ID: 20000534 Result: Down-regulated in Transcription
  misc_feature: MA Experiment 20000534 PARAMETER Experiment Name: Zm_Hybrid_Pollen_P Parameter: Age (day) Value: 8
  misc_feature: MA Experiment 20000534 PARAMETER Experiment Name: Zm_Hybrid_Pollen_P Parameter: Organism Value: Zea mays
  misc_feature: MA Experiment 20000534 PARAMETER Experiment Name: Zm_Hybrid_Pollen_P Parameter: Plant Line Value: 35A19
  misc_feature: MA Experiment 20000534 PARAMETER Experiment Name: Zm_Hybrid_Pollen_P Parameter: Tissue Value: Pollen vs. Aerial
  misc_feature: MA Experiment ID: 20000535 Result: Down-regulated in Transcription
  misc_feature: MA Experiment 20000535 PARAMETER Experiment Name: Zm_Hybrid_Seed_Dev_P Parameter: DAP Value: 30 vs. 12
  misc_feature: MA Experiment 20000535 PARAMETER Experiment Name: Zm_Hybrid_Seed_Dev_P Parameter: Organism Value: Zea mays
  misc_feature: MA Experiment 20000535 PARAMETER Experiment Name: Zm_Hybrid_Seed_Dev_P Parameter: Plant Line Value: 35A19
  misc_feature: MA Experiment 20000535 PARAMETER Experiment Name: Zm_Hybrid_Seed_Dev_P Parameter: Tissue Value: Embryo vs. Unfert Floret

SEQ ID NO: 9555 - protein, 198 aa, Zea mays subsp. mays; identical to SEQ ID NO: 3687
  peptide (1)..(198): Ceres Seq. ID no. 12356121
  misc_feature (19)..(178): Pfam Name: Equine herpesvirus glycoprotein gp2 Pfam Description: Equine herpesvirus glycoprotein gp2
  misc_feature (11)..(190): Homolog of NCBI NO: 11359723 NR Description: proteophosphoglycan, membrane-associated - Leishmania major (fragment) >gi|5420389|emb|CAB46680.1|
  misc_feature (19)..(193): Homolog of NCBI NO: 32699068 NR Description: hypothetical protein FLJ35107 [Homo sapiens]
  misc_feature (1)..(193): Homolog of NCBI NO: 2429362 NR Description: proline rich protein [Santalum album]
  misc_feature (13)..(190): Homolog of NCBI NO: 11359723 NR Description: proteophosphoglycan, membrane-associated - Leishmania major (fragment) >gi|5420389|emb|CAB46680.1|
  misc_feature (19)..(193): Homolog of NCBI NO: 32699068 NR Description: hypothetical protein FLJ35107 [Homo sapiens]
  misc_feature (17)..(183): Homolog of NCBI NO: 32699068 NR Description: hypothetical protein FLJ35107 [Homo sapiens]
  misc_feature (11)..(192): Homolog of NCBI NO: 11359723 NR Description: proteophosphoglycan, membrane-associated - Leishmania major (fragment) >gi|5420389|emb|CAB46680.1|
  misc_feature (11)..(193): Homolog of NCBI NO: 13592175 NR Description: ppg3 [Leishmania major]
  misc_feature (11)..(190): Homolog of NCBI NO: 13592175 NR Description: ppg3 [Leishmania major]
  misc_feature (11)..(190): Homolog of NCBI NO: 13592175 NR Description: ppg3 [Leishmania major]

SEQ ID NO: 9556 - protein, 190 aa, Zea mays subsp. mays; identical to SEQ ID NO: 3688
  peptide (1)..(190): Ceres Seq. ID no. 12356122
  misc_feature (29)..(168): Pfam Name: Protein of unknown function, DUF538 Pfam Description: Protein of unknown function, DUF538
  misc_feature (39)..(173): Homolog of NCBI NO: 15235335 NR Description: putative protein; protein id: At4g02360.1
  misc_feature (23)..(168): Homolog of NCBI NO: 18379012 NR Description: Expressed protein; protein id: At1g02813.1,
  misc_feature (13)..(170): Homolog of NCBI NO: 21554037 NR Description: unknown [Arabidopsis thaliana]
  misc_feature (29)..(168): Homolog of NCBI NO: 18379014 NR Description: Expressed protein; protein id: At1g02816.1, by cDNA: 28445., supported by cDNA: gi_14423479, supported by
  misc_feature (13)..(170): Homolog of NCBI NO: 18411923 NR Description: coded for by A. thaliana cDNA R64991; protein id: supported by cDNA: 19543., supported by cDNA: gi_13430841, by cDNA: gi_15810602 [Arabidopsis thaliana]
  misc_feature (23)..(168): Homolog of NCBI NO: 21553750 NR Description: unknown [Arabidopsis thaliana]

SEQ ID NO: 9557 - protein, 173 aa, Zea mays subsp. mays; identical to SEQ ID NO: 3689
  peptide (1)..(173): Ceres Seq. ID no. 12356123
  misc_feature (12)..(151): Pfam Name: Protein of unknown function, DUF538 Pfam Description: Protein of unknown function, DUF538
  misc_feature (1)..(153): Homolog of NCBI NO: 18411923 NR Description: coded for by A. thaliana cDNA R64991; protein id: supported by cDNA: 19543., supported by cDNA: gi_13430841, by cDNA: gi_15810602 [Arabidopsis thaliana]
  misc_feature (1)..(153): Homolog of NCBI NO: 21554037 NR Description: unknown [Arabidopsis thaliana]
  misc_feature (12)..(151): Homolog of NCBI NO: 18379014 NR Description: Expressed protein; protein id: At1g02816.1, by cDNA: 28445., supported by cDNA: gi_14423479, supported by
  misc_feature (22)..(156): Homolog of NCBI NO: 15235335 NR Description: putative protein; protein id: At4g02360.1
  misc_feature (6)..(151): Homolog of NCBI NO: 18379012 NR Description: Expressed protein; protein id: At1g02813.1,
  misc_feature (6)..(151): Homolog of NCBI NO: 21553750 NR Description: unknown [Arabidopsis thaliana]

SEQ ID NO: 9558 - DNA, 1283 bp, Zea mays subsp. mays
  misc_feature (1)..(1283): Ceres Seq. ID no. 13494816
  misc_feature: MA Experiment ID: 108504 Result: Down-regulated in Transcription
  misc_feature: MA Experiment 108504 PARAMETER Experiment Name: Zm_Drought_P Parameter: Age (day) Value: 8
  misc_feature: MA Experiment 108504 PARAMETER Experiment Name: Zm_Drought_P Parameter: Organism Value: Zea mays
  misc_feature: MA Experiment 108504 PARAMETER Experiment Name: Zm_Drought_P Parameter: Plant Line Value: 35A19
  misc_feature: MA Experiment 108504 PARAMETER Experiment Name: Zm_Drought_P Parameter: Timepoint (hr) Value: 12
  misc_feature: MA Experiment 108504 PARAMETER Experiment Name: Zm_Drought_P Parameter: Tissue Value: Aerial
  misc_feature: MA Experiment 108504 PARAMETER Experiment Name: Zm_Drought_P Parameter: Treatment Value: Drought vs. No Drought
  misc_feature: MA Experiment ID: 108527 Result: Down-regulated in Transcription
  misc_feature: MA Experiment 108527 PARAMETER Experiment Name: Zm_5mM_NO_P Parameter: Age (day) Value: 8
  misc_feature: MA Experiment 108527 PARAMETER Experiment Name: Zm_5mM_NO_P Parameter: Organism Value: Zea mays
  misc_feature: MA Experiment 108527 PARAMETER Experiment Name: Zm_5mM_NO_P Parameter: Plant Line Value: 35A19
  misc_feature: MA Experiment 108527 PARAMETER Experiment Name: Zm_5mM_NO_P Parameter: Timepoint (hr) Value: 6
  misc_feature: MA Experiment 108527 PARAMETER Experiment Name: Zm_5mM_NO_P Parameter: Tissue Value: Aerial
  misc_feature: MA Experiment 108527 PARAMETER Experiment Name: Zm_5mM_NO_P Parameter: Treatment Value: 5mM NO vs. No Treatment
  misc_feature: MA Experiment ID: 20000480 Result: Down-regulated in Transcription
  misc_feature: MA Experiment 20000480 PARAMETER Experiment Name: Zm_Drought_P Parameter: Age (day) Value: 11
  misc_feature: MA Experiment 20000480 PARAMETER Experiment Name: Zm_Drought_P Parameter: Organism Value: Zea mays
  misc_feature: MA Experiment 20000480 PARAMETER Experiment Name: Zm_Drought_P Parameter: Plant Line Value: 35A19
  misc_feature: MA Experiment 20000480 PARAMETER Experiment Name: Zm_Drought_P Parameter: Timepoint (hr) Value: 72
  misc_feature: MA Experiment 20000480 PARAMETER Experiment Name: Zm_Drought_P Parameter: Tissue Value: Aerial
  misc_feature: MA Experiment 20000480 PARAMETER Experiment Name: Zm_Drought_P Parameter: Treatment Value: Drought vs. No Drought
aaaacaccgattcgtttccccttggcacctggcgccctgtcgccttcgaaaaacagccgccgccgtcgcccgtcccggatccgacggcccccgctccttcgtctagtatttatactagtgccttgccggcgctgctcctgttgcctctcgcatttgcccacgcccgcagcgcctcgcctcggctgctctacctctatcccgcgacccgcgagatcggaatcgcggcgccccgccgccctcctccaaaatggcaccgtctctgctcggggggttcaccaagtcgttggccatgacggtgctctccgagatcggggacaagaccttcttcgccgccgcgattctggctatgcgccatcccaggaaactcgtattggcaggctgtttaactgcactaatagtcatgacagctctatcggcttctctaggttgggttgcaccaaatctgatttcacgtaaatggactcatcatttgaccactctattgttctttctatttggcatttggtcattgtgggaaggcttcaaggaagatgggtaccgagattcggaagaattggctgaagttgaagcagagctggatgctgcctttaagagtaataaaggtgaatctaaaaataaatttaaggcgaatgatgatatgaagaaacagcaaagaccatttctcatgcagttcttctcaccaatttttctgaaggcattttctattacattctttggtgagtggggtgacaagagccagattgctacaattggcttggctgctgatgaaaacccgttcggtgttgtcctgggtggaatcatagcgcaagcactctgcactactgctgccgttcttggtggaaagagcctagcgtcccagatatctgagaagatggttgaactgtcaagcggagtgctcttcctgctcttcggtatcatgtccttactctctggaccagaaggagaattgtaatccctgcttgagcctttttcagctagctgattaacatggctttctcttcttagacctatcttatttcagtacatgaatgatggcaacgaaagccatccatccatggcgaacaggatggtgatttaacagtttagccgacacgctgtaaacatttcagtcgcccttcaaaaattactacatgttacagaagtctgtagcgattgtatatttgtattctgtcgtgcccagcacgtgaaattttgttatcgcaattacatgcgttaacaaagctttgttcgtgaaccaagtattcaggcaattaatatggggcttatagcaggcctttgtcttt

SEQ ID NO: 9559 - protein, 234 aa, Zea mays subsp. mays
  peptide (1)..(234): Ceres Seq. ID no. 13494817
  misc_feature (9)..(84): Pfam Name: Uncharacterized protein family UPF0016 Pfam Description: Uncharacterized protein family UPF0016
  misc_feature (4)..(228): Homolog of NCBI NO: 15221462 NR Description: transmembrane protein -related [Arabidopsis
  misc_feature (4)..(231): Homolog of NCBI NO: 15222613 NR Description: transmembrane protein -related [Arabidopsis
  misc_feature (4)..(231): Homolog of NCBI NO: 21593636 NR Description: transmembrane protein, putative [Arabidopsis
  misc_feature (1)..(231): Homolog of NCBI NO: 6755853 NR Description: TPA regulated locus [Mus musculus]
  misc_feature (1)..(231): Homolog of NCBI NO: 7684611 NR Description: TPARDL [Mus musculus]
  misc_feature (1)..(231): Homolog of NCBI NO: 21357589 NR Description: CG4196-PC [Drosophila melanogaster]
  misc_feature (1)..(174): Homolog of NCBI NO: 34877387 NR Description: similar to probable transmembrane protein FT27 -
  misc_feature (170)..(231): Homolog of NCBI NO: 34877387 NR Description: similar to probable transmembrane protein FT27 -
  misc_feature (4)..(226): Homolog of NCBI NO: 17556152 NR Description: Uncharacterized protein family UPF0016 (32.1 kD) elegans] >gi|13491294|gb|AAK27882.1| Hypothetical protein
  misc_feature (2)..(230): Homolog of NCBI NO: 18421551 NR Description: transmembrane protein FT27/PFT27-related
MAPSLLGGFTKSLAMTVLSEIGDKTFFAAAILAMRHPRKLVLAGCLTALIVMTALSASLGWVAPNLISRKWTHHLTTLLFFLFGIWSLWEGFKEDGYRDSEELAEVEAELDAAFKSNKGESKNKFKANDDMKKQQRPFLMQFFSPIFLKAFSITFFGEWGDKSQIATIGLAADENPFGVVLGGIIAQALCTTAAVLGGKSLASQISEKMVELSSGVLFLLFGIMSLLSGPEGEL

SEQ ID NO: 9560 - protein, 220 aa, Zea mays subsp. mays
  peptide (1)..(220): Ceres Seq. ID no. 13494818
  misc_feature (1)..(70): Pfam Name: Uncharacterized protein family UPF0016 Pfam Description: Uncharacterized protein family UPF0016
  misc_feature (1)..(214): Homolog of NCBI NO: 15221462 NR Description: transmembrane protein -related [Arabidopsis
  misc_feature (1)..(217): Homolog of NCBI NO: 15222613 NR Description: transmembrane protein -related [Arabidopsis
  misc_feature (1)..(217): Homolog of NCBI NO: 21593636 NR Description: transmembrane protein, putative [Arabidopsis
  misc_feature (1)..(217): Homolog of NCBI NO: 6755853 NR Description: TPA regulated locus [Mus musculus]
  misc_feature (1)..(217): Homolog of NCBI NO: 7684611 NR Description: TPARDL [Mus musculus]
  misc_feature (1)..(217): Homolog of NCBI NO: 21357589 NR Description: CG4196-PC [Drosophila melanogaster]
  misc_feature (1)..(160): Homolog of NCBI NO: 34877387 NR Description: similar to probable transmembrane protein FT27 -
  misc_feature (156)..(217): Homolog of NCBI NO: 34877387 NR Description: similar to probable transmembrane protein FT27 -
  misc_feature (1)..(212): Homolog of NCBI NO: 17556152 NR Description: Uncharacterized protein family UPF0016 (32.1 kD) elegans] >gi|13491294|gb|AAK27882.1| Hypothetical protein
  misc_feature (1)..(216): Homolog of NCBI NO: 18421551 NR Description: transmembrane protein FT27/PFT27-related
MTVLSEIGDKTFFAAAILAMRHPRKLVLAGCLTALIVMTALSASLGWVAPNLISRKWTHHLTTLLFFLFGIWSLWEGFKEDGYRDSEELAEVEAELDAAFKSNKGESKNKFKANDDMKKQQRPFLMQFFSPIFLKAFSITFFGEWGDKSQIATIGLAADENPFGVVLGGIIAQALCTTAAVLGGKSLASQISEKMVELSSGVLFLLFGIMSLLSGPEGEL

SEQ ID NO: 9561 - protein, 201 aa, Zea mays subsp. mays
  peptide (1)..(201): Ceres Seq. ID no. 13494819
  misc_feature (1)..(51): Pfam Name: Uncharacterized protein family UPF0016 Pfam Description: Uncharacterized protein family UPF0016
  misc_feature (1)..(195): Homolog of NCBI NO: 15221462 NR Description: transmembrane protein -related [Arabidopsis
  misc_feature (1)..(198): Homolog of NCBI NO: 15222613 NR Description: transmembrane protein -related [Arabidopsis
  misc_feature (1)..(198): Homolog of NCBI NO: 21593636 NR Description: transmembrane protein, putative [Arabidopsis
  misc_feature (1)..(198): Homolog of NCBI NO: 6755853 NR Description: TPA regulated locus [Mus musculus]
  misc_feature (1)..(198): Homolog of NCBI NO: 7684611 NR Description: TPARDL [Mus musculus]
  misc_feature (1)..(198): Homolog of NCBI NO: 21357589 NR Description: CG4196-PC [Drosophila melanogaster]
  misc_feature (1)..(141): Homolog of NCBI NO: 34877387 NR Description: similar to probable transmembrane protein FT27 -
  misc_feature (137)..(198): Homolog of NCBI NO: 34877387 NR Description: similar to probable transmembrane protein FT27 -
  misc_feature (1)..(193): Homolog of NCBI NO: 17556152 NR Description: Uncharacterized protein family UPF0016 (32.1 kD) elegans] >gi|13491294|gb|AAK27882.1| Hypothetical protein
  misc_feature (1)..(197): Homolog of NCBI NO: 18421551 NR Description: transmembrane protein FT27/PFT27-related
MRHPRKLVLAGCLTALIVMTALSASLGWVAPNLISRKWTHHLTTLLFFLFGIWSLWEGFKEDGYRDSEELAEVEAELDAAFKSNKGESKNKFKANDDMKKQQRPFLMQFFSPIFLKAFSITFFGEWGDKSQIATIGLAADENPFGVVLGGIIAQALCTTAAVLGGKSLASQISEKMVELSSGVLFLLFGIMSLLSGPEGEL

SEQ ID NO: 9562 - DNA, 1693 bp, Zea mays subsp. mays; identical to SEQ ID NO: 7356
  misc_feature (1)..(1693): Ceres Seq. ID no. 13498349
  misc_feature: MA Experiment ID: 108504 Result: Down-regulated in Transcription
  misc_feature: MA Experiment 108504 PARAMETER Experiment Name: Zm_Drought_P Parameter: Age (day) Value: 8
  misc_feature: MA Experiment 108504 PARAMETER Experiment Name: Zm_Drought_P Parameter: Organism Value: Zea mays
  misc_feature: MA Experiment 108504 PARAMETER Experiment Name: Zm_Drought_P Parameter: Plant Line Value: 35A19
  misc_feature: MA Experiment 108504 PARAMETER Experiment Name: Zm_Drought_P Parameter: Timepoint (hr) Value: 12
  misc_feature: MA Experiment 108504 PARAMETER Experiment Name: Zm_Drought_P Parameter: Tissue Value: Aerial
  misc_feature: MA Experiment 108504 PARAMETER Experiment Name: Zm_Drought_P Parameter: Treatment Value: Drought vs. No Drought
  misc_feature: MA Experiment ID: 108528 Result: Up-regulated in Transcription
  misc_feature: MA Experiment 108528 PARAMETER Experiment Name: Zm_Imbibed_Seeds_P Parameter: Age (day) Value: 5 vs. 2
  misc_feature: MA Experiment 108528 PARAMETER Experiment Name: Zm_Imbibed_Seeds_P Parameter: Organism Value: Zea mays
  misc_feature: MA Experiment 108528 PARAMETER Experiment Name: Zm_Imbibed_Seeds_P Parameter: Plant Line Value: 35A19
  misc_feature: MA Experiment 108528 PARAMETER Experiment Name: Zm_Imbibed_Seeds_P Parameter: Tissue Value: Aerial vs. Embryo
  misc_feature: MA Experiment ID: 108529 Result: Up-regulated in Transcription
  misc_feature: MA Experiment 108529 PARAMETER Experiment Name: Zm_Imbibed_Seeds_P Parameter: Age (day) Value: 5 vs. 2
  misc_feature: MA Experiment 108529 PARAMETER Experiment Name: Zm_Imbibed_Seeds_P Parameter: Organism Value: Zea mays
  misc_feature: MA Experiment 108529 PARAMETER Experiment Name: Zm_Imbibed_Seeds_P Parameter: Plant Line Value: 35A19
  misc_feature: MA Experiment 108529 PARAMETER Experiment Name: Zm_Imbibed_Seeds_P Parameter: Tissue Value: Roots vs. Embryo
  misc_feature: MA Experiment ID: 108530 Result: Up-regulated in Transcription
  misc_feature: MA Experiment 108530 PARAMETER Experiment Name: Zm_Imbibed_Seeds_P Parameter: Age (day) Value: 6 vs. 2
  misc_feature: MA Experiment 108530 PARAMETER Experiment Name: Zm_Imbibed_Seeds_P Parameter: Organism Value: Zea mays
  misc_feature: MA Experiment 108530 PARAMETER Experiment Name: Zm_Imbibed_Seeds_P Parameter: Plant Line Value: 35A19
  misc_feature: MA Experiment 108530 PARAMETER Experiment Name: Zm_Imbibed_Seeds_P Parameter: Tissue Value: Aerial vs. Embryo
  misc_feature: MA Experiment ID: 108535 Result: Down-regulated in Transcription
  misc_feature: MA Experiment 108535 PARAMETER Experiment Name: Zm_Meristem_P Parameter: Age (day) Value: 8
  misc_feature: MA Experiment 108535 PARAMETER Experiment Name: Zm_Meristem_P Parameter: Organism Value: Zea mays
  misc_feature: MA Experiment 108535 PARAMETER Experiment Name: Zm_Meristem_P Parameter: Plant Line Value: 35A19
  misc_feature: MA Experiment 108535 PARAMETER Experiment Name: Zm_Meristem_P Parameter: Tissue Value: Root Meristem vs. Above Root Meristem
  misc_feature: MA Experiment ID: 108536 Result: Down-regulated in Transcription
  misc_feature: MA Experiment 108536 PARAMETER Experiment Name: Zm_Meristem_P Parameter: Age (day) Value: 8
  misc_feature: MA Experiment 108536 PARAMETER Experiment Name: Zm_Meristem_P Parameter: Organism Value: Zea mays
  misc_feature: MA Experiment 108536 PARAMETER Experiment Name: Zm_Meristem_P Parameter: Plant Line Value: 35A19
  misc_feature: MA Experiment 108536 PARAMETER Experiment Name: Zm_Meristem_P Parameter: Tissue Value: Shoot Meristem vs. Above Shoot Meristem
  misc_feature: MA Experiment ID: 108545 Result: Up-regulated in Transcription
  misc_feature: MA Experiment 108545 PARAMETER Experiment Name: Zm_Imbibed_Seeds_P Parameter: Age (day) Value: 3 vs. 2
  misc_feature: MA Experiment 108545 PARAMETER Experiment Name: Zm_Imbibed_Seeds_P Parameter: Organism Value: Zea mays
  misc_feature: MA Experiment 108545 PARAMETER Experiment Name: Zm_Imbibed_Seeds_P Parameter: Plant Line Value: 35A19
  misc_feature: MA Experiment 108545 PARAMETER Experiment Name: Zm_Imbibed_Seeds_P Parameter: Tissue Value: Aerial vs. Embryo
  misc_feature: MA Experiment ID: 108547 Result: Up-regulated in Transcription
  misc_feature: MA Experiment 108547 PARAMETER Experiment Name: Zm_Imbibed_Seeds_P Parameter: Age (day) Value: 4 vs. 2
  misc_feature: MA Experiment 108547 PARAMETER Experiment Name: Zm_Imbibed_Seeds_P Parameter: Organism Value: Zea mays
  misc_feature: MA Experiment 108547 PARAMETER Experiment Name: Zm_Imbibed_Seeds_P Parameter: Plant Line Value: 35A19
  misc_feature: MA Experiment 108547 PARAMETER Experiment Name: Zm_Imbibed_Seeds_P Parameter: Tissue Value: Aerial vs. Embryo
  misc_feature: MA Experiment ID: 108556 Result: Down-regulated in Transcription
  misc_feature: MA Experiment 108556 PARAMETER Experiment Name: Zm_Drought_P Parameter: Age (day) Value: 9
  misc_feature: MA Experiment 108556 PARAMETER Experiment Name: Zm_Drought_P Parameter: Organism Value: Zea mays
  misc_feature: MA Experiment 108556 PARAMETER Experiment Name: Zm_Drought_P Parameter: Plant Line Value: 35A19
  misc_feature: MA Experiment 108556 PARAMETER Experiment Name: Zm_Drought_P Parameter: Timepoint (hr) Value: 24
  misc_feature: MA Experiment 108556 PARAMETER Experiment Name: Zm_Drought_P Parameter: Tissue Value: Aerial
  misc_feature: MA Experiment 108556 PARAMETER Experiment Name: Zm_Drought_P Parameter: Treatment Value: Drought vs. No Drought
  misc_feature: MA Experiment ID: 108559 Result: Down-regulated in Transcription
  misc_feature: MA Experiment 108559 PARAMETER Experiment Name: Zm_5mM_NO_P Parameter: Age (day) Value: 8
  misc_feature: MA Experiment 108559 PARAMETER Experiment Name: Zm_5mM_NO_P Parameter: Organism Value: Zea mays
  misc_feature: MA Experiment 108559 PARAMETER Experiment Name: Zm_5mM_NO_P Parameter: Plant Line Value: 35A19
  misc_feature: MA Experiment 108559 PARAMETER Experiment Name: Zm_5mM_NO_P Parameter: Timepoint (hr) Value: 12
  misc_feature: MA Experiment 108559 PARAMETER Experiment Name: Zm_5mM_NO_P Parameter: Tissue Value: Aerial
  misc_feature: MA Experiment 108559 PARAMETER Experiment Name: Zm_5mM_NO_P Parameter: Treatment Value: 5mM NO vs. No Treatment
  misc_feature: MA Experiment ID: 20000479 Result: Down-regulated in Transcription
  misc_feature: MA Experiment 20000479 PARAMETER Experiment Name: Zm_Drought_P Parameter: Age (day) Value: 10
  misc_feature: MA Experiment 20000479 PARAMETER Experiment Name: Zm_Drought_P Parameter: Organism Value: Zea mays
  misc_feature: MA Experiment 20000479 PARAMETER Experiment Name: Zm_Drought_P Parameter: Plant Line Value: 35A19
  misc_feature: MA Experiment 20000479 PARAMETER Experiment Name: Zm_Drought_P Parameter: Timepoint (hr) Value: 48
  misc_feature: MA Experiment 20000479 PARAMETER Experiment Name: Zm_Drought_P Parameter: Tissue Value: Aerial
  misc_feature: MA Experiment 20000479 PARAMETER Experiment Name: Zm_Drought_P Parameter: Treatment Value: Drought vs. No Drought
  misc_feature: MA Experiment ID: 20000480 Result: Down-regulated in Transcription
  misc_feature: MA Experiment 20000480 PARAMETER Experiment Name: Zm_Drought_P Parameter: Age (day) Value: 11
  misc_feature: MA Experiment 20000480 PARAMETER Experiment Name: Zm_Drought_P Parameter: Organism Value: Zea mays
  misc_feature: MA Experiment 20000480 PARAMETER Experiment Name: Zm_Drought_P Parameter: Plant Line Value: 35A19
  misc_feature: MA Experiment 20000480 PARAMETER Experiment Name: Zm_Drought_P Parameter: Timepoint (hr) Value: 72
  misc_feature: MA Experiment 20000480 PARAMETER Experiment Name: Zm_Drought_P Parameter: Tissue Value: Aerial
  misc_feature: MA Experiment 20000480 PARAMETER Experiment Name: Zm_Drought_P Parameter: Treatment Value: Drought vs. No Drought
  misc_feature: MA Experiment ID: 20000487 Result: Down-regulated in Transcription
  misc_feature: MA Experiment 20000487 PARAMETER Experiment Name: Zm_50mM_NH4NO3_L_to_H_P Parameter: Organism Value: Zea mays
  misc_feature: MA Experiment 20000487 PARAMETER Experiment Name: Zm_50mM_NH4NO3_L_to_H_P Parameter: Timepoint (hr) Value: 4
  misc_feature: MA Experiment 20000487 PARAMETER Experiment Name: Zm_50mM_NH4NO3_L_to_H_P Parameter: Tissue Value: Leaves
  misc_feature: MA Experiment 20000487 PARAMETER Experiment Name: Zm_50mM_NH4NO3_L_to_H_P Parameter: Treatment Value: 50mM NH4NO3 vs. 100mM Mannitol
  misc_feature: MA Experiment ID: 20000492 Result: Down-regulated in Transcription
  misc_feature: MA Experiment 20000492 PARAMETER Experiment Name: Zm_Hybrid_Seed_Dev_P Parameter: DAP Value: 12
  misc_feature: MA Experiment 20000492 PARAMETER Experiment Name: Zm_Hybrid_Seed_Dev_P Parameter: Organism Value: Zea mays
  misc_feature: MA Experiment 20000492 PARAMETER Experiment Name: Zm_Hybrid_Seed_Dev_P Parameter: Plant Line Value: 35A19
  misc_feature: MA Experiment 20000492 PARAMETER Experiment Name: Zm_Hybrid_Seed_Dev_P Parameter: Tissue Value: Fert Kernel vs. Unfert Floret
  misc_feature: MA Experiment ID: 20000535 Result: Down-regulated in Transcription
  misc_feature: MA Experiment 20000535 PARAMETER Experiment Name: Zm_Hybrid_Seed_Dev_P Parameter: DAP Value: 30 vs. 12
  misc_feature: MA Experiment 20000535 PARAMETER Experiment Name: Zm_Hybrid_Seed_Dev_P Parameter: Organism Value: Zea mays
  misc_feature: MA Experiment 20000535 PARAMETER Experiment Name: Zm_Hybrid_Seed_Dev_P Parameter: Plant Line Value: 35A19
  misc_feature: MA Experiment 20000535 PARAMETER Experiment Name: Zm_Hybrid_Seed_Dev_P Parameter: Tissue Value: Embryo vs. Unfert Floret
  misc_feature: MA Experiment ID: 20001613 Result: Down-regulated in Transcription
  misc_feature: MA Experiment 20001613 PARAMETER Experiment Name: Zm_50ppm_KNO3_L-to-H_P Parameter: Age (day) Value: 20
  misc_feature: MA Experiment 20001613 PARAMETER Experiment Name: Zm_50ppm_KNO3_L-to-H_P Parameter: Organism Value: Zea mays
  misc_feature: MA Experiment 20001613 PARAMETER Experiment Name: Zm_50ppm_KNO3_L-to-H_P Parameter: Plant Line Value: 35A19
  misc_feature: MA Experiment 20001613 PARAMETER Experiment Name: Zm_50ppm_KNO3_L-to-H_P Parameter: Timepoint (hr) Value: 24
  misc_feature: MA Experiment 20001613 PARAMETER Experiment Name: Zm_50ppm_KNO3_L-to-H_P Parameter: Tissue Value: Roots
  misc_feature: MA Experiment 20001613 PARAMETER Experiment Name: Zm_50ppm_KNO3_L-to-H_P Parameter: Treatment Value: 50ppm KNO3 vs. 50ppm KCl
  misc_feature: MA Experiment ID: 20001614 Result: Down-regulated in Transcription
  misc_feature: MA Experiment 20001614 PARAMETER Experiment Name: Zm_50ppm_KNO3_L-to-H_P Parameter: Age (day) Value: 21
  misc_feature: MA Experiment 20001614 PARAMETER Experiment Name: Zm_50ppm_KNO3_L-to-H_P Parameter: Organism Value: Zea mays
  misc_feature: MA Experiment 20001614 PARAMETER Experiment Name: Zm_50ppm_KNO3_L-to-H_P Parameter: Plant Line Value: 35A19
  misc_feature: MA Experiment 20001614 PARAMETER Experiment Name: Zm_50ppm_KNO3_L-to-H_P Parameter: Timepoint (hr) Value: 48
  misc_feature: MA Experiment 20001614 PARAMETER Experiment Name: Zm_50ppm_KNO3_L-to-H_P Parameter: Tissue Value: Roots
  misc_feature: MA Experiment 20001614 PARAMETER Experiment Name: Zm_50ppm_KNO3_L-to-H_P Parameter: Treatment Value: 50ppm KNO3 vs. 50ppm KCl

SEQ ID NO: 9563 - protein, 208 aa, Zea mays subsp. mays; identical to SEQ ID NO: 7357
  peptide (1)..(208): Ceres Seq. ID no. 13498350
  misc_feature (1)..(91): Homolog of NCBI NO: 34899270 NR Description: putative zinc-finger protein [Oryza sativa
  misc_feature (1)..(11): Homolog of NCBI NO: 34899270 NR Description: putative zinc-finger protein [Oryza sativa
  misc_feature (1)..(93): Homolog of NCBI NO: 7522220 NR Description: zinc-finger protein C60910 [imported] - rice
  misc_feature (1)..(91): Homolog of NCBI NO: 34899270 NR Description: putative zinc-finger protein [Oryza sativa
  misc_feature (1)..(11): Homolog of NCBI NO: 34899270 NR Description: putative zinc-finger protein [Oryza sativa
  misc_feature (1)..(93): Homolog of NCBI NO: 7522220 NR Description: zinc-finger protein C60910 [imported] - rice

SEQ ID NO: 9564 - protein, 206 aa, Zea mays subsp. mays; identical to SEQ ID NO: 7358
  peptide (1)..(206): Ceres Seq. ID no. 13498351
  misc_feature (12)..(58): Pfam Name: B-box zinc finger Pfam Description: B-box zinc finger
  misc_feature (12)..(58): Pfam Name: B-box zinc finger Pfam Description: B-box zinc finger
  misc_feature (3)..(69): Homolog of NCBI NO: 34899270 NR Description: putative zinc-finger protein [Oryza sativa
  misc_feature (1)..(111): Homolog of NCBI NO: 7522220 NR Description: zinc-finger protein C60910 [imported] - rice
  misc_feature (9)..(79): Homolog of NCBI NO: 38175538 NR Description: zinc-finger protein C60910-like [Oryza sativa
  misc_feature (11)..(62): Homolog of NCBI NO: 30685731 NR Description: CONSTANS B-box zinc finger family protein
  misc_feature (1)..(102): Homolog of NCBI NO: 34898680 NR Description: Hd1 [Oryza sativa (japonica cultivar-group)]
  misc_feature (1)..(111): Homolog of NCBI NO: 7522220 NR Description: zinc-finger protein C60910 [imported] - rice
  misc_feature (11)..(62): Homolog of NCBI NO: 30685731 NR Description: CONSTANS B-box zinc finger family protein
  misc_feature (8)..(85): Homolog of NCBI NO: 21667483 NR Description: CONSTANS-like protein [Hordeum vulgare subsp.
  misc_feature (8)..(85): Homolog of NCBI NO: 21667479 NR Description: CONSTANS-like protein [Hordeum vulgare subsp.
  misc_feature (16)..(68): Homolog of NCBI NO: 7489605 NR Description: zinc-finger protein S3574 [imported] - rice
  misc_feature (16)..(111): Homolog of NCBI NO: 15231491 NR Description: CONSTANS B-box zinc finger family protein
  misc_feature (1)..(81): Homolog of NCBI NO: 11094209 NR Description: allele:Hd1 [Oryza sativa]
  misc_feature (1)..(102): Homolog of NCBI NO: 34898680 NR Description: Hd1 [Oryza sativa (japonica cultivar-group)]
  misc_feature (9)..(79): Homolog of NCBI NO: 38175538 NR Description: zinc-finger protein C60910-like [Oryza sativa
  misc_feature (3)..(69): Homolog of NCBI NO: 34899270 NR Description: putative zinc-finger protein [Oryza sativa
  misc_feature (1)..(81): Homolog of NCBI NO: 11094209 NR Description: allele:Hd1 [Oryza sativa]
  misc_feature (16)..(111): Homolog of NCBI NO: 15231491 NR Description: CONSTANS B-box zinc finger family protein
  misc_feature (16)..(68): Homolog of NCBI NO: 7489605 NR Description: zinc-finger protein S3574 [imported] - rice
  misc_feature (8)..(85): Homolog of NCBI NO: 21667479 NR Description: CONSTANS-like protein [Hordeum vulgare subsp.
  misc_feature (8)..(85): Homolog of NCBI NO: 21667483 NR Description: CONSTANS-like protein [Hordeum vulgare subsp.

SEQ ID NO: 9565 - protein, 185 aa, Zea mays subsp. mays; identical to SEQ ID NO: 7359
  peptide (1)..(185): Ceres Seq. ID no. 13498352
  misc_feature (1)..(37): Pfam Name: B-box zinc finger Pfam Description: B-box zinc finger
  misc_feature (1)..(37): Pfam Name: B-box zinc finger Pfam Description: B-box zinc finger
  misc_feature (1)..(48): Homolog of NCBI NO: 34899270 NR Description: putative zinc-finger protein [Oryza sativa
  misc_feature (1)..(90): Homolog of NCBI NO: 7522220 NR Description: zinc-finger protein C60910 [imported] - rice
  misc_feature (1)..(58): Homolog of NCBI NO: 38175538 NR Description: zinc-finger protein C60910-like [Oryza sativa
  misc_feature (1)..(41): Homolog of NCBI NO: 30685731 NR Description: CONSTANS B-box zinc finger family protein
  misc_feature (1)..(81): Homolog of NCBI NO: 34898680 NR Description: Hd1 [Oryza sativa (japonica cultivar-group)]
  misc_feature (1)..(90): Homolog of NCBI NO: 7522220 NR Description: zinc-finger protein C60910 [imported] - rice
  misc_feature (1)..(41): Homolog of NCBI NO: 30685731 NR Description: CONSTANS B-box zinc finger family protein
  misc_feature (1)..(64): Homolog of NCBI NO: 21667483 NR Description: CONSTANS-like protein [Hordeum vulgare subsp.
  misc_feature (1)..(64): Homolog of NCBI NO: 21667479 NR Description: CONSTANS-like protein [Hordeum vulgare subsp.
  misc_feature (1)..(47): Homolog of NCBI NO: 7489605 NR Description: zinc-finger protein S3574 [imported] - rice
  misc_feature (1)..(90): Homolog of NCBI NO: 15231491 NR Description: CONSTANS B-box zinc finger family protein
  misc_feature (1)..(60): Homolog of NCBI NO: 11094209 NR Description: allele:Hd1 [Oryza sativa]
  misc_feature (1)..(81): Homolog of NCBI NO: 34898680 NR Description: Hd1 [Oryza sativa (japonica cultivar-group)]
  misc_feature (1)..(58): Homolog of NCBI NO: 38175538 NR Description: zinc-finger protein C60910-like [Oryza sativa
  misc_feature (1)..(48): Homolog of NCBI NO: 34899270 NR Description: putative zinc-finger protein [Oryza sativa
  misc_feature (1)..(60): Homolog of NCBI NO: 11094209 NR Description: allele:Hd1 [Oryza sativa]
  misc_feature (1)..(90): Homolog of NCBI NO: 15231491 NR Description: CONSTANS B-box zinc finger family protein
  misc_feature (1)..(47): Homolog of NCBI NO: 7489605 NR Description: zinc-finger protein S3574 [imported] - rice
  misc_feature (1)..(64): Homolog of NCBI NO: 21667479 NR Description: CONSTANS-like protein [Hordeum vulgare subsp.
  misc_feature (1)..(64): Homolog of NCBI NO: 21667483 NR Description: CONSTANS-like protein [Hordeum vulgare subsp.

SEQ ID NO: 9566 - DNA, 1867 bp, Zea mays subsp. mays
  misc_feature (1)..(1867): Ceres Seq. ID no. 12374910
  misc_feature: MA Experiment ID: 108543 Result: Down-regulated in Transcription
  misc_feature: MA Experiment ID: 108544 Result: Down-regulated in Transcription
gtccatggtatgcgcgggaacctcccgtctctcgccgcggccagtaatggcgtcgctctccctctgtccttcttccacacgaagcagctccacgcgcgcctcatcgtcgcatccccctcctccgcctctggccctgcctacctccgcctcctagtgctccgctcctatgctgcccgcggagacctttcctccgcccgccgcctgctggacgaggctccccgcccggcctcgccgcttctctacaacgccctaatccgcgcgcacgcccgccgtctcgaccttccagccgggctcgcgcttttcgcccgcatgcgctgctccgccactccgcccgacgcgcacaccttcgcctgcgtcctccgcgcctgcgctgaatcctcgcgcccggatgctgttaaggtcgttcatggtatcgctacaacatgcggtatgtgctcccgtccgattgtcctgagctcgcttgtcagtgcgtacgcgaagcttggcctcgtggacaatgctcgcagcttgttcgatggattgtgtgagccggacttggtcatttggaactccatgatgtccgcatatgggtaccaagggatgtggtatgatggtctacagatgttctccttaatgcggagagctgggcagcatccggatgggtattcaatggttagcttagtctcatgcttctggaatccggaaatacttgcatttggtcaagcagttcatggaatatgtgtcaagggaggttatgactctggacaccatgtgagaagcacacttgtgtcaatgtacatgaggtgtgggtgtgtggaatctggccaaagattgtttggtagcttgcctgatgtggatttgattacctggtcgtcactgattactgggctaatacaaacgggcaagtatgaggaatcatttgatttgttccggaaaatgtgctttacaggtaggaggcccgacagccatattgattgctagtgttctctcggtatttgcttctactgctgctattagctataccaaggaggtccactgttatgcagtcaagcttggagctgatatagacataagagtctcttcttcgctaatggatgcttatgcaaaatgtggtttcactgagctcggatactgggtgttccgccaagtacctaataagaactcagtcatgtacaacacggtcatatcaaaccttgaatctcacgggtttgcaactaaggctattgaagtcctagatgagatggttaatgataagctcaggcctgatagtgctaccttctcctctttacttgctgcttgttgtcatgtggggcacttggaggagggatggaagttgttcaggagaatgagggatgagttcaagatagttgttgaaatggagcactatgtgtacatggtgaggcttcttgcaacatttggccagctgaaggaggcatatgatcttatacagacaatgcaaatccaaccagattgtggtgtgtggggtgcattgctttggggttgttgtgtccatcgtgattctagcttcggcaggattgttgctgaaaagctatgtgaactcaattcagacaaagctgcttacagggttatgctctcaaacatgtatgcctcacaagagatgtggtgggatgctgaggaggttagggatgagttatcaaaagaaaatatgtacaagaacacagggacgagttgggttggtgaagtaaaaaaatgatggttggcatttgtcattgagaaagcatgtcagatatcaagtacatatgaactctatattgttatattctggtagagatgatatcttgtgaaactccaaacatgtactcgttggattttagcttaaccagttttgtactcagtctttccttataatcatgggaggttcatttgc

SEQ ID NO: 9567 - protein, 319 aa, Zea mays subsp. mays
  peptide (1)..(319): Ceres Seq. ID no. 12374911
  misc_feature (107)..(315): Homolog of NCBI NO: 34913768 NR Description: OSJNBa0051H17.34 [Oryza sativa (japonica
  misc_feature (212)..(316): Homolog of NCBI NO: 34913768 NR Description: OSJNBa0051H17.34 [Oryza sativa (japonica
  misc_feature (11)..(315): Homolog of NCBI NO: 34897084 NR Description: hypothetical protein [Oryza sativa (japonica group)] >gi|12957718|gb|AAK09236.1| hypothetical protein [Oryza
  misc_feature (49)..(319): Homolog of NCBI NO: 34903762 NR Description: unnamed protein product [Oryza sativa (japonica group)] >gi|7340873|dbj|BAA92963.1| unnamed protein product
  misc_feature (56)..(314): Homolog of NCBI NO: 15234006 NR Description: putative protein; protein id: At4g18750.1
  misc_feature (4)..(314): Homolog of NCBI NO: 34903762 NR Description: unnamed protein product [Oryza sativa (japonica group)] >gi|7340873|dbj|BAA92963.1| unnamed protein product
  misc_feature (28)..(315): Homolog of NCBI NO: 15233590 NR Description: putative protein; protein id: At4g21300.1
  misc_feature (56)..(315): Homolog of NCBI NO: 34903762 NR Description: unnamed protein product [Oryza sativa (japonica group)] >gi|7340873|dbj|BAA92963.1| unnamed protein product
  misc_feature (28)..(315): Homolog of NCBI NO: 11994419 NR Description: selenium-binding protein-like [Arabidopsis
  misc_feature (28)..(315): Homolog of NCBI NO: 15230593 NR Description: unknown protein; protein id: At3g12770.1
VHGMRGNLPSLAAASNGVALPLSFFHTKQLHARLIVASPSSASGPAYLRLLVLRSYAARGDLSSARRLLDEAPRPASPLLYNALIRAHARRLDLPAGLALFARMRCSATPPDAHTFACVLRACAESSRPDAVKVVHGIATTCGMCSRPIVLSSLVSAYAKLGLVDNARSLFDGLCEPDLVIWNSMMSAYGYQGMWYDGLQMFSLMRRAGQHPDGYSMVSLVSCFWNPEILAFGQAVHGICVKGGYDSGHHVRSTLVSMYMRCGCVESGQRLFGSLPDVDLITWSSLITGLIQTGKYEESFDLFRKMCFTGRRPDSHIDC

SEQ ID NO: 9568 - protein, 316 aa, Zea mays subsp. mays
  peptide (1)..(316): Ceres Seq. ID no. 12374912
  misc_feature (104)..(312): Homolog of NCBI NO: 34913768 NR Description: OSJNBa0051H17.34 [Oryza sativa (japonica
  misc_feature (209)..(313): Homolog of NCBI NO: 34913768 NR Description: OSJNBa0051H17.34 [Oryza sativa (japonica
  misc_feature (8)..(312): Homolog of NCBI NO: 34897084 NR Description: hypothetical protein [Oryza sativa (japonica group)] >gi|12957718|gb|AAK09236.1| hypothetical protein [Oryza
  misc_feature (46)..(316): Homolog of NCBI NO: 34903762 NR Description: unnamed protein product [Oryza sativa (japonica group)] >gi|7340873|dbj|BAA92963.1| unnamed protein product
  misc_feature (53)..(311): Homolog of NCBI NO: 15234006 NR Description: putative protein; protein id: At4g18750.1
  misc_feature (1)..(311): Homolog of NCBI NO: 34903762 NR Description: unnamed protein product [Oryza sativa (japonica group)] >gi|7340873|dbj|BAA92963.1| unnamed protein product
  misc_feature (25)..(312): Homolog of NCBI NO: 15233590 NR Description: putative protein; protein id: At4g21300.1
  misc_feature (53)..(312): Homolog of NCBI NO: 34903762 NR Description: unnamed protein product [Oryza sativa (japonica group)] >gi|7340873|dbj|BAA92963.1| unnamed protein product
  misc_feature (25)..(312): Homolog of NCBI NO: 11994419 NR Description: selenium-binding protein-like [Arabidopsis
  misc_feature (25)..(312): Homolog of NCBI NO: 15230593 NR Description: unknown protein; protein id: At3g12770.1
MRGNLPSLAAASNGVALPLSFFHTKQLHARLIVASPSSASGPAYLRLLVLRSYAARGDLSSARRLLDEAPRPASPLLYNALIRAHARRLDLPAGLALFARMRCSATPPDAHTFACVLRACAESSRPDAVKVVHGIATTCGMCSRPIVLSSLVSAYAKLGLVDNARSLFDGLCEPDLVIWNSMMSAYGYQGMWYDGLQMFSLMRRAGQHPDGYSMVSLVSCFWNPEILAFGQAVHGICVKGGYDSGHHVRSTLVSMYMRCGCVESGQRLFGSLPDVDLITWSSLITGLIQTGKYEESFDLFRKMCFTGRRPDSHIDC

SEQ ID NO: 9569 - protein, 268 aa, Zea mays subsp. mays
  peptide (1)..(268): Ceres Seq. ID no. 12374913
  misc_feature (87)..(121): Pfam Name: PPR repeat Pfam Description: PPR repeat
  misc_feature (18)..(268): Homolog of NCBI NO: 34913768 NR Description: OSJNBa0051H17.34 [Oryza sativa (japonica
  misc_feature (21)..(263): Homolog of NCBI NO: 34897084 NR Description: hypothetical protein [Oryza sativa (japonica group)] >gi|12957718|gb|AAK09236.1| hypothetical protein [Oryza
  misc_feature (1)..(267): Homolog of NCBI NO: 34903762 NR Description: unnamed protein product [Oryza sativa (japonica group)] >gi|7340873|dbj|BAA92963.1| unnamed protein product
  misc_feature (18)..(267): Homolog of NCBI NO: 15234006 NR Description: putative protein; protein id: At4g18750.1
  misc_feature (21)..(268): Homolog of NCBI NO: 15233590 NR Description: putative protein; protein id: At4g21300.1
  misc_feature (18)..(267): Homolog of NCBI NO: 11994419 NR Description: selenium-binding protein-like [Arabidopsis
  misc_feature (18)..(267): Homolog of NCBI NO: 15230593 NR Description: unknown protein; protein id: At3g12770.1
  misc_feature (18)..(267): Homolog of NCBI NO: 15220337 NR Description: hypothetical protein; protein id: At1g11290.1
  misc_feature (7)..(261): Homolog of NCBI NO: 34913364 NR Description: hypothetical protein~similar to Arabidopsis
  misc_feature (23)..(263): Homolog of NCBI NO: 34911728 NR Description: P0707D10.28 [Oryza sativa (japonica
MRNHLICSGKCALQVGGPTAILIASVLSVFASTAAISYTKEVHCYAVKLGADIDIRVSSSLMDAYAKCGFTELGYWVFRQVPNKNSVMYNTVISNLESHGFATKAIEVLDEMVNDKLRPDSATFSSLLAACCHVGHLEEGWKLFRRMRDEFKIVVEMEHYVYMVRLLATFGQLKEAYDLIQTMQIQPDCGVWGALLWGCCVHRDSSFGRIVAEKLCELNSDKAAYRVMLSNMYASQEMWWDAEEVRDELSKENMYKNTGTSWVGEVKK

SEQ ID NO: 9570 - DNA, 1168 bp, Zea mays subsp. mays
  misc_feature (1)..(1168): Ceres Seq. ID no. 12367987
  misc_feature: MA Experiment ID: 108689 Result: Up-regulated in Transcription
  misc_feature: MA Experiment 108689 PARAMETER Experiment Name: Zm_Drought_Roots_P Parameter: Age (day) Value: 9
  misc_feature: MA Experiment 108689 PARAMETER Experiment Name: Zm_Drought_Roots_P Parameter: Organism Value: Zea mays
  misc_feature: MA Experiment 108689 PARAMETER Experiment Name: Zm_Drought_Roots_P Parameter: Plant Line Value: 35A19
  misc_feature: MA Experiment 108689 PARAMETER Experiment Name: Zm_Drought_Roots_P Parameter: Timepoint (hr) Value: 24
  misc_feature: MA Experiment 108689 PARAMETER Experiment Name: Zm_Drought_Roots_P Parameter: Tissue Value: Roots
  misc_feature: MA Experiment 108689 PARAMETER Experiment Name: Zm_Drought_Roots_P Parameter: Treatment Value: Drought vs. No Drought
gtgtccggtgcgggctgcgagtgacgtgggctaaataaagtgtgcgtcgggtggtaatggtggtggggcccggtgtcagtgcccgcgtccctcgctgctttgccctctccaccctccgccatcaccgccgcggcgtccttctgtaccggatccgtcgcagccaccactccgcagatccgctgggttgacgtccacggagctccggggatgtcgtcctccgcttccagcgtcgagggcgacgccgccggagagttcacggaggtcgtaatcgtgcgtcacggcgagacgtcatggaacgcctcgcgcatcatacagggacacttggatgcagagcttaatgatattggaaggcagcaagctgttgcggttgctcatcgtctttctaaagaagtgaaaccagttgtcatatactcttctgatctgaagcgagcagcagagactgcgcaaacaattgcaagaatttgcaatgtgccaaatgtcgtgttcgatccagcactgagagaaagacacattggagatctgcaaggcatgacgcttcaagatgctgctacagagaggccagaggcatacaaagcttttatgtcccacaagagaaatcaacaagttcctggtggtggagagagtcttgatcaactgtcggagcgatgtgtgtcttttctgtacgacattgttggtaaacacaaaggggagcgagttatcctggtttcacatggcggcaccatcagagagctctacagacacgtgagtcccacgaagccgctccacggcaaaatacacaacacgtcggtgagcgtcatcctcgtgtccgacgccaccggccggtgcatcgtcaagatgtgcggggacgtcagccacctccaggagacgggcgtcctggagaacgccttcggtggcgacaagacctccgcctgagattccaacattcatcacgcgccgagagctctcggcaattatcacgcgccgagtgagcgctcgtttcggccgtctttttttccactgtaccaatcatcctgttgctaccagtagtggtctagcggagaatgatgcacacttccccccgctgggaacgcggcgatttttgctggaacagttgaaggccgagccggggcgaatccttttggcctggccgtgcactgcttgctgaactgcacgtacgcatgtggagctg

SEQ ID NO: 9571 - protein, 234 aa, Zea mays subsp. mays
  peptide (1)..(234): Ceres Seq. ID no. 12367988
  misc_feature (18)..(201): Pfam Name: Phosphoglycerate mutase family Pfam Description: Phosphoglycerate mutase family
  misc_feature (15)..(233): Homolog of NCBI NO: 15229783 NR Description: putative protein; protein id: At3g50520.1, by cDNA: gi_14334855, supported by cDNA: gi_17104694 [Arabidopsis
  misc_feature (15)..(230): Homolog of NCBI NO: 9955567 NR Description: phosphoglycerate mutase-like protein [Arabidopsis
  misc_feature (15)..(230): Homolog of NCBI NO: 15237633 NR Description: phosphoglycerate mutase - like protein; protein
  misc_feature (15)..(217): Homolog of NCBI NO: 17545218 NR Description: PUTATIVE PHOSPHOGLYCERATE MUTASE 2 PROTEIN solanacearum] >gi|17427509|emb|CAD14027.1| PUTATIVE
  misc_feature (82)..(230): Homolog of NCBI NO: 26450240 NR Description: putative phosphoglycerate mutase [Arabidopsis
  misc_feature (6)..(218): Homolog of NCBI NO: 22976134 NR Description: hypothetical protein [Ralstonia metallidurans]
  misc_feature (17)..(221): Homolog of NCBI NO: 33592552 NR Description: probable phosphoglycerate mutase 2 [Bordetella >gi|33600435|ref|NP_887995.1| probable phosphoglycerate mutase 2 bronchiseptica] >gi|33568034|emb|CAE31947.1| probable
  misc_feature (17)..(221): Homolog of NCBI NO: 33596671 NR Description: probable phosphoglycerate mutase 2 [Bordetella >gi|33573372|emb|CAE37356.1| probable phosphoglycerate mutase 2
  misc_feature (17)..(218): Homolog of NCBI NO: 15806410 NR Description: phosphoglycerate mutase, putative [Deinococcus
  misc_feature (17)..(218): Homolog of NCBI NO: 23021451 NR Description: hypothetical protein [Clostridium thermocellum
MSSSASSVEGDAAGEFTEVVIVRHGETSWNASRIIQGHLDAELNDIGRQQAVAVAHRLSKEVKPVVIYSSDLKRAAETAQTIARICNVPNVVFDPALRERHIGDLQGMTLQDAATERPEAYKAFMSHKRNQQVPGGGESLDQLSERCVSFLYDIVGKHKGERVILVSHGGTIRELYRHVSPTKPLHGKIHNTSVSVILVSDATGRCIVKMCGDVSHLQETGVLENAFGGDKTSA

SEQ ID NO: 9572 - protein, 127 aa, Zea mays subsp. mays
  peptide (1)..(127): Ceres Seq. ID no. 12367989
  misc_feature (1)..(94): Pfam Name: Phosphoglycerate mutase family Pfam Description: Phosphoglycerate mutase family
  misc_feature (1)..(126): Homolog of NCBI NO: 15229783 NR Description: putative protein; protein id: At3g50520.1, by cDNA: gi_14334855, supported by cDNA: gi_17104694 [Arabidopsis
  misc_feature (1)..(123): Homolog of NCBI NO: 9955567 NR Description: phosphoglycerate mutase-like protein [Arabidopsis
  misc_feature (1)..(123): Homolog of NCBI NO: 15237633 NR Description: phosphoglycerate mutase - like protein; protein
  misc_feature (1)..(110): Homolog of NCBI NO: 17545218 NR Description: PUTATIVE PHOSPHOGLYCERATE MUTASE 2 PROTEIN solanacearum] >gi|17427509|emb|CAD14027.1| PUTATIVE
  misc_feature (1)..(123): Homolog of NCBI NO: 26450240 NR Description: putative phosphoglycerate mutase [Arabidopsis
  misc_feature (1)..(111): Homolog of NCBI NO: 22976134 NR Description: hypothetical protein [Ralstonia metallidurans]
  misc_feature (1)..(114): Homolog of NCBI NO: 33592552 NR Description: probable phosphoglycerate mutase 2 [Bordetella >gi|33600435|ref|NP_887995.1| probable phosphoglycerate mutase 2 bronchiseptica] >gi|33568034|emb|CAE31947.1| probable
  misc_feature (1)..(114): Homolog of NCBI NO: 33596671 NR Description: probable phosphoglycerate mutase 2 [Bordetella >gi|33573372|emb|CAE37356.1| probable phosphoglycerate mutase 2
  misc_feature (1)..(111): Homolog of NCBI NO: 15806410 NR Description: phosphoglycerate mutase, putative [Deinococcus
  misc_feature (1)..(111): Homolog of NCBI NO: 23021451 NR Description: hypothetical protein [Clostridium thermocellum
MTLQDAATERPEAYKAFMSHKRNQQVPGGGESLDQLSERCVSFLYDIVGKHKGERVILVSHGGTIRELYRHVSPTKPLHGKIHNTSVSVILVSDATGRCIVKMCGDVSHLQETGVLENAFGGDKTSA

SEQ ID NO: 9573 - DNA, 1157 bp, Zea mays subsp. mays
  misc_feature (1)..(1157): Ceres Seq. ID no. 12367688
  misc_feature: MA Experiment ID: 20000534 Result: Down-regulated in Transcription
  misc_feature: MA Experiment 20000534 PARAMETER Experiment Name: Zm_Hybrid_Pollen_P Parameter: Age (day) Value: 8
  misc_feature: MA Experiment 20000534 PARAMETER Experiment Name: Zm_Hybrid_Pollen_P Parameter: Organism Value: Zea mays
  misc_feature: MA Experiment 20000534 PARAMETER Experiment Name: Zm_Hybrid_Pollen_P Parameter: Plant Line Value: 35A19
  misc_feature: MA Experiment 20000534 PARAMETER Experiment Name: Zm_Hybrid_Pollen_P Parameter: Tissue Value: Pollen vs. Aerial
  misc_feature: MA Experiment ID: 20000535 Result: Down-regulated in Transcription
  misc_feature: MA Experiment 20000535 PARAMETER Experiment Name: Zm_Hybrid_Seed_Dev_P Parameter: DAP Value: 30 vs. 12
  misc_feature: MA Experiment 20000535 PARAMETER Experiment Name: Zm_Hybrid_Seed_Dev_P Parameter: Organism Value: Zea mays
  misc_feature: MA Experiment 20000535 PARAMETER Experiment Name: Zm_Hybrid_Seed_Dev_P Parameter: Plant Line Value: 35A19
  misc_feature: MA Experiment 20000535 PARAMETER Experiment Name: Zm_Hybrid_Seed_Dev_P Parameter: Tissue Value: Embryo vs. Unfert Floret
aaaacacgactagagtgggtgggagactgggaaagacgagacagcgagacaccactgagacgagagtcagccggcaggtgagacatcgcaggggaaccagctctcaagacggccgacggccggcttgcctacctgctcccatccttcccgagggaccgagaaagataagaaaggcggtggtcaacttgtgtcctgaggtgcccgtagaagcccaaggacaagaaacaaggagaagagtagatctacatctactccaccgatgagcgcgtctcggttcatcaagtgcgtcaccgtgggggacggtgccgtcggaaagacctgcatgctcatctcctacacatccaacactttccccactgactatgttccaactgtgttcgacaacttcagtgccaatgttgtggttgacgggagcactgtcaacttgggtctgtgggatacagcaggacaagaagattacaatagactgcgtccgttgagctatcgtggtgctgatgtttttctgctcgccttttctcttatcagcaaagcaagctatgagaatgtctctaagaagtgggttcctgaattaaggcactatgctcctggcgtgcccataatccttgttgggacaaaacttgatctgcgtgatgataagcagttttttgttgatcaccctggtgctgttccaatttccactgcccagggcgaagagctgaggaagctaattggtgctgccgcctacatcgaatgcagttcaaaaacccagcagaacataaaagcagtgtttgacgcagcaattaaggtggttctccagccaccaaagcaaaagaagaggaagaagaaggtgcagaagggatgcaccattttgtaactacaaacggtagagggcaacagtctggctgcggcgctgctgccaatgataaccatcgcctccttgctgtataatatatcgcctgatcatgccaccagcatgcacaagggagatggtggttttaggatccttgtcctactgtgttgtgtagaccaccgggtgtagttgactgtatctggttgtttgtatgtatggacaagacaaaactagcactgcagatggtatggtaaggcgtaagcaaatacaatatgacactggtccagttccaggaatgaatggaatatgacattggtccgagatttgc

SEQ ID NO: 9574 - protein, 197 aa, Zea mays subsp. mays
  peptide (1)..(197): Ceres Seq. ID no. 12367689
  misc_feature (8)..(179): Pfam Name: Ras family Pfam Description: Ras family
  misc_feature (1)..(197): Homolog of NCBI NO: 15236247 NR Description: Rho1Ps homolog Rac-like protein; protein id: supported by cDNA: gi_1732518, supported by cDNA: gi_2645642
  misc_feature (1)..(197): Homolog of NCBI NO: 2500195 NR Description: RAC-LIKE GTP BINDING PROTEIN RHO1
  misc_feature (1)..(197): Homolog of NCBI NO: 2117168 NR Description: RAC1 [Lotus japonicus]
  misc_feature (1)..(197): Homolog of NCBI NO: 11274342 NR Description: RacD protein - maize >gi|4959465|gb|AAD34358.1|
  misc_feature (1)..(197): Homolog of NCBI NO: 38524283 NR Description: putative RACD protein [Hordeum vulgare subsp.
  misc_feature (1)..(197): Homolog of NCBI NO: 14278856 NR Description: Rac-like GTPase 1 [Nicotiana tabacum]
  misc_feature (1)..(197): Homolog of NCBI NO: 6822324 NR Description: small GTP binding protein RACDP [Oryza sativa japonica] >gi|13487163|gb|AAK27450.1|AF329814_1 small GTP binding
  misc_feature (1)..(197): Homolog of NCBI NO: 2500199 NR Description: RAC-LIKE GTP BINDING PROTEIN RHO1
  misc_feature (1)..(197): Homolog of NCBI NO: 28393687 NR Description: putative Rho1Ps homolog Rac protein [Arabidopsis
  misc_feature (1)..(197): Homolog of NCBI NO: 4097583 NR Description: NTGP3 [Nicotiana tabacum]
MSASRFIKCVTVGDGAVGKTCMLISYTSNTFPTDYVPTVFDNFSANVVVDGSTVNLGLWDTAGQEDYNRLRPLSYRGADVFLLAFSLISKASYENVSKKWVPELRHYAPGVPIILVGTKLDLRDDKQFFVDHPGAVPISTAQGEELRKLIGAAAYIECSSKTQQNIKAVFDAAIKVVLQPPKQKKRKKKVQKGCTIL

SEQ ID NO: 9575 - protein, 176 aa, Zea mays subsp. mays
  peptide (1)..(176): Ceres Seq. ID no. 12367690
  misc_feature (1)..(158): Pfam Name: Ras family Pfam Description: Ras family
  misc_feature (1)..(176): Homolog of NCBI NO: 11274342 NR Description: RacD protein - maize >gi|4959465|gb|AAD34358.1|
  misc_feature (1)..(176): Homolog of NCBI NO: 6822324 NR Description: small GTP binding protein RACDP [Oryza sativa japonica] >gi|13487163|gb|AAK27450.1|AF329814_1 small GTP binding
  misc_feature (1)..(176): Homolog of NCBI NO: 38524283 NR Description: putative RACD protein [Hordeum vulgare subsp.
  misc_feature (1)..(176): Homolog of NCBI NO: 14278856 NR Description: Rac-like GTPase 1 [Nicotiana tabacum]
  misc_feature (1)..(176): Homolog of NCBI NO: 15236247 NR Description: Rho1Ps homolog Rac-like protein; protein id: supported by cDNA: gi_1732518, supported by cDNA: gi_2645642
  misc_feature (1)..(176): Homolog of NCBI NO: 2500195 NR Description: RAC-LIKE GTP BINDING PROTEIN RHO1
  misc_feature (1)..(176): Homolog of NCBI NO: 2117168 NR Description: RAC1 [Lotus japonicus]
  misc_feature (1)..(176): Homolog of NCBI NO: 2500199 NR Description: RAC-LIKE GTP BINDING PROTEIN RHO1
  misc_feature (1)..(176): Homolog of NCBI NO: 28393687 NR Description: putative Rho1Ps homolog Rac protein [Arabidopsis
  misc_feature (1)..(176): Homolog of NCBI NO: 4097583 NR Description: NTGP3 [Nicotiana tabacum]
MLISYTSNTFPTDYVPTVFDNFSANVVVDGSTVNLGLWDTAGQEDYNRLRPLSYRGADVFLLAFSLISKASYENVSKKWVPELRHYAPGVPIILVGTKLDLRDDKQFFVDHPGAVPISTAQGEELRKLIGAAAYIECSSKTQQNIKAVFDAAIKVVLQPPKQKKRKKKVQKGCTIL

SEQ ID NO: 9576 - DNA, 1019 bp, Zea mays subsp. mays
  misc_feature (1)..(1019): Ceres Seq. ID no. 12369259
  misc_feature: MA Experiment ID: 108527 Result: Up-regulated in Transcription
  misc_feature: MA Experiment 108527 PARAMETER Experiment Name: Zm_5mM_NO_P Parameter: Age (day) Value: 8
  misc_feature: MA Experiment 108527 PARAMETER Experiment Name: Zm_5mM_NO_P Parameter: Organism Value: Zea mays
  misc_feature: MA Experiment 108527 PARAMETER Experiment Name: Zm_5mM_NO_P Parameter: Plant Line Value: 35A19
  misc_feature: MA Experiment 108527 PARAMETER Experiment Name: Zm_5mM_NO_P Parameter: Timepoint (hr) Value: 6
  misc_feature: MA Experiment 108527 PARAMETER Experiment Name: Zm_5mM_NO_P Parameter: Tissue Value: Aerial
  misc_feature: MA Experiment 108527 PARAMETER Experiment Name: Zm_5mM_NO_P Parameter: Treatment Value: 5mM NO vs. No Treatment
  misc_feature: MA Experiment ID: 108689 Result: Up-regulated in Transcription
  misc_feature: MA Experiment 108689 PARAMETER Experiment Name: Zm_Drought_Roots_P Parameter: Age (day) Value: 9
  misc_feature: MA Experiment 108689 PARAMETER Experiment Name: Zm_Drought_Roots_P Parameter: Organism Value: Zea mays
  misc_feature: MA Experiment 108689 PARAMETER Experiment Name: Zm_Drought_Roots_P Parameter: Plant Line Value: 35A19
  misc_feature: MA Experiment 108689 PARAMETER Experiment Name: Zm_Drought_Roots_P Parameter: Timepoint (hr) Value: 24
  misc_feature: MA Experiment 108689 PARAMETER Experiment Name: Zm_Drought_Roots_P Parameter: Tissue Value: Roots
  misc_feature: MA Experiment 108689 PARAMETER Experiment Name: Zm_Drought_Roots_P Parameter: Treatment Value: Drought vs. No Drought
atccgttgatcccatcggcttccccttcctcttccccgatccccttcctcccccgatcccatccaattccacttccacaccgcgggcctcgccgccgacgccgacgccgccggccatgtccaagtacggcaccattcccacctcctcctccgcgggcggagggcccgtgcccctcggcggcgcctccccgctcgatttcatctcccgcgccaaggctcggggcgcctcggcgctggcgacgcgccggccctggcgcgagctcgtggacgtccacgccgtcggcctgcccccgagcctcggcgacgcgtacctccgcgtgcgcgccaacctcgcccacttcgccatgaactatgccatcgtcgtcctcgtcgtcgtcttcctctccctcctctggcaccccgtctccctcatcgtattcctcgtctgcatgcttgcctggctcgtcctctacttcctccgcgacgagcccctcgtcctcttcggccgcgtcgtcgccgacggctacgtcctcgccgtgctcgccgtcgtcacgctcgtcctgctcctcctcaccgacgccaccgccaacatcctctcctcgctgctcatcggcctcgtgctcgtcctcgtccacgccgcgctgcacaaggcggaggacaacgccgccgacgaggctgaccgctggtacgcgccggtgtcacagcagccgtcgcactgaggatctgaatgtggccgttctgcgccttggctgtgattctattctgtactccctgtttccgagttcctccagctgcgcaagctgggccatccccatctcatctgcgatgaaaaacctgtccctgttggttgtgattcacctgctgccggttccatgggaagttttggatccagcgacgacgctgggctgttaaacttgttctccacgcccatttctgtgatacgtttaaagcgtctcgttcacgtgtatcaaatccggactgaagtctagtgtacattttgagttggagaaatgtgatgccagggacctgcgttcagatttc

SEQ ID NO: 9577 - protein, 231 aa, Zea mays subsp. mays
  peptide (1)..(231): Ceres Seq. ID no. 12369260
  misc_feature (39)..(220): Homolog of NCBI NO: 34903576 NR Description: P0419B01.1 [Oryza sativa (japonica
  misc_feature (39)..(217): Homolog of NCBI NO: 21617895 NR Description: unknown [Arabidopsis thaliana]
  misc_feature (39)..(217): Homolog of NCBI NO: 18400140 NR Description: expressed protein; protein id: At3g13720.1, by cDNA: 8544. [Arabidopsis thaliana] >gi|9294018|dbj|BAB01921.1|
  misc_feature (39)..(217): Homolog of NCBI NO: 18405248 NR Description: expressed protein; protein id: At1g55190.1, by cDNA: 21940. [Arabidopsis thaliana] >gi|25347725|pir||F96593
  misc_feature (61)..(217): Homolog of NCBI NO: 15231332 NR Description: unknown protein; protein id: At3g13710.1 thaliana] >gi|9294017|dbj|BAB01920.1|
  misc_feature (61)..(212): Homolog of NCBI NO: 15220814 NR Description: hypothetical protein; protein id: At1g17700.1
  misc_feature (36)..(217): Homolog of NCBI NO: 21594668 NR Description: unknown [Arabidopsis thaliana]
  misc_feature (39)..(219): Homolog of NCBI NO: 15239101 NR Description: putative protein; protein id: At5g05380.1 thaliana] >gi|10176750|dbj|BAB09981.1|
  misc_feature (39)..(219): Homolog of NCBI NO: 18072825 NR Description: prenylated Rab receptor 2 [Arabidopsis thaliana]
  misc_feature (14)..(212): Homolog of NCBI NO: 40539036 NR Description: putative prenylated rab acceptor protein [Oryza
SVDPIGFPFLFPDPLPPPIPSNSTSTPRASPPTPTPPAMSKYGTIPTSSSAGGGPVPLGGASPLDFISRAKARGASALATRRPWRELVDVHAVGLPPSLGDAYLRVRANLAHFAMNYAIVVLVVVFLSLLWHPVSLIVFLVCMLAWLVLYFLRDEPLVLFGRVVADGYVLAVLAVVTLVLLLLTDATANILSSLLIGLVLVLVHAALHKAEDNAADEADRWYAPVSQQPSH

SEQ ID NO: 9578 - protein, 193 aa, Zea mays subsp. mays
  peptide (1)..(193): Ceres Seq. ID no. 12369261
  misc_feature (1)..(182): Homolog of NCBI NO: 34903576 NR Description: P0419B01.1 [Oryza sativa (japonica
  misc_feature (1)..(179): Homolog of NCBI NO: 21617895 NR Description: unknown [Arabidopsis thaliana]
  misc_feature (1)..(179): Homolog of NCBI NO: 18400140 NR Description: expressed protein; protein id: At3g13720.1, by cDNA: 8544. [Arabidopsis thaliana] >gi|9294018|dbj|BAB01921.1|
  misc_feature (1)..(179): Homolog of NCBI NO: 18405248 NR Description: expressed protein; protein id: At1g55190.1, by cDNA: 21940. [Arabidopsis thaliana] >gi|25347725|pir||F96593
  misc_feature (23)..(179): Homolog of NCBI NO: 15231332 NR Description: unknown protein; protein id: At3g13710.1 thaliana] >gi|9294017|dbj|BAB01920.1|
  misc_feature (23)..(174): Homolog of NCBI NO: 15220814 NR Description: hypothetical protein; protein id: At1g17700.1
  misc_feature (1)..(179): Homolog of NCBI NO: 21594668 NR Description: unknown [Arabidopsis thaliana]
  misc_feature (1)..(181): Homolog of NCBI NO: 15239101 NR Description: putative protein; protein id: At5g05380.1 thaliana] >gi|10176750|dbj|BAB09981.1|
  misc_feature (1)..(181): Homolog of NCBI NO: 18072825 NR Description: prenylated Rab receptor 2 [Arabidopsis thaliana]
  misc_feature (1)..(174): Homolog of NCBI NO: 40539036 NR Description: putative prenylated rab acceptor protein [Oryza
MSKYGTIPTSSSAGGGPVPLGGASPLDFISRAKARGASALATRRPWRELVDVHAVGLPPSLGDAYLRVRANLAHFAMNYAIVVLVVVFLSLLWHPVSLIVFLVCMLAWLVLYFLRDEPLVLFGRVVADGYVLAVLAVVTLVLLLLTDATANILSSLLIGLVLVLVHAALHKAEDNAADEADRWYAPVSQQPSH

SEQ ID NO: 9579 - protein, 179 aa, Zea mays subsp. mays
  peptide (1)..(179): Ceres Seq. ID no. 12369262
  misc_feature (1)..(106): Pfam Name: Equine herpesvirus glycoprotein gp2 Pfam Description: Equine herpesvirus glycoprotein gp2
  misc_feature (1)..(176): Homolog of NCBI NO: 11359723 NR Description: proteophosphoglycan, membrane-associated - Leishmania major (fragment) >gi|5420389|emb|CAB46680.1|
  misc_feature (1)..(151): Homolog of NCBI NO: 13592175 NR Description: ppg3 [Leishmania major]
  misc_feature (1)..(156): Homolog of NCBI NO: 13592175 NR Description: ppg3 [Leishmania major]
  misc_feature (1)..(151): Homolog of NCBI NO: 13592175 NR Description: ppg3 [Leishmania major]
  misc_feature (1)..(106): Homolog of NCBI NO: 23017082 NR Description: hypothetical protein [Thermobifida fusca]
  misc_feature (1)..(89): Homolog of NCBI NO: 5420387 NR Description: proteophosphoglycan [Leishmania major]
  misc_feature (1)..(100): Homolog of NCBI NO: 11359723 NR Description: proteophosphoglycan, membrane-associated - Leishmania major (fragment) >gi|5420389|emb|CAB46680.1|
  misc_feature (1)..(156): Homolog of NCBI NO: 13592175 NR Description: ppg3 [Leishmania major]
  misc_feature (1)..(156): Homolog of NCBI NO: 5420387 NR Description: proteophosphoglycan [Leishmania major]
  misc_feature (1)..(80): Homolog of NCBI NO: 2429362 NR Description: proline rich protein [Santalum album]
MPSSSSSSSSSPSSGTPSPSSYSSSACLPGSSSTSSATSPSSSSAASSPTATSSPCSPSSRSSCSSSPTPPPTSSPRCSSASCSSSSTPRCTRRRTTPPTRLTAGTRRCHSSRRTEDLNVAVLRLGCDSILYSLFPSSSSCASWAIPISSAMKNLSLLVVIHLLPVPWEVLDPATTLGC

SEQ ID NO: 9580 - DNA, 1560 bp, Zea mays subsp. mays
  misc_feature (1)..(1560): Ceres Seq. ID no. 12382424
  misc_feature: MA Experiment ID: 108522 Result: Up-regulated in Transcription
  misc_feature: MA Experiment 108522 PARAMETER Experiment Name: Zm_42deg_Heat_P Parameter: Age (day) Value: 8
  misc_feature: MA Experiment 108522 PARAMETER Experiment Name: Zm_42deg_Heat_P Parameter: Organism Value: Zea mays
  misc_feature: MA Experiment 108522 PARAMETER Experiment Name: Zm_42deg_Heat_P Parameter: Plant Line Value: 35A19
  misc_feature: MA Experiment 108522 PARAMETER Experiment Name: Zm_42deg_Heat_P Parameter: Temperature (deg C) Value: 42 vs. 22
  misc_feature: MA Experiment 108522 PARAMETER Experiment Name: Zm_42deg_Heat_P Parameter: Timepoint (hr) Value: 1
  misc_feature: MA Experiment 108522 PARAMETER Experiment Name: Zm_42deg_Heat_P Parameter: Tissue Value: Aerial
  misc_feature: MA Experiment ID: 108523 Result: Up-regulated in Transcription
  misc_feature: MA Experiment 108523 PARAMETER Experiment Name: Zm_42deg_Heat_P Parameter: Age (day) Value: 8
  misc_feature: MA Experiment 108523 PARAMETER Experiment Name: Zm_42deg_Heat_P Parameter: Organism Value: Zea mays
  misc_feature: MA Experiment 108523 PARAMETER Experiment Name: Zm_42deg_Heat_P Parameter: Plant Line Value: 35A19
  misc_feature: MA Experiment 108523 PARAMETER Experiment Name: Zm_42deg_Heat_P Parameter: Temperature (deg C) Value: 42 vs. 22
  misc_feature: MA Experiment 108523 PARAMETER Experiment Name: Zm_42deg_Heat_P Parameter: Timepoint (hr) Value: 6
  misc_feature: MA Experiment 108523 PARAMETER Experiment Name: Zm_42deg_Heat_P Parameter: Tissue Value: Aerial
  misc_feature: MA Experiment ID: 108527 Result: Up-regulated in Transcription
  misc_feature: MA Experiment 108527 PARAMETER Experiment Name: Zm_5mM_NO_P Parameter: Age (day) Value: 8
  misc_feature: MA Experiment 108527 PARAMETER Experiment Name: Zm_5mM_NO_P Parameter: Organism Value: Zea mays
  misc_feature: MA Experiment 108527 PARAMETER Experiment Name: Zm_5mM_NO_P Parameter: Plant Line Value: 35A19
  misc_feature: MA Experiment 108527 PARAMETER Experiment Name: Zm_5mM_NO_P Parameter: Timepoint (hr) Value: 6
  misc_feature: MA Experiment 108527 PARAMETER Experiment Name: Zm_5mM_NO_P Parameter: Tissue Value: Aerial
  misc_feature: MA Experiment 108527 PARAMETER Experiment Name: Zm_5mM_NO_P Parameter: Treatment Value: 5mM NO vs. No Treatment
  misc_feature: MA Experiment ID: 108543 Result: Down-regulated in Transcription
  misc_feature: MA Experiment ID: 108556 Result: Up-regulated in Transcription
  misc_feature: MA Experiment 108556 PARAMETER Experiment Name: Zm_Drought_P Parameter: Age (day) Value: 9
  misc_feature: MA Experiment 108556 PARAMETER Experiment Name: Zm_Drought_P Parameter: Organism Value: Zea mays
  misc_feature: MA Experiment 108556 PARAMETER Experiment Name: Zm_Drought_P Parameter: Plant Line Value: 35A19
  misc_feature: MA Experiment 108556 PARAMETER Experiment Name: Zm_Drought_P Parameter: Timepoint (hr) Value: 24
  misc_feature: MA Experiment 108556 PARAMETER Experiment Name: Zm_Drought_P Parameter: Tissue Value: Aerial
  misc_feature: MA Experiment 108556 PARAMETER Experiment Name: Zm_Drought_P Parameter: Treatment Value: Drought vs. No Drought
  misc_feature: MA Experiment ID: 108559 Result: Up-regulated in Transcription
  misc_feature: MA Experiment 108559 PARAMETER Experiment Name: Zm_5mM_NO_P Parameter: Age (day) Value: 8
  misc_feature: MA Experiment 108559 PARAMETER Experiment Name: Zm_5mM_NO_P Parameter: Organism Value: Zea mays
  misc_feature: MA Experiment 108559 PARAMETER Experiment Name: Zm_5mM_NO_P Parameter: Plant Line Value: 35A19
  misc_feature: MA Experiment 108559 PARAMETER Experiment Name: Zm_5mM_NO_P Parameter: Timepoint (hr) Value: 12
  misc_feature: MA Experiment 108559 PARAMETER Experiment Name: Zm_5mM_NO_P Parameter: Tissue Value: Aerial
  misc_feature: MA Experiment 108559 PARAMETER Experiment Name: Zm_5mM_NO_P Parameter: Treatment Value: 5mM NO vs. No Treatment
  misc_feature: MA Experiment ID: 20000479 Result: Up-regulated in Transcription
  misc_feature: MA Experiment 20000479 PARAMETER Experiment Name: Zm_Drought_P Parameter: Age (day) Value: 10
  misc_feature: MA Experiment 20000479 PARAMETER Experiment Name: Zm_Drought_P Parameter: Organism Value: Zea mays
  misc_feature: MA Experiment 20000479 PARAMETER Experiment Name: Zm_Drought_P Parameter: Plant Line Value: 35A19
  misc_feature: MA Experiment 20000479 PARAMETER Experiment Name: Zm_Drought_P Parameter: Timepoint (hr) Value: 48
  misc_feature: MA Experiment 20000479 PARAMETER Experiment Name: Zm_Drought_P Parameter: Tissue Value: Aerial
  misc_feature: MA Experiment 20000479 PARAMETER Experiment Name: Zm_Drought_P Parameter: Treatment Value: Drought vs. No Drought
gcaccgtttcccaaaccctccggactcgaacccaacccacgcacccacatcgggagacgagccaggccgagctctagaagagtctccggaaggcccgcatcgtcgatggcggccgagggcagcggcgtccaagagacgttcgaggcgcgggtgaagcgcctgttcgggtcccgcctcttcgacgccgtcccggactcctccttcccgacggcctcctggtccgtggccgcgggcgacgtcgagcgccaccgttggtcgaagccgtcggaggcccgcgacgcggaggaggaggcagcgggggaggccggccgcggggacacgccctgcgtctccgcgttctacgacgccaacgggtgccttcgtggccggaggcgcaggtccaggaaggaggagttcgaggggaacctcgacgacctagatgaagacgaggaggaagacggggagagggagaggaatgcggcagaacaggacgaggaggagggggttagagttaacatcggcctcgaccccactctggatcgggaggaagaggaggacaagtatgacagagaggcctttggcagagaggaggctgctgaccgcgtgtacatgcatgatataatggatgccggcataaacatgagcatcaacagtatagtccctgacctccttgatgattccattgaagaggtgtaccgttttaggaaggatccccgtgcagatatgagggcagcatctccaagactcagagaagatggttctactaaagattgtgattctcactatcccactcaagccaaggatttccccagtgtagttcatacaaagaaagctgtggaggaagtcaatgtaaaacctatactgaagaggaaggagtcacaagctgatttaaaaccaaggaaacgtgtcaggtttgatgctaatgttaaggatagtgagttggatatgtttgaacatgacgaagattctccaacggttcctcaatccatggatgtaatcactgagttggagagcacatctactttgtctgcatctcctggggtccctgactatgtaaggaacccttcaaagtacacccgatacaccctggatgtaccagagtctaatgatggctcgaacaggacagctcttgctgacatgcatgatctgttagcgagatcatacccaaacaggatacattctgagacgcctgttaagattcctagctcagtcacattcatccctcgcaagaagtcagttgataccatggcagtggatgagggccccagagctattgattccaactcctctgcaattggaatggtagcaggcgcctcagatgaacctgatcaatgtgaaatggatgaagatgacagtaaatcaccgacaacgccacagatgcatacaaactcaaaggcgagctcccggcgttacaggtcaagcagaacagatgatgatgagtgaaattgaggatcccagggtatccaatctgatgtttgtttctaagaaaattttgagtttcagaataccttatgtaaatccggatatatgtgtgttcttgtgatttgagctaattaactatgttgaactacttttcccccc

SEQ ID NO: 9581 - protein, 473 aa, Zea mays subsp. mays
  peptide (1)..(473): Ceres Seq. ID no. 12382425
  misc_feature (175)..(472): Homolog of NCBI NO: 38347160 NR Description: OSJNBa0039C07.6 [Oryza sativa (japonica
  misc_feature (40)..(181): Homolog of NCBI NO: 38347160 NR Description: OSJNBa0039C07.6 [Oryza sativa (japonica
  misc_feature (129)..(473): Homolog of NCBI NO: 15240759 NR Description: putative protein; protein id: At5g13970.1, by cDNA: gi_19310485 [Arabidopsis thaliana] emb|CAB86638.1~gene_id:MAC12.6~similar to unknown protein
APFPKPSGLEPNPRTHIGRRARPSSRRVSGRPASSMAAEGSGVQETFEARVKRLFGSRLFDAVPDSSFPTASWSVAAGDVERHRWSKPSEARDAEEEAAGEAGRGDTPCVSAFYDANGCLRGRRRRSRKEEFEGNLDDLDEDEEEDGERERNAAEQDEEEGVRVNIGLDPTLDREEEEDKYDREAFGREEAADRVYMHDIMDAGINMSINSIVPDLLDDSIEEVYRFRKDPRADMRAASPRLREDGSTKDCDSHYPTQAKDFPSVVHTKKAVEEVNVKPILKRKESQADLKPRKRVRFDANVKDSELDMFEHDEDSPTVPQSMDVITELESTSTLSASPGVPDYVRNPSKYTRYTLDVPESNDGSNRTALADMHDLLARSYPNRIHSETPVKIPSSVTFIPRKKSVDTMAVDEGPRAIDSNSSAIGMVAGASDEPDQCEMDEDDSKSPTTPQMHTNSKASSRRYRSSRTDDDE

SEQ ID NO: 9582 - protein, 438 aa, Zea mays subsp. mays
  peptide (1)..(438): Ceres Seq. ID no. 12382426
  misc_feature (140)..(437): Homolog of NCBI NO: 38347160 NR Description: OSJNBa0039C07.6 [Oryza sativa (japonica
  misc_feature (5)..(146): Homolog of NCBI NO: 38347160 NR Description: OSJNBa0039C07.6 [Oryza sativa (japonica
  misc_feature (94)..(438): Homolog of NCBI NO: 15240759 NR Description: putative protein; protein id: At5g13970.1, by cDNA: gi_19310485 [Arabidopsis thaliana] emb|CAB86638.1~gene_id:MAC12.6~similar to unknown protein
MAAEGSGVQETFEARVKRLFGSRLFDAVPDSSFPTASWSVAAGDVERHRWSKPSEARDAEEEAAGEAGRGDTPCVSAFYDANGCLRGRRRRSRKEEFEGNLDDLDEDEEEDGERERNAAEQDEEEGVRVNIGLDPTLDREEEEDKYDREAFGREEAADRVYMHDIMDAGINMSINSIVPDLLDDSIEEVYRFRKDPRADMRAASPRLREDGSTKDCDSHYPTQAKDFPSVVHTKKAVEEVNVKPILKRKESQADLKPRKRVRFDANVKDSELDMFEHDEDSPTVPQSMDVITELESTSTLSASPGVPDYVRNPSKYTRYTLDVPESNDGSNRTALADMHDLLARSYPNRIHSETPVKIPSSVTFIPRKKSVDTMAVDEGPRAIDSNSSAIGMVAGASDEPDQCEMDEDDSKSPTTPQMHTNSKASSRRYRSSRTDDDE

SEQ ID NO: 9583 - protein, 277 aa, Zea mays subsp. mays
  peptide (1)..(277): Ceres Seq. ID no. 12382427
  misc_feature (1)..(276): Homolog of NCBI NO: 38347160 NR Description: OSJNBa0039C07.6 [Oryza sativa (japonica
  misc_feature (1)..(277): Homolog of NCBI NO: 15240759 NR Description: putative protein; protein id: At5g13970.1, by cDNA: gi_19310485 [Arabidopsis thaliana] emb|CAB86638.1~gene_id:MAC12.6~similar to unknown protein
MHDIMDAGINMSINSIVPDLLDDSIEEVYRFRKDPRADMRAASPRLREDGSTKDCDSHYPTQAKDFPSVVHTKKAVEEVNVKPILKRKESQADLKPRKRVRFDANVKDSELDMFEHDEDSPTVPQSMDVITELESTSTLSASPGVPDYVRNPSKYTRYTLDVPESNDGSNRTALADMHDLLARSYPNRIHSETPVKIPSSVTFIPRKKSVDTMAVDEGPRAIDSNSSAIGMVAGASDEPDQCEMDEDDSKSPTTPQMHTNSKASSRRYRSSRTDDDE

SEQ ID NO: 9584 - DNA, 1917 bp, Zea mays subsp. mays
  misc_feature (1)..(1917): Ceres Seq. ID no. 12375014
  misc_feature: MA Experiment ID: 108536 Result: Up-regulated in Transcription
  misc_feature: MA Experiment 108536 PARAMETER Experiment Name: Zm_Meristem_P Parameter: Age (day) Value: 8
  misc_feature: MA Experiment 108536 PARAMETER Experiment Name: Zm_Meristem_P Parameter: Organism Value: Zea mays
  misc_feature: MA Experiment 108536 PARAMETER Experiment Name: Zm_Meristem_P Parameter: Plant Line Value: 35A19
  misc_feature: MA Experiment 108536 PARAMETER Experiment Name: Zm_Meristem_P Parameter: Tissue Value: Shoot Meristem vs. Above Shoot Meristem
  misc_feature: MA Experiment ID: 20001613 Result: Up-regulated in Transcription
  misc_feature: MA Experiment 20001613 PARAMETER Experiment Name: Zm_50ppm_KNO3_L-to-H_P Parameter: Age (day) Value: 20
  misc_feature: MA Experiment 20001613 PARAMETER Experiment Name: Zm_50ppm_KNO3_L-to-H_P Parameter: Organism Value: Zea mays
  misc_feature: MA Experiment 20001613 PARAMETER Experiment Name: Zm_50ppm_KNO3_L-to-H_P Parameter: Plant Line Value: 35A19
  misc_feature: MA Experiment 20001613 PARAMETER Experiment Name: Zm_50ppm_KNO3_L-to-H_P Parameter: Timepoint (hr) Value: 24
  misc_feature: MA Experiment 20001613 PARAMETER Experiment Name: Zm_50ppm_KNO3_L-to-H_P Parameter: Tissue Value: Roots
  misc_feature: MA Experiment 20001613 PARAMETER Experiment Name: Zm_50ppm_KNO3_L-to-H_P Parameter: Treatment Value: 50ppm KNO3 vs. 50ppm KCl
  misc_feature: MA Experiment ID: 20001614 Result: Up-regulated in Transcription
  misc_feature: MA Experiment 20001614 PARAMETER Experiment Name: Zm_50ppm_KNO3_L-to-H_P Parameter: Age (day) Value: 21
  misc_feature: MA Experiment 20001614 PARAMETER Experiment Name: Zm_50ppm_KNO3_L-to-H_P Parameter: Organism Value: Zea mays
  misc_feature: MA Experiment 20001614 PARAMETER Experiment Name: Zm_50ppm_KNO3_L-to-H_P Parameter: Plant Line Value: 35A19
  misc_feature: MA Experiment 20001614 PARAMETER Experiment Name: Zm_50ppm_KNO3_L-to-H_P Parameter: Timepoint (hr) Value: 48
  misc_feature: MA Experiment 20001614 PARAMETER Experiment Name: Zm_50ppm_KNO3_L-to-H_P Parameter: Tissue Value: Roots
  misc_feature: MA Experiment 20001614 PARAMETER Experiment Name: Zm_50ppm_KNO3_L-to-H_P Parameter: Treatment Value: 50ppm KNO3 vs. 50ppm KCl
atagggcgtgttctaaaagacacaagatcttctctgggcacactagtgtatgaaaaaccacaagggtgattcagcttgccactgtcggctccttctatgcatgcagctgatccctgctgctcactcccatggcgcaaggtgaggagagctcgtggtgcatggcgagcagcgatcatgcatcattcgcccaagcagtcgcgtgtggaacccaaaggcgcgcttctgccgcacaacctgccaatttcttggagttgcaacctgcagcagctgctccttattactttggtgagttggaggaggcccttatccatggcacccgtacatctgttgatcacggcatgatcggaagtgatgtggacacagagcgtaagactgctggataccttgcagctaggccccccacactggagatcttcccttcatggccaatgagtcatctacagcagccatacagtggtaactcgcactcagtagggagcaccactgagtcgagctcaggtcagaacagtatgccacagaccgagctggtgtccccagggagcatgagggccgactctggacagcgtcaggagcttttgatggtgactgttgatgattacaactacgagcaaggactcggagccgcagcaaccacagctccaatctttcagcagcatgcagcaggccaagacaagggaaagcatggatccacaaggaaagacggcaggctgttagacgccaagaccgagaggcgattggcccagaacagagaagctgcaaggaagagcaggctgagaaaaaaggcctacgtacagcagctagagacgagtcggatcaggcttcagcaaatcgagcaggagctgcatggagcacgctcacagggtctgttcccgggaggaggtggtgcgcctggagacttgagttcaggcgctgtgattttcgacatggagtacgcccggtggctagaagacgacaccaagcacatgacggagctccaggccgtgctgcagccccagatcatcgacgcgaacctgggggccatcgtcgaggactgcatgcggcactacgacgagctgttccacctgagggccatgctcgcaagatccgacgtgttccacctgatgaccggcctgtgggcgaccacggccgagcgatgcttcctctggatgggagggttccgtccttctgaaatcctcaagatgctgataccgcagctcgaccctctcgcggagccgcagctgctagggatgtacaatctgcaacggtcgtcggagcagaccgaggaggcgctcgtgcaggggcttcagcagctgcaccagtcgctggcggacgccgtgggcgctagtcctctcagcgacggcgcgaatgtcgccaactacaccgctctcatggccctggcacttgacaggctcgacaccctcgagagcttttaccgccaggcggacagcctgaggcagcagaccttgcaccagatgcggcggatcctgacgatccgccagacggctcggtgcttcgtctccatcagcgagtaccaccgccgcctccgcgcccttagctccgtctgggcatcgtcccgccctccaactcctccaagcgagggcgtcgttgcggccgcagagaatgttagccctacagggacgacgagcgagcaagctctccctccgtaccaccatagccagccgttccctggcttctgatcgaaggttcgatgcatgcatgcatgctggttgtcgcggctagctagggtacagattccgtcgtcagtggtggcgagcggacgacgaggcccggccgagggggacagattgtagtgtataacgttcttctatatatcattcgtcgagaacggaaacatgcatcatcagtcggtattcagtcagtgcatcatcactatgaaaaaaaagaggacacacaaagggtctctgctctctttctctc

SEQ ID NO: 9585 - protein, 515 aa, Zea mays subsp. mays
  peptide (1)..(515): Ceres Seq. ID no. 12375015
  misc_feature (196)..(253): Pfam Name: bZIP transcription factor Pfam Description: bZIP transcription factor
  misc_feature (67)..(515): Homolog of NCBI NO: 7489717 NR Description: basic leucine zipper protein - maize basic leucine zipper protein [Zea mays]
  misc_feature (41)..(430): Homolog of NCBI NO: 34908472 NR Description: putative basic leucine zipper protein [Oryza
  misc_feature (430)..(511): Homolog of NCBI NO: 34908472 NR Description: putative basic leucine zipper protein [Oryza
  misc_feature (171)..(515): Homolog of NCBI NO: 28630433 NR Description: liguleless2-like protein [Zea mays]
  misc_feature (47)..(477): Homolog of NCBI NO: 30680599 NR Description: bZIP protein [Arabidopsis thaliana]
  misc_feature (192)..(489): Homolog of NCBI NO: 6664324 NR Description: T27G7.2 [Arabidopsis thaliana]
  misc_feature (198)..(489): Homolog of NCBI NO: 6579203 NR Description: T23G18.19 [Arabidopsis thaliana]
  misc_feature (141)..(477): Homolog of NCBI NO: 17025920 NR Description: bZIP transcription factor [Oryza sativa]
  misc_feature (187)..(477): Homolog of NCBI NO: 17025918 NR Description: bZIP transcription factor [Oryza sativa]
  misc_feature (187)..(477): Homolog of NCBI NO: 422029 NR Description: transcription factor OBF3.2 - maize
MAQGEESSWCMASSDHASFAQAVACGTQRRASAAQPANFLELQPAAAAPYYFGELEEALIHGTRTSVDHGMIGSDVDTERKTAGYLAARPPTLEIFPSWPMSHLQQPYSGNSHSVGSTTESSSGQNSMPQTELVSPGSMRADSGQRQELLMVTVDDYNYEQGLGAAATTAPIFQQHAAGQDKGKHGSTRKDGRLLDAKTERRLAQNREAARKSRLRKKAYVQQLETSRIRLQQIEQELHGARSQGLFPGGGGAPGDLSSGAVIFDMEYARWLEDDTKHMTELQAVLQPQIIDANLGAIVEDCMRHYDELFHLRAMLARSDVFHLMTGLWATTAERCFLWMGGFRPSEILKMLIPQLDPLAEPQLLGMYNLQRSSEQTEEALVQGLQQLHQSLADAVGASPLSDGANVANYTALMALALDRLDTLESFYRQADSLRQQTLHQMRRILTIRQTARCFVSISEYHRRLRALSSVWASSRPPTPPSEGVVAAAENVSPTGTTSEQALPPYHHSQPFPGF

SEQ ID NO: 9586 - protein, 505 aa, Zea mays subsp. mays
  peptide (1)..(505): Ceres Seq. ID no. 12375016
  misc_feature (186)..(243): Pfam Name: bZIP transcription factor Pfam Description: bZIP transcription factor
  misc_feature (57)..(505): Homolog of NCBI NO: 7489717 NR Description: basic leucine zipper protein - maize basic leucine zipper protein [Zea mays]
  misc_feature (31)..(420): Homolog of NCBI NO: 34908472 NR Description: putative basic leucine zipper protein [Oryza
  misc_feature (420)..(501): Homolog of NCBI NO: 34908472 NR Description: putative basic leucine zipper protein [Oryza
  misc_feature (161)..(505): Homolog of NCBI NO: 28630433 NR Description: liguleless2-like protein [Zea mays]
  misc_feature (37)..(467): Homolog of NCBI NO: 30680599 NR Description: bZIP protein [Arabidopsis thaliana]
  misc_feature (182)..(479): Homolog of NCBI NO: 6664324 NR Description: T27G7.2 [Arabidopsis thaliana]
  misc_feature (188)..(479): Homolog of NCBI NO: 6579203 NR Description: T23G18.19 [Arabidopsis thaliana]
  misc_feature (131)..(467): Homolog of NCBI NO: 17025920 NR Description: bZIP transcription factor [Oryza sativa]
  misc_feature (177)..(467): Homolog of NCBI NO: 17025918 NR Description: bZIP transcription factor [Oryza sativa]
  misc_feature (177)..(467): Homolog of NCBI NO: 422029 NR Description: transcription factor OBF3.2 - maize
MASSDHASFAQAVACGTQRRASAAQPANFLELQPAAAAPYYFGELEEALIHGTRTSVDHGMIGSDVDTERKTAGYLAARPPTLEIFPSWPMSHLQQPYSGNSHSVGSTTESSSGQNSMPQTELVSPGSMRADSGQRQELLMVTVDDYNYEQGLGAAATTAPIFQQHAAGQDKGKHGSTRKDGRLLDAKTERRLAQNREAARKSRLRKKAYVQQLETSRIRLQQIEQELHGARSQGLFPGGGGAPGDLSSGAVIFDMEYARWLEDDTKHMTELQAVLQPQIIDANLGAIVEDCMRHYDELFHLRAMLARSDVFHLMTGLWATTAERCFLWMGGFRPSEILKMLIPQLDPLAEPQLLGMYNLQRSSEQTEEALVQGLQQLHQSLADAVGASPLSDGANVANYTALMALALDRLDTLESFYRQADSLRQQTLHQMRRILTIRQTARCFVSISEYHRRLRALSSVWASSRPPTPPSEGVVAAAENVSPTGTTSEQALPPYHHSQPFPGF

SEQ ID NO: 9587 - protein, 445 aa, Zea mays subsp. mays
  peptide (1)..(445): Ceres Seq. ID no. 12375017
  misc_feature (126)..(183): Pfam Name: bZIP transcription factor Pfam Description: bZIP transcription factor
  misc_feature (1)..(445): Homolog of NCBI NO: 7489717 NR Description: basic leucine zipper protein - maize basic leucine zipper protein [Zea mays]
  misc_feature (1)..(360): Homolog of NCBI NO: 34908472 NR Description: putative basic leucine zipper protein [Oryza
  misc_feature (360)..(441): Homolog of NCBI NO: 34908472 NR Description: putative basic leucine zipper protein [Oryza
  misc_feature (101)..(445): Homolog of NCBI NO: 28630433 NR Description: liguleless2-like protein [Zea mays]
  misc_feature (1)..(407): Homolog of NCBI NO: 30680599 NR Description: bZIP protein [Arabidopsis thaliana]
  misc_feature (122)..(419): Homolog of NCBI NO: 6664324 NR Description: T27G7.2 [Arabidopsis thaliana]
  misc_feature (128)..(419): Homolog of NCBI NO: 6579203 NR Description: T23G18.19 [Arabidopsis thaliana]
  misc_feature (71)..(407): Homolog of NCBI NO: 17025920 NR Description: bZIP transcription factor [Oryza sativa]
  misc_feature (117)..(407): Homolog of NCBI NO: 17025918 NR Description: bZIP transcription factor [Oryza sativa]
  misc_feature (117)..(407): Homolog of NCBI NO: 422029 NR Description: transcription factor OBF3.2 - maize
MIGSDVDTERKTAGYLAARPPTLEIFPSWPMSHLQQPYSGNSHSVGSTTESSSGQNSMPQTELVSPGSMRADSGQRQELLMVTVDDYNYEQGLGAAATTAPIFQQHAAGQDKGKHGSTRKDGRLLDAKTERRLAQNREAARKSRLRKKAYVQQLETSRIRLQQIEQELHGARSQGLFPGGGGAPGDLSSGAVIFDMEYARWLEDDTKHMTELQAVLQPQIIDANLGAIVEDCMRHYDELFHLRAMLARSDVFHLMTGLWATTAERCFLWMGGFRPSEILKMLIPQLDPLAEPQLLGMYNLQRSSEQTEEALVQGLQQLHQSLADAVGASPLSDGANVANYTALMALALDRLDTLESFYRQADSLRQQTLHQMRRILTIRQTARCFVSISEYHRRLRALSSVWASSRPPTPPSEGVVAAAENVSPTGTTSEQALPPYHHSQPFPGF

SEQ ID NO: 9588 - DNA, 1535 bp, Zea mays subsp. mays
  misc_feature (1)..(1535): Ceres Seq. ID no. 12382136
  misc_feature: MA Experiment ID: 108522 Result: Up-regulated in Transcription
  misc_feature: MA Experiment 108522 PARAMETER Experiment Name: Zm_42deg_Heat_P Parameter: Age (day) Value: 8
  misc_feature: MA Experiment 108522 PARAMETER Experiment Name: Zm_42deg_Heat_P Parameter: Organism Value: Zea mays
  misc_feature: MA Experiment 108522 PARAMETER Experiment Name: Zm_42deg_Heat_P Parameter: Plant Line Value: 35A19
  misc_feature: MA Experiment 108522 PARAMETER Experiment Name: Zm_42deg_Heat_P Parameter: Temperature (deg C) Value: 42 vs. 22
  misc_feature: MA Experiment 108522 PARAMETER Experiment Name: Zm_42deg_Heat_P Parameter: Timepoint (hr) Value: 1
  misc_feature: MA Experiment 108522 PARAMETER Experiment Name: Zm_42deg_Heat_P Parameter: Tissue Value: Aerial
  misc_feature: MA Experiment ID: 108523 Result: Up-regulated in Transcription
  misc_feature: MA Experiment 108523 PARAMETER Experiment Name: Zm_42deg_Heat_P Parameter: Age (day) Value: 8
  misc_feature: MA Experiment 108523 PARAMETER Experiment Name: Zm_42deg_Heat_P Parameter: Organism Value: Zea mays
  misc_feature: MA Experiment 108523 PARAMETER Experiment Name: Zm_42deg_Heat_P Parameter: Plant Line Value: 35A19
  misc_feature: MA Experiment 108523 PARAMETER Experiment Name: Zm_42deg_Heat_P Parameter: Temperature (deg C) Value: 42 vs. 22
  misc_feature: MA Experiment 108523 PARAMETER Experiment Name: Zm_42deg_Heat_P Parameter: Timepoint (hr) Value: 6
  misc_feature: MA Experiment 108523 PARAMETER Experiment Name: Zm_42deg_Heat_P Parameter: Tissue Value: Aerial
  misc_feature: MA Experiment ID: 108527 Result: Up-regulated in Transcription
  misc_feature: MA Experiment 108527 PARAMETER Experiment Name: Zm_5mM_NO_P Parameter: Age (day) Value: 8
  misc_feature: MA Experiment 108527 PARAMETER Experiment Name: Zm_5mM_NO_P Parameter: Organism Value: Zea mays
  misc_feature: MA Experiment 108527 PARAMETER Experiment Name: Zm_5mM_NO_P Parameter: Plant Line Value: 35A19
  misc_feature: MA Experiment 108527 PARAMETER Experiment Name: Zm_5mM_NO_P Parameter: Timepoint (hr) Value: 6
  misc_feature: MA Experiment 108527 PARAMETER Experiment Name: Zm_5mM_NO_P Parameter: Tissue Value: Aerial
  misc_feature: MA Experiment 108527 PARAMETER Experiment Name: Zm_5mM_NO_P Parameter: Treatment Value: 5mM NO vs. No Treatment
  misc_feature: MA Experiment ID: 108533 Result: Up-regulated in Transcription
  misc_feature: MA Experiment 108533 PARAMETER Experiment Name: Zm_4deg_Cold_P Parameter: Age (hr) Value: 8
  misc_feature: MA Experiment 108533 PARAMETER Experiment Name: Zm_4deg_Cold_P Parameter: Organism Value: Zea mays
  misc_feature: MA Experiment 108533 PARAMETER Experiment Name: Zm_4deg_Cold_P Parameter: Plant Line Value: 35A19
  misc_feature: MA Experiment 108533 PARAMETER Experiment Name: Zm_4deg_Cold_P Parameter: Temperature (deg C) Value: 4 vs. 22
  misc_feature: MA Experiment 108533 PARAMETER Experiment Name: Zm_4deg_Cold_P Parameter: Timepoint (hr) Value: 1
  misc_feature: MA Experiment 108533 PARAMETER Experiment Name: Zm_4deg_Cold_P Parameter: Tissue Value: Aerial
  misc_feature: MA Experiment ID: 108535 Result: Down-regulated in Transcription
  misc_feature: MA Experiment 108535 PARAMETER Experiment Name: Zm_Meristem_P Parameter: Age (day) Value: 8
  misc_feature: MA Experiment 108535 PARAMETER Experiment Name: Zm_Meristem_P Parameter: Organism Value: Zea mays
  misc_feature: MA Experiment 108535 PARAMETER Experiment Name: Zm_Meristem_P Parameter: Plant Line Value: 35A19
  misc_feature: MA Experiment 108535 PARAMETER Experiment Name: Zm_Meristem_P Parameter: Tissue Value: Root Meristem vs. Above Root Meristem
  misc_feature: MA Experiment ID: 108556 Result: Up-regulated in Transcription
  misc_feature: MA Experiment 108556 PARAMETER Experiment Name: Zm_Drought_P Parameter: Age (day) Value: 9
  misc_feature: MA Experiment 108556 PARAMETER Experiment Name: Zm_Drought_P Parameter: Organism Value: Zea mays
  misc_feature: MA Experiment 108556 PARAMETER Experiment Name: Zm_Drought_P Parameter: Plant Line Value: 35A19
  misc_feature: MA Experiment 108556 PARAMETER Experiment Name: Zm_Drought_P Parameter: Timepoint (hr) Value: 24
  misc_feature: MA Experiment 108556 PARAMETER Experiment Name: Zm_Drought_P Parameter: Tissue Value: Aerial
  misc_feature: MA Experiment 108556 PARAMETER Experiment Name: Zm_Drought_P Parameter: Treatment Value: Drought vs. No Drought
  misc_feature: MA Experiment ID: 20000479 Result: Up-regulated in Transcription
  misc_feature: MA Experiment 20000479 PARAMETER Experiment Name: Zm_Drought_P Parameter: Age (day) Value: 10
  misc_feature: MA Experiment 20000479 PARAMETER Experiment Name: Zm_Drought_P Parameter: Organism Value: Zea mays
  misc_feature: MA Experiment 20000479 PARAMETER Experiment Name: Zm_Drought_P Parameter: Plant Line Value: 35A19
  misc_feature: MA Experiment 20000479 PARAMETER Experiment Name: Zm_Drought_P Parameter: Timepoint (hr) Value: 48
  misc_feature: MA Experiment 20000479 PARAMETER Experiment Name: Zm_Drought_P Parameter: Tissue Value: Aerial
  misc_feature: MA Experiment 20000479 PARAMETER Experiment Name: Zm_Drought_P Parameter: Treatment Value: Drought vs. No Drought
  misc_feature: MA Experiment ID: 20000480 Result: Up-regulated in Transcription
  misc_feature: MA Experiment 20000480 PARAMETER Experiment Name: Zm_Drought_P Parameter: Age (day) Value: 11
  misc_feature: MA Experiment 20000480 PARAMETER Experiment Name: Zm_Drought_P Parameter: Organism Value: Zea mays
  misc_feature: MA Experiment 20000480 PARAMETER Experiment Name: Zm_Drought_P Parameter: Plant Line Value: 35A19
  misc_feature: MA Experiment 20000480 PARAMETER Experiment Name: Zm_Drought_P Parameter: Timepoint (hr) Value: 72
  misc_feature: MA Experiment 20000480 PARAMETER Experiment Name: Zm_Drought_P Parameter: Tissue Value: Aerial
  misc_feature: MA Experiment 20000480 PARAMETER Experiment Name: Zm_Drought_P Parameter: Treatment Value: Drought vs. No Drought
atgaagctcacatttctcaatggcattccattcttgcacaatcattccagccagccaccatagctccatgtcgtcgtcgacctcacaaatggcgtcgctcgccgtgctcgtcttcctggtggtctgcgcaacgcttgcgtccggcgccgccagcgtccgcgttgggctcacgcgcatccactccgacccggacaccaccgcgccccagttcgtgcgcgacgcgctgcgccgcgacatgcaccggcagcggtcccggtcgttcggccgcgaccgcgaccgcgagctcgcggagtccgacgggcgcaccagcaccacggtgtccgcgcgcacccgcaaggacctgcccaacggcggggagtacctcatgacgctggccatcggcacgccgccgctgccgtacgcggccgtcgccgacacgggcagcgacctcatctggacgcagtgcgcgccctgcggcacccagtgcttcgagcagccggcgccgctgtacaacccagcgagctcgaccacgttcagcgtgctcccgtgcaacagctccctgagcatgtgcgcgggggcgctggcgggggccgcgccgccgcccgggtgcgcctgcatgtactaccagacgtacggcaccgggtggacggcgggcgtgcagggctccgagaccttcaccttcggctcgtccgccgccgaccaggcccgcgtccccggcgtcgccttcggctgcagcaacgccagcagcagcgactggaacgggtcggcggggctggtggggctgggcaggggcagcctgtcgctcgtctcgcagctcggcgccggcaggttctcctactgcctgacgccgttccaggacaccaacagcaccagcaccctcctcctcggcccgtcggcggcgctcaacggcaccggcgtccgctccacgccgttcgtcgctagcccggccagggcgcccatgagcacctactactacctcaacctgacgggcatatccctgggcgcgaaggcgctgcccatctctcccggcgcattctccctgaagcccgacggcacgggcggcctcatcatcgactccggcacgaccatcacctcgctggccaacgcggcgtaccagcaggtccgcgccgcggtaaagtcccagctggtcacgacgctgccaacggtcgacgggtcggactccacggggctcgacctgtgcttcgcgctgccggccccgacgtcggcgccgccggccgtgctgccgagcatgacgctccacttcgacggcgccgacatggtgctccccgcggacagctacatgatctcggggtccggcgtgtggtgcctggccatgcggaaccagacggacggcgcgatgagcacgttcgggaactaccagcagcagaacatgcacatcctctacgacgtccgggaggagacgctgtcgttcgctccggccaagtgcagcactctttgacgatgcgatagttgtacatatgtatatgtgtgcatatataggattcgtgatttttttgtatacagtggattgttaaccgaacacgctaattaattcc

SEQ ID NO: 9589 - protein, 472 aa, Zea mays subsp. mays
  peptide (1)..(472): Ceres Seq. ID no. 12382137
  misc_feature (64)..(467): Pfam Name: Eukaryotic aspartyl protease Pfam Description: Eukaryotic aspartyl protease
  misc_feature (25)..(472): Homolog of NCBI NO: 34898762 NR Description: OJ1131_E05.5 [Oryza sativa (japonica
  misc_feature (24)..(472): Homolog of NCBI NO: 34898756 NR Description: OJ1131_E05.2 [Oryza sativa (japonica
  misc_feature (38)..(472): Homolog of NCBI NO: 38344829 NR Description: OSJNBa0064H22.10 [Oryza sativa (japonica
  misc_feature (47)..(472): Homolog of NCBI NO: 30678047 NR Description: chloroplast nucleoid DNA binding protein -related
  misc_feature (116)..(472): Homolog of NCBI NO: 20197342 NR Description: putative chloroplast nucleoid DNA binding protein
  misc_feature (24)..(472): Homolog of NCBI NO: 15242803 NR Description: putative protein; protein id: At5g33340.1
  misc_feature (42)..(469): Homolog of NCBI NO: 15290061 NR Description: nucleoid DNA-binding protein cnd41-like protein
  misc_feature (7)..(470): Homolog of NCBI NO: 15223368 NR Description: chloroplast nucleoid DNA binding protein, protein id: At1g01300.1, supported by cDNA: 7567. [Arabidopsis
  misc_feature (112)..(469): Homolog of NCBI NO: 34895664 NR Description: nucleoid DNA-binding protein cnd41-like protein
  misc_feature (112)..(472): Homolog of NCBI NO: 15228044 NR Description: putative chloroplast nucleoid DNA binding protein id: At2g42980.1 [Arabidopsis thaliana] putative chloroplast nucleoid DNA binding protein [Arabidopsis
MAFHSCTIIPASHHSSMSSSTSQMASLAVLVFLVVCATLASGAASVRVGLTRIHSDPDTTAPQFVRDALRRDMHRQRSRSFGRDRDRELAESDGRTSTTVSARTRKDLPNGGEYLMTLAIGTPPLPYAAVADTGSDLIWTQCAPCGTQCFEQPAPLYNPASSTTFSVLPCNSSLSMCAGALAGAAPPPGCACMYYQTYGTGWTAGVQGSETFTFGSSAADQARVPGVAFGCSNASSSDWNGSAGLVGLGRGSLSLVSQLGAGRFSYCLTPFQDTNSTSTLLLGPSAALNGTGVRSTPFVASPARAPMSTYYYLNLTGISLGAKALPISPGAFSLKPDGTGGLIIDSGTTITSLANAAYQQVRAAVKSQLVTTLPTVDGSDSTGLDLCFALPAPTSAPPAVLPSMTLHFDGADMVLPADSYMISGSGVWCLAMRNQTDGAMSTFGNYQQQNMHILYDVREETLSFAPAKCSTL

SEQ ID NO: 9590 - protein, 456 aa, Zea mays subsp. mays
  peptide (1)..(456): Ceres Seq. ID no. 12382138
  misc_feature (48)..(451): Pfam Name: Eukaryotic aspartyl protease Pfam Description: Eukaryotic aspartyl protease
  misc_feature (9)..(456): Homolog of NCBI NO: 34898762 NR Description: OJ1131_E05.5 [Oryza sativa (japonica
  misc_feature (8)..(456): Homolog of NCBI NO: 34898756 NR Description: OJ1131_E05.2 [Oryza sativa (japonica
  misc_feature (22)..(456): Homolog of NCBI NO: 38344829 NR Description: OSJNBa0064H22.10 [Oryza sativa (japonica
  misc_feature (31)..(456): Homolog of NCBI NO: 30678047 NR Description: chloroplast nucleoid DNA binding protein -related
  misc_feature (100)..(456): Homolog of NCBI NO: 20197342 NR Description: putative chloroplast nucleoid DNA binding protein
  misc_feature (8)..(456): Homolog of NCBI NO: 15242803 NR Description: putative protein; protein id: At5g33340.1
  misc_feature (26)..(453): Homolog of NCBI NO: 15290061 NR Description: nucleoid DNA-binding protein cnd41-like protein
  misc_feature (1)..(454): Homolog of NCBI NO: 15223368 NR Description: chloroplast nucleoid DNA binding protein, protein id: At1g01300.1, supported by cDNA: 7567. [Arabidopsis
  misc_feature (96)..(453): Homolog of NCBI NO: 34895664 NR Description: nucleoid DNA-binding protein cnd41-like protein
  misc_feature (96)..(456): Homolog of NCBI NO: 15228044 NR Description: putative chloroplast nucleoid DNA binding protein id: At2g42980.1 [Arabidopsis thaliana] putative chloroplast nucleoid DNA binding protein [Arabidopsis
MSSSTSQMASLAVLVFLVVCATLASGAASVRVGLTRIHSDPDTTAPQFVRDALRRDMHRQRSRSFGRDRDRELAESDGRTSTTVSARTRKDLPNGGEYLMTLAIGTPPLPYAAVADTGSDLIWTQCAPCGTQCFEQPAPLYNPASSTTFSVLPCNSSLSMCAGALAGAAPPPGCACMYYQTYGTGWTAGVQGSETFTFGSSAADQARVPGVAFGCSNASSSDWNGSAGLVGLGRGSLSLVSQLGAGRFSYCLTPFQDTNSTSTLLLGPSAALNGTGVRSTPFVASPARAPMSTYYYLNLTGISLGAKALPISPGAFSLKPDGTGGLIIDSGTTITSLANAAYQQVRAAVKSQLVTTLPTVDGSDSTGLDLCFALPAPTSAPPAVLPSMTLHFDGADMVLPADSYMISGSGVWCLAMRNQTDGAMSTFGNYQQQNMHILYDVREETLSFAPAKCSTL

SEQ ID NO: 9591 - protein, 449 aa, Zea mays subsp. mays
  peptide (1)..(449): Ceres Seq. ID no. 12382139
  misc_feature (41)..(444): Pfam Name: Eukaryotic aspartyl protease Pfam Description: Eukaryotic aspartyl protease
  misc_feature (2)..(449): Homolog of NCBI NO: 34898762 NR Description: OJ1131_E05.5 [Oryza sativa (japonica
  misc_feature (1)..(449): Homolog of NCBI NO: 34898756 NR Description: OJ1131_E05.2 [Oryza sativa (japonica
  misc_feature (15)..(449): Homolog of NCBI NO: 38344829 NR Description: OSJNBa0064H22.10 [Oryza sativa (japonica
  misc_feature (24)..(449): Homolog of NCBI NO: 30678047 NR Description: chloroplast nucleoid DNA binding protein -related
  misc_feature (93)..(449): Homolog of NCBI NO: 20197342 NR Description: putative chloroplast nucleoid DNA binding protein
  misc_feature (1)..(449): Homolog of NCBI NO: 15242803 NR Description: putative protein; protein id: At5g33340.1
  misc_feature (19)..(446): Homolog of NCBI NO: 15290061 NR Description: nucleoid DNA-binding protein cnd41-like protein
  misc_feature (1)..(447): Homolog of NCBI NO: 15223368 NR Description: chloroplast nucleoid DNA binding protein, protein id: At1g01300.1, supported by cDNA: 7567. [Arabidopsis
  misc_feature (89)..(446): Homolog of NCBI NO: 34895664 NR Description: nucleoid DNA-binding protein cnd41-like protein
  misc_feature (89)..(449): Homolog of NCBI NO: 15228044 NR Description: putative chloroplast nucleoid DNA binding protein id: At2g42980.1 [Arabidopsis thaliana] putative chloroplast nucleoid DNA binding protein [Arabidopsis
MASLAVLVFLVVCATLASGAASVRVGLTRIHSDPDTTAPQFVRDALRRDMHRQRSRSFGRDRDRELAESDGRTSTTVSARTRKDLPNGGEYLMTLAIGTPPLPYAAVADTGSDLIWTQCAPCGTQCFEQPAPLYNPASSTTFSVLPCNSSLSMCAGALAGAAPPPGCACMYYQTYGTGWTAGVQGSETFTFGSSAADQARVPGVAFGCSNASSSDWNGSAGLVGLGRGSLSLVSQLGAGRFSYCLTPFQDTNSTSTLLLGPSAALNGTGVRSTPFVASPARAPMSTYYYLNLTGISLGAKALPISPGAFSLKPDGTGGLIIDSGTTITSLANAAYQQVRAAVKSQLVTTLPTVDGSDSTGLDLCFALPAPTSAPPAVLPSMTLHFDGADMVLPADSYMISGSGVWCLAMRNQTDGAMSTFGNYQQQNMHILYDVREETLSFAPAKCSTL

SEQ ID NO: 9592 - DNA, 1422 bp, Zea mays subsp. mays
  misc_feature (1)..(1422): Ceres Seq. ID no. 13492589
  misc_feature: MA Experiment ID: 108523 Result: Up-regulated in Transcription
  misc_feature: MA Experiment 108523 PARAMETER Experiment Name: Zm_42deg_Heat_P Parameter: Age (day) Value: 8
  misc_feature: MA Experiment 108523 PARAMETER Experiment Name: Zm_42deg_Heat_P Parameter: Organism Value: Zea mays
  misc_feature: MA Experiment 108523 PARAMETER Experiment Name: Zm_42deg_Heat_P Parameter: Plant Line Value: 35A19
  misc_feature: MA Experiment 108523 PARAMETER Experiment Name: Zm_42deg_Heat_P Parameter: Temperature (deg C) Value: 42 vs. 22
  misc_feature: MA Experiment 108523 PARAMETER Experiment Name: Zm_42deg_Heat_P Parameter: Timepoint (hr) Value: 6
  misc_feature: MA Experiment 108523 PARAMETER Experiment Name: Zm_42deg_Heat_P Parameter: Tissue Value: Aerial
gaccaacccaaccgtgggggtgccgggtgccctacggcctacgggccggagcagcgcttgggagccgcggcacggaggcatcgacgccgttgagctcgaggcgaccggcggctggcggccccgccacagcgttgctgtggcagtgtggcttcttctggtttctgcgggctcagcgcggaggcctattgcaggattaaatggcaaatagggcaagatggatgatgaagtacgaaaagggtcttgttgatatacttcatgagaacaacacttcacattatcgtacccaaaacggttggagaacataggggtggaggaaaattgttagggatttcaatgtacggtaccctgaagcaaagtttagtaaaatgcaaatccaggaacatgagactcaattgaagaaagactacaggtcgataaaatatatcctccaacgtgatggtgtctcgtgggaccagagtgcgtccatgtttagaacaacagatgaaatctgggatgagattatcgaggatatgcccaaggcacggaagtaccaaagcaagagctttccattgcttgactcactagaaccgttatttgatggtcctattcctgaaggggcacaaaaatcaccttccagcatacctcagaatgttggtggaaacgttggtgatggaggcaacaatatcagcacagtcccagacttgtctgaaagacctagtggaacaattaacacaagcgttaatgaggcatggaataatatcagcctacttaagcaaacagcattgggaccccaaggtatagacaatctcgattctcgacacgctgcaaaatcgtgataaagaggtgctggaacggctacagcatggctcggaccggaggccgaagagagcggatgaacaggcacagtcaagttcttgcgtagaactgcagagagacaggcgcaagaagcggaaggccccagacatccagcagatcatggagacctatatgaatttcagaatgaagcaacctcgcgtcaaacaacgaagagcaaaggacggtgaccagttcacgatttcaagctgtatcaaggctctgcacaccatggctgatatgtcagatgaggtcaaggtattagcctctgatgttttcaaggacgctgagaacagggagacctttctttcgtatgaacccaggctgcgcaccttgtggctgaagagggaagttggcaagctactctcctatagaagtggcagcccttgcttgttttgtttgctacccgtgcctaggcttcatttaacaaactctactagtgacttaacttgttccatgcacagtacgtcactatactgcttagtcattcatgatcaatgatgtgcttgctgcatgtagtgcttccaaaattttgcatctgtgccaatacactgttaaaaaatgcgacagaatgcttgtttcttgacagct

SEQ ID NO: 9593 - protein, 149 aa, Zea mays subsp. mays
  peptide (1)..(149): Ceres Seq. ID no. 13492590
  misc_feature (1)..(142): Homolog of NCBI NO: 21741991 NR Description: OSJNBa0060P14.12 [Oryza sativa (japonica
  misc_feature (1)..(86): Homolog of NCBI NO: 34907580 NR Description: B1078G07.31 [Oryza sativa (japonica
  misc_feature (1)..(77): Homolog of NCBI NO: 37535590 NR Description: hypothetical protein [Oryza sativa (japonica group)] >gi|22726005|gb|AAN05005.1| hypothetical protein [Oryza
  misc_feature (1)..(77): Homolog of NCBI NO: 37535236 NR Description: hypothetical protein [Oryza sativa (japonica group)] >gi|13489169|gb|AAK27803.1| hypothetical protein [Oryza
  misc_feature (1)..(77): Homolog of NCBI NO: 34915330 NR Description: hypothetical protein~similar to Oryza sativa
  misc_feature (50)..(89): Homolog of NCBI NO: 38344751 NR Description: OSJNBa0089K21.9 [Oryza sativa (japonica
  misc_feature (1)..(77): Homolog of NCBI NO: 34394471 NR Description: unknown protein [Oryza sativa (japonica
  misc_feature (1)..(70): Homolog of NCBI NO: 15224652 NR Description: hypothetical protein [Arabidopsis thaliana]
  misc_feature (1)..(66): Homolog of NCBI NO: 25371570 NR Description: hypothetical protein AT4g02210 [imported] - thaliana >gi|3912927|gb|AAC78711.1| hypothetical protein thaliana] >gi|7268981|emb|CAB80714.1| hypothetical protein
  misc_feature (1)..(66): Homolog of NCBI NO: 15293059 NR Description: unknown protein [Arabidopsis thaliana]
  misc_feature (1)..(77): Homolog of NCBI NO: 37535236 NR Description: hypothetical protein [Oryza sativa (japonica group)] >gi|13489169|gb|AAK27803.1| hypothetical protein [Oryza
  misc_feature (1)..(77): Homolog of NCBI NO: 34915330 NR Description: hypothetical protein~similar to Oryza sativa
  misc_feature (50)..(89): Homolog of NCBI NO: 38344751 NR Description: OSJNBa0089K21.9 [Oryza sativa (japonica
  misc_feature (1)..(77): Homolog of NCBI NO: 34394471 NR Description: unknown protein [Oryza sativa (japonica
  misc_feature (1)..(70): Homolog of NCBI NO: 15224652 NR Description: hypothetical protein [Arabidopsis thaliana]
  misc_feature (1)..(66): Homolog of NCBI NO: 25371570 NR Description: hypothetical protein AT4g02210 [imported] - thaliana >gi|3912927|gb|AAC78711.1| hypothetical protein thaliana] >gi|7268981|emb|CAB80714.1| hypothetical protein
  misc_feature (1)..(66): Homolog of NCBI NO: 15293059 NR Description: unknown protein [Arabidopsis thaliana]
  misc_feature (1)..(142): Homolog of NCBI NO: 21741991 NR Description: OSJNBa0060P14.12 [Oryza sativa (japonica
  misc_feature (1)..(86): Homolog of NCBI NO: 34907580 NR Description: B1078G07.31 [Oryza sativa (japonica
  misc_feature (1)..(77): Homolog of NCBI NO: 37535590 NR Description: hypothetical protein [Oryza sativa (japonica group)] >gi|22726005|gb|AAN05005.1| hypothetical protein [Oryza
MQIQEHETQLKKDYRSIKYILQRDGVSWDQSASMFRTTDEIWDEIIEDMPKARKYQSKSFPLLDSLEPLFDGPIPEGAQKSPSSIPQNVGGNVGDGGNNISTVPDLSERPSGTINTSVNEAWNNISLLKQTALGPQGIDNLDSRHAAKS

SEQ ID NO: 9594 - protein, 125 aa, Zea mays subsp. mays
  peptide (1)..(125): Ceres Seq. ID no. 13492591
  misc_feature (1)..(82): Homolog of NCBI NO: 21741991 NR Description: OSJNBa0060P14.12 [Oryza sativa (japonica
  misc_feature (11)..(74): Homolog of NCBI NO: 34907580 NR Description: B1078G07.31 [Oryza sativa (japonica
  misc_feature (1)..(80): Homolog of NCBI NO: 37535236 NR Description: hypothetical protein [Oryza sativa (japonica group)] >gi|13489169|gb|AAK27803.1| hypothetical protein [Oryza
  misc_feature (1)..(80): Homolog of NCBI NO: 34915330 NR Description: hypothetical protein~similar to Oryza sativa
  misc_feature (1)..(77): Homolog of NCBI NO: 38344751 NR Description: OSJNBa0089K21.9 [Oryza sativa (japonica
  misc_feature (27)..(77): Homolog of NCBI NO: 15224652 NR Description: hypothetical protein [Arabidopsis thaliana]
  misc_feature (15)..(77): Homolog of NCBI NO: 25371570 NR Description: hypothetical protein AT4g02210 [imported] - thaliana >gi|3912927|gb|AAC78711.1| hypothetical protein thaliana] >gi|7268981|emb|CAB80714.1| hypothetical protein
  misc_feature (15)..(77): Homolog of NCBI NO: 15293059 NR Description: unknown protein [Arabidopsis thaliana]
  misc_feature (15)..(77): Homolog of NCBI NO: 18411878 NR Description: expressed protein [Arabidopsis thaliana]
  misc_feature (1)..(77): Homolog of NCBI NO: 37535088 NR Description: hypothetical protein [Oryza sativa (japonica group)] >gi|22165102|gb|AAM93719.1| hypothetical protein [Oryza
  misc_feature (1)..(82): Homolog of NCBI NO: 21741991 NR Description: OSJNBa0060P14.12 [Oryza sativa (japonica
  misc_feature (11)..(74): Homolog of NCBI NO: 34907580 NR Description: B1078G07.31 [Oryza sativa (japonica
  misc_feature (1)..(80): Homolog of NCBI NO: 37535236 NR Description: hypothetical protein [Oryza sativa (japonica group)] >gi|13489169|gb|AAK27803.1| hypothetical protein [Oryza
  misc_feature (1)..(80): Homolog of NCBI NO: 34915330 NR Description: hypothetical protein~similar to Oryza sativa
  misc_feature (1)..(77): Homolog of NCBI NO: 38344751 NR Description: OSJNBa0089K21.9 [Oryza sativa (japonica
  misc_feature (27)..(77): Homolog of NCBI NO: 15224652 NR Description: hypothetical protein [Arabidopsis thaliana]
  misc_feature (15)..(77): Homolog of NCBI NO: 25371570 NR Description: hypothetical protein AT4g02210 [imported] - thaliana >gi|3912927|gb|AAC78711.1| hypothetical protein thaliana] >gi|7268981|emb|CAB80714.1| hypothetical protein
  misc_feature (15)..(77): Homolog of NCBI NO: 15293059 NR Description: unknown protein [Arabidopsis thaliana]
  misc_feature (15)..(77): Homolog of NCBI NO: 18411878 NR Description: expressed protein [Arabidopsis thaliana]
  misc_feature (1)..(77): Homolog of NCBI NO: 37535088 NR Description: hypothetical protein [Oryza sativa (japonica group)] >gi|22165102|gb|AAM93719.1| hypothetical protein [Oryza
METYMNFRMKQPRVKQRRAKDGDQFTISSCIKALHTMADMSDEVKVLASDVFKDAENRETFLSYEPRLRTLWLKREVGKLLSYRSGSPCLFCLLPVPRLHLTNSTSDLTCSMHSTSLYCLVIHDQ

SEQ ID NO: 9595 - protein, 121 aa, Zea mays subsp. mays
  peptide (1)..(121): Ceres Seq. ID no. 13492592
  misc_feature (1)..(78): Homolog of NCBI NO: 21741991 NR Description: OSJNBa0060P14.12 [Oryza sativa (japonica
  misc_feature (7)..(70): Homolog of NCBI NO: 34907580 NR Description: B1078G07.31 [Oryza sativa (japonica
  misc_feature (1)..(76): Homolog of NCBI NO: 37535236 NR Description: hypothetical protein [Oryza sativa (japonica group)] >gi|13489169|gb|AAK27803.1| hypothetical protein [Oryza
  misc_feature (1)..(76): Homolog of NCBI NO: 34915330 NR Description: hypothetical protein~similar to Oryza sativa
  misc_feature (1)..(73): Homolog of NCBI NO: 38344751 NR Description: OSJNBa0089K21.9 [Oryza sativa (japonica
  misc_feature (23)..(73): Homolog of NCBI NO: 15224652 NR Description: hypothetical protein [Arabidopsis thaliana]
  misc_feature (11)..(73): Homolog of NCBI NO: 25371570 NR Description: hypothetical protein AT4g02210 [imported] - thaliana >gi|3912927|gb|AAC78711.1| hypothetical protein thaliana] >gi|7268981|emb|CAB80714.1| hypothetical protein
  misc_feature (11)..(73): Homolog of NCBI NO: 15293059 NR Description: unknown protein [Arabidopsis thaliana]
  misc_feature (11)..(73): Homolog of NCBI NO: 18411878 NR Description: expressed protein [Arabidopsis thaliana]
  misc_feature (1)..(73): Homolog of NCBI NO: 37535088 NR Description: hypothetical protein [Oryza sativa (japonica group)] >gi|22165102|gb|AAM93719.1| hypothetical protein [Oryza
  misc_feature (1)..(78): Homolog of NCBI NO: 21741991 NR Description: OSJNBa0060P14.12 [Oryza sativa (japonica
  misc_feature (7)..(70): Homolog of NCBI NO: 34907580 NR Description: B1078G07.31 [Oryza sativa (japonica
  misc_feature (1)..(76): Homolog of NCBI NO: 37535236 NR Description: hypothetical protein [Oryza sativa (japonica group)] >gi|13489169|gb|AAK27803.1| hypothetical protein [Oryza
  misc_feature (1)..(76): Homolog of NCBI NO: 34915330 NR Description: hypothetical protein~similar to Oryza sativa
  misc_feature (1)..(73): Homolog of NCBI NO: 38344751 NR Description: OSJNBa0089K21.9 [Oryza sativa (japonica
  misc_feature (23)..(73): Homolog of NCBI NO: 15224652 NR Description: hypothetical protein [Arabidopsis thaliana]
  misc_feature (11)..(73): Homolog of NCBI NO: 25371570 NR Description: hypothetical protein AT4g02210 [imported] - thaliana >gi|3912927|gb|AAC78711.1| hypothetical protein thaliana] >gi|7268981|emb|CAB80714.1| hypothetical protein
  misc_feature (11)..(73): Homolog of NCBI NO: 15293059 NR Description: unknown protein [Arabidopsis thaliana]
  misc_feature (11)..(73): Homolog of NCBI NO: 18411878 NR Description: expressed protein [Arabidopsis thaliana]
  misc_feature (1)..(73): Homolog of NCBI NO: 37535088 NR Description: hypothetical protein [Oryza sativa (japonica group)] >gi|22165102|gb|AAM93719.1| hypothetical protein [Oryza
MNFRMKQPRVKQRRAKDGDQFTISSCIKALHTMADMSDEVKVLASDVFKDAENRETFLSYEPRLRTLWLKREVGKLLSYRSGSPCLFCLLPVPRLHLTNSTSDLTCSMHSTSLYCLVIHDQ

SEQ ID NO: 9596 - DNA, 1464 bp, Zea mays subsp. mays
  misc_feature (1)..(1464): Ceres Seq. ID no. 12381445
  misc_feature: MA Experiment ID: 108515 Result: Up-regulated in Transcription
  misc_feature: MA Experiment 108515 PARAMETER Experiment Name: Zm_2mM_SA_P Parameter: Age (day) Value: 8
  misc_feature: MA Experiment 108515 PARAMETER Experiment Name: Zm_2mM_SA_P Parameter: Organism Value: Zea mays
  misc_feature: MA Experiment 108515 PARAMETER Experiment Name: Zm_2mM_SA_P Parameter: Plant Line Value: 35A19
  misc_feature: MA Experiment 108515 PARAMETER Experiment Name: Zm_2mM_SA_P Parameter: Timepoint (hr) Value: 12
  misc_feature: MA Experiment 108515 PARAMETER Experiment Name: Zm_2mM_SA_P Parameter: Tissue Value: Aerial
  misc_feature: MA Experiment 108515 PARAMETER Experiment Name: Zm_2mM_SA_P Parameter: Treatment Value: 2mM SA vs. No Treatment
  misc_feature: MA Experiment ID: 108528 Result: Down-regulated in Transcription
  misc_feature: MA Experiment 108528 PARAMETER Experiment Name: Zm_Imbibed_Seeds_P Parameter: Age (day) Value: 5 vs. 2
  misc_feature: MA Experiment 108528 PARAMETER Experiment Name: Zm_Imbibed_Seeds_P Parameter: Organism Value: Zea mays
  misc_feature: MA Experiment 108528 PARAMETER Experiment Name: Zm_Imbibed_Seeds_P Parameter: Plant Line Value: 35A19
  misc_feature: MA Experiment 108528 PARAMETER Experiment Name: Zm_Imbibed_Seeds_P Parameter: Tissue Value: Aerial vs. Embryo
  misc_feature: MA Experiment ID: 108530 Result: Down-regulated in Transcription
  misc_feature: MA Experiment 108530 PARAMETER Experiment Name: Zm_Imbibed_Seeds_P Parameter: Age (day) Value: 6 vs. 2
  misc_feature: MA Experiment 108530 PARAMETER Experiment Name: Zm_Imbibed_Seeds_P Parameter: Organism Value: Zea mays
  misc_feature: MA Experiment 108530 PARAMETER Experiment Name: Zm_Imbibed_Seeds_P Parameter: Plant Line Value: 35A19
  misc_feature: MA Experiment 108530 PARAMETER Experiment Name: Zm_Imbibed_Seeds_P Parameter: Tissue Value: Aerial vs. Embryo
  misc_feature: MA Experiment ID: 108535 Result: Up-regulated in Transcription
  misc_feature: MA Experiment 108535 PARAMETER Experiment Name: Zm_Meristem_P Parameter: Age (day) Value: 8
  misc_feature: MA Experiment 108535 PARAMETER Experiment Name: Zm_Meristem_P Parameter: Organism Value: Zea mays
  misc_feature: MA Experiment 108535 PARAMETER Experiment Name: Zm_Meristem_P Parameter: Plant Line Value: 35A19
  misc_feature: MA Experiment 108535 PARAMETER Experiment Name: Zm_Meristem_P Parameter: Tissue Value: Root Meristem vs. Above Root Meristem
  misc_feature: MA Experiment ID: 108544 Result: Down-regulated in Transcription
  misc_feature: MA Experiment ID: 108545 Result: Down-regulated in Transcription
  misc_feature: MA Experiment 108545 PARAMETER Experiment Name: Zm_Imbibed_Seeds_P Parameter: Age (day) Value: 3 vs. 2
  misc_feature: MA Experiment 108545 PARAMETER Experiment Name: Zm_Imbibed_Seeds_P Parameter: Organism Value: Zea mays
  misc_feature: MA Experiment 108545 PARAMETER Experiment Name: Zm_Imbibed_Seeds_P Parameter: Plant Line Value: 35A19
  misc_feature: MA Experiment 108545 PARAMETER Experiment Name: Zm_Imbibed_Seeds_P Parameter: Tissue Value: Aerial vs. Embryo
  misc_feature: MA Experiment ID: 20000492 Result: Down-regulated in Transcription
  misc_feature: MA Experiment 20000492 PARAMETER Experiment Name: Zm_Hybrid_Seed_Dev_P Parameter: DAP Value: 12
  misc_feature: MA Experiment 20000492 PARAMETER Experiment Name: Zm_Hybrid_Seed_Dev_P Parameter: Organism Value: Zea mays
  misc_feature: MA Experiment 20000492 PARAMETER Experiment Name: Zm_Hybrid_Seed_Dev_P Parameter: Plant Line Value: 35A19
  misc_feature: MA Experiment 20000492 PARAMETER Experiment Name: Zm_Hybrid_Seed_Dev_P Parameter: Tissue Value: Fert Kernel vs. Unfert Floret
aagtcacatcagcgcgtccgccttcacctatcatcatcgtctcaatctccggccggtctcagccgggcacccaaactgagatggcgtccgtccggtggtcccgccgtgggccctgatcgcctccttcctcgtcgtcgcggcagtgggagcccagccgatggacccgaagaaccccatctcgtcggaccccaacgtgatccccgtatacatgagccccggctcgccccccacctacgtgagctgttacaacagcacccatgggcagcaagggtcggaacccacgtgctccatcctcgcgcgccagtgtccccgcggttgccgggacacctgctacgtccactgcccgtcctgcaagctcgtctgcctgtgcgagctgaccggctcggagtgctacgacccgcgcttcgtgggaggcgacggcaacaagttcctgttccacggccggcgcgacgccgacttctgtctggtgtcggacgccaacctgcacatcaacgcgcacttcatcggcaagcgcaacgacgcgcgcgccgccgcgccggcgcgggacttcacgtgggtgcaggcgctgggcatccggttcggcgggcaccggctgtacctgggcgtccggaggacggccgtctgggacgacgccgaggaccggctggccatcaccttcgacggggtgcccgtggcgctggacgccgtggccggcgccagctggagccccgcggcggcgcccgcgctgtccgtgttccgcacgggccccgccaacggcgtggtggtgcgcctggacgggcggttccgggccgtggccaacgccgtgccggtgaccgcggaggactcgagggtccacggctacggcctgcgccccggggacggcagcctcgcgcacctcaacgtggcgttcaggttctacgccctcagcgccgacgtgcacggcgtgctgggccagacctaccgcccgggctacgtcagcgccgccggggtggacgcgggcgccagggtccccgtcatgggcggcgccggaaggttccaggtgtacggcggcatcttcgacaccagctgcgaggtcgggcggttcgctggcgaggaccacgggcccgtgggcggcgtcatcaccgtggaggagccgaccgacgcgctctgcggcagcggcaaggccagcactggcctggtctgcaagaagtgacgactgacgaggccggcggcgtgaggtcccgctccgcttgtgtagtgtttttgcttgtgtgtacgtgcgtgctgacgtatatcggtatatatagctgctgctgctgctgcgaagtatagtagcaatggttctatgtatggcggggcggccgaataaaagactgtgacgcgtctcttgtgctatagtcgtgtggacaacactggaaaaaatgccgtgttggtctggtcacgtaagaagtgtgtattattattattattattattattattattattattactaaaaaaaaaaaa

SEQ ID NO: 9597 - protein, 429 aa, Zea mays subsp. mays
  peptide (1)..(429): Ceres Seq. ID no. 12381446
  misc_feature (169)..(380): Pfam Name: HlyD family secretion protein Pfam Description: HlyD family secretion protein
  misc_feature (34)..(380): Homolog of NCBI NO: 23018055 NR Description: hypothetical protein [Thermobifida fusca]
  misc_feature (39)..(375): Homolog of NCBI NO: 23018788 NR Description: hypothetical protein [Thermobifida fusca]
  misc_feature (210)..(377): Homolog of NCBI NO: 23102044 NR Description: hypothetical protein [Azotobacter vinelandii]
  misc_feature (192)..(366): Homolog of NCBI NO: 29247944 NR Description: GLP_26_54603_52153 [Giardia lamblia ATCC 50803]
  misc_feature (136)..(386): Homolog of NCBI NO: 23103741 NR Description: hypothetical protein [Azotobacter vinelandii]
  misc_feature (122)..(370): Homolog of NCBI NO: 23106338 NR Description: hypothetical protein [Azotobacter vinelandii]
  misc_feature (60)..(305): Homolog of NCBI NO: 23102229 NR Description: hypothetical protein [Azotobacter vinelandii]
  misc_feature (199)..(380): Homolog of NCBI NO: 23106326 NR Description: hypothetical protein [Azotobacter vinelandii]
KSHQRVRLHLSSSSQSPAGLSRAPKLRWRPSGGPAVGPDRLLPRRRGSGSPADGPEEPHLVGPQRDPRIHEPRLAPHLRELLQQHPWAARVGTHVLHPRAPVSPRLPGHLLRPLPVLQARLPVRADRLGVLRPALRGRRRQQVPVPRPARRRLLSGVGRQPAHQRALHRQAQRRARRRAGAGLHVGAGAGHPVRRAPAVPGRPEDGRLGRRRGPAGHHLRRGARGAGRRGRRQLEPRGGARAVRVPHGPRQRRGGAPGRAVPGRGQRRAGDRGGLEGPRLRPAPRGRQPRAPQRGVQVLRPQRRRARRAGPDLPPGLRQRRRGGRGRQGPRHGRRRKVPGVRRHLRHQLRGRAVRWRGPRARGRRHHRGGADRRALRQRQGQHWPGLQEVTTDEAGGVRSRSACVVFLLVCTCVLTYIGIYSCCCCCEV

SEQ ID NO: 9598 - protein, 337 aa, Zea mays subsp. mays
  peptide (1)..(337): Ceres Seq. ID no. 12381447
  misc_feature (1)..(337): Homolog of NCBI NO: 21741738 NR Description: OSJNBa0073L04.18 [Oryza sativa (japonica
  misc_feature (1)..(337): Homolog of NCBI NO: 4514637 NR Description: root cap protein 2 [Zea mays]
  misc_feature (1)..(307): Homolog of NCBI NO: 4514635 NR Description: root cap protein 1 [Zea mays]
  misc_feature (1)..(302): Homolog of NCBI NO: 34905930 NR Description: similar to root cap protein [Oryza sativa
  misc_feature (1)..(311): Homolog of NCBI NO: 34905940 NR Description: similar to root cap protein [Oryza sativa
  misc_feature (1)..(302): Homolog of NCBI NO: 34905936 NR Description: similar to root cap protein [Oryza sativa
  misc_feature (1)..(337): Homolog of NCBI NO: 11994465 NR Description: contains similarity to late embryogenesis
  misc_feature (1)..(337): Homolog of NCBI NO: 30685319 NR Description: late embryogenesis abundant protein -related
  misc_feature (19)..(302): Homolog of NCBI NO: 34905934 NR Description: similar to root cap protein [Oryza sativa
  misc_feature (41)..(337): Homolog of NCBI NO: 7484468 NR Description: late embryonic abundant protein EMB7 - white >gi|1350543|gb|AAB01570.1| late embryogenesis abundant protein
MDPKNPISSDPNVIPVYMSPGSPPTYVSCYNSTHGQQGSEPTCSILARQCPRGCRDTCYVHCPSCKLVCLCELTGSECYDPRFVGGDGNKFLFHGRRDADFCLVSDANLHINAHFIGKRNDARAAAPARDFTWVQALGIRFGGHRLYLGVRRTAVWDDAEDRLAITFDGVPVALDAVAGASWSPAAAPALSVFRTGPANGVVVRLDGRFRAVANAVPVTAEDSRVHGYGLRPGDGSLAHLNVAFRFYALSADVHGVLGQTYRPGYVSAAGVDAGARVPVMGGAGRFQVYGGIFDTSCEVGRFAGEDHGPVGGVITVEEPTDALCGSGKASTGLVCKK

SEQ ID NO: 9599 - protein, 320 aa, Zea mays subsp. mays
  peptide (1)..(320): Ceres Seq. ID no. 12381448
  misc_feature (1)..(320): Homolog of NCBI NO: 21741738 NR Description: OSJNBa0073L04.18 [Oryza sativa (japonica
  misc_feature (1)..(320): Homolog of NCBI NO: 4514637 NR Description: root cap protein 2 [Zea mays]
  misc_feature (1)..(290): Homolog of NCBI NO: 4514635 NR Description: root cap protein 1 [Zea mays]
  misc_feature (1)..(285): Homolog of NCBI NO: 34905930 NR Description: similar to root cap protein [Oryza sativa
  misc_feature (1)..(294): Homolog of NCBI NO: 34905940 NR Description: similar to root cap protein [Oryza sativa
  misc_feature (1)..(285): Homolog of NCBI NO: 34905936 NR Description: similar to root cap protein [Oryza sativa
  misc_feature (1)..(320): Homolog of NCBI NO: 11994465 NR Description: contains similarity to late embryogenesis
  misc_feature (1)..(320): Homolog of NCBI NO: 30685319 NR Description: late embryogenesis abundant protein -related
  misc_feature (2)..(285): Homolog of NCBI NO: 34905934 NR Description: similar to root cap protein [Oryza sativa
  misc_feature (24)..(320): Homolog of NCBI NO: 7484468 NR Description: late embryonic abundant protein EMB7 - white >gi|1350543|gb|AAB01570.1| late embryogenesis abundant protein
MSPGSPPTYVSCYNSTHGQQGSEPTCSILARQCPRGCRDTCYVHCPSCKLVCLCELTGSECYDPRFVGGDGNKFLFHGRRDADFCLVSDANLHINAHFIGKRNDARAAAPARDFTWVQALGIRFGGHRLYLGVRRTAVWDDAEDRLAITFDGVPVALDAVAGASWSPAAAPALSVFRTGPANGVVVRLDGRFRAVANAVPVTAEDSRVHGYGLRPGDGSLAHLNVAFRFYALSADVHGVLGQTYRPGYVSAAGVDAGARVPVMGGAGRFQVYGGIFDTSCEVGRFAGEDHGPVGGVITVEEPTDALCGSGKASTGLVCKK

SEQ ID NO: 9600 - DNA, 738 bp, Zea mays subsp. mays
  misc_feature (1)..(738): Ceres Seq. ID no. 12356758
  misc_feature: MA Experiment ID: 108504 Result: Down-regulated in Transcription
  misc_feature: MA Experiment 108504 PARAMETER Experiment Name: Zm_Drought_P Parameter: Age (day) Value: 8
  misc_feature: MA Experiment 108504 PARAMETER Experiment Name: Zm_Drought_P Parameter: Organism Value: Zea mays
  misc_feature: MA Experiment 108504 PARAMETER Experiment Name: Zm_Drought_P Parameter: Plant Line Value: 35A19
  misc_feature: MA Experiment 108504 PARAMETER Experiment Name: Zm_Drought_P Parameter: Timepoint (hr) Value: 12
  misc_feature: MA Experiment 108504 PARAMETER Experiment Name: Zm_Drought_P Parameter: Tissue Value: Aerial
  misc_feature: MA Experiment 108504 PARAMETER Experiment Name: Zm_Drought_P Parameter: Treatment Value: Drought vs. No Drought
  misc_feature: MA Experiment ID: 108515 Result: Down-regulated in Transcription
  misc_feature: MA Experiment 108515 PARAMETER Experiment Name: Zm_2mM_SA_P Parameter: Age (day) Value: 8
  misc_feature: MA Experiment 108515 PARAMETER Experiment Name: Zm_2mM_SA_P Parameter: Organism Value: Zea mays
  misc_feature: MA Experiment 108515 PARAMETER Experiment Name: Zm_2mM_SA_P Parameter: Plant Line Value: 35A19
  misc_feature: MA Experiment 108515 PARAMETER Experiment Name: Zm_2mM_SA_P Parameter: Timepoint (hr) Value: 12
  misc_feature: MA Experiment 108515 PARAMETER Experiment Name: Zm_2mM_SA_P Parameter: Tissue Value: Aerial
  misc_feature: MA Experiment 108515 PARAMETER Experiment Name: Zm_2mM_SA_P Parameter: Treatment Value: 2mM SA vs. No Treatment
  misc_feature: MA Experiment ID: 108522 Result: Down-regulated in Transcription
  misc_feature: MA Experiment 108522 PARAMETER Experiment Name: Zm_42deg_Heat_P Parameter: Age (day) Value: 8
  misc_feature: MA Experiment 108522 PARAMETER Experiment Name: Zm_42deg_Heat_P Parameter: Organism Value: Zea mays
  misc_feature: MA Experiment 108522 PARAMETER Experiment Name: Zm_42deg_Heat_P Parameter: Plant Line Value: 35A19
  misc_feature: MA Experiment 108522 PARAMETER Experiment Name: Zm_42deg_Heat_P Parameter: Temperature (deg C) Value: 42 vs. 22
  misc_feature: MA Experiment 108522 PARAMETER Experiment Name: Zm_42deg_Heat_P Parameter: Timepoint (hr) Value: 1
  misc_feature: MA Experiment 108522 PARAMETER Experiment Name: Zm_42deg_Heat_P Parameter: Tissue Value: Aerial
  misc_feature: MA Experiment ID: 108523 Result: Down-regulated in Transcription
  misc_feature: MA Experiment 108523 PARAMETER Experiment Name: Zm_42deg_Heat_P Parameter: Age (day) Value: 8
  misc_feature: MA Experiment 108523 PARAMETER Experiment Name: Zm_42deg_Heat_P Parameter: Organism Value: Zea mays
  misc_feature: MA Experiment 108523 PARAMETER Experiment Name: Zm_42deg_Heat_P Parameter: Plant Line Value: 35A19
  misc_feature: MA Experiment 108523 PARAMETER Experiment Name: Zm_42deg_Heat_P Parameter: Temperature (deg C) Value: 42 vs. 22
  misc_feature: MA Experiment 108523 PARAMETER Experiment Name: Zm_42deg_Heat_P Parameter: Timepoint (hr) Value: 6
  misc_feature: MA Experiment 108523 PARAMETER Experiment Name: Zm_42deg_Heat_P Parameter: Tissue Value: Aerial
  misc_feature: MA Experiment ID: 108535 Result: Up-regulated in Transcription
  misc_feature: MA Experiment 108535 PARAMETER Experiment Name: Zm_Meristem_P Parameter: Age (day) Value: 8
  misc_feature: MA Experiment 108535 PARAMETER Experiment Name: Zm_Meristem_P Parameter: Organism Value: Zea mays
  misc_feature: MA Experiment 108535 PARAMETER Experiment Name: Zm_Meristem_P Parameter: Plant Line Value: 35A19
  misc_feature: MA Experiment 108535 PARAMETER Experiment Name: Zm_Meristem_P Parameter: Tissue Value: Root Meristem vs. Above Root Meristem
  misc_feature: MA Experiment ID: 108540 Result: Down-regulated in Transcription
  misc_feature: MA Experiment 108540 PARAMETER Experiment Name: Zm_20percent_PEG_P Parameter: Age (day) Value: 8
  misc_feature: MA Experiment 108540 PARAMETER Experiment Name: Zm_20percent_PEG_P Parameter: Organism Value: Zea mays
  misc_feature: MA Experiment 108540 PARAMETER Experiment Name: Zm_20percent_PEG_P Parameter: Plant Line Value: 35A19
  misc_feature: MA Experiment 108540 PARAMETER Experiment Name: Zm_20percent_PEG_P Parameter: Timepoint (hr) Value: 6
  misc_feature: MA Experiment 108540 PARAMETER Experiment Name: Zm_20percent_PEG_P Parameter: Tissue Value: Aerial
  misc_feature: MA Experiment 108540 PARAMETER Experiment Name: Zm_20percent_PEG_P Parameter: Treatment Value: 20percent PEG vs. No Treatment
  misc_feature: MA Experiment ID: 108542 Result: Down-regulated in Transcription
  misc_feature: MA Experiment 108542 PARAMETER Experiment Name: Zm_150mM_NaCl_P Parameter: Age (day) Value: 8
  misc_feature: MA Experiment 108542 PARAMETER Experiment Name: Zm_150mM_NaCl_P Parameter: Organism Value: Zea mays
  misc_feature: MA Experiment 108542 PARAMETER Experiment Name: Zm_150mM_NaCl_P Parameter: Plant Line Value: 35A19
  misc_feature: MA Experiment 108542 PARAMETER Experiment Name: Zm_150mM_NaCl_P Parameter: Timepoint (hr) Value: 6
  misc_feature: MA Experiment 108542 PARAMETER Experiment Name: Zm_150mM_NaCl_P Parameter: Tissue Value: Aerial
  misc_feature: MA Experiment 108542 PARAMETER Experiment Name: Zm_150mM_NaCl_P Parameter: Treatment Value: 150mM NaCl vs. No Treatment
  misc_feature: MA Experiment ID: 108543 Result: Up-regulated in Transcription
  misc_feature: MA Experiment ID: 108544 Result: Down-regulated in Transcription
  misc_feature: MA Experiment ID: 108556 Result: Down-regulated in Transcription
  misc_feature: MA Experiment 108556 PARAMETER Experiment Name: Zm_Drought_P Parameter: Age (day) Value: 9
  misc_feature: MA Experiment 108556 PARAMETER Experiment Name: Zm_Drought_P Parameter: Organism Value: Zea mays
  misc_feature: MA Experiment 108556 PARAMETER Experiment Name: Zm_Drought_P Parameter: Plant Line Value: 35A19
  misc_feature: MA Experiment 108556 PARAMETER Experiment Name: Zm_Drought_P Parameter: Timepoint (hr) Value: 24
  misc_feature: MA Experiment 108556 PARAMETER Experiment Name: Zm_Drought_P Parameter: Tissue Value: Aerial
  misc_feature: MA Experiment 108556 PARAMETER Experiment Name: Zm_Drought_P Parameter: Treatment Value: Drought vs. No Drought
  misc_feature: MA Experiment ID: 108597 Result: Down-regulated in Transcription
  misc_feature: MA Experiment 108597 PARAMETER Experiment Name: Zm_100uM_ABA_P Parameter: Age (day) Value: 9
  misc_feature: MA Experiment 108597 PARAMETER Experiment Name: Zm_100uM_ABA_P Parameter: Organism Value: Zea mays
  misc_feature: MA Experiment 108597 PARAMETER Experiment Name: Zm_100uM_ABA_P Parameter: Plant Line Value: 35A19
  misc_feature: MA Experiment 108597 PARAMETER Experiment Name: Zm_100uM_ABA_P Parameter: Timepoint (hr) Value: 24
  misc_feature: MA Experiment 108597 PARAMETER Experiment Name: Zm_100uM_ABA_P Parameter: Tissue Value: Aerial
  misc_feature: MA Experiment 108597 PARAMETER Experiment Name: Zm_100uM_ABA_P Parameter: Treatment Value: 100uM ABA vs. No Treatment
  misc_feature: MA Experiment ID: 108687 Result: Down-regulated in Transcription
  misc_feature: MA Experiment 108687 PARAMETER Experiment Name: Zm_Embryos-Flowers__P Parameter: Tissue Value: Embryo vs. Aerial+
  misc_feature: MA Experiment ID: 20000477 Result: Down-regulated in Transcription
  misc_feature: MA Experiment 20000477 PARAMETER Experiment Name: Zm_5mM_SA_P Parameter: Age (day) Value: 10
  misc_feature: MA Experiment 20000477 PARAMETER Experiment Name: Zm_5mM_SA_P Parameter: Organism Value: Zea mays
  misc_feature: MA Experiment 20000477 PARAMETER Experiment Name: Zm_5mM_SA_P Parameter: Plant Line Value: 35A19
  misc_feature: MA Experiment 20000477 PARAMETER Experiment Name: Zm_5mM_SA_P Parameter: Timepoint (hr) Value: 48
  misc_feature: MA Experiment 20000477 PARAMETER Experiment Name: Zm_5mM_SA_P Parameter: Tissue Value: Aerial
  misc_feature: MA Experiment 20000477 PARAMETER Experiment Name: Zm_5mM_SA_P Parameter: Treatment Value: 5mM SA vs. No Treatment
  misc_feature: MA Experiment ID: 20000478 Result: Down-regulated in Transcription
  misc_feature: MA Experiment 20000478 PARAMETER Experiment Name: Zm_5mM_SA_P Parameter: Age (day) Value: 11
  misc_feature: MA Experiment 20000478 PARAMETER Experiment Name: Zm_5mM_SA_P Parameter: Organism Value: Zea mays
  misc_feature: MA Experiment 20000478 PARAMETER Experiment Name: Zm_5mM_SA_P Parameter: Plant Line Value: 35A19
  misc_feature: MA Experiment 20000478 PARAMETER Experiment Name: Zm_5mM_SA_P Parameter: Timepoint (hr) Value: 72
  misc_feature: MA Experiment 20000478 PARAMETER Experiment Name: Zm_5mM_SA_P Parameter: Tissue Value: Aerial
  misc_feature: MA Experiment 20000478 PARAMETER Experiment Name: Zm_5mM_SA_P Parameter: Treatment Value: 5mM SA vs. No Treatment
  misc_feature: MA Experiment ID: 20000533 Result: Down-regulated in Transcription
  misc_feature: MA Experiment 20000533 PARAMETER Experiment Name: Zm_0.001percent_MeJA_P Parameter: Age (day) Value: 11
  misc_feature: MA Experiment 20000533 PARAMETER Experiment Name: Zm_0.001percent_MeJA_P Parameter: Organism Value: Zea mays
  misc_feature: MA Experiment 20000533 PARAMETER Experiment Name: Zm_0.001percent_MeJA_P Parameter: Plant Line Value: 35A19
  misc_feature: MA Experiment 20000533 PARAMETER Experiment Name: Zm_0.001percent_MeJA_P Parameter: Timepoint (hr) Value: 72
  misc_feature: MA Experiment 20000533 PARAMETER Experiment Name: Zm_0.001percent_MeJA_P Parameter: Tissue Value: Aerial
  misc_feature: MA Experiment 20000533 PARAMETER Experiment Name: Zm_0.001percent_MeJA_P Parameter: Treatment Value: 0.001percent MeJA vs. No Treatment
  misc_feature: MA Experiment ID: 20000626 Result: Down-regulated in Transcription
  misc_feature: MA Experiment 20000626 PARAMETER Experiment Name: Zm_Herbicide-Treatments_P Parameter: Timepoint (hr) Value: 12
  misc_feature: MA Experiment 20000626 PARAMETER Experiment Name: Zm_Herbicide-Treatments_P Parameter: Tissue Value: Aerial
  misc_feature: MA Experiment 20000626 PARAMETER Experiment Name: Zm_Herbicide-Treatments_P Parameter: Treatment Value: Roundup vs. No Treatment
  misc_feature: MA Experiment ID: 20000627 Result: Down-regulated in Transcription
  misc_feature: MA Experiment 20000627 PARAMETER Experiment Name: Zm_Herbicide-Treatments_P Parameter: Timepoint (hr) Value: 12
  misc_feature: MA Experiment 20000627 PARAMETER Experiment Name: Zm_Herbicide-Treatments_P Parameter: Tissue Value: Aerial
  misc_feature: MA Experiment 20000627 PARAMETER Experiment Name: Zm_Herbicide-Treatments_P Parameter: Treatment Value: Finale vs. No Treatment
  misc_feature: MA Experiment ID: 20000629 Result: Down-regulated in Transcription
  misc_feature: MA Experiment 20000629 PARAMETER Experiment Name: Zm_Herbicide-Treatments_P Parameter: Timepoint (hr) Value: 12
  misc_feature: MA Experiment 20000629 PARAMETER Experiment Name: Zm_Herbicide-Treatments_P Parameter: Tissue Value: Aerial
  misc_feature: MA Experiment 20000629 PARAMETER Experiment Name: Zm_Herbicide-Treatments_P Parameter: Treatment Value: Trimec vs. No Treatment
  misc_feature: MA Experiment ID: 20000632 Result: Down-regulated in Transcription
  misc_feature: MA Experiment 20000632 PARAMETER Experiment Name: Zm_Herbicide-Treatments_P Parameter: Timepoint (hr) Value: 4
  misc_feature: MA Experiment 20000632 PARAMETER Experiment Name: Zm_Herbicide-Treatments_P Parameter: Tissue Value: Aerial
  misc_feature: MA Experiment 20000632 PARAMETER Experiment Name: Zm_Herbicide-Treatments_P Parameter: Treatment Value: Glean vs. No Treatment
  misc_feature: MA Experiment ID: 20000633 Result: Down-regulated in Transcription
  misc_feature: MA Experiment 20000633 PARAMETER Experiment Name: Zm_Herbicide-Treatments_P Parameter: Timepoint (hr) Value: 4
  misc_feature: MA Experiment 20000633 PARAMETER Experiment Name: Zm_Herbicide-Treatments_P Parameter: Tissue Value: Aerial
  misc_feature: MA Experiment 20000633 PARAMETER Experiment Name: Zm_Herbicide-Treatments_P Parameter: Treatment Value: Trimec vs. No Treatment
atcactgccaaatcccccagaaaatcaactcctcctcaattccacgctgccaccaactcgccgtcctccgcgccaagcatcaaagctccgatggcccgcacgaagcagacggctcgcaagtcgacgggcggcaaggcgccccgcaagcagctggcgaccaaggcggcgcgcaagtctgcgccggccaccggcggcgtgaagaagccccaccgcttccgccccggcaccgtcgcgctccgggagatccgcaagtaccagaagagcacggagctgctcatccgcaagttgcccttccagcgcctcgtccgtgagatcgcgcaggacttcaagaccgatctccgcttccagtcctccgccgtcgcggcgctgcaggaggccgccgaggcctaccttgtggggctctttgaggacactaacctctgcgccatccacgccaagcgcgtcaccatcatgcccaaggacatccagctcgcgcgccgcatcaggggcgagagggcctgagcgaggcgagctcctctcaccgcaggcggcgtcgttgttgcttcggacctgcttgtaggacttgtgcttctcttggtttcctttctggtggcagaggcatcttggtaccattgtgcttgttcttagaatcttagggatagagagttttcagttgctgggtaacctgattgtttatcttgcattcctgcctctgtaatggttgtctgctgtcttaatggaaattatatttgctttttt

SEQ ID NO: 9601 - protein, 166 aa, Zea mays subsp. mays
  peptide (1)..(166): Ceres Seq. ID no. 12356759
  misc_feature (47)..(165): Pfam Name: Core histone H2A/H2B/H3/H4 Pfam Description: Core histone H2A/H2B/H3/H4
  misc_feature (31)..(166): Homolog of NCBI NO: 15232146 NR Description: histone H3, putative; protein id: At3g27360.1, by cDNA: gi_14335141, supported by cDNA: gi_18655352 [Arabidopsis >gi|15238433|ref|NP_201339.1| histone H3 (sp|P05203); id:
  misc_feature (6)..(166): Homolog of NCBI NO: 31210959 NR Description: ENSANGP00000016066 [Anopheles gambiae]
  misc_feature (31)..(166): Homolog of NCBI NO: 122087 NR Description: Histone H3 >gi|81849|pir||S04520 histone H3
  misc_feature (31)..(166): Homolog of NCBI NO: 1362108 NR Description: histone H3 homolog - common tobacco
  misc_feature (21)..(166): Homolog of NCBI NO: 31239843 NR Description: ENSANGP00000014183 [Anopheles gambiae]
  misc_feature (31)..(166): Homolog of NCBI NO: 166384 NR Description: histone H3 (H3-1.1)
  misc_feature (32)..(166): Homolog of NCBI NO: 70753 NR Description: histone H3 - garden pea (tentative sequence)
  misc_feature (32)..(166): Homolog of NCBI NO: 122083 NR Description: Histone H3 >gi|70751|pir||HSEAH3 histone H3 -
  misc_feature (20)..(166): Homolog of NCBI NO: 34876364 NR Description: similar to CG31613-PA [Rattus norvegicus]
  misc_feature (18)..(166): Homolog of NCBI NO: 31210957 NR Description: ENSANGP00000016056 [Anopheles gambiae] ENSANGP00000014197 [Anopheles gambiae] ENSANGP00000014197 [Anopheles gambiae str. PEST]
ITAKSPRKSTPPQFHAATNSPSSAPSIKAPMARTKQTARKSTGGKAPRKQLATKAARKSAPATGGVKKPHRFRPGTVALREIRKYQKSTELLIRKLPFQRLVREIAQDFKTDLRFQSSAVAALQEAAEAYLVGLFEDTNLCAIHAKRVTIMPKDIQLARRIRGERA

SEQ ID NO: 9602 - protein, 136 aa, Zea mays subsp. mays; identical to SEQ ID NO: 8709
  peptide (1)..(136): Ceres Seq. ID no. 12356760
  misc_feature (17)..(135): Pfam Name: Core histone H2A/H2B/H3/H4 Pfam Description: Core histone H2A/H2B/H3/H4
  misc_feature (1)..(136): Homolog of NCBI NO: 15232146 NR Description: histone H3, putative; protein id: At3g27360.1, by cDNA: gi_14335141, supported by cDNA: gi_18655352 [Arabidopsis >gi|15238433|ref|NP_201339.1| histone H3 (sp|P05203); id:
  misc_feature (1)..(136): Homolog of NCBI NO: 31210959 NR Description: ENSANGP00000016066 [Anopheles gambiae]
  misc_feature (1)..(136): Homolog of NCBI NO: 122087 NR Description: Histone H3 >gi|81849|pir||S04520 histone H3
  misc_feature (1)..(136): Homolog of NCBI NO: 1362108 NR Description: histone H3 homolog - common tobacco
  misc_feature (1)..(136): Homolog of NCBI NO: 31239843 NR Description: ENSANGP00000014183 [Anopheles gambiae]
  misc_feature (1)..(136): Homolog of NCBI NO: 166384 NR Description: histone H3 (H3-1.1)
  misc_feature (2)..(136): Homolog of NCBI NO: 70753 NR Description: histone H3 - garden pea (tentative sequence)
  misc_feature (2)..(136): Homolog of NCBI NO: 122083 NR Description: Histone H3 >gi|70751|pir||HSEAH3 histone H3 -
  misc_feature (1)..(136): Homolog of NCBI NO: 34876364 NR Description: similar to CG31613-PA [Rattus norvegicus]
  misc_feature (1)..(136): Homolog of NCBI NO: 31210957 NR Description: ENSANGP00000016056 [Anopheles gambiae] ENSANGP00000014197 [Anopheles gambiae] ENSANGP00000014197 [Anopheles gambiae str. PEST]

SEQ ID NO: 9603 - protein, 102 aa, Zea mays subsp. mays
  peptide (1)..(102): Ceres Seq. ID no. 12356761
HCQIPQKINSSSIPRCHQLAVLRAKHQSSDGPHEADGSQVDGRQGAPQAAGDQGGAQVCAGHRRREEAPPLPPRHRRAPGDPQVPEEHGAAHPQVALPAPRP

SEQ ID NO: 9604 - DNA, 1364 bp, Zea mays subsp. mays
  misc_feature (1)..(1364): Ceres Seq. ID no. 12354363
  misc_feature: MA Experiment ID: 108528 Result: Up-regulated in Transcription
  misc_feature: MA Experiment 108528 PARAMETER Experiment Name: Zm_Imbibed_Seeds_P Parameter: Age (day) Value: 5 vs. 2
  misc_feature: MA Experiment 108528 PARAMETER Experiment Name: Zm_Imbibed_Seeds_P Parameter: Organism Value: Zea mays
  misc_feature: MA Experiment 108528 PARAMETER Experiment Name: Zm_Imbibed_Seeds_P Parameter: Plant Line Value: 35A19
  misc_feature: MA Experiment 108528 PARAMETER Experiment Name: Zm_Imbibed_Seeds_P Parameter: Tissue Value: Aerial vs. Embryo
  misc_feature: MA Experiment ID: 20000630 Result: Down-regulated in Transcription
  misc_feature: MA Experiment 20000630 PARAMETER Experiment Name: Zm_Herbicide-Treatments_P Parameter: Timepoint (hr) Value: 4
  misc_feature: MA Experiment 20000630 PARAMETER Experiment Name: Zm_Herbicide-Treatments_P Parameter: Tissue Value: Aerial
  misc_feature: MA Experiment 20000630 PARAMETER Experiment Name: Zm_Herbicide-Treatments_P Parameter: Treatment Value: Roundup vs. No Treatment
acaacgagccaacgctcggggttttcactgcacacaagctttgctcagtcgttctgtgcttactgttcctgactcgtgtcgtgcaggagtcgaaggcattggcgtcaactacggcacgatcgccagcaacctgccgtcccccgacaaggtgatcacgctgtgcaaggccaagggcatcaccgacgtccggctcttccacccggacaccgccgtcctggcggcgctccgaggctcgggcctgggcgtcgtgctcggcaccctgaacgaggacctggcccgcctggcctccgacccctcgttcgccgcgtcgtgggtgcagtcctacgtgcggcccttcgccggcgccgtccgcttccgctacgtgggccgcgggcaacgaggtcgtcccgggggacctagcctcgcacgtccttccgtccatgcacaacctcgagtccgcgctccgtgccgcggggctcggcggcgtgcgggtcaccaccgccgtgtcgacgtccgtgctgggaacctcgtacccgccgtcgcagggcgccttctccgacgcggcgctgccgtccatggggcccatcgcgtcgttcctggcgcccaggtccacgccgctgctcgtcaacgtgtacccctacttcgcctactcggccgacccggcgtcggtgtcgctggactacgcgctgctgcggtccgactcgggcggcggggccgtcgtcgtggcggacggcggggcgtcgtacggcaacatgttcgacgccatcgtggacgccgtgtacgcggcgctggagagggccggcgcgcggggcctggagctggtggtctcggagaccgggtggccgtcgggcggaggcggcgccggcgcaagcgtgggtaacgcgtcggcgtacgtcaacaacgtggtgcgccacgtcgggagcggccgcggcacgccgcggcggcccgggaagcccgtggaggcgttcatcttcgccatgttcaatgagaaccagaagcccgagggcgtggagcagcacttcggcatgttccagccggacatgaccgaggtgtaccacgtcgacttcatggcggcatcttcctcgtaggcgaaacaacgtacgtactgcgctgcgcggattaaggacgacacacacgttggcattttttttgtaaaaaaaaagtttttaatggtctcatcgacgtcgatctgcattattgtgcacgaactattaagatttgggagatgattactcgcatctagttccagtaggattcatcgaatggttgggtcggcgattgttggtgacatttgcacatatgagtgcatcttaaagcatcaaccaacgccacgttactatacaatgcaatgctgcatatattatcaatatagttttttatgctct

SEQ ID NO: 9605 - protein, 285 aa, Zea mays subsp. mays
  peptide (1)..(285): Ceres Seq. ID no. 12354364
  misc_feature (33)..(147): Pfam Name: Glycosyl hydrolases family 17 Pfam Description: Glycosyl hydrolases family 17
  misc_feature (28)..(147): Homolog of NCBI NO: 34908958 NR Description: beta-1,3-glucanase precursor [Oryza sativa
  misc_feature (28)..(130): Homolog of NCBI NO: 4097944 NR Description: beta-1,3-glucanase precursor [Oryza sativa]
  misc_feature (28)..(139): Homolog of NCBI NO: 585078 NR Description: PUTATIVE GLUCAN ENDO-1,3-BETA-GLUCOSIDASE GVI
  misc_feature (9)..(133): Homolog of NCBI NO: 4097946 NR Description: beta-1,3-glucanase precursor [Oryza sativa]
  misc_feature (35)..(133): Homolog of NCBI NO: 4884532 NR Description: beta-1,3-glucanase [Oryza sativa]
  misc_feature (33)..(139): Homolog of NCBI NO: 322839 NR Description: glucan endo-1,3-beta-D-glucosidase (EC 3.2.1.39)
  misc_feature (33)..(130): Homolog of NCBI NO: 7447972 NR Description: glucan endo-1,3-beta-D-glucosidase (EC 3.2.1.39)
  misc_feature (13)..(130): Homolog of NCBI NO: 6073860 NR Description: beta-1, 3-glucananse [Musa acuminata]
  misc_feature (30)..(130): Homolog of NCBI NO: 6448757 NR Description: beta-1,3-glucanase [Musa acuminata]
  misc_feature (30)..(139): Homolog of NCBI NO: 34906500 NR Description: beta 1,3-glucanase [Oryza sativa (japonica
QRANARGFHCTQALLSRSVLTVPDSCRAGVEGIGVNYGTIASNLPSPDKVITLCKAKGITDVRLFHPDTAVLAALRGSGLGVVLGTLNEDLARLASDPSFAASWVQSYVRPFAGAVRFRYVGRGQRGRPGGPSLARPSVHAQPRVRAPCRGARRRAGHHRRVDVRAGNLVPAVAGRLLRRGAAVHGAHRVVPGAQVHAAARQRVPLLRLLGRPGVGVAGLRAAAVRLGRRGRRRGGRRGVVRQHVRRHRGRRVRGAGEGRRAGPGAGGLGDRVAVGRRRRRRKRG

SEQ ID NO: 9606 - protein, 215 aa, Zea mays subsp. mays
  peptide (1)..(215): Ceres Seq. ID no. 12354365
  misc_feature (1)..(209): Pfam Name: Glycosyl hydrolases family 17 Pfam Description: Glycosyl hydrolases family 17
  misc_feature (1)..(211): Homolog of NCBI NO: 34908958 NR Description: beta-1,3-glucanase precursor [Oryza sativa
  misc_feature (1)..(211): Homolog of NCBI NO: 4097944 NR Description: beta-1,3-glucanase precursor [Oryza sativa]
  misc_feature (1)..(214): Homolog of NCBI NO: 585078 NR Description: PUTATIVE GLUCAN ENDO-1,3-BETA-GLUCOSIDASE GVI
  misc_feature (1)..(208): Homolog of NCBI NO: 4097946 NR Description: beta-1,3-glucanase precursor [Oryza sativa]
  misc_feature (1)..(213): Homolog of NCBI NO: 4884532 NR Description: beta-1,3-glucanase [Oryza sativa]
  misc_feature (1)..(214): Homolog of NCBI NO: 322839 NR Description: glucan endo-1,3-beta-D-glucosidase (EC 3.2.1.39)
  misc_feature (1)..(213): Homolog of NCBI NO: 7447972 NR Description: glucan endo-1,3-beta-D-glucosidase (EC 3.2.1.39)
  misc_feature (1)..(209): Homolog of NCBI NO: 6073860 NR Description: beta-1, 3-glucananse [Musa acuminata]
  misc_feature (1)..(209): Homolog of NCBI NO: 6448757 NR Description: beta-1,3-glucanase [Musa acuminata]
  misc_feature (1)..(209): Homolog of NCBI NO: 34906500 NR Description: beta 1,3-glucanase [Oryza sativa (japonica
MHNLESALRAAGLGGVRVTTAVSTSVLGTSYPPSQGAFSDAALPSMGPIASFLAPRSTPLLVNVYPYFAYSADPASVSLDYALLRSDSGGGAVVVADGGASYGNMFDAIVDAVYAALERAGARGLELVVSETGWPSGGGGAGASVGNASAYVNNVVRHVGSGRGTPRRPGKPVEAFIFAMFNENQKPEGVEQHFGMFQPDMTEVYHVDFMAASSS

SEQ ID NO: 9607 - protein, 170 aa, Zea mays subsp. mays
  peptide (1)..(170): Ceres Seq. ID no. 12354366
  misc_feature (1)..(164): Pfam Name: Glycosyl hydrolases family 17 Pfam Description: Glycosyl hydrolases family 17
  misc_feature (1)..(166): Homolog of NCBI NO: 34908958 NR Description: beta-1,3-glucanase precursor [Oryza sativa
  misc_feature (1)..(166): Homolog of NCBI NO: 4097944 NR Description: beta-1,3-glucanase precursor [Oryza sativa]
  misc_feature (1)..(169): Homolog of NCBI NO: 585078 NR Description: PUTATIVE GLUCAN ENDO-1,3-BETA-GLUCOSIDASE GVI
  misc_feature (1)..(163): Homolog of NCBI NO: 4097946 NR Description: beta-1,3-glucanase precursor [Oryza sativa]
  misc_feature (1)..(168): Homolog of NCBI NO: 4884532 NR Description: beta-1,3-glucanase [Oryza sativa]
  misc_feature (1)..(169): Homolog of NCBI NO: 322839 NR Description: glucan endo-1,3-beta-D-glucosidase (EC 3.2.1.39)
  misc_feature (1)..(168): Homolog of NCBI NO: 7447972 NR Description: glucan endo-1,3-beta-D-glucosidase (EC 3.2.1.39)
  misc_feature (1)..(164): Homolog of NCBI NO: 6073860 NR Description: beta-1, 3-glucananse [Musa acuminata]
  misc_feature (1)..(164): Homolog of NCBI NO: 6448757 NR Description: beta-1,3-glucanase [Musa acuminata]
  misc_feature (1)..(164): Homolog of NCBI NO: 34906500 NR Description: beta 1,3-glucanase [Oryza sativa (japonica
MGPIASFLAPRSTPLLVNVYPYFAYSADPASVSLDYALLRSDSGGGAVVVADGGASYGNMFDAIVDAVYAALERAGARGLELVVSETGWPSGGGGAGASVGNASAYVNNVVRHVGSGRGTPRRPGKPVEAFIFAMFNENQKPEGVEQHFGMFQPDMTEVYHVDFMAASSS

SEQ ID NO: 9608 - DNA, 1285 bp, Zea mays subsp. mays
  misc_feature (1)..(1285): Ceres Seq. ID no. 12416626
  misc_feature: MA Experiment ID: 108522 Result: Up-regulated in Transcription
  misc_feature: MA Experiment 108522 PARAMETER Experiment Name: Zm_42deg_Heat_P Parameter: Age (day) Value: 8
  misc_feature: MA Experiment 108522 PARAMETER Experiment Name: Zm_42deg_Heat_P Parameter: Organism Value: Zea mays
  misc_feature: MA Experiment 108522 PARAMETER Experiment Name: Zm_42deg_Heat_P Parameter: Plant Line Value: 35A19
  misc_feature: MA Experiment 108522 PARAMETER Experiment Name: Zm_42deg_Heat_P Parameter: Temperature (deg C) Value: 42 vs. 22
  misc_feature: MA Experiment 108522 PARAMETER Experiment Name: Zm_42deg_Heat_P Parameter: Timepoint (hr) Value: 1
  misc_feature: MA Experiment 108522 PARAMETER Experiment Name: Zm_42deg_Heat_P Parameter: Tissue Value: Aerial
  misc_feature: MA Experiment ID: 108527 Result: Up-regulated in Transcription
  misc_feature: MA Experiment 108527 PARAMETER Experiment Name: Zm_5mM_NO_P Parameter: Age (day) Value: 8
  misc_feature: MA Experiment 108527 PARAMETER Experiment Name: Zm_5mM_NO_P Parameter: Organism Value: Zea mays
  misc_feature: MA Experiment 108527 PARAMETER Experiment Name: Zm_5mM_NO_P Parameter: Plant Line Value: 35A19
  misc_feature: MA Experiment 108527 PARAMETER Experiment Name: Zm_5mM_NO_P Parameter: Timepoint (hr) Value: 6
  misc_feature: MA Experiment 108527 PARAMETER Experiment Name: Zm_5mM_NO_P Parameter: Tissue Value: Aerial
  misc_feature: MA Experiment 108527 PARAMETER Experiment Name: Zm_5mM_NO_P Parameter: Treatment Value: 5mM NO vs. No Treatment
  misc_feature: MA Experiment ID: 108544 Result: Down-regulated in Transcription
  misc_feature: MA Experiment ID: 20000487 Result: Down-regulated in Transcription
  misc_feature: MA Experiment 20000487 PARAMETER Experiment Name: Zm_50mM_NH4NO3_L_to_H_P Parameter: Organism Value: Zea mays
  misc_feature: MA Experiment 20000487 PARAMETER Experiment Name: Zm_50mM_NH4NO3_L_to_H_P Parameter: Timepoint (hr) Value: 4
  misc_feature: MA Experiment 20000487 PARAMETER Experiment Name: Zm_50mM_NH4NO3_L_to_H_P Parameter: Tissue Value: Leaves
  misc_feature: MA Experiment 20000487 PARAMETER Experiment Name: Zm_50mM_NH4NO3_L_to_H_P Parameter: Treatment Value: 50mM NH4NO3 vs. 100mM Mannitol
  misc_feature: MA Experiment ID: 20000535 Result: Down-regulated in Transcription
  misc_feature: MA Experiment 20000535 PARAMETER Experiment Name: Zm_Hybrid_Seed_Dev_P Parameter: DAP Value: 30 vs. 12
  misc_feature: MA Experiment 20000535 PARAMETER Experiment Name: Zm_Hybrid_Seed_Dev_P Parameter: Organism Value: Zea mays
  misc_feature: MA Experiment 20000535 PARAMETER Experiment Name: Zm_Hybrid_Seed_Dev_P Parameter: Plant Line Value: 35A19
  misc_feature: MA Experiment 20000535 PARAMETER Experiment Name: Zm_Hybrid_Seed_Dev_P Parameter: Tissue Value: Embryo vs. Unfert Floret
gaagtcgccggagccacacgcattcccctgcctcgcccttccccctcctatttaccgcccgcgtcgtcccccaacgcacgccttcccacccccgtgcctgcctctgcctgcctgctccccgacgccggggggccccacgacgacccagccccggccccgcgcggtcacagcaagccgggacatggcgcgcggcggcatcgcccgcctactcgccacgctccttttcttcctcctgctcgccacgcccctcgcagacggagcttccgaggcagagacgggcctcgcgcagggcgcgtctgaggcggcggcgccggacgcgggcgcggacacgcagcagcagcacctcctgccgcggcccctcgtcatcgagctcccgtcgtcgcgggccgaggacgaggacgagcccggcgctgacgccgtgccgccggacgtgcgctgcgccagctggcggctggcggcggaggccaacaacctcgcgccgtggagggcggtgccgccggagtgcgcgccgcacgtgcgggactacgtcaccggcgtcgcctaccgctccgacctcgacctcgtggcgcgggagtccgccgcctacgcgcgcgccgccgcgccgctcggcgccgacgggcgcgacgcctgggtcttcgacgtcgacgagaccctgctctccaacctcccgtactacgccgagcacggctacggggctgagttgttcgaccaccacaagtttgacgagtgggtggagaggggcgaggcggccgccatcccctcgagcttgaagctgtacaatgaggttcgcgagctggggttcaagaccttcctgctcacgggcagaagcgaggggcaccgaggcgtcacggtggacaacctcaacaaacaggggttccatgactgggaaaagctcgtactcagggcagcaggtgaccgcaagaaaacagcgacagtctacaaatcagaaaagaggaaggagatggaacaagagggttacaggatcctaggcaactctggcgaccaatggagcgacctgctggggtcttccatgggtgcccgctctttcaagctccctaacccaatgtattatatcccgtgacagaaactgggaaacaaggccgggtgaaaggtgctgcgtttattggatgcacaggcccggtcgaaaacagaaatcatttcgcaatggaatttaaaactgtacaaatgcttctttcactaacttggtgtacattactcgactgcatgtgcagagttacttcaactatgtaagagtgaaaacgggtccggggatcaatgttcctcg

SEQ ID NO: 9609 - protein, 359 aa, Zea mays subsp. mays
  peptide (1)..(359): Ceres Seq. ID no. 12416627
  misc_feature (119)..(358): Pfam Name: HAD superfamily, subfamily IIIB (Acid phosphatase) Pfam Description: HAD superfamily, subfamily IIIB (Acid
  misc_feature (107)..(358): Homolog of NCBI NO: 130718 NR Description: Acid phosphatase precursor 1
  misc_feature (107)..(358): Homolog of NCBI NO: 445113 NR Description: acid phosphatase 1
  misc_feature (109)..(359): Homolog of NCBI NO: 15234949 NR Description: acid phosphatase - like protein; protein id: supported by cDNA: gi_20259050 [Arabidopsis thaliana]
  misc_feature (121)..(359): Homolog of NCBI NO: 15241412 NR Description: acid phosphatase; protein id: At5g51260.1 thaliana] >gi|8843863|dbj|BAA97389.1| acid phosphatase
  misc_feature (146)..(358): Homolog of NCBI NO: 15233526 NR Description: acid phosphatase-like protein; protein id: supported by cDNA: 108301. [Arabidopsis thaliana]
  misc_feature (135)..(359): Homolog of NCBI NO: 15233504 NR Description: acid phosphatase-like protein; protein id: supported by cDNA: gi_15293022, supported by cDNA: gi_20258884
KSPEPHAFPCLALPPPIYRPRRPPTHAFPPPCLPLPACSPTPGGPTTTQPRPRAVTASRDMARGGIARLLATLLFFLLLATPLADGASEAETGLAQGASEAAAPDAGADTQQQHLLPRPLVIELPSSRAEDEDEPGADAVPPDVRCASWRLAAEANNLAPWRAVPPECAPHVRDYVTGVAYRSDLDLVARESAAYARAAAPLGADGRDAWVFDVDETLLSNLPYYAEHGYGAELFDHHKFDEWVERGEAAAIPSSLKLYNEVRELGFKTFLLTGRSEGHRGVTVDNLNKQGFHDWEKLVLRAAGDRKKTATVYKSEKRKEMEQEGYRILGNSGDQWSDLLGSSMGARSFKLPNPMYYIP

SEQ ID NO: 9610 - protein, 299 aa, Zea mays subsp. mays
  peptide (1)..(299): Ceres Seq. ID no. 12416628
  misc_feature (59)..(298): Pfam Name: HAD superfamily, subfamily IIIB (Acid phosphatase) Pfam Description: HAD superfamily, subfamily IIIB (Acid
  misc_feature (47)..(298): Homolog of NCBI NO: 130718 NR Description: Acid phosphatase precursor 1
  misc_feature (47)..(298): Homolog of NCBI NO: 445113 NR Description: acid phosphatase 1
  misc_feature (49)..(299): Homolog of NCBI NO: 15234949 NR Description: acid phosphatase - like protein; protein id: supported by cDNA: gi_20259050 [Arabidopsis thaliana]
  misc_feature (61)..(299): Homolog of NCBI NO: 15241412 NR Description: acid phosphatase; protein id: At5g51260.1 thaliana] >gi|8843863|dbj|BAA97389.1| acid phosphatase
  misc_feature (86)..(298): Homolog of NCBI NO: 15233526 NR Description: acid phosphatase-like protein; protein id: supported by cDNA: 108301. [Arabidopsis thaliana]
  misc_feature (75)..(299): Homolog of NCBI NO: 15233504 NR Description: acid phosphatase-like protein; protein id: supported by cDNA: gi_15293022, supported by cDNA: gi_20258884
MARGGIARLLATLLFFLLLATPLADGASEAETGLAQGASEAAAPDAGADTQQQHLLPRPLVIELPSSRAEDEDEPGADAVPPDVRCASWRLAAEANNLAPWRAVPPECAPHVRDYVTGVAYRSDLDLVARESAAYARAAAPLGADGRDAWVFDVDETLLSNLPYYAEHGYGAELFDHHKFDEWVERGEAAAIPSSLKLYNEVRELGFKTFLLTGRSEGHRGVTVDNLNKQGFHDWEKLVLRAAGDRKKTATVYKSEKRKEMEQEGYRILGNSGDQWSDLLGSSMGARSFKLPNPMYYIP

SEQ ID NO: 9611 - protein, 255 aa, Zea mays subsp. mays
  peptide (1)..(255): Ceres Seq. ID no. 12416629
  misc_feature (51)..(255): Pfam Name: Equine herpesvirus glycoprotein gp2 Pfam Description: Equine herpesvirus glycoprotein gp2
  misc_feature (38)..(255): Homolog of NCBI NO: 19923466 NR Description: splicing coactivator subunit SRm300; RNA binding
  misc_feature (1)..(255): Homolog of NCBI NO: 11360318 NR Description: probable mucin DKFZp434C196.1 - human (fragment)
  misc_feature (38)..(255): Homolog of NCBI NO: 5821145 NR Description: RNA binding protein [Homo sapiens]
  misc_feature (38)..(255): Homolog of NCBI NO: 5821143 NR Description: RNA binding protein [Homo sapiens]
  misc_feature (2)..(255): Homolog of NCBI NO: 6649242 NR Description: splicing coactivator subunit SRm300 [Homo sapiens]
  misc_feature (38)..(255): Homolog of NCBI NO: 6649242 NR Description: splicing coactivator subunit SRm300 [Homo sapiens]
  misc_feature (1)..(255): Homolog of NCBI NO: 5032119 NR Description: Ser/Arg-related nuclear matrix protein (plenty of
  misc_feature (26)..(255): Homolog of NCBI NO: 28574039 NR Description: Salivary gland secretion 1 CG3047-PA
  misc_feature (6)..(255): Homolog of NCBI NO: 28574039 NR Description: Salivary gland secretion 1 CG3047-PA
  misc_feature (3)..(255): Homolog of NCBI NO: 28574039 NR Description: Salivary gland secretion 1 CG3047-PA
SRRSHTHSPASPFPLLFTARVVPQRTPSHPRACLCLPAPRRRGAPRRPSPGPARSQQAGTWRAAASPAYSPRSFSSSCSPRPSQTELPRQRRASRRARLRRRRRTRARTRSSSTSCRGPSSSSSRRRGPRTRTSPALTPCRRTCAAPAGGWRRRPTTSRRGGRCRRSARRTCGTTSPASPTAPTSTSWRGSPPPTRAPPRRSAPTGATPGSSTSTRPCSPTSRTTPSTATGLSCSTTTSLTSGWRGARRPPSPRA

SEQ ID NO: 9612 - DNA, 1240 bp, Zea mays subsp. mays
  misc_feature (1)..(1240): Ceres Seq. ID no. 12354293
  misc_feature: MA Experiment ID: 108523 Result: Up-regulated in Transcription
  misc_feature: MA Experiment 108523 PARAMETER Experiment Name: Zm_42deg_Heat_P Parameter: Age (day) Value: 8
  misc_feature: MA Experiment 108523 PARAMETER Experiment Name: Zm_42deg_Heat_P Parameter: Organism Value: Zea mays
  misc_feature: MA Experiment 108523 PARAMETER Experiment Name: Zm_42deg_Heat_P Parameter: Plant Line Value: 35A19
  misc_feature: MA Experiment 108523 PARAMETER Experiment Name: Zm_42deg_Heat_P Parameter: Temperature (deg C) Value: 42 vs. 22
  misc_feature: MA Experiment 108523 PARAMETER Experiment Name: Zm_42deg_Heat_P Parameter: Timepoint (hr) Value: 6
  misc_feature: MA Experiment 108523 PARAMETER Experiment Name: Zm_42deg_Heat_P Parameter: Tissue Value: Aerial
  misc_feature: MA Experiment ID: 108528 Result: Up-regulated in Transcription
  misc_feature: MA Experiment 108528 PARAMETER Experiment Name: Zm_Imbibed_Seeds_P Parameter: Age (day) Value: 5 vs. 2
  misc_feature: MA Experiment 108528 PARAMETER Experiment Name: Zm_Imbibed_Seeds_P Parameter: Organism Value: Zea mays
  misc_feature: MA Experiment 108528 PARAMETER Experiment Name: Zm_Imbibed_Seeds_P Parameter: Plant Line Value: 35A19
  misc_feature: MA Experiment 108528 PARAMETER Experiment Name: Zm_Imbibed_Seeds_P Parameter: Tissue Value: Aerial vs. Embryo
  misc_feature: MA Experiment ID: 108529 Result: Up-regulated in Transcription
  misc_feature: MA Experiment 108529 PARAMETER Experiment Name: Zm_Imbibed_Seeds_P Parameter: Age (day) Value: 5 vs. 2
  misc_feature: MA Experiment 108529 PARAMETER Experiment Name: Zm_Imbibed_Seeds_P Parameter: Organism Value: Zea mays
  misc_feature: MA Experiment 108529 PARAMETER Experiment Name: Zm_Imbibed_Seeds_P Parameter: Plant Line Value: 35A19
  misc_feature: MA Experiment 108529 PARAMETER Experiment Name: Zm_Imbibed_Seeds_P Parameter: Tissue Value: Roots vs. Embryo
  misc_feature: MA Experiment ID: 108535 Result: Down-regulated in Transcription
  misc_feature: MA Experiment 108535 PARAMETER Experiment Name: Zm_Meristem_P Parameter: Age (day) Value: 8
  misc_feature: MA Experiment 108535 PARAMETER Experiment Name: Zm_Meristem_P Parameter: Organism Value: Zea mays
  misc_feature: MA Experiment 108535 PARAMETER Experiment Name: Zm_Meristem_P Parameter: Plant Line Value: 35A19
  misc_feature: MA Experiment 108535 PARAMETER Experiment Name: Zm_Meristem_P Parameter: Tissue Value: Root Meristem vs. Above Root Meristem
  misc_feature: MA Experiment ID: 108536 Result: Up-regulated in Transcription
  misc_feature: MA Experiment 108536 PARAMETER Experiment Name: Zm_Meristem_P Parameter: Age (day) Value: 8
  misc_feature: MA Experiment 108536 PARAMETER Experiment Name: Zm_Meristem_P Parameter: Organism Value: Zea mays
  misc_feature: MA Experiment 108536 PARAMETER Experiment Name: Zm_Meristem_P Parameter: Plant Line Value: 35A19
  misc_feature: MA Experiment 108536 PARAMETER Experiment Name: Zm_Meristem_P Parameter: Tissue Value: Shoot Meristem vs. Above Shoot Meristem
  misc_feature: MA Experiment ID: 108543 Result: Up-regulated in Transcription
  misc_feature: MA Experiment ID: 108546 Result: Up-regulated in Transcription
  misc_feature: MA Experiment 108546 PARAMETER Experiment Name: Zm_Imbibed_Seeds_P Parameter: Age (day) Value: 3 vs. 2
  misc_feature: MA Experiment 108546 PARAMETER Experiment Name: Zm_Imbibed_Seeds_P Parameter: Organism Value: Zea mays
  misc_feature: MA Experiment 108546 PARAMETER Experiment Name: Zm_Imbibed_Seeds_P Parameter: Plant Line Value: 35A19
  misc_feature: MA Experiment 108546 PARAMETER Experiment Name: Zm_Imbibed_Seeds_P Parameter: Tissue Value: Roots vs. Embryo
  misc_feature: MA Experiment ID: 108547 Result: Up-regulated in Transcription
  misc_feature: MA Experiment 108547 PARAMETER Experiment Name: Zm_Imbibed_Seeds_P Parameter: Age (day) Value: 4 vs. 2
  misc_feature: MA Experiment 108547 PARAMETER Experiment Name: Zm_Imbibed_Seeds_P Parameter: Organism Value: Zea mays
  misc_feature: MA Experiment 108547 PARAMETER Experiment Name: Zm_Imbibed_Seeds_P Parameter: Plant Line Value: 35A19
  misc_feature: MA Experiment 108547 PARAMETER Experiment Name: Zm_Imbibed_Seeds_P Parameter: Tissue Value: Aerial vs. Embryo
  misc_feature: MA Experiment ID: 108559 Result: Down-regulated in Transcription
  misc_feature: MA Experiment 108559 PARAMETER Experiment Name: Zm_5mM_NO_P Parameter: Age (day) Value: 8
  misc_feature: MA Experiment 108559 PARAMETER Experiment Name: Zm_5mM_NO_P Parameter: Organism Value: Zea mays
  misc_feature: MA Experiment 108559 PARAMETER Experiment Name: Zm_5mM_NO_P Parameter: Plant Line Value: 35A19
  misc_feature: MA Experiment 108559 PARAMETER Experiment Name: Zm_5mM_NO_P Parameter: Timepoint (hr) Value: 12
  misc_feature: MA Experiment 108559 PARAMETER Experiment Name: Zm_5mM_NO_P Parameter: Tissue Value: Aerial
  misc_feature: MA Experiment 108559 PARAMETER Experiment Name: Zm_5mM_NO_P Parameter: Treatment Value: 5mM NO vs. No Treatment
  misc_feature: MA Experiment ID: 108689 Result: Up-regulated in Transcription
  misc_feature: MA Experiment 108689 PARAMETER Experiment Name: Zm_Drought_Roots_P Parameter: Age (day) Value: 9
  misc_feature: MA Experiment 108689 PARAMETER Experiment Name: Zm_Drought_Roots_P Parameter: Organism Value: Zea mays
  misc_feature: MA Experiment 108689 PARAMETER Experiment Name: Zm_Drought_Roots_P Parameter: Plant Line Value: 35A19
  misc_feature: MA Experiment 108689 PARAMETER Experiment Name: Zm_Drought_Roots_P Parameter: Timepoint (hr) Value: 24
  misc_feature: MA Experiment 108689 PARAMETER Experiment Name: Zm_Drought_Roots_P Parameter: Tissue Value: Roots
  misc_feature: MA Experiment 108689 PARAMETER Experiment Name: Zm_Drought_Roots_P Parameter: Treatment Value: Drought vs. No Drought
  misc_feature: MA Experiment ID: 20000477 Result: Up-regulated in Transcription
  misc_feature: MA Experiment 20000477 PARAMETER Experiment Name: Zm_5mM_SA_P Parameter: Age (day) Value: 10
  misc_feature: MA Experiment 20000477 PARAMETER Experiment Name: Zm_5mM_SA_P Parameter: Organism Value: Zea mays
  misc_feature: MA Experiment 20000477 PARAMETER Experiment Name: Zm_5mM_SA_P Parameter: Plant Line Value: 35A19
  misc_feature: MA Experiment 20000477 PARAMETER Experiment Name: Zm_5mM_SA_P Parameter: Timepoint (hr) Value: 48
  misc_feature: MA Experiment 20000477 PARAMETER Experiment Name: Zm_5mM_SA_P Parameter: Tissue Value: Aerial
  misc_feature: MA Experiment 20000477 PARAMETER Experiment Name: Zm_5mM_SA_P Parameter: Treatment Value: 5mM SA vs. No Treatment
  misc_feature: MA Experiment ID: 20000478 Result: Up-regulated in Transcription
  misc_feature: MA Experiment 20000478 PARAMETER Experiment Name: Zm_5mM_SA_P Parameter: Age (day) Value: 11
  misc_feature: MA Experiment 20000478 PARAMETER Experiment Name: Zm_5mM_SA_P Parameter: Organism Value: Zea mays
  misc_feature: MA Experiment 20000478 PARAMETER Experiment Name: Zm_5mM_SA_P Parameter: Plant Line Value: 35A19
  misc_feature: MA Experiment 20000478 PARAMETER Experiment Name: Zm_5mM_SA_P Parameter: Timepoint (hr) Value: 72
  misc_feature: MA Experiment 20000478 PARAMETER Experiment Name: Zm_5mM_SA_P Parameter: Tissue Value: Aerial
  misc_feature: MA Experiment 20000478 PARAMETER Experiment Name: Zm_5mM_SA_P Parameter: Treatment Value: 5mM SA vs. No Treatment
  misc_feature: MA Experiment ID: 20000480 Result: Up-regulated in Transcription
  misc_feature: MA Experiment 20000480 PARAMETER Experiment Name: Zm_Drought_P Parameter: Age (day) Value: 11
  misc_feature: MA Experiment 20000480 PARAMETER Experiment Name: Zm_Drought_P Parameter: Organism Value: Zea mays
  misc_feature: MA Experiment 20000480 PARAMETER Experiment Name: Zm_Drought_P Parameter: Plant Line Value: 35A19
  misc_feature: MA Experiment 20000480 PARAMETER Experiment Name: Zm_Drought_P Parameter: Timepoint (hr) Value: 72
  misc_feature: MA Experiment 20000480 PARAMETER Experiment Name: Zm_Drought_P Parameter: Tissue Value: Aerial
  misc_feature: MA Experiment 20000480 PARAMETER Experiment Name: Zm_Drought_P Parameter: Treatment Value: Drought vs. No Drought
  misc_feature: MA Experiment ID: 20000532 Result: Up-regulated in Transcription
  misc_feature: MA Experiment 20000532 PARAMETER Experiment Name: Zm_0.001percent_MeJA_P Parameter: Age (day) Value: 10
  misc_feature: MA Experiment 20000532 PARAMETER Experiment Name: Zm_0.001percent_MeJA_P Parameter: Organism Value: Zea mays
  misc_feature: MA Experiment 20000532 PARAMETER Experiment Name: Zm_0.001percent_MeJA_P Parameter: Plant Line Value: 35A19
  misc_feature: MA Experiment 20000532 PARAMETER Experiment Name: Zm_0.001percent_MeJA_P Parameter: Timepoint (hr) Value: 48
  misc_feature: MA Experiment 20000532 PARAMETER Experiment Name: Zm_0.001percent_MeJA_P Parameter: Tissue Value: Aerial
  misc_feature: MA Experiment 20000532 PARAMETER Experiment Name: Zm_0.001percent_MeJA_P Parameter: Treatment Value: 0.001percent MeJA vs. No Treatment
  misc_feature: MA Experiment ID: 20000533 Result: Up-regulated in Transcription
  misc_feature: MA Experiment 20000533 PARAMETER Experiment Name: Zm_0.001percent_MeJA_P Parameter: Age (day) Value: 11
  misc_feature: MA Experiment 20000533 PARAMETER Experiment Name: Zm_0.001percent_MeJA_P Parameter: Organism Value: Zea mays
  misc_feature: MA Experiment 20000533 PARAMETER Experiment Name: Zm_0.001percent_MeJA_P Parameter: Plant Line Value: 35A19
  misc_feature: MA Experiment 20000533 PARAMETER Experiment Name: Zm_0.001percent_MeJA_P Parameter: Timepoint (hr) Value: 72
  misc_feature: MA Experiment 20000533 PARAMETER Experiment Name: Zm_0.001percent_MeJA_P Parameter: Tissue Value: Aerial
  misc_feature: MA Experiment 20000533 PARAMETER Experiment Name: Zm_0.001percent_MeJA_P Parameter: Treatment Value: 0.001percent MeJA vs. No Treatment
  misc_feature: MA Experiment ID: 20000535 Result: Down-regulated in Transcription
  misc_feature: MA Experiment 20000535 PARAMETER Experiment Name: Zm_Hybrid_Seed_Dev_P Parameter: DAP Value: 30 vs. 12
  misc_feature: MA Experiment 20000535 PARAMETER Experiment Name: Zm_Hybrid_Seed_Dev_P Parameter: Organism Value: Zea mays
  misc_feature: MA Experiment 20000535 PARAMETER Experiment Name: Zm_Hybrid_Seed_Dev_P Parameter: Plant Line Value: 35A19
  misc_feature: MA Experiment 20000535 PARAMETER Experiment Name: Zm_Hybrid_Seed_Dev_P Parameter: Tissue Value: Embryo vs. Unfert Floret
  misc_feature: MA Experiment ID: 20000629 Result: Down-regulated in Transcription
  misc_feature: MA Experiment 20000629 PARAMETER Experiment Name: Zm_Herbicide-Treatments_P Parameter: Timepoint (hr) Value: 12
  misc_feature: MA Experiment 20000629 PARAMETER Experiment Name: Zm_Herbicide-Treatments_P Parameter: Tissue Value: Aerial
  misc_feature: MA Experiment 20000629 PARAMETER Experiment Name: Zm_Herbicide-Treatments_P Parameter: Treatment Value: Trimec vs. No Treatment
  misc_feature: MA Experiment ID: 20001608 Result: Up-regulated in Transcription
  misc_feature: MA Experiment 20001608 PARAMETER Experiment Name: Zm_50ppm_KNO3_L-to-H_P Parameter: Age (day) Value: 21
  misc_feature: MA Experiment 20001608 PARAMETER Experiment Name: Zm_50ppm_KNO3_L-to-H_P Parameter: Organism Value: Zea mays
  misc_feature: MA Experiment 20001608 PARAMETER Experiment Name: Zm_50ppm_KNO3_L-to-H_P Parameter: Plant Line Value: 35A19
  misc_feature: MA Experiment 20001608 PARAMETER Experiment Name: Zm_50ppm_KNO3_L-to-H_P Parameter: Timepoint (hr) Value: 48
  misc_feature: MA Experiment 20001608 PARAMETER Experiment Name: Zm_50ppm_KNO3_L-to-H_P Parameter: Tissue Value: Shoots
  misc_feature: MA Experiment 20001608 PARAMETER Experiment Name: Zm_50ppm_KNO3_L-to-H_P Parameter: Treatment Value: 50ppm KNO3 vs. 50ppm KCl
aaaaacagtgcactgactgagtgagtgtcatccagtgcaagctcccagtcccagtcccagtcccagtcccagggtagtagaggactagaggcaggctagagcaaagcacgcggattgcgtggctagcgcaacaatggcgatggccacggccaagctcgtccttctcatggtcctcgtggccggcagctccagcggcggcagcgcgtgggggccgctgatgagccgcctccggatgccgacggcgcgggtcgccccgtcgaggtggcgaaggagcgcctccaggaggactacgtcgtatcggcggctgcgccgctgatccacgcgctgcggccgctgctgggctccgcgggggacctgggccggcgcgccggcgtgccgtgcgacagctggcgcctggccgtggagacgtacaacaagcgcgattggacgacggtgccggccagctgcgagcgctacgtcggccactacatgctcggcggccactaccgccgggactcccgcgtcgtcatcgacgaggccatcgcctacgccgagggcctcaagctgggcggcaacggcaaggaggtctgggtcttcgatatcgacgagacgtccctctccaatctcccctactatgccacccacggcttcggcactaagctatacaacgcgacgagcttcaacgagtacgtgctggaggggagcgcgccggtgctcccggagacgcagcggctgttcaagaagctcgtctcgctgggcatcaagccggtgttcctgacgggccgcaccgaggaccagagggccatcaccgtcaccaacctccgccgccaggggtactccggctggatgacgctgctgctcaagcccgtcggcctcaaggccaccgccatcgcctacaagtccggcgagcgccagaagctccaggacgccgggtacgtcatcgtcggcaacatcggcgaccagtggagcgacatcctcggcgcgccggagggcgcgcgcaccttcaagctgcctgaccccctctactacattggctaagcagcgatgccaacggcgcggctctccatcagcccatcgatcaacccgtcaccccggctccagtgcctgtgctcaactgctctttgtttgttacccctcacttcttatcatcattaattcctaaggttaattccctgagctgagtggaaataaggccgactcggtggagagctgtcgacttctcaataattgctcatgaaaaccatgatggtttatgttatgc

SEQ ID NO: 9613 - protein, 182 aa, Zea mays subsp. mays
  peptide (1)..(182): Ceres Seq. ID no. 12354294
  misc_feature (1)..(181): Pfam Name: HAD superfamily, subfamily IIIB (Acid phosphatase) Pfam Description: HAD superfamily, subfamily IIIB (Acid
  misc_feature (1)..(181): Homolog of NCBI NO: 6900306 NR Description: putative acid phosphatase [Hordeum vulgare subsp.
MLGGHYRRDSRVVIDEAIAYAEGLKLGGNGKEVWVFDIDETSLSNLPYYATHGFGTKLYNATSFNEYVLEGSAPVLPETQRLFKKLVSLGIKPVFLTGRTEDQRAITVTNLRRQGYSGWMTLLLKPVGLKATAIAYKSGERQKLQDAGYVIVGNIGDQWSDILGAPEGARTFKLPDPLYYIG

SEQ ID NO: 9614 - DNA, 1412 bp, Zea mays subsp. mays
  misc_feature (1)..(1412): Ceres Seq. ID no. 12416622
  misc_feature: MA Experiment ID: 20000487 Result: Up-regulated in Transcription
  misc_feature: MA Experiment 20000487 PARAMETER Experiment Name: Zm_50mM_NH4NO3_L_to_H_P Parameter: Organism Value: Zea mays
  misc_feature: MA Experiment 20000487 PARAMETER Experiment Name: Zm_50mM_NH4NO3_L_to_H_P Parameter: Timepoint (hr) Value: 4
  misc_feature: MA Experiment 20000487 PARAMETER Experiment Name: Zm_50mM_NH4NO3_L_to_H_P Parameter: Tissue Value: Leaves
  misc_feature: MA Experiment 20000487 PARAMETER Experiment Name: Zm_50mM_NH4NO3_L_to_H_P Parameter: Treatment Value: 50mM NH4NO3 vs. 100mM Mannitol
ctaactagggttttgccaagccctctccttccctatcctcacccccatggaccccttttccaagaagcgcaagcccgacgagaacggtgccgtcaccgcctctcccgccggtggggctgccacgctgggcctcacccgcgacgacgtcatccgccttctcgagccgctctcccgggaccagcttgcggacatagcggccgccgccgcgctcgtctcctcgcaagcgctcgacgccgtgcgcgcagccgccgaccgtgacccggccctccgcaagctcttcgttcgggggctaggttgggagaccacatccgactcgctccgcgccatcttctccgcttacggggacctggaggaggccgtcgtcatcactgacaaacccacggggcggtccaagggctacgggttcgtcaccttccgccacgccgattccgccgtcctcgcgctcaaggagccatccaagaagatcgacggtcgcatgactgtcacgcagctcgccgccgccggctcggctggtgggcccgccggtgggcccgccggcagtggcggtgctcctgtgtctgatgtgtcgctccggaagatcttcgttggtaacgttccggcagacatggcatcagagcgtctccttgcgcattttgcctcctatggcgagattgaggaggggccgctgggttttgacaagcagacgggcaagttccggggttttgcactcttcgtatacaagacaccagaaggtgcgcaggcctccctagtggacacggtgaaggtaattgacggccaccagcttgtatgcaagcttgccttagacgggaagaaggagaagcaggggcaatcacagcaacctggacctggcaatcaccaccagcagcagatactgccgggtggtccgcaggacattcagggagggcttgggcttgggtcacaaatgggagcacagtatggtgtccctgggactggtatgccttcatttggttttggtggtgttggcggcgggtttgggggtccaaatccttatggtaacatgccatcttccatgggtggaagtggcgcaggtggtttagggtcgatgggaggccaggtgcccagtggtttggctagtgctggggctggtgcatttgggcctggcggattgggtggtggttcatttggtgtatcatctcagttcggtgctgctgggatgggggcatatggtggccttggaattggtggaggctctatgtaccgcatacaacagggagcaggtgggctgcctgcaggcgcatttggtgatggagggagctacccacctccaggttctggtttccggggccaggaccctcaaggtggaatgtctcctcctggtccaggtggcagggctcctcctatgtatcccaacgtgccaccttatttctaaggtattcatttacactgcttcc

SEQ ID NO: 9615 - protein, 447 aa, Zea mays subsp. mays
  peptide (1)..(447): Ceres Seq. ID no. 12416623
  misc_feature (178)..(248): Pfam Name: RNA recognition motif. (a.k.a. RRM, RBD, or RNP domain) Pfam Description: RNA recognition motif. (a.k.a. RRM, RBD, or RNP
  misc_feature (1)..(354): Homolog of NCBI NO: 34912640 NR Description: P0410E01.24 [Oryza sativa (japonica
  misc_feature (1)..(414): Homolog of NCBI NO: 15232459 NR Description: RNA-binding protein; protein id: At3g15010.1, by cDNA: gi_17380743, supported by cDNA: gi_20259620 [Arabidopsis
  misc_feature (32)..(417): Homolog of NCBI NO: 34903096 NR Description: unnamed protein product [Oryza sativa (japonica group)] >gi|6815067|dbj|BAA90354.1| unnamed protein product
  misc_feature (6)..(392): Homolog of NCBI NO: 15226817 NR Description: RRM-containing RNA-binding protein; protein id: supported by cDNA: gi_16612301 [Arabidopsis thaliana]
  misc_feature (12)..(417): Homolog of NCBI NO: 18410591 NR Description: RRM-containing RNA-binding protein; protein id: supported by cDNA: gi_14194148, supported by cDNA: gi_14335131, by cDNA: gi_14596194, supported by cDNA: gi_20148396, supported
  misc_feature (12)..(417): Homolog of NCBI NO: 14596195 NR Description: putative protein [Arabidopsis thaliana]
  misc_feature (6)..(410): Homolog of NCBI NO: 21666573 NR Description: RNA-binding protein AKIP1 [Vicia faba]
  misc_feature (70)..(409): Homolog of NCBI NO: 27882514 NR Description: Similar to heterogeneous nuclear
  misc_feature (65)..(434): Homolog of NCBI NO: 28374304 NR Description: similar to heterogeneous ribonuclear particle
  misc_feature (70)..(434): Homolog of NCBI NO: 542649 NR Description: heterogeneous ribonuclear particle protein A3 -
MDPFSKKRKPDENGAVTASPAGGAATLGLTRDDVIRLLEPLSRDQLADIAAAAALVSSQALDAVRAAADRDPALRKLFVRGLGWETTSDSLRAIFSAYGDLEEAVVITDKPTGRSKGYGFVTFRHADSAVLALKEPSKKIDGRMTVTQLAAAGSAGGPAGGPAGSGGAPVSDVSLRKIFVGNVPADMASERLLAHFASYGEIEEGPLGFDKQTGKFRGFALFVYKTPEGAQASLVDTVKVIDGHQLVCKLALDGKKEKQGQSQQPGPGNHHQQQILPGGPQDIQGGLGLGSQMGAQYGVPGTGMPSFGFGGVGGGFGGPNPYGNMPSSMGGSGAGGLGSMGGQVPSGLASAGAGAFGPGGLGGGSFGVSSQFGAAGMGAYGGLGIGGGSMYRIQQGAGGLPAGAFGDGGSYPPPGSGFRGQDPQGGMSPPGPGGRAPPMYPNVPPYF

SEQ ID NO: 9616 - protein, 304 aa, Zea mays subsp. mays
  peptide (1)..(304): Ceres Seq. ID no. 12416624
  misc_feature (35)..(105): Pfam Name: RNA recognition motif. (a.k.a. RRM, RBD, or RNP domain) Pfam Description: RNA recognition motif. (a.k.a. RRM, RBD, or RNP
  misc_feature (1)..(211): Homolog of NCBI NO: 34912640 NR Description: P0410E01.24 [Oryza sativa (japonica
  misc_feature (1)..(271): Homolog of NCBI NO: 15232459 NR Description: RNA-binding protein; protein id: At3g15010.1, by cDNA: gi_17380743, supported by cDNA: gi_20259620 [Arabidopsis
  misc_feature (1)..(274): Homolog of NCBI NO: 34903096 NR Description: unnamed protein product [Oryza sativa (japonica group)] >gi|6815067|dbj|BAA90354.1| unnamed protein product
  misc_feature (1)..(249): Homolog of NCBI NO: 15226817 NR Description: RRM-containing RNA-binding protein; protein id: supported by cDNA: gi_16612301 [Arabidopsis thaliana]
  misc_feature (1)..(274): Homolog of NCBI NO: 18410591 NR Description: RRM-containing RNA-binding protein; protein id: supported by cDNA: gi_14194148, supported by cDNA: gi_14335131, by cDNA: gi_14596194, supported by cDNA: gi_20148396, supported
  misc_feature (1)..(274): Homolog of NCBI NO: 14596195 NR Description: putative protein [Arabidopsis thaliana]
  misc_feature (1)..(267): Homolog of NCBI NO: 21666573 NR Description: RNA-binding protein AKIP1 [Vicia faba]
  misc_feature (1)..(266): Homolog of NCBI NO: 27882514 NR Description: Similar to heterogeneous nuclear
  misc_feature (1)..(291): Homolog of NCBI NO: 28374304 NR Description: similar to heterogeneous ribonuclear particle
  misc_feature (1)..(291): Homolog of NCBI NO: 542649 NR Description: heterogeneous ribonuclear particle protein A3 -
MTVTQLAAAGSAGGPAGGPAGSGGAPVSDVSLRKIFVGNVPADMASERLLAHFASYGEIEEGPLGFDKQTGKFRGFALFVYKTPEGAQASLVDTVKVIDGHQLVCKLALDGKKEKQGQSQQPGPGNHHQQQILPGGPQDIQGGLGLGSQMGAQYGVPGTGMPSFGFGGVGGGFGGPNPYGNMPSSMGGSGAGGLGSMGGQVPSGLASAGAGAFGPGGLGGGSFGVSSQFGAAGMGAYGGLGIGGGSMYRIQQGAGGLPAGAFGDGGSYPPPGSGFRGQDPQGGMSPPGPGGRAPPMYPNVPPYF

SEQ ID NO: 9617 - protein, 261 aa, Zea mays subsp. mays
  peptide (1)..(261): Ceres Seq. ID no. 12416625
  misc_feature (1)..(62): Pfam Name: RNA recognition motif. (a.k.a. RRM, RBD, or RNP domain) Pfam Description: RNA recognition motif. (a.k.a. RRM, RBD, or RNP
  misc_feature (1)..(168): Homolog of NCBI NO: 34912640 NR Description: P0410E01.24 [Oryza sativa (japonica
  misc_feature (1)..(228): Homolog of NCBI NO: 15232459 NR Description: RNA-binding protein; protein id: At3g15010.1, by cDNA: gi_17380743, supported by cDNA: gi_20259620 [Arabidopsis
  misc_feature (1)..(231): Homolog of NCBI NO: 34903096 NR Description: unnamed protein product [Oryza sativa (japonica group)] >gi|6815067|dbj|BAA90354.1| unnamed protein product
  misc_feature (1)..(206): Homolog of NCBI NO: 15226817 NR Description: RRM-containing RNA-binding protein; protein id: supported by cDNA: gi_16612301 [Arabidopsis thaliana]
  misc_feature (1)..(231): Homolog of NCBI NO: 18410591 NR Description: RRM-containing RNA-binding protein; protein id: supported by cDNA: gi_14194148, supported by cDNA: gi_14335131, by cDNA: gi_14596194, supported by cDNA: gi_20148396, supported
  misc_feature (1)..(231): Homolog of NCBI NO: 14596195 NR Description: putative protein [Arabidopsis thaliana]
  misc_feature (1)..(224): Homolog of NCBI NO: 21666573 NR Description: RNA-binding protein AKIP1 [Vicia faba]
  misc_feature (1)..(223): Homolog of NCBI NO: 27882514 NR Description: Similar to heterogeneous nuclear
  misc_feature (1)..(248): Homolog of NCBI NO: 28374304 NR Description: similar to heterogeneous ribonuclear particle
  misc_feature (1)..(248): Homolog of NCBI NO: 542649 NR Description: heterogeneous ribonuclear particle protein A3 -
MASERLLAHFASYGEIEEGPLGFDKQTGKFRGFALFVYKTPEGAQASLVDTVKVIDGHQLVCKLALDGKKEKQGQSQQPGPGNHHQQQILPGGPQDIQGGLGLGSQMGAQYGVPGTGMPSFGFGGVGGGFGGPNPYGNMPSSMGGSGAGGLGSMGGQVPSGLASAGAGAFGPGGLGGGSFGVSSQFGAAGMGAYGGLGIGGGSMYRIQQGAGGLPAGAFGDGGSYPPPGSGFRGQDPQGGMSPPGPGGRAPPMYPNVPPYF

SEQ ID NO: 9618 - DNA, 2061 bp, Zea mays subsp. mays
  misc_feature (1)..(2061): Ceres Seq. ID no. 12416040
  misc_feature: MA Experiment ID: 108559 Result: Down-regulated in Transcription
  misc_feature: MA Experiment 108559 PARAMETER Experiment Name: Zm_5mM_NO_P Parameter: Age (day) Value: 8
  misc_feature: MA Experiment 108559 PARAMETER Experiment Name: Zm_5mM_NO_P Parameter: Organism Value: Zea mays
  misc_feature: MA Experiment 108559 PARAMETER Experiment Name: Zm_5mM_NO_P Parameter: Plant Line Value: 35A19
  misc_feature: MA Experiment 108559 PARAMETER Experiment Name: Zm_5mM_NO_P Parameter: Timepoint (hr) Value: 12
  misc_feature: MA Experiment 108559 PARAMETER Experiment Name: Zm_5mM_NO_P Parameter: Tissue Value: Aerial
  misc_feature: MA Experiment 108559 PARAMETER Experiment Name: Zm_5mM_NO_P Parameter: Treatment Value: 5mM NO vs. No Treatment
cattgttgattacacggtatgcgcagagtggttattctgatgaggctgtagaattgtttcttgacatgctggagaacggatttcagccggaccagtacaccttgagcagtatgttatcggcctgtacagagttgggatcattcaggttggggcagcaactgcactctctagcgctcaggcttggactggaatcagacagttgcgtgagctgtgggcttgtggacatgtatgcaaagtctcacaatggacagtccttgcacaatgcgagagaagtcttcaatcggatgccaaagcataatgtgatgtcgtggacggcacttttgtcagggtatgtgcagcgtggatcgcaggacaaccaggttatgatactgttttgcaagatgttaaatgaaggcatcagaccaaaccatatcacatattctagtatgcttaaggcatgtgcaaaccttggtgatcaagattcaggcaggcaaattcatactcattgcgtcaaatctaacctagctgacttaaacgttgttgggaatgctttagtaagcatgtatgctgaatctggttccatagaggaagctagacatgcgttcgaccagctatatgaaaagaacatggtatccttcagcggcaatttagacggagatgggaggagcaacacttatcaagactatcagattgaaagaatggagttaggaatcagcactttcacatttggtagtctgatcagtgctgccgcttgtgtagggatgctaaccaaaggccagcagctgcatgccctctcactgaaggctggatttgggtcagatagagccataggaaactctcttgtatctatgtattctaggtgtggatacctagtagatgcttgccaagtctttgatgaaatgaatgaccataatgtgatctcatggacttcaatgatcagtggtttggcaaaacatgggtatgcagcaagagctctggaattgtttcacgatatgatcgcagctggggtgaaaccaaatgatgtcacatacattgctgttttatctgcatgtagccatgccggtctagttaaagaagggaaggaacactttagaatgatgcagaagcatcatggactcataccaaggatggagcattatgcttgcatggttgatctccttgggcgatcaggccttgttgaagatgcactagattttatcaacgaaatgccttgtcaagtagacgcattggtctggaagacacttcttggtgcctgtaagacccacaacaacatggatattggtgagattgctgctaaccatgtcatacagctcgaaccacaagatccagccccctatgtcttgctttccaacttatacgcagaggctggtttgtgggatcaagtagctaggataaggagtctaatgagggataaaaacttgatgaaagaaaaagggttgagctggatgcatgttgacaataccattcacgagtttcgagctggtgataccagccatccacaagcagaggagatctatacaaagttggagacactgataagagaaatcaaagtcatgggctatgtaccagacaccagcgtagtgctccatgacatgtcggatgagcttaaggaactgtgtctgcttcagcacagcgagaagattgctgttgcattcggtttgatcagttgtacatcagcaacaaagccaataaggatatttaagaacctccgtgtatgcgttgattgtcattcagcactcaagtatgtctccaaggccaccggtagggagataatattgagagatagcaacagattccacaggatgaaggatggggaatgctcgtgcggagaatactggtaacaagcaagctagctagctcacgtagtcacgtttagctgaagagccatgtacagagttctggcgcaccacaacattattgacagtgagtgtccatgttcatattttctgtaggaccttcacaaaatcatagtttatacaaagcatgagttgttgtgatagtttatactttatactagggtcagagtttgtacagttgtatgcactctcctatcaccataaatgcaaattgttttgagtggtc

SEQ ID NO: 9619 - protein, 605 aa, Zea mays subsp. mays
  peptide (1)..(605): Ceres Seq. ID no. 12416041
  misc_feature (370)..(404): Pfam Name: PPR repeat Pfam Description: PPR repeat
  misc_feature (1)..(605): Homolog of NCBI NO: 30693150 NR Description: pentatricopeptide (PPR) repeat-containing protein
  misc_feature (1)..(560): Homolog of NCBI NO: 11357746 NR Description: hypothetical protein F2K15.30 - Arabidopsis >gi|6723387|emb|CAB66396.1| putative protein [Arabidopsis
  misc_feature (2)..(605): Homolog of NCBI NO: 34915012 NR Description: P0458A05.10 [Oryza sativa (japonica
  misc_feature (18)..(605): Homolog of NCBI NO: 15236324 NR Description: putative protein; protein id: At4g13650.1
  misc_feature (2)..(605): Homolog of NCBI NO: 15242550 NR Description: selenium-binding protein-like; protein id:
  misc_feature (2)..(605): Homolog of NCBI NO: 15234095 NR Description: putative protein; protein id: At4g33170.1
  misc_feature (2)..(605): Homolog of NCBI NO: 34912228 NR Description: P0415C01.16 [Oryza sativa (japonica
  misc_feature (2)..(605): Homolog of NCBI NO: 34897884 NR Description: Similar to Arabidopsis thaliana DNA chromosome 4,
  misc_feature (2)..(605): Homolog of NCBI NO: 18418348 NR Description: putative protein; protein id: At4g33990.1
  misc_feature (2)..(605): Homolog of NCBI NO: 15220337 NR Description: hypothetical protein; protein id: At1g11290.1
LLITRYAQSGYSDEAVELFLDMLENGFQPDQYTLSSMLSACTELGSFRLGQQLHSLALRLGLESDSCVSCGLVDMYAKSHNGQSLHNAREVFNRMPKHNVMSWTALLSGYVQRGSQDNQVMILFCKMLNEGIRPNHITYSSMLKACANLGDQDSGRQIHTHCVKSNLADLNVVGNALVSMYAESGSIEEARHAFDQLYEKNMVSFSGNLDGDGRSNTYQDYQIERMELGISTFTFGSLISAAACVGMLTKGQQLHALSLKAGFGSDRAIGNSLVSMYSRCGYLVDACQVFDEMNDHNVISWTSMISGLAKHGYAARALELFHDMIAAGVKPNDVTYIAVLSACSHAGLVKEGKEHFRMMQKHHGLIPRMEHYACMVDLLGRSGLVEDALDFINEMPCQVDALVWKTLLGACKTHNNMDIGEIAANHVIQLEPQDPAPYVLLSNLYAEAGLWDQVARIRSLMRDKNLMKEKGLSWMHVDNTIHEFRAGDTSHPQAEEIYTKLETLIREIKVMGYVPDTSVVLHDMSDELKELCLLQHSEKIAVAFGLISCTSATKPIRIFKNLRVCVDCHSALKYVSKATGREIILRDSNRFHRMKDGECSCGEYW

SEQ ID NO: 9620 - protein, 584 aa, Zea mays subsp. mays
  peptide (1)..(584): Ceres Seq. ID no. 12416042
  misc_feature (349)..(383): Pfam Name: PPR repeat Pfam Description: PPR repeat
  misc_feature (1)..(584): Homolog of NCBI NO: 30693150 NR Description: pentatricopeptide (PPR) repeat-containing protein
  misc_feature (1)..(539): Homolog of NCBI NO: 11357746 NR Description: hypothetical protein F2K15.30 - Arabidopsis >gi|6723387|emb|CAB66396.1| putative protein [Arabidopsis
  misc_feature (1)..(584): Homolog of NCBI NO: 34915012 NR Description: P0458A05.10 [Oryza sativa (japonica
  misc_feature (1)..(584): Homolog of NCBI NO: 15236324 NR Description: putative protein; protein id: At4g13650.1
  misc_feature (1)..(584): Homolog of NCBI NO: 15242550 NR Description: selenium-binding protein-like; protein id:
  misc_feature (1)..(584): Homolog of NCBI NO: 15234095 NR Description: putative protein; protein id: At4g33170.1
  misc_feature (1)..(584): Homolog of NCBI NO: 34912228 NR Description: P0415C01.16 [Oryza sativa (japonica
  misc_feature (1)..(584): Homolog of NCBI NO: 34897884 NR Description: Similar to Arabidopsis thaliana DNA chromosome 4,
  misc_feature (1)..(584): Homolog of NCBI NO: 18418348 NR Description: putative protein; protein id: At4g33990.1
  misc_feature (1)..(584): Homolog of NCBI NO: 15220337 NR Description: hypothetical protein; protein id: At1g11290.1
MLENGFQPDQYTLSSMLSACTELGSFRLGQQLHSLALRLGLESDSCVSCGLVDMYAKSHNGQSLHNAREVFNRMPKHNVMSWTALLSGYVQRGSQDNQVMILFCKMLNEGIRPNHITYSSMLKACANLGDQDSGRQIHTHCVKSNLADLNVVGNALVSMYAESGSIEEARHAFDQLYEKNMVSFSGNLDGDGRSNTYQDYQIERMELGISTFTFGSLISAAACVGMLTKGQQLHALSLKAGFGSDRAIGNSLVSMYSRCGYLVDACQVFDEMNDHNVISWTSMISGLAKHGYAARALELFHDMIAAGVKPNDVTYIAVLSACSHAGLVKEGKEHFRMMQKHHGLIPRMEHYACMVDLLGRSGLVEDALDFINEMPCQVDALVWKTLLGACKTHNNMDIGEIAANHVIQLEPQDPAPYVLLSNLYAEAGLWDQVARIRSLMRDKNLMKEKGLSWMHVDNTIHEFRAGDTSHPQAEEIYTKLETLIREIKVMGYVPDTSVVLHDMSDELKELCLLQHSEKIAVAFGLISCTSATKPIRIFKNLRVCVDCHSALKYVSKATGREIILRDSNRFHRMKDGECSCGEYW

SEQ ID NO: 9621 - protein, 569 aa, Zea mays subsp. mays
  peptide (1)..(569): Ceres Seq. ID no. 12416043
  misc_feature (334)..(368): Pfam Name: PPR repeat Pfam Description: PPR repeat
  misc_feature (1)..(569): Homolog of NCBI NO: 30693150 NR Description: pentatricopeptide (PPR) repeat-containing protein
  misc_feature (1)..(524): Homolog of NCBI NO: 11357746 NR Description: hypothetical protein F2K15.30 - Arabidopsis >gi|6723387|emb|CAB66396.1| putative protein [Arabidopsis
  misc_feature (1)..(569): Homolog of NCBI NO: 34915012 NR Description: P0458A05.10 [Oryza sativa (japonica
  misc_feature (1)..(569): Homolog of NCBI NO: 15236324 NR Description: putative protein; protein id: At4g13650.1
  misc_feature (1)..(569): Homolog of NCBI NO: 15242550 NR Description: selenium-binding protein-like; protein id:
  misc_feature (1)..(569): Homolog of NCBI NO: 15234095 NR Description: putative protein; protein id: At4g33170.1
  misc_feature (1)..(569): Homolog of NCBI NO: 34912228 NR Description: P0415C01.16 [Oryza sativa (japonica
  misc_feature (1)..(569): Homolog of NCBI NO: 34897884 NR Description: Similar to Arabidopsis thaliana DNA chromosome 4,
  misc_feature (1)..(569): Homolog of NCBI NO: 18418348 NR Description: putative protein; protein id: At4g33990.1
  misc_feature (1)..(569): Homolog of NCBI NO: 15220337 NR Description: hypothetical protein; protein id: At1g11290.1
MLSACTELGSFRLGQQLHSLALRLGLESDSCVSCGLVDMYAKSHNGQSLHNAREVFNRMPKHNVMSWTALLSGYVQRGSQDNQVMILFCKMLNEGIRPNHITYSSMLKACANLGDQDSGRQIHTHCVKSNLADLNVVGNALVSMYAESGSIEEARHAFDQLYEKNMVSFSGNLDGDGRSNTYQDYQIERMELGISTFTFGSLISAAACVGMLTKGQQLHALSLKAGFGSDRAIGNSLVSMYSRCGYLVDACQVFDEMNDHNVISWTSMISGLAKHGYAARALELFHDMIAAGVKPNDVTYIAVLSACSHAGLVKEGKEHFRMMQKHHGLIPRMEHYACMVDLLGRSGLVEDALDFINEMPCQVDALVWKTLLGACKTHNNMDIGEIAANHVIQLEPQDPAPYVLLSNLYAEAGLWDQVARIRSLMRDKNLMKEKGLSWMHVDNTIHEFRAGDTSHPQAEEIYTKLETLIREIKVMGYVPDTSVVLHDMSDELKELCLLQHSEKIAVAFGLISCTSATKPIRIFKNLRVCVDCHSALKYVSKATGREIILRDSNRFHRMKDGECSCGEYW

SEQ ID NO: 9622 - DNA, 861 bp, Zea mays subsp. mays
  misc_feature (1)..(861): Ceres Seq. ID no. 12347397
  misc_feature: MA Experiment ID: 108503 Result: Up-regulated in Transcription
  misc_feature: MA Experiment 108503 PARAMETER Experiment Name: Zm_Drought_P Parameter: Age (day) Value: 8
  misc_feature: MA Experiment 108503 PARAMETER Experiment Name: Zm_Drought_P Parameter: Organism Value: Zea mays
  misc_feature: MA Experiment 108503 PARAMETER Experiment Name: Zm_Drought_P Parameter: Plant Line Value: 35A19
  misc_feature: MA Experiment 108503 PARAMETER Experiment Name: Zm_Drought_P Parameter: Timepoint (hr) Value: 6
  misc_feature: MA Experiment 108503 PARAMETER Experiment Name: Zm_Drought_P Parameter: Tissue Value: Aerial
  misc_feature: MA Experiment 108503 PARAMETER Experiment Name: Zm_Drought_P Parameter: Treatment Value: Drought vs. No Drought
  misc_feature: MA Experiment ID: 108504 Result: Up-regulated in Transcription
  misc_feature: MA Experiment 108504 PARAMETER Experiment Name: Zm_Drought_P Parameter: Age (day) Value: 8
  misc_feature: MA Experiment 108504 PARAMETER Experiment Name: Zm_Drought_P Parameter: Organism Value: Zea mays
  misc_feature: MA Experiment 108504 PARAMETER Experiment Name: Zm_Drought_P Parameter: Plant Line Value: 35A19
  misc_feature: MA Experiment 108504 PARAMETER Experiment Name: Zm_Drought_P Parameter: Timepoint (hr) Value: 12
  misc_feature: MA Experiment 108504 PARAMETER Experiment Name: Zm_Drought_P Parameter: Tissue Value: Aerial
  misc_feature: MA Experiment 108504 PARAMETER Experiment Name: Zm_Drought_P Parameter: Treatment Value: Drought vs. No Drought
  misc_feature: MA Experiment ID: 108523 Result: Down-regulated in Transcription
  misc_feature: MA Experiment 108523 PARAMETER Experiment Name: Zm_42deg_Heat_P Parameter: Age (day) Value: 8
  misc_feature: MA Experiment 108523 PARAMETER Experiment Name: Zm_42deg_Heat_P Parameter: Organism Value: Zea mays
  misc_feature: MA Experiment 108523 PARAMETER Experiment Name: Zm_42deg_Heat_P Parameter: Plant Line Value: 35A19
  misc_feature: MA Experiment 108523 PARAMETER Experiment Name: Zm_42deg_Heat_P Parameter: Temperature (deg C) Value: 42 vs. 22
  misc_feature: MA Experiment 108523 PARAMETER Experiment Name: Zm_42deg_Heat_P Parameter: Timepoint (hr) Value: 6
  misc_feature: MA Experiment 108523 PARAMETER Experiment Name: Zm_42deg_Heat_P Parameter: Tissue Value: Aerial
  misc_feature: MA Experiment ID: 108540 Result: Up-regulated in Transcription
  misc_feature: MA Experiment 108540 PARAMETER Experiment Name: Zm_20percent_PEG_P Parameter: Age (day) Value: 8
  misc_feature: MA Experiment 108540 PARAMETER Experiment Name: Zm_20percent_PEG_P Parameter: Organism Value: Zea mays
  misc_feature: MA Experiment 108540 PARAMETER Experiment Name: Zm_20percent_PEG_P Parameter: Plant Line Value: 35A19
  misc_feature: MA Experiment 108540 PARAMETER Experiment Name: Zm_20percent_PEG_P Parameter: Timepoint (hr) Value: 6
  misc_feature: MA Experiment 108540 PARAMETER Experiment Name: Zm_20percent_PEG_P Parameter: Tissue Value: Aerial
  misc_feature: MA Experiment 108540 PARAMETER Experiment Name: Zm_20percent_PEG_P Parameter: Treatment Value: 20percent PEG vs. No Treatment
  misc_feature: MA Experiment ID: 108556 Result: Up-regulated in Transcription
  misc_feature: MA Experiment 108556 PARAMETER Experiment Name: Zm_Drought_P Parameter: Age (day) Value: 9
  misc_feature: MA Experiment 108556 PARAMETER Experiment Name: Zm_Drought_P Parameter: Organism Value: Zea mays
  misc_feature: MA Experiment 108556 PARAMETER Experiment Name: Zm_Drought_P Parameter: Plant Line Value: 35A19
  misc_feature: MA Experiment 108556 PARAMETER Experiment Name: Zm_Drought_P Parameter: Timepoint (hr) Value: 24
  misc_feature: MA Experiment 108556 PARAMETER Experiment Name: Zm_Drought_P Parameter: Tissue Value: Aerial
  misc_feature: MA Experiment 108556 PARAMETER Experiment Name: Zm_Drought_P Parameter: Treatment Value: Drought vs. No Drought
  misc_feature: MA Experiment ID: 108559 Result: Down-regulated in Transcription
  misc_feature: MA Experiment 108559 PARAMETER Experiment Name: Zm_5mM_NO_P Parameter: Age (day) Value: 8
  misc_feature: MA Experiment 108559 PARAMETER Experiment Name: Zm_5mM_NO_P Parameter: Organism Value: Zea mays
  misc_feature: MA Experiment 108559 PARAMETER Experiment Name: Zm_5mM_NO_P Parameter: Plant Line Value: 35A19
  misc_feature: MA Experiment 108559 PARAMETER Experiment Name: Zm_5mM_NO_P Parameter: Timepoint (hr) Value: 12
  misc_feature: MA Experiment 108559 PARAMETER Experiment Name: Zm_5mM_NO_P Parameter: Tissue Value: Aerial
  misc_feature: MA Experiment 108559 PARAMETER Experiment Name: Zm_5mM_NO_P Parameter: Treatment Value: 5mM NO vs. No Treatment
  misc_feature: MA Experiment ID: 108597 Result: Up-regulated in Transcription
  misc_feature: MA Experiment 108597 PARAMETER Experiment Name: Zm_100uM_ABA_P Parameter: Age (day) Value: 9
  misc_feature: MA Experiment 108597 PARAMETER Experiment Name: Zm_100uM_ABA_P Parameter: Organism Value: Zea mays
  misc_feature: MA Experiment 108597 PARAMETER Experiment Name: Zm_100uM_ABA_P Parameter: Plant Line Value: 35A19
  misc_feature: MA Experiment 108597 PARAMETER Experiment Name: Zm_100uM_ABA_P Parameter: Timepoint (hr) Value: 24
  misc_feature: MA Experiment 108597 PARAMETER Experiment Name: Zm_100uM_ABA_P Parameter: Tissue Value: Aerial
  misc_feature: MA Experiment 108597 PARAMETER Experiment Name: Zm_100uM_ABA_P Parameter: Treatment Value: 100uM ABA vs. No Treatment
  misc_feature: MA Experiment ID: 20000479 Result: Up-regulated in Transcription
  misc_feature: MA Experiment 20000479 PARAMETER Experiment Name: Zm_Drought_P Parameter: Age (day) Value: 10
  misc_feature: MA Experiment 20000479 PARAMETER Experiment Name: Zm_Drought_P Parameter: Organism Value: Zea mays
  misc_feature: MA Experiment 20000479 PARAMETER Experiment Name: Zm_Drought_P Parameter: Plant Line Value: 35A19
  misc_feature: MA Experiment 20000479 PARAMETER Experiment Name: Zm_Drought_P Parameter: Timepoint (hr) Value: 48
  misc_feature: MA Experiment 20000479 PARAMETER Experiment Name: Zm_Drought_P Parameter: Tissue Value: Aerial
  misc_feature: MA Experiment 20000479 PARAMETER Experiment Name: Zm_Drought_P Parameter: Treatment Value: Drought vs. No Drought
  misc_feature: MA Experiment ID: 20000487 Result: Down-regulated in Transcription
  misc_feature: MA Experiment 20000487 PARAMETER Experiment Name: Zm_50mM_NH4NO3_L_to_H_P Parameter: Organism Value: Zea mays
  misc_feature: MA Experiment 20000487 PARAMETER Experiment Name: Zm_50mM_NH4NO3_L_to_H_P Parameter: Timepoint (hr) Value: 4
  misc_feature: MA Experiment 20000487 PARAMETER Experiment Name: Zm_50mM_NH4NO3_L_to_H_P Parameter: Tissue Value: Leaves
  misc_feature: MA Experiment 20000487 PARAMETER Experiment Name: Zm_50mM_NH4NO3_L_to_H_P Parameter: Treatment Value: 50mM NH4NO3 vs. 100mM Mannitol
  misc_feature: MA Experiment ID: 20000488 Result: Down-regulated in Transcription
  misc_feature: MA Experiment 20000488 PARAMETER Experiment Name: Zm_50mM_NH4NO3_L_to_H_P Parameter: Organism Value: Zea mays
  misc_feature: MA Experiment 20000488 PARAMETER Experiment Name: Zm_50mM_NH4NO3_L_to_H_P Parameter: Timepoint (hr) Value: 8
  misc_feature: MA Experiment 20000488 PARAMETER Experiment Name: Zm_50mM_NH4NO3_L_to_H_P Parameter: Tissue Value: Leaves
  misc_feature: MA Experiment 20000488 PARAMETER Experiment Name: Zm_50mM_NH4NO3_L_to_H_P Parameter: Treatment Value: 50mM NH4NO3 vs. 100mM Mannitol
  misc_feature: MA Experiment ID: 20001606 Result: Down-regulated in Transcription
  misc_feature: MA Experiment 20001606 PARAMETER Experiment Name: Zm_50ppm_KNO3_L-to-H_P Parameter: Age (day) Value: 19
  misc_feature: MA Experiment 20001606 PARAMETER Experiment Name: Zm_50ppm_KNO3_L-to-H_P Parameter: Organism Value: Zea mays
  misc_feature: MA Experiment 20001606 PARAMETER Experiment Name: Zm_50ppm_KNO3_L-to-H_P Parameter: Plant Line Value: 35A19
  misc_feature: MA Experiment 20001606 PARAMETER Experiment Name: Zm_50ppm_KNO3_L-to-H_P Parameter: Timepoint (hr) Value: 8
  misc_feature: MA Experiment 20001606 PARAMETER Experiment Name: Zm_50ppm_KNO3_L-to-H_P Parameter: Tissue Value: Shoots
  misc_feature: MA Experiment 20001606 PARAMETER Experiment Name: Zm_50ppm_KNO3_L-to-H_P Parameter: Treatment Value: 50ppm KNO3 vs. 50ppm KCl
  misc_feature: MA Experiment ID: 20001608 Result: Down-regulated in Transcription
  misc_feature: MA Experiment 20001608 PARAMETER Experiment Name: Zm_50ppm_KNO3_L-to-H_P Parameter: Age (day) Value: 21
  misc_feature: MA Experiment 20001608 PARAMETER Experiment Name: Zm_50ppm_KNO3_L-to-H_P Parameter: Organism Value: Zea mays
  misc_feature: MA Experiment 20001608 PARAMETER Experiment Name: Zm_50ppm_KNO3_L-to-H_P Parameter: Plant Line Value: 35A19
  misc_feature: MA Experiment 20001608 PARAMETER Experiment Name: Zm_50ppm_KNO3_L-to-H_P Parameter: Timepoint (hr) Value: 48
  misc_feature: MA Experiment 20001608 PARAMETER Experiment Name: Zm_50ppm_KNO3_L-to-H_P Parameter: Tissue Value: Shoots
  misc_feature: MA Experiment 20001608 PARAMETER Experiment Name: Zm_50ppm_KNO3_L-to-H_P Parameter: Treatment Value: 50ppm KNO3 vs. 50ppm KCl
  misc_feature: MA Experiment ID: 20001610 Result: Down-regulated in Transcription
  misc_feature: MA Experiment 20001610 PARAMETER Experiment Name: Zm_50ppm_KNO3_L-to-H_P Parameter: Age (day) Value: 19
  misc_feature: MA Experiment 20001610 PARAMETER Experiment Name: Zm_50ppm_KNO3_L-to-H_P Parameter: Organism Value: Zea mays
  misc_feature: MA Experiment 20001610 PARAMETER Experiment Name: Zm_50ppm_KNO3_L-to-H_P Parameter: Plant Line Value: 35A19
  misc_feature: MA Experiment 20001610 PARAMETER Experiment Name: Zm_50ppm_KNO3_L-to-H_P Parameter: Timepoint (hr) Value: 2
  misc_feature: MA Experiment 20001610 PARAMETER Experiment Name: Zm_50ppm_KNO3_L-to-H_P Parameter: Tissue Value: Roots
  misc_feature: MA Experiment 20001610 PARAMETER Experiment Name: Zm_50ppm_KNO3_L-to-H_P Parameter: Treatment Value: 50ppm KNO3 vs. 50ppm KCl
accccgactcctccccatcgcccatcgccgccctccgatccttcatggccgctgccacagccgccgccgccgcgctcgcctccccggcgggcctctccacatcgctggcgcgccgcggcctcgtcagcttcgcacccgcgctccgccccggccctgaccgcagctctcgcgccgtcgccctcctcggtgtacgaactcatgtcacggctgttgatcaagccattgtaaaaggtgatacaaagttggaaggtcctgtggttgttgttactggtgcttccagggggattggaaaagccactgcattggctcttggaaaagcaggctgcaaggtcttggtgaattatgctcgatcttcaaaggaggctgaagaagtctccaaggagattgaagcatctggaggccaggccattacctttggaggagatgtttccaaagaggctgatgtttaatctattataaaagtggctgttgatacatggggaacgattgatgtactagtaaataatgcaggaatcacacgggacacattgttgatgagaatgaagaaatcacagtggcaagatgtgattgatttgaatcttacaggcgttttcctttgcacgcaggctgcaacaaaagtaatgatgaagaagaaaaagggaagaattatcaatatagcatcggttgttggtcttactggtaatgctggacaagctaattatgctgctgccaaaggtttgtattcctgtatatggtacaaattgtaaaatccgtgccagggtttatgtttcctgaccgtggcgacggtcctgttttcactcttctttcttcattgccctgtattctttttgtctgcattcttttttgtcaagcttggcgtcc

SEQ ID NO: 9623 - protein, 148 aa, Zea mays subsp. mays
  peptide (1)..(148): Ceres Seq. ID no. 12347398
  misc_feature (17)..(148): Homolog of NCBI NO: 38346116 NR Description: OSJNBb0006N15.11 [Oryza sativa (japonica
  misc_feature (15)..(148): Homolog of NCBI NO: 119791 NR Description: 3-oxoacyl-[acyl-carrier protein] reductase,
  misc_feature (47)..(148): Homolog of NCBI NO: 14422263 NR Description: beta-oxyacyl-[acyl-carrier protein] reductase
  misc_feature (17)..(148): Homolog of NCBI NO: 14422251 NR Description: 3-oxyacyl-[acyl carrier protein] reductase
  misc_feature (64)..(148): Homolog of NCBI NO: 14422247 NR Description: 3-oxyacyl-[acyl-carrier protein] reductase
  misc_feature (48)..(148): Homolog of NCBI NO: 14422249 NR Description: 3-oxyacyl-[acyl carrier protein] reductase
  misc_feature (84)..(148): Homolog of NCBI NO: 13096234 NR Description: Chain A, The X-Ray Structure Of Beta-Keto Acyl
  misc_feature (53)..(148): Homolog of NCBI NO: 18395461 NR Description: putative 3-oxoacyl (acyl-carrier protein) protein id: At1g24360.1, supported by cDNA: gi_13358177, by cDNA: gi_16648892, supported by cDNA: gi_20148324 [Arabidopsis
  misc_feature (53)..(148): Homolog of NCBI NO: 99753 NR Description: 3-oxoacyl-[acyl-carrier-protein] reductase (EC
  misc_feature (80)..(148): Homolog of NCBI NO: 14422253 NR Description: 3-oxyacyl-[acyl carrier protein] reductase
PDSSPSPIAALRSFMAAATAAAAALASPAGLSTSLARRGLVSFAPALRPGPDRSSRAVALLGVRTHVTAVDQAIVKGDTKLEGPVVVVTGASRGIGKATALALGKAGCKVLVNYARSSKEAEEVSKEIEASGGQAITFGGDVSKEADV

SEQ ID NO: 9624 - protein, 134 aa, Zea mays subsp. mays
  peptide (1)..(134): Ceres Seq. ID no. 12347399
  misc_feature (3)..(134): Homolog of NCBI NO: 38346116 NR Description: OSJNBb0006N15.11 [Oryza sativa (japonica
  misc_feature (1)..(134): Homolog of NCBI NO: 119791 NR Description: 3-oxoacyl-[acyl-carrier protein] reductase,
  misc_feature (33)..(134): Homolog of NCBI NO: 14422263 NR Description: beta-oxyacyl-[acyl-carrier protein] reductase
  misc_feature (3)..(134): Homolog of NCBI NO: 14422251 NR Description: 3-oxyacyl-[acyl carrier protein] reductase
  misc_feature (50)..(134): Homolog of NCBI NO: 14422247 NR Description: 3-oxyacyl-[acyl-carrier protein] reductase
  misc_feature (34)..(134): Homolog of NCBI NO: 14422249 NR Description: 3-oxyacyl-[acyl carrier protein] reductase
  misc_feature (70)..(134): Homolog of NCBI NO: 13096234 NR Description: Chain A, The X-Ray Structure Of Beta-Keto Acyl
  misc_feature (39)..(134): Homolog of NCBI NO: 18395461 NR Description: putative 3-oxoacyl (acyl-carrier protein) protein id: At1g24360.1, supported by cDNA: gi_13358177, by cDNA: gi_16648892, supported by cDNA: gi_20148324 [Arabidopsis
  misc_feature (39)..(134): Homolog of NCBI NO: 99753 NR Description: 3-oxoacyl-[acyl-carrier-protein] reductase (EC
  misc_feature (66)..(134): Homolog of NCBI NO: 14422253 NR Description: 3-oxyacyl-[acyl carrier protein] reductase
MAAATAAAAALASPAGLSTSLARRGLVSFAPALRPGPDRSSRAVALLGVRTHVTAVDQAIVKGDTKLEGPVVVVTGASRGIGKATALALGKAGCKVLVNYARSSKEAEEVSKEIEASGGQAITFGGDVSKEADV

SEQ ID NO: 9625 - protein, 75 aa, Zea mays subsp. mays
  peptide (1)..(75): Ceres Seq. ID no. 12347400
TPTPPHRPSPPSDPSWPLPQPPPPRSPPRRASPHRWRAAASSASHPRSAPALTAALAPSPSSVYELMSRLLIKPL

SEQ ID NO: 9626 - DNA, 1417 bp, Zea mays subsp. mays
  misc_feature (1)..(1417): Ceres Seq. ID no. 12383227
  misc_feature: MA Experiment ID: 108515 Result: Up-regulated in Transcription
  misc_feature: MA Experiment 108515 PARAMETER Experiment Name: Zm_2mM_SA_P Parameter: Age (day) Value: 8
  misc_feature: MA Experiment 108515 PARAMETER Experiment Name: Zm_2mM_SA_P Parameter: Organism Value: Zea mays
  misc_feature: MA Experiment 108515 PARAMETER Experiment Name: Zm_2mM_SA_P Parameter: Plant Line Value: 35A19
  misc_feature: MA Experiment 108515 PARAMETER Experiment Name: Zm_2mM_SA_P Parameter: Timepoint (hr) Value: 12
  misc_feature: MA Experiment 108515 PARAMETER Experiment Name: Zm_2mM_SA_P Parameter: Tissue Value: Aerial
  misc_feature: MA Experiment 108515 PARAMETER Experiment Name: Zm_2mM_SA_P Parameter: Treatment Value: 2mM SA vs. No Treatment
  misc_feature: MA Experiment ID: 108522 Result: Down-regulated in Transcription
  misc_feature: MA Experiment 108522 PARAMETER Experiment Name: Zm_42deg_Heat_P Parameter: Age (day) Value: 8
  misc_feature: MA Experiment 108522 PARAMETER Experiment Name: Zm_42deg_Heat_P Parameter: Organism Value: Zea mays
  misc_feature: MA Experiment 108522 PARAMETER Experiment Name: Zm_42deg_Heat_P Parameter: Plant Line Value: 35A19
  misc_feature: MA Experiment 108522 PARAMETER Experiment Name: Zm_42deg_Heat_P Parameter: Temperature (deg C) Value: 42 vs. 22
  misc_feature: MA Experiment 108522 PARAMETER Experiment Name: Zm_42deg_Heat_P Parameter: Timepoint (hr) Value: 1
  misc_feature: MA Experiment 108522 PARAMETER Experiment Name: Zm_42deg_Heat_P Parameter: Tissue Value: Aerial
  misc_feature: MA Experiment ID: 108528 Result: Down-regulated in Transcription
  misc_feature: MA Experiment 108528 PARAMETER Experiment Name: Zm_Imbibed_Seeds_P Parameter: Age (day) Value: 5 vs. 2
  misc_feature: MA Experiment 108528 PARAMETER Experiment Name: Zm_Imbibed_Seeds_P Parameter: Organism Value: Zea mays
  misc_feature: MA Experiment 108528 PARAMETER Experiment Name: Zm_Imbibed_Seeds_P Parameter: Plant Line Value: 35A19
  misc_feature: MA Experiment 108528 PARAMETER Experiment Name: Zm_Imbibed_Seeds_P Parameter: Tissue Value: Aerial vs. Embryo
  misc_feature: MA Experiment ID: 108529 Result: Down-regulated in Transcription
  misc_feature: MA Experiment 108529 PARAMETER Experiment Name: Zm_Imbibed_Seeds_P Parameter: Age (day) Value: 5 vs. 2
  misc_feature: MA Experiment 108529 PARAMETER Experiment Name: Zm_Imbibed_Seeds_P Parameter: Organism Value: Zea mays
  misc_feature: MA Experiment 108529 PARAMETER Experiment Name: Zm_Imbibed_Seeds_P Parameter: Plant Line Value: 35A19
  misc_feature: MA Experiment 108529 PARAMETER Experiment Name: Zm_Imbibed_Seeds_P Parameter: Tissue Value: Roots vs. Embryo
  misc_feature: MA Experiment ID: 108530 Result: Down-regulated in Transcription
  misc_feature: MA Experiment 108530 PARAMETER Experiment Name: Zm_Imbibed_Seeds_P Parameter: Age (day) Value: 6 vs. 2
  misc_feature: MA Experiment 108530 PARAMETER Experiment Name: Zm_Imbibed_Seeds_P Parameter: Organism Value: Zea mays
  misc_feature: MA Experiment 108530 PARAMETER Experiment Name: Zm_Imbibed_Seeds_P Parameter: Plant Line Value: 35A19
  misc_feature: MA Experiment 108530 PARAMETER Experiment Name: Zm_Imbibed_Seeds_P Parameter: Tissue Value: Aerial vs. Embryo
  misc_feature: MA Experiment ID: 108533 Result: Down-regulated in Transcription
  misc_feature: MA Experiment 108533 PARAMETER Experiment Name: Zm_4deg_Cold_P Parameter: Age (hr) Value: 8
  misc_feature: MA Experiment 108533 PARAMETER Experiment Name: Zm_4deg_Cold_P Parameter: Organism Value: Zea mays
  misc_feature: MA Experiment 108533 PARAMETER Experiment Name: Zm_4deg_Cold_P Parameter: Plant Line Value: 35A19
  misc_feature: MA Experiment 108533 PARAMETER Experiment Name: Zm_4deg_Cold_P Parameter: Temperature (deg C) Value: 4 vs. 22
  misc_feature: MA Experiment 108533 PARAMETER Experiment Name: Zm_4deg_Cold_P Parameter: Timepoint (hr) Value: 1
  misc_feature: MA Experiment 108533 PARAMETER Experiment Name: Zm_4deg_Cold_P Parameter: Tissue Value: Aerial
  misc_feature: MA Experiment ID: 108534 Result: Down-regulated in Transcription
  misc_feature: MA Experiment 108534 PARAMETER Experiment Name: Zm_4deg_Cold_P Parameter: Age (hr) Value: 8
  misc_feature: MA Experiment 108534 PARAMETER Experiment Name: Zm_4deg_Cold_P Parameter: Organism Value: Zea mays
  misc_feature: MA Experiment 108534 PARAMETER Experiment Name: Zm_4deg_Cold_P Parameter: Plant Line Value: 35A19
  misc_feature: MA Experiment 108534 PARAMETER Experiment Name: Zm_4deg_Cold_P Parameter: Temperature (deg C) Value: 4 vs. 22
  misc_feature: MA Experiment 108534 PARAMETER Experiment Name: Zm_4deg_Cold_P Parameter: Timepoint (hr) Value: 6
  misc_feature: MA Experiment 108534 PARAMETER Experiment Name: Zm_4deg_Cold_P Parameter: Tissue Value: Aerial
  misc_feature: MA Experiment ID: 108543 Result: Down-regulated in Transcription
  misc_feature: MA Experiment ID: 108544 Result: Down-regulated in Transcription
  misc_feature: MA Experiment ID: 108546 Result: Down-regulated in Transcription
  misc_feature: MA Experiment 108546 PARAMETER Experiment Name: Zm_Imbibed_Seeds_P Parameter: Age (day) Value: 3 vs. 2
  misc_feature: MA Experiment 108546 PARAMETER Experiment Name: Zm_Imbibed_Seeds_P Parameter: Organism Value: Zea mays
  misc_feature: MA Experiment 108546 PARAMETER Experiment Name: Zm_Imbibed_Seeds_P Parameter: Plant Line Value: 35A19
  misc_feature: MA Experiment 108546 PARAMETER Experiment Name: Zm_Imbibed_Seeds_P Parameter: Tissue Value: Roots vs. Embryo
  misc_feature: MA Experiment ID: 108547 Result: Down-regulated in Transcription
  misc_feature: MA Experiment 108547 PARAMETER Experiment Name: Zm_Imbibed_Seeds_P Parameter: Age (day) Value: 4 vs. 2
  misc_feature: MA Experiment 108547 PARAMETER Experiment Name: Zm_Imbibed_Seeds_P Parameter: Organism Value: Zea mays
  misc_feature: MA Experiment 108547 PARAMETER Experiment Name: Zm_Imbibed_Seeds_P Parameter: Plant Line Value: 35A19
  misc_feature: MA Experiment 108547 PARAMETER Experiment Name: Zm_Imbibed_Seeds_P Parameter: Tissue Value: Aerial vs. Embryo
  misc_feature: MA Experiment ID: 108556 Result: Down-regulated in Transcription
  misc_feature: MA Experiment 108556 PARAMETER Experiment Name: Zm_Drought_P Parameter: Age (day) Value: 9
  misc_feature: MA Experiment 108556 PARAMETER Experiment Name: Zm_Drought_P Parameter: Organism Value: Zea mays
  misc_feature: MA Experiment 108556 PARAMETER Experiment Name: Zm_Drought_P Parameter: Plant Line Value: 35A19
  misc_feature: MA Experiment 108556 PARAMETER Experiment Name: Zm_Drought_P Parameter: Timepoint (hr) Value: 24
  misc_feature: MA Experiment 108556 PARAMETER Experiment Name: Zm_Drought_P Parameter: Tissue Value: Aerial
  misc_feature: MA Experiment 108556 PARAMETER Experiment Name: Zm_Drought_P Parameter: Treatment Value: Drought vs. No Drought
  misc_feature: MA Experiment ID: 108559 Result: Up-regulated in Transcription
  misc_feature: MA Experiment 108559 PARAMETER Experiment Name: Zm_5mM_NO_P Parameter: Age (day) Value: 8
  misc_feature: MA Experiment 108559 PARAMETER Experiment Name: Zm_5mM_NO_P Parameter: Organism Value: Zea mays
  misc_feature: MA Experiment 108559 PARAMETER Experiment Name: Zm_5mM_NO_P Parameter: Plant Line Value: 35A19
  misc_feature: MA Experiment 108559 PARAMETER Experiment Name: Zm_5mM_NO_P Parameter: Timepoint (hr) Value: 12
  misc_feature: MA Experiment 108559 PARAMETER Experiment Name: Zm_5mM_NO_P Parameter: Tissue Value: Aerial
  misc_feature: MA Experiment 108559 PARAMETER Experiment Name: Zm_5mM_NO_P Parameter: Treatment Value: 5mM NO vs. No Treatment
  misc_feature: MA Experiment ID: 108597 Result: Down-regulated in Transcription
  misc_feature: MA Experiment 108597 PARAMETER Experiment Name: Zm_100uM_ABA_P Parameter: Age (day) Value: 9
  misc_feature: MA Experiment 108597 PARAMETER Experiment Name: Zm_100uM_ABA_P Parameter: Organism Value: Zea mays
  misc_feature: MA Experiment 108597 PARAMETER Experiment Name: Zm_100uM_ABA_P Parameter: Plant Line Value: 35A19
  misc_feature: MA Experiment 108597 PARAMETER Experiment Name: Zm_100uM_ABA_P Parameter: Timepoint (hr) Value: 24
  misc_feature: MA Experiment 108597 PARAMETER Experiment Name: Zm_100uM_ABA_P Parameter: Tissue Value: Aerial
  misc_feature: MA Experiment 108597 PARAMETER Experiment Name: Zm_100uM_ABA_P Parameter: Treatment Value: 100uM ABA vs. No Treatment
  misc_feature: MA Experiment ID: 108687 Result: Up-regulated in Transcription
  misc_feature: MA Experiment 108687 PARAMETER Experiment Name: Zm_Embryos-Flowers__P Parameter: Tissue Value: Embryo vs. Aerial+
  misc_feature: MA Experiment ID: 108688 Result: Down-regulated in Transcription
  misc_feature: MA Experiment 108688 PARAMETER Experiment Name: Zm_Embryos-Flowers__P Parameter: Tissue Value: Immature Flowers vs. Aerial+
  misc_feature: MA Experiment ID: 108689 Result: Down-regulated in Transcription
  misc_feature: MA Experiment 108689 PARAMETER Experiment Name: Zm_Drought_Roots_P Parameter: Age (day) Value: 9
  misc_feature: MA Experiment 108689 PARAMETER Experiment Name: Zm_Drought_Roots_P Parameter: Organism Value: Zea mays
  misc_feature: MA Experiment 108689 PARAMETER Experiment Name: Zm_Drought_Roots_P Parameter: Plant Line Value: 35A19
  misc_feature: MA Experiment 108689 PARAMETER Experiment Name: Zm_Drought_Roots_P Parameter: Timepoint (hr) Value: 24
  misc_feature: MA Experiment 108689 PARAMETER Experiment Name: Zm_Drought_Roots_P Parameter: Tissue Value: Roots
  misc_feature: MA Experiment 108689 PARAMETER Experiment Name: Zm_Drought_Roots_P Parameter: Treatment Value: Drought vs. No Drought
  misc_feature: MA Experiment ID: 20000487 Result: Down-regulated in Transcription
  misc_feature: MA Experiment 20000487 PARAMETER Experiment Name: Zm_50mM_NH4NO3_L_to_H_P Parameter: Organism Value: Zea mays
  misc_feature: MA Experiment 20000487 PARAMETER Experiment Name: Zm_50mM_NH4NO3_L_to_H_P Parameter: Timepoint (hr) Value: 4
  misc_feature: MA Experiment 20000487 PARAMETER Experiment Name: Zm_50mM_NH4NO3_L_to_H_P Parameter: Tissue Value: Leaves
  misc_feature: MA Experiment 20000487 PARAMETER Experiment Name: Zm_50mM_NH4NO3_L_to_H_P Parameter: Treatment Value: 50mM NH4NO3 vs. 100mM Mannitol
  misc_feature: MA Experiment ID: 20000492 Result: Up-regulated in Transcription
  misc_feature: MA Experiment 20000492 PARAMETER Experiment Name: Zm_Hybrid_Seed_Dev_P Parameter: DAP Value: 12
  misc_feature: MA Experiment 20000492 PARAMETER Experiment Name: Zm_Hybrid_Seed_Dev_P Parameter: Organism Value: Zea mays
  misc_feature: MA Experiment 20000492 PARAMETER Experiment Name: Zm_Hybrid_Seed_Dev_P Parameter: Plant Line Value: 35A19
  misc_feature: MA Experiment 20000492 PARAMETER Experiment Name: Zm_Hybrid_Seed_Dev_P Parameter: Tissue Value: Fert Kernel vs. Unfert Floret
  misc_feature: MA Experiment ID: 20000535 Result: Up-regulated in Transcription
  misc_feature: MA Experiment 20000535 PARAMETER Experiment Name: Zm_Hybrid_Seed_Dev_P Parameter: DAP Value: 30 vs. 12
  misc_feature: MA Experiment 20000535 PARAMETER Experiment Name: Zm_Hybrid_Seed_Dev_P Parameter: Organism Value: Zea mays
  misc_feature: MA Experiment 20000535 PARAMETER Experiment Name: Zm_Hybrid_Seed_Dev_P Parameter: Plant Line Value: 35A19
  misc_feature: MA Experiment 20000535 PARAMETER Experiment Name: Zm_Hybrid_Seed_Dev_P Parameter: Tissue Value: Embryo vs. Unfert Floret
  misc_feature: MA Experiment ID: 20000626 Result: Up-regulated in Transcription
  misc_feature: MA Experiment 20000626 PARAMETER Experiment Name: Zm_Herbicide-Treatments_P Parameter: Timepoint (hr) Value: 12
  misc_feature: MA Experiment 20000626 PARAMETER Experiment Name: Zm_Herbicide-Treatments_P Parameter: Tissue Value: Aerial
  misc_feature: MA Experiment 20000626 PARAMETER Experiment Name: Zm_Herbicide-Treatments_P Parameter: Treatment Value: Roundup vs. No Treatment
  misc_feature: MA Experiment ID: 20000629 Result: Up-regulated in Transcription
  misc_feature: MA Experiment 20000629 PARAMETER Experiment Name: Zm_Herbicide-Treatments_P Parameter: Timepoint (hr) Value: 12
  misc_feature: MA Experiment 20000629 PARAMETER Experiment Name: Zm_Herbicide-Treatments_P Parameter: Tissue Value: Aerial
  misc_feature: MA Experiment 20000629 PARAMETER Experiment Name: Zm_Herbicide-Treatments_P Parameter: Treatment Value: Trimec vs. No Treatment
gcacgagaccattacctagaacatcctaatcgaaaaaggcaattgcaagcagcacaaggctccaaagatgcaccgctccttcctcctcgtctctgcactcgtagccaccgcgctttccaccgacaccaccgttgccgctgcccagagccagaggcagaggtcatgggccgaactcagcgggcgggacaactgggacgggctcctggacccgctcgacggcgacctccggcgcgccgtcatccggtacgggaagctggcgcaggcgacgtcgtacgcgttcatcggcgacccggcgtcgccgtacgcgggcgcgtcgcggtacgcccccggcgcgttcctccgcagggcgcaggcgcccgacccggacgcgtacaacgtgacgaggttcctgtacgcgacgtcgagcgcgcgcgtccccggccagttcatcacgcggccggcgccgccgggggcgtggagcgccgagtccaactggatggggtacgtcggccgtggccacggacgccggcgtcgcgaggcctggggaggcgggacatcgtggtggcgtggcgcgggaccaagcgcgccgtggagtgggccaacgacctggacatcacgctggtgccggcggcgggcgtcgtcgggcctggccccgggtggtcgcagccggcggtgcaccggggtttcttgtccgtgtacgcgtcgaggaactccacgtcgcggttcaacaagcaaagcgccagagagcaggtgttggcctagattagaaggctattggacgcgtacaagggcgagaactgcagcatcacgctaaccggccacagcctgggcgcggcgctctccacgctcaccgccatcgacatcgtcgccaacggcctcaacgtccggggccccaacaacgacacggtccccgtcgccgccatcgtcttcggcagcccccgcgtgggcgacgaccagttcaagaaggcgttcgactcggcgcccggcgcccggctgctccgggtccggaacgcgcccgacgtcgtgcccaccgtcctgcccaacgccttctacaaggacgtcggcgtggagctgctgctggacacgcgcaagtcgccgcacctcaagaggcccggcccgggccccgccgcctggcacaacctcgagtgctacctgcacggcgtcgcgggcacgcagggcgccggcgacgccgccgggttcagcctggaggtggaccgcgacgtcgcgctggtgaacaaggaggtggacgcgctcagcgacgactaccccgtgccggcggcctggtgggtggaggggaacaagggcatgaccagggacgccagcggacgctgggttttgcaggatcatgaggagggtaacctcgctatgtgatgattttgataacttcattaaagatggttattaatgaattaataatacgaaagcaagagttttctcc

SEQ ID NO: 9627 - protein, 246 aa, Zea mays subsp. mays
  peptide (1)..(246): Ceres Seq. ID no. 12383228
  misc_feature (131)..(246): Homolog of NCBI NO: 34911842 NR Description: lipase-like protein [Oryza sativa (japonica
  misc_feature (174)..(246): Homolog of NCBI NO: 34911830 NR Description: lipase-like protein [Oryza sativa (japonica
  misc_feature (174)..(246): Homolog of NCBI NO: 34911832 NR Description: lipase-like protein [Oryza sativa (japonica
  misc_feature (174)..(246): Homolog of NCBI NO: 15233922 NR Description: lipase-like protein; protein id: At4g18550.1
  misc_feature (170)..(246): Homolog of NCBI NO: 34910484 NR Description: putative lipase [Oryza sativa (japonica
  misc_feature (174)..(246): Homolog of NCBI NO: 15221426 NR Description: lipase-like protein; protein id: At1g06250.1, by cDNA: 12912. [Arabidopsis thaliana] >gi|25406908|pir||C86198
  misc_feature (174)..(246): Homolog of NCBI NO: 21537306 NR Description: lipase-like protein [Arabidopsis thaliana]
  misc_feature (174)..(246): Homolog of NCBI NO: 1527001 NR Description: Ipomoea nil Pn47p
  misc_feature (174)..(246): Homolog of NCBI NO: 30679836 NR Description: lipase (class 3) family [Arabidopsis thaliana]
  misc_feature (174)..(246): Homolog of NCBI NO: 15224613 NR Description: putative lipase; protein id: At2g31100.1
ARDHYLEHPNRKRQLQAAQGSKDAPLLPPRLCTRSHRAFHRHHRCRCPEPEAEVMGRTQRAGQLGRAPGPARRRPPARRHPVREAGAGDVVRVHRRPGVAVRGRVAVRPRRVPPQGAGARPGRVQRDEVPVRDVERARPRPVHHAAGAAGGVERRVQLDGVRRPWPRTPASRGLGRRDIVVAWRGTKRAVEWANDLDITLVPAAGVVGPGPGWSQPAVHRGFLSVYASRNSTSRFNKQSAREQVLA

SEQ ID NO: 9628 - protein, 241 aa, Zea mays subsp. mays
  peptide (1)..(241): Ceres Seq. ID no. 12383229
  misc_feature (170)..(241): Pfam Name: Equine herpesvirus glycoprotein gp2 Pfam Description: Equine herpesvirus glycoprotein gp2
  misc_feature (31)..(140): Homolog of NCBI NO: 34911830 NR Description: lipase-like protein [Oryza sativa (japonica
  misc_feature (33)..(140): Homolog of NCBI NO: 34911832 NR Description: lipase-like protein [Oryza sativa (japonica
  misc_feature (31)..(140): Homolog of NCBI NO: 15233922 NR Description: lipase-like protein; protein id: At4g18550.1
  misc_feature (31)..(168): Homolog of NCBI NO: 34910484 NR Description: putative lipase [Oryza sativa (japonica
  misc_feature (31)..(140): Homolog of NCBI NO: 15221426 NR Description: lipase-like protein; protein id: At1g06250.1, by cDNA: 12912. [Arabidopsis thaliana] >gi|25406908|pir||C86198
  misc_feature (31)..(140): Homolog of NCBI NO: 21537306 NR Description: lipase-like protein [Arabidopsis thaliana]
  misc_feature (31)..(174): Homolog of NCBI NO: 1527001 NR Description: Ipomoea nil Pn47p
  misc_feature (24)..(140): Homolog of NCBI NO: 30679836 NR Description: lipase (class 3) family [Arabidopsis thaliana]
  misc_feature (33)..(65): Homolog of NCBI NO: 15224613 NR Description: putative lipase; protein id: At2g31100.1
  misc_feature (26)..(168): Homolog of NCBI NO: 18402385 NR Description: putative lipase; protein id: At2g30550.1, by cDNA: 207043., supported by cDNA: gi_20268777 [Arabidopsis >gi|20198327|gb|AAB63082.2| putative lipase [Arabidopsis
MHRSFLLVSALVATALSTDTTVAAAQSQRQRSWAELSGRDNWDGLLDPLDGDLRRAVIRYGKLAQATSYAFIGDPASPYAGASRYAPGAFLRRAQAPDPDAYNVTRFLYATSSARVPGQFITRPAPPGAWSAESNWMGYVGRGHGRRRREAWGGGTSWWRGAGPSAPWSGPTTWTSRWCRRRASSGLAPGGRSRRCTGVSCPCTRRGTPRRGSTSKAPESRCWPRLEGYWTRTRARTAASR

SEQ ID NO: 9629 - protein, 192 aa, Zea mays subsp. mays
  peptide (1)..(192): Ceres Seq. ID no. 12383230
  misc_feature (77)..(192): Homolog of NCBI NO: 34911842 NR Description: lipase-like protein [Oryza sativa (japonica
  misc_feature (120)..(192): Homolog of NCBI NO: 34911830 NR Description: lipase-like protein [Oryza sativa (japonica
  misc_feature (120)..(192): Homolog of NCBI NO: 34911832 NR Description: lipase-like protein [Oryza sativa (japonica
  misc_feature (120)..(192): Homolog of NCBI NO: 15233922 NR Description: lipase-like protein; protein id: At4g18550.1
  misc_feature (116)..(192): Homolog of NCBI NO: 34910484 NR Description: putative lipase [Oryza sativa (japonica
  misc_feature (120)..(192): Homolog of NCBI NO: 15221426 NR Description: lipase-like protein; protein id: At1g06250.1, by cDNA: 12912. [Arabidopsis thaliana] >gi|25406908|pir||C86198
  misc_feature (120)..(192): Homolog of NCBI NO: 21537306 NR Description: lipase-like protein [Arabidopsis thaliana]
  misc_feature (120)..(192): Homolog of NCBI NO: 1527001 NR Description: Ipomoea nil Pn47p
  misc_feature (120)..(192): Homolog of NCBI NO: 30679836 NR Description: lipase (class 3) family [Arabidopsis thaliana]
  misc_feature (120)..(192): Homolog of NCBI NO: 15224613 NR Description: putative lipase; protein id: At2g31100.1
MGRTQRAGQLGRAPGPARRRPPARRHPVREAGAGDVVRVHRRPGVAVRGRVAVRPRRVPPQGAGARPGRVQRDEVPVRDVERARPRPVHHAAGAAGGVERRVQLDGVRRPWPRTPASRGLGRRDIVVAWRGTKRAVEWANDLDITLVPAAGVVGPGPGWSQPAVHRGFLSVYASRNSTSRFNKQSAREQVLA

SEQ ID NO: 9630 - DNA, 1672 bp, Zea mays subsp. mays
  misc_feature (1)..(1672): Ceres Seq. ID no. 12354367
  misc_feature: MA Experiment ID: 108543 Result: Up-regulated in Transcription
  misc_feature: MA Experiment ID: 20000478 Result: Down-regulated in Transcription
  misc_feature: MA Experiment 20000478 PARAMETER Experiment Name: Zm_5mM_SA_P Parameter: Age (day) Value: 11
  misc_feature: MA Experiment 20000478 PARAMETER Experiment Name: Zm_5mM_SA_P Parameter: Organism Value: Zea mays
  misc_feature: MA Experiment 20000478 PARAMETER Experiment Name: Zm_5mM_SA_P Parameter: Plant Line Value: 35A19
  misc_feature: MA Experiment 20000478 PARAMETER Experiment Name: Zm_5mM_SA_P Parameter: Timepoint (hr) Value: 72
  misc_feature: MA Experiment 20000478 PARAMETER Experiment Name: Zm_5mM_SA_P Parameter: Tissue Value: Aerial
  misc_feature: MA Experiment 20000478 PARAMETER Experiment Name: Zm_5mM_SA_P Parameter: Treatment Value: 5mM SA vs. No Treatment
  misc_feature: MA Experiment ID: 20000480 Result: Down-regulated in Transcription
  misc_feature: MA Experiment 20000480 PARAMETER Experiment Name: Zm_Drought_P Parameter: Age (day) Value: 11
  misc_feature: MA Experiment 20000480 PARAMETER Experiment Name: Zm_Drought_P Parameter: Organism Value: Zea mays
  misc_feature: MA Experiment 20000480 PARAMETER Experiment Name: Zm_Drought_P Parameter: Plant Line Value: 35A19
  misc_feature: MA Experiment 20000480 PARAMETER Experiment Name: Zm_Drought_P Parameter: Timepoint (hr) Value: 72
  misc_feature: MA Experiment 20000480 PARAMETER Experiment Name: Zm_Drought_P Parameter: Tissue Value: Aerial
  misc_feature: MA Experiment 20000480 PARAMETER Experiment Name: Zm_Drought_P Parameter: Treatment Value: Drought vs. No Drought
  misc_feature: MA Experiment ID: 20000533 Result: Down-regulated in Transcription
  misc_feature: MA Experiment 20000533 PARAMETER Experiment Name: Zm_0.001percent_MeJA_P Parameter: Age (day) Value: 11
  misc_feature: MA Experiment 20000533 PARAMETER Experiment Name: Zm_0.001percent_MeJA_P Parameter: Organism Value: Zea mays
  misc_feature: MA Experiment 20000533 PARAMETER Experiment Name: Zm_0.001percent_MeJA_P Parameter: Plant Line Value: 35A19
  misc_feature: MA Experiment 20000533 PARAMETER Experiment Name: Zm_0.001percent_MeJA_P Parameter: Timepoint (hr) Value: 72
  misc_feature: MA Experiment 20000533 PARAMETER Experiment Name: Zm_0.001percent_MeJA_P Parameter: Tissue Value: Aerial
  misc_feature: MA Experiment 20000533 PARAMETER Experiment Name: Zm_0.001percent_MeJA_P Parameter: Treatment Value: 0.001percent MeJA vs. No Treatment
acactcccactcggccactcccacctgtaggttcacgggaggcgaggaccttgcccccctgcattcttcccgtatcgcggaccgatcctcgccgcgggaggcgagcggagcggggcgtttctgcgggggagaagcgcgtccctgcaatttctgagagaggggaggcggcgagtggaaaagagcagacgttgctatcctatcttgctgacacagcggcgttgtggcgaggcgcatggcgagggcgcgcggtggcgccgcgtggtgggtgctggcagcggcgtgggtgctgtgggcggcggcggctgcggcggaggcagaggccaggtcgccgtcggcgaggagggtgcaccggcacctcaagcgcctcaacaagccggccgtcaagagcatcgagagtccagatggagacatcatcgactgcgtgcatatctcccaccagccagcctttgatcatcctctcctcaagaaccacacaatacagtttaggccggcgtaccaccctgaaggtctatacgatgataccaagagcagcataggctcaaacaatgctggcgagaggccgatgctccagatgtggcatcgaaatggcaggtgccccgagggcacggttccaatcaggagaaccaagaaggacgacctgcttcgagctagctccgtgaggcggtatggcaggaagcggcacactgctccgaacccactgtctgttgatcccaacatgctcagcgagggtggccaccaacacgccatcgcgtacgtccagggcgacaagtactatggtgcaaaggccaccattaatgtgtgggagcccaagattcagcaggctaacgaatttagcctgtcccagctctggatcttggggggttcatttggggaggatctcaacagcatagaggctggctggcaggttagccctgacctctatggagacaacaacaccaggctgttcacatattggactagtgatgcataccaagccacaggttgctacaacatgttgtgctctggtttcattcagataaacagcgaggttgccatgggggctagtatcttccccatctcgaactacgcgggctcccaatatgatattagcatcctgatctggaaggaccccaaggaaggcaactggtggatgcagtttggcaaggaatacgtcctgggctactggccgtccttcctcttctcctacctcgcggacagcgcgtcgatgatcgaatggggcggggaggtggtgaactcggagcccgacggcacgcacacatcgacccagatgggcagcgggcacttcccggaggaagggttcagcaaggcgagctacttcaagaacgttcaggtggtgtacagcagcaaccagctcagcgcccccaagggcgtaggcaccttcaccgagcagtccaactgctacgacgtgcagaacggtaacaatggggactggggcacctacttctactacggcggccctggcaagaactcgaactgcccgtgactggtgcttctaatgtgtagtgtgaagtgccgtcaccactagcaaaaaaatgtaacccaagcgttcaggttcgcttatacagcgtcaatctgcatctccttgttcagtcttaggtagtgtgtaacatgtgcatgtgctctctagaccctaatgttttcttcttcttttcattgtattttcttcttgtgc

SEQ ID NO: 9631 - protein, 416 aa, Zea mays subsp. mays
  peptide (1)..(416): Ceres Seq. ID no. 12354368
  misc_feature (180)..(374): Pfam Name: Arabidopsis proteins of unknown function Pfam Description: Arabidopsis proteins of unknown function
  misc_feature (17)..(416): Homolog of NCBI NO: 18400044 NR Description: expressed protein; protein id: At3g13510.1, by cDNA: 37810., supported by cDNA: gi_18700164 [Arabidopsis >gi|9280303|dbj|BAB01758.1| gb|AAC16072.1~gene_id:MRP15.17~strong
  misc_feature (17)..(416): Homolog of NCBI NO: 21593294 NR Description: putative carboxyl-terminal peptidase [Arabidopsis
  misc_feature (1)..(416): Homolog of NCBI NO: 27311623 NR Description: unknown protein [Arabidopsis thaliana]
  misc_feature (8)..(416): Homolog of NCBI NO: 34393299 NR Description: putative DD1A protein [Oryza sativa (japonica
  misc_feature (2)..(416): Homolog of NCBI NO: 34393554 NR Description: putative carboxyl-terminal proteinase [Oryza
  misc_feature (1)..(416): Homolog of NCBI NO: 15222707 NR Description: unknown protein; protein id: At1g55360.1
  misc_feature (2)..(416): Homolog of NCBI NO: 30103019 NR Description: unknown protein [Oryza sativa (japonica
  misc_feature (5)..(415): Homolog of NCBI NO: 15241244 NR Description: putative protein; protein id: At5g56530.1, by cDNA: gi_17381169 [Arabidopsis thaliana]
  misc_feature (37)..(416): Homolog of NCBI NO: 18406483 NR Description: expressed protein; protein id: At2g44210.1, by cDNA: 39057., supported by cDNA: gi_15081718 [Arabidopsis
  misc_feature (36)..(416): Homolog of NCBI NO: 15220207 NR Description: putative carboxyl-terminal peptidase; protein id:
MARARGGAAWWVLAAAWVLWAAAAAAEAEARSPSARRVHRHLKRLNKPAVKSIESPDGDIIDCVHISHQPAFDHPLLKNHTIQFRPAYHPEGLYDDTKSSIGSNNAGERPMLQMWHRNGRCPEGTVPIRRTKKDDLLRASSVRRYGRKRHTAPNPLSVDPNMLSEGGHQHAIAYVQGDKYYGAKATINVWEPKIQQANEFSLSQLWILGGSFGEDLNSIEAGWQVSPDLYGDNNTRLFTYWTSDAYQATGCYNMLCSGFIQINSEVAMGASIFPISNYAGSQYDISILIWKDPKEGNWWMQFGKEYVLGYWPSFLFSYLADSASMIEWGGEVVNSEPDGTHTSTQMGSGHFPEEGFSKASYFKNVQVVYSSNQLSAPKGVGTFTEQSNCYDVQNGNNGDWGTYFYYGGPGKNSNCP

SEQ ID NO: 9632 - protein, 306 aa, Zea mays subsp. mays
  peptide (1)..(306): Ceres Seq. ID no. 12354369
  misc_feature (70)..(264): Pfam Name: Arabidopsis proteins of unknown function Pfam Description: Arabidopsis proteins of unknown function
  misc_feature (1)..(306): Homolog of NCBI NO: 34393299 NR Description: putative DD1A protein [Oryza sativa (japonica
  misc_feature (1)..(306): Homolog of NCBI NO: 30103019 NR Description: unknown protein [Oryza sativa (japonica
  misc_feature (1)..(306): Homolog of NCBI NO: 34393554 NR Description: putative carboxyl-terminal proteinase [Oryza
  misc_feature (1)..(306): Homolog of NCBI NO: 15222707 NR Description: unknown protein; protein id: At1g55360.1
  misc_feature (1)..(306): Homolog of NCBI NO: 18400044 NR Description: expressed protein; protein id: At3g13510.1, by cDNA: 37810., supported by cDNA: gi_18700164 [Arabidopsis >gi|9280303|dbj|BAB01758.1| gb|AAC16072.1~gene_id:MRP15.17~strong
  misc_feature (1)..(306): Homolog of NCBI NO: 21593294 NR Description: putative carboxyl-terminal peptidase [Arabidopsis
  misc_feature (1)..(306): Homolog of NCBI NO: 27311623 NR Description: unknown protein [Arabidopsis thaliana]
  misc_feature (1)..(305): Homolog of NCBI NO: 15241244 NR Description: putative protein; protein id: At5g56530.1, by cDNA: gi_17381169 [Arabidopsis thaliana]
  misc_feature (1)..(306): Homolog of NCBI NO: 18406483 NR Description: expressed protein; protein id: At2g44210.1, by cDNA: 39057., supported by cDNA: gi_15081718 [Arabidopsis
  misc_feature (1)..(306): Homolog of NCBI NO: 15220207 NR Description: putative carboxyl-terminal peptidase; protein id:
MLQMWHRNGRCPEGTVPIRRTKKDDLLRASSVRRYGRKRHTAPNPLSVDPNMLSEGGHQHAIAYVQGDKYYGAKATINVWEPKIQQANEFSLSQLWILGGSFGEDLNSIEAGWQVSPDLYGDNNTRLFTYWTSDAYQATGCYNMLCSGFIQINSEVAMGASIFPISNYAGSQYDISILIWKDPKEGNWWMQFGKEYVLGYWPSFLFSYLADSASMIEWGGEVVNSEPDGTHTSTQMGSGHFPEEGFSKASYFKNVQVVYSSNQLSAPKGVGTFTEQSNCYDVQNGNNGDWGTYFYYGGPGKNSNCP

SEQ ID NO: 9633 - protein, 303 aa, Zea mays subsp. mays
  peptide (1)..(303): Ceres Seq. ID no. 12354370
  misc_feature (67)..(261): Pfam Name: Arabidopsis proteins of unknown function Pfam Description: Arabidopsis proteins of unknown function
  misc_feature (1)..(303): Homolog of NCBI NO: 34393299 NR Description: putative DD1A protein [Oryza sativa (japonica
  misc_feature (1)..(303): Homolog of NCBI NO: 30103019 NR Description: unknown protein [Oryza sativa (japonica
  misc_feature (1)..(303): Homolog of NCBI NO: 34393554 NR Description: putative carboxyl-terminal proteinase [Oryza
  misc_feature (1)..(303): Homolog of NCBI NO: 15222707 NR Description: unknown protein; protein id: At1g55360.1
  misc_feature (1)..(303): Homolog of NCBI NO: 18400044 NR Description: expressed protein; protein id: At3g13510.1, by cDNA: 37810., supported by cDNA: gi_18700164 [Arabidopsis >gi|9280303|dbj|BAB01758.1| gb|AAC16072.1~gene_id:MRP15.17~strong
  misc_feature (1)..(303): Homolog of NCBI NO: 21593294 NR Description: putative carboxyl-terminal peptidase [Arabidopsis
  misc_feature (1)..(303): Homolog of NCBI NO: 27311623 NR Description: unknown protein [Arabidopsis thaliana]
  misc_feature (1)..(302): Homolog of NCBI NO: 15241244 NR Description: putative protein; protein id: At5g56530.1, by cDNA: gi_17381169 [Arabidopsis thaliana]
  misc_feature (1)..(303): Homolog of NCBI NO: 18406483 NR Description: expressed protein; protein id: At2g44210.1, by cDNA: 39057., supported by cDNA: gi_15081718 [Arabidopsis
  misc_feature (1)..(303): Homolog of NCBI NO: 15220207 NR Description: putative carboxyl-terminal peptidase; protein id:
MWHRNGRCPEGTVPIRRTKKDDLLRASSVRRYGRKRHTAPNPLSVDPNMLSEGGHQHAIAYVQGDKYYGAKATINVWEPKIQQANEFSLSQLWILGGSFGEDLNSIEAGWQVSPDLYGDNNTRLFTYWTSDAYQATGCYNMLCSGFIQINSEVAMGASIFPISNYAGSQYDISILIWKDPKEGNWWMQFGKEYVLGYWPSFLFSYLADSASMIEWGGEVVNSEPDGTHTSTQMGSGHFPEEGFSKASYFKNVQVVYSSNQLSAPKGVGTFTEQSNCYDVQNGNNGDWGTYFYYGGPGKNSNCP

SEQ ID NO: 9634 - DNA, 1255 bp, Zea mays subsp. mays
  misc_feature (1)..(1255): Ceres Seq. ID no. 12415959
  misc_feature: MA Experiment ID: 108504 Result: Up-regulated in Transcription
  misc_feature: MA Experiment 108504 PARAMETER Experiment Name: Zm_Drought_P Parameter: Age (day) Value: 8
  misc_feature: MA Experiment 108504 PARAMETER Experiment Name: Zm_Drought_P Parameter: Organism Value: Zea mays
  misc_feature: MA Experiment 108504 PARAMETER Experiment Name: Zm_Drought_P Parameter: Plant Line Value: 35A19
  misc_feature: MA Experiment 108504 PARAMETER Experiment Name: Zm_Drought_P Parameter: Timepoint (hr) Value: 12
  misc_feature: MA Experiment 108504 PARAMETER Experiment Name: Zm_Drought_P Parameter: Tissue Value: Aerial
  misc_feature: MA Experiment 108504 PARAMETER Experiment Name: Zm_Drought_P Parameter: Treatment Value: Drought vs. No Drought
  misc_feature: MA Experiment ID: 108522 Result: Up-regulated in Transcription
  misc_feature: MA Experiment 108522 PARAMETER Experiment Name: Zm_42deg_Heat_P Parameter: Age (day) Value: 8
  misc_feature: MA Experiment 108522 PARAMETER Experiment Name: Zm_42deg_Heat_P Parameter: Organism Value: Zea mays
  misc_feature: MA Experiment 108522 PARAMETER Experiment Name: Zm_42deg_Heat_P Parameter: Plant Line Value: 35A19
  misc_feature: MA Experiment 108522 PARAMETER Experiment Name: Zm_42deg_Heat_P Parameter: Temperature (deg C) Value: 42 vs. 22
  misc_feature: MA Experiment 108522 PARAMETER Experiment Name: Zm_42deg_Heat_P Parameter: Timepoint (hr) Value: 1
  misc_feature: MA Experiment 108522 PARAMETER Experiment Name: Zm_42deg_Heat_P Parameter: Tissue Value: Aerial
  misc_feature: MA Experiment ID: 108535 Result: Up-regulated in Transcription
  misc_feature: MA Experiment 108535 PARAMETER Experiment Name: Zm_Meristem_P Parameter: Age (day) Value: 8
  misc_feature: MA Experiment 108535 PARAMETER Experiment Name: Zm_Meristem_P Parameter: Organism Value: Zea mays
  misc_feature: MA Experiment 108535 PARAMETER Experiment Name: Zm_Meristem_P Parameter: Plant Line Value: 35A19
  misc_feature: MA Experiment 108535 PARAMETER Experiment Name: Zm_Meristem_P Parameter: Tissue Value: Root Meristem vs. Above Root Meristem
  misc_feature: MA Experiment ID: 108543 Result: Up-regulated in Transcription
  misc_feature: MA Experiment ID: 108547 Result: Down-regulated in Transcription
  misc_feature: MA Experiment 108547 PARAMETER Experiment Name: Zm_Imbibed_Seeds_P Parameter: Age (day) Value: 4 vs. 2
  misc_feature: MA Experiment 108547 PARAMETER Experiment Name: Zm_Imbibed_Seeds_P Parameter: Organism Value: Zea mays
  misc_feature: MA Experiment 108547 PARAMETER Experiment Name: Zm_Imbibed_Seeds_P Parameter: Plant Line Value: 35A19
  misc_feature: MA Experiment 108547 PARAMETER Experiment Name: Zm_Imbibed_Seeds_P Parameter: Tissue Value: Aerial vs. Embryo
  misc_feature: MA Experiment ID: 108556 Result: Up-regulated in Transcription
  misc_feature: MA Experiment 108556 PARAMETER Experiment Name: Zm_Drought_P Parameter: Age (day) Value: 9
  misc_feature: MA Experiment 108556 PARAMETER Experiment Name: Zm_Drought_P Parameter: Organism Value: Zea mays
  misc_feature: MA Experiment 108556 PARAMETER Experiment Name: Zm_Drought_P Parameter: Plant Line Value: 35A19
  misc_feature: MA Experiment 108556 PARAMETER Experiment Name: Zm_Drought_P Parameter: Timepoint (hr) Value: 24
  misc_feature: MA Experiment 108556 PARAMETER Experiment Name: Zm_Drought_P Parameter: Tissue Value: Aerial
  misc_feature: MA Experiment 108556 PARAMETER Experiment Name: Zm_Drought_P Parameter: Treatment Value: Drought vs. No Drought
  misc_feature: MA Experiment ID: 108689 Result: Up-regulated in Transcription
  misc_feature: MA Experiment 108689 PARAMETER Experiment Name: Zm_Drought_Roots_P Parameter: Age (day) Value: 9
  misc_feature: MA Experiment 108689 PARAMETER Experiment Name: Zm_Drought_Roots_P Parameter: Organism Value: Zea mays
  misc_feature: MA Experiment 108689 PARAMETER Experiment Name: Zm_Drought_Roots_P Parameter: Plant Line Value: 35A19
  misc_feature: MA Experiment 108689 PARAMETER Experiment Name: Zm_Drought_Roots_P Parameter: Timepoint (hr) Value: 24
  misc_feature: MA Experiment 108689 PARAMETER Experiment Name: Zm_Drought_Roots_P Parameter: Tissue Value: Roots
  misc_feature: MA Experiment 108689 PARAMETER Experiment Name: Zm_Drought_Roots_P Parameter: Treatment Value: Drought vs. No Drought
  misc_feature: MA Experiment ID: 20000478 Result: Up-regulated in Transcription
  misc_feature: MA Experiment 20000478 PARAMETER Experiment Name: Zm_5mM_SA_P Parameter: Age (day) Value: 11
  misc_feature: MA Experiment 20000478 PARAMETER Experiment Name: Zm_5mM_SA_P Parameter: Organism Value: Zea mays
  misc_feature: MA Experiment 20000478 PARAMETER Experiment Name: Zm_5mM_SA_P Parameter: Plant Line Value: 35A19
  misc_feature: MA Experiment 20000478 PARAMETER Experiment Name: Zm_5mM_SA_P Parameter: Timepoint (hr) Value: 72
  misc_feature: MA Experiment 20000478 PARAMETER Experiment Name: Zm_5mM_SA_P Parameter: Tissue Value: Aerial
  misc_feature: MA Experiment 20000478 PARAMETER Experiment Name: Zm_5mM_SA_P Parameter: Treatment Value: 5mM SA vs. No Treatment
  misc_feature: MA Experiment ID: 20000479 Result: Up-regulated in Transcription
  misc_feature: MA Experiment 20000479 PARAMETER Experiment Name: Zm_Drought_P Parameter: Age (day) Value: 10
  misc_feature: MA Experiment 20000479 PARAMETER Experiment Name: Zm_Drought_P Parameter: Organism Value: Zea mays
  misc_feature: MA Experiment 20000479 PARAMETER Experiment Name: Zm_Drought_P Parameter: Plant Line Value: 35A19
  misc_feature: MA Experiment 20000479 PARAMETER Experiment Name: Zm_Drought_P Parameter: Timepoint (hr) Value: 48
  misc_feature: MA Experiment 20000479 PARAMETER Experiment Name: Zm_Drought_P Parameter: Tissue Value: Aerial
  misc_feature: MA Experiment 20000479 PARAMETER Experiment Name: Zm_Drought_P Parameter: Treatment Value: Drought vs. No Drought
  misc_feature: MA Experiment ID: 20000480 Result: Up-regulated in Transcription
  misc_feature: MA Experiment 20000480 PARAMETER Experiment Name: Zm_Drought_P Parameter: Age (day) Value: 11
  misc_feature: MA Experiment 20000480 PARAMETER Experiment Name: Zm_Drought_P Parameter: Organism Value: Zea mays
  misc_feature: MA Experiment 20000480 PARAMETER Experiment Name: Zm_Drought_P Parameter: Plant Line Value: 35A19
  misc_feature: MA Experiment 20000480 PARAMETER Experiment Name: Zm_Drought_P Parameter: Timepoint (hr) Value: 72
  misc_feature: MA Experiment 20000480 PARAMETER Experiment Name: Zm_Drought_P Parameter: Tissue Value: Aerial
  misc_feature: MA Experiment 20000480 PARAMETER Experiment Name: Zm_Drought_P Parameter: Treatment Value: Drought vs. No Drought
  misc_feature: MA Experiment ID: 20000492 Result: Down-regulated in Transcription
  misc_feature: MA Experiment 20000492 PARAMETER Experiment Name: Zm_Hybrid_Seed_Dev_P Parameter: DAP Value: 12
  misc_feature: MA Experiment 20000492 PARAMETER Experiment Name: Zm_Hybrid_Seed_Dev_P Parameter: Organism Value: Zea mays
  misc_feature: MA Experiment 20000492 PARAMETER Experiment Name: Zm_Hybrid_Seed_Dev_P Parameter: Plant Line Value: 35A19
  misc_feature: MA Experiment 20000492 PARAMETER Experiment Name: Zm_Hybrid_Seed_Dev_P Parameter: Tissue Value: Fert Kernel vs. Unfert Floret
  misc_feature: MA Experiment ID: 20000626 Result: Down-regulated in Transcription
  misc_feature: MA Experiment 20000626 PARAMETER Experiment Name: Zm_Herbicide-Treatments_P Parameter: Timepoint (hr) Value: 12
  misc_feature: MA Experiment 20000626 PARAMETER Experiment Name: Zm_Herbicide-Treatments_P Parameter: Tissue Value: Aerial
  misc_feature: MA Experiment 20000626 PARAMETER Experiment Name: Zm_Herbicide-Treatments_P Parameter: Treatment Value: Roundup vs. No Treatment
  misc_feature: MA Experiment ID: 20000629 Result: Down-regulated in Transcription
  misc_feature: MA Experiment 20000629 PARAMETER Experiment Name: Zm_Herbicide-Treatments_P Parameter: Timepoint (hr) Value: 12
  misc_feature: MA Experiment 20000629 PARAMETER Experiment Name: Zm_Herbicide-Treatments_P Parameter: Tissue Value: Aerial
  misc_feature: MA Experiment 20000629 PARAMETER Experiment Name: Zm_Herbicide-Treatments_P Parameter: Treatment Value: Trimec vs. No Treatment
accctcacttcccctactgcgcgtctcgtctgcactaggattggattgaatccagaaccctctcctgcagcctgcaggttgtcgtcgccctcttcctcctccttcgctgttggctgttactattgcttccgcttccgccgccgcggaaatcaaactaatctgatcgagaccacaccgttccagagagatcccccaaacaaaaaaaagagcacgggatcgaaatggagctcgacggcaagtacagcaaggaccagagcctcaaatgcgaatgcctcctcttcgacctcgatgacacactatacccgttcaactccggcattgctgccgacataaagaagaacatccaagactatatggtgcacaagctcggcgttgacgaggccataagcttggacctatgcgtcctcctctacaagcagtacggaaccaccatggctggcttgagggctgttgggtaccagtttgattacgatgactaccacagctttgttcatgggaggttgtcttatgacaaaatcaagcctgatcctgtgcttaggaacatcctcctcagcttacccattcgcaaacttgtgttcacaaacggtgacagaacacatgcttcaagggccctcaagaggcttggcattgaggattgtttcgaaggagtcgtgtgctttgagacactgaacccgacatctcctcctcctcctgtcccagctcaggaacttgaaatctttgatctaatgaagcatctggctcatccacagcccgcggtgcagctaccaaaatcacctatcctatgcaaaccgtcaagggaggccatgctgcaggctctcaaggtcgcctccattaatccacagacaactatattgttcgatgacagcttcaggaacattgaagctgcaaagcaaattggaatgtgtactgtcctggttggaacatctgagcggaaaaagggtgctgaccatgccttggaaagcctccacaacatgaaggaagcactgccggagctgtgggaggaagctgagaaggatgaagatgtgaggaattcgagcaaagccggaatcgagacatctgtgatcgcgtaatcttttttgttccttggttacaaatgtagccccttctgttttccttggaggacaacacgaggtggtggtgtatgaaaaaagaggagacctcctcaaggggtgggggggactgactgatactacgaccactgatgttacaccccgtaaactattactatccaataagaatgttttcttcttcaact

SEQ ID NO: 9635 - protein, 282 aa, Zea mays subsp. mays; identical to SEQ ID NO: 6740
  peptide (1)..(282): Ceres Seq. ID no. 12415960
  misc_feature (16)..(235): Pfam Name: haloacid dehalogenase-like hydrolase Pfam Description: haloacid dehalogenase-like hydrolase
  misc_feature (1)..(154): Homolog of NCBI NO: 34906034 NR Description: P0518C01.30 [Oryza sativa (japonica
  misc_feature (181)..(282): Homolog of NCBI NO: 34906034 NR Description: P0518C01.30 [Oryza sativa (japonica
  misc_feature (1)..(152): Homolog of NCBI NO: 7406669 NR Description: putative ripening-related protein [Vitis vinifera]
  misc_feature (141)..(282): Homolog of NCBI NO: 7406669 NR Description: putative ripening-related protein [Vitis vinifera]
  misc_feature (1)..(282): Homolog of NCBI NO: 15241720 NR Description: putative protein; protein id: At5g02230.1, by cDNA: 36724. [Arabidopsis thaliana] >gi|11358409|pir||T48244
  misc_feature (1)..(282): Homolog of NCBI NO: 21593165 NR Description: unknown [Arabidopsis thaliana]
  misc_feature (1)..(278): Homolog of NCBI NO: 30697234 NR Description: haloacid dehalogenase-like hydrolase family
  misc_feature (1)..(278): Homolog of NCBI NO: 30697236 NR Description: haloacid dehalogenase-like hydrolase family
  misc_feature (1)..(278): Homolog of NCBI NO: 21618155 NR Description: putative ripening-related protein-like
  misc_feature (14)..(282): Homolog of NCBI NO: 40714684 NR Description: expressed protein [Oryza sativa (japonica

SEQ ID NO: 9636 - protein, 238 aa, Zea mays subsp. mays; identical to SEQ ID NO: 6741
  peptide (1)..(238): Ceres Seq. ID no. 12415961
  misc_feature (1)..(191): Pfam Name: haloacid dehalogenase-like hydrolase Pfam Description: haloacid dehalogenase-like hydrolase
  misc_feature (1)..(110): Homolog of NCBI NO: 34906034 NR Description: P0518C01.30 [Oryza sativa (japonica
  misc_feature (137)..(238): Homolog of NCBI NO: 34906034 NR Description: P0518C01.30 [Oryza sativa (japonica
  misc_feature (1)..(108): Homolog of NCBI NO: 7406669 NR Description: putative ripening-related protein [Vitis vinifera]
  misc_feature (97)..(238): Homolog of NCBI NO: 7406669 NR Description: putative ripening-related protein [Vitis vinifera]
  misc_feature (1)..(238): Homolog of NCBI NO: 15241720 NR Description: putative protein; protein id: At5g02230.1, by cDNA: 36724. [Arabidopsis thaliana] >gi|11358409|pir||T48244
  misc_feature (1)..(238): Homolog of NCBI NO: 21593165 NR Description: unknown [Arabidopsis thaliana]
  misc_feature (1)..(234): Homolog of NCBI NO: 30697234 NR Description: haloacid dehalogenase-like hydrolase family
  misc_feature (1)..(234): Homolog of NCBI NO: 30697236 NR Description: haloacid dehalogenase-like hydrolase family
  misc_feature (1)..(234): Homolog of NCBI NO: 21618155 NR Description: putative ripening-related protein-like
  misc_feature (1)..(238): Homolog of NCBI NO: 40714684 NR Description: expressed protein [Oryza sativa (japonica

SEQ ID NO: 9637 - protein, 212 aa, Zea mays subsp. mays; identical to SEQ ID NO: 6742
  peptide (1)..(212): Ceres Seq. ID no. 12415962
  misc_feature (1)..(165): Pfam Name: haloacid dehalogenase-like hydrolase Pfam Description: haloacid dehalogenase-like hydrolase
  misc_feature (1)..(84): Homolog of NCBI NO: 34906034 NR Description: P0518C01.30 [Oryza sativa (japonica
  misc_feature (111)..(212): Homolog of NCBI NO: 34906034 NR Description: P0518C01.30 [Oryza sativa (japonica
  misc_feature (1)..(82): Homolog of NCBI NO: 7406669 NR Description: putative ripening-related protein [Vitis vinifera]
  misc_feature (71)..(212): Homolog of NCBI NO: 7406669 NR Description: putative ripening-related protein [Vitis vinifera]
  misc_feature (1)..(212): Homolog of NCBI NO: 15241720 NR Description: putative protein; protein id: At5g02230.1, by cDNA: 36724. [Arabidopsis thaliana] >gi|11358409|pir||T48244
  misc_feature (1)..(212): Homolog of NCBI NO: 21593165 NR Description: unknown [Arabidopsis thaliana]
  misc_feature (1)..(208): Homolog of NCBI NO: 30697234 NR Description: haloacid dehalogenase-like hydrolase family
  misc_feature (1)..(208): Homolog of NCBI NO: 30697236 NR Description: haloacid dehalogenase-like hydrolase family
  misc_feature (1)..(208): Homolog of NCBI NO: 21618155 NR Description: putative ripening-related protein-like
  misc_feature (1)..(212): Homolog of NCBI NO: 40714684 NR Description: expressed protein [Oryza sativa (japonica

SEQ ID NO: 9638 - DNA, 1957 bp, Zea mays subsp. mays
  misc_feature (1)..(1957): Ceres Seq. ID no. 13493484
  misc_feature: MA Experiment ID: 108528 Result: Up-regulated in Transcription
  misc_feature: MA Experiment 108528 PARAMETER Experiment Name: Zm_Imbibed_Seeds_P Parameter: Age (day) Value: 5 vs. 2
  misc_feature: MA Experiment 108528 PARAMETER Experiment Name: Zm_Imbibed_Seeds_P Parameter: Organism Value: Zea mays
  misc_feature: MA Experiment 108528 PARAMETER Experiment Name: Zm_Imbibed_Seeds_P Parameter: Plant Line Value: 35A19
  misc_feature: MA Experiment 108528 PARAMETER Experiment Name: Zm_Imbibed_Seeds_P Parameter: Tissue Value: Aerial vs. Embryo
  misc_feature: MA Experiment ID: 108530 Result: Up-regulated in Transcription
  misc_feature: MA Experiment 108530 PARAMETER Experiment Name: Zm_Imbibed_Seeds_P Parameter: Age (day) Value: 6 vs. 2
  misc_feature: MA Experiment 108530 PARAMETER Experiment Name: Zm_Imbibed_Seeds_P Parameter: Organism Value: Zea mays
  misc_feature: MA Experiment 108530 PARAMETER Experiment Name: Zm_Imbibed_Seeds_P Parameter: Plant Line Value: 35A19
  misc_feature: MA Experiment 108530 PARAMETER Experiment Name: Zm_Imbibed_Seeds_P Parameter: Tissue Value: Aerial vs. Embryo
  misc_feature: MA Experiment ID: 108545 Result: Up-regulated in Transcription
  misc_feature: MA Experiment 108545 PARAMETER Experiment Name: Zm_Imbibed_Seeds_P Parameter: Age (day) Value: 3 vs. 2
  misc_feature: MA Experiment 108545 PARAMETER Experiment Name: Zm_Imbibed_Seeds_P Parameter: Organism Value: Zea mays
  misc_feature: MA Experiment 108545 PARAMETER Experiment Name: Zm_Imbibed_Seeds_P Parameter: Plant Line Value: 35A19
  misc_feature: MA Experiment 108545 PARAMETER Experiment Name: Zm_Imbibed_Seeds_P Parameter: Tissue Value: Aerial vs. Embryo
  misc_feature: MA Experiment ID: 108547 Result: Up-regulated in Transcription
  misc_feature: MA Experiment 108547 PARAMETER Experiment Name: Zm_Imbibed_Seeds_P Parameter: Age (day) Value: 4 vs. 2
  misc_feature: MA Experiment 108547 PARAMETER Experiment Name: Zm_Imbibed_Seeds_P Parameter: Organism Value: Zea mays
  misc_feature: MA Experiment 108547 PARAMETER Experiment Name: Zm_Imbibed_Seeds_P Parameter: Plant Line Value: 35A19
  misc_feature: MA Experiment 108547 PARAMETER Experiment Name: Zm_Imbibed_Seeds_P Parameter: Tissue Value: Aerial vs. Embryo
  misc_feature: MA Experiment ID: 108559 Result: Down-regulated in Transcription
  misc_feature: MA Experiment 108559 PARAMETER Experiment Name: Zm_5mM_NO_P Parameter: Age (day) Value: 8
  misc_feature: MA Experiment 108559 PARAMETER Experiment Name: Zm_5mM_NO_P Parameter: Organism Value: Zea mays
  misc_feature: MA Experiment 108559 PARAMETER Experiment Name: Zm_5mM_NO_P Parameter: Plant Line Value: 35A19
  misc_feature: MA Experiment 108559 PARAMETER Experiment Name: Zm_5mM_NO_P Parameter: Timepoint (hr) Value: 12
  misc_feature: MA Experiment 108559 PARAMETER Experiment Name: Zm_5mM_NO_P Parameter: Tissue Value: Aerial
  misc_feature: MA Experiment 108559 PARAMETER Experiment Name: Zm_5mM_NO_P Parameter: Treatment Value: 5mM NO vs. No Treatment
  misc_feature: MA Experiment ID: 20000535 Result: Down-regulated in Transcription
  misc_feature: MA Experiment 20000535 PARAMETER Experiment Name: Zm_Hybrid_Seed_Dev_P Parameter: DAP Value: 30 vs. 12
  misc_feature: MA Experiment 20000535 PARAMETER Experiment Name: Zm_Hybrid_Seed_Dev_P Parameter: Organism Value: Zea mays
  misc_feature: MA Experiment 20000535 PARAMETER Experiment Name: Zm_Hybrid_Seed_Dev_P Parameter: Plant Line Value: 35A19
  misc_feature: MA Experiment 20000535 PARAMETER Experiment Name: Zm_Hybrid_Seed_Dev_P Parameter: Tissue Value: Embryo vs. Unfert Floret
aacgtgtcctcctacaattgccgacgtagccgtcgtcttcgccagagcagcgccagcgggcccagttcttgaaagggtgcagtgtatccaaggagacaaaggcatcggtctgcagtttcttggctacaaattcaaacagcactagggtgaaatcagtgggcttgagagtagcatcatccttcaaatgatggtggttatccagctgacggtttctctgggaatggcaacacgctattgccaaaaagcacatccgttcgtggcgaggaccatccggttgctgatcctgtactcccaatggattcaatgatgacgccagaaatcctctctgctaatttggcacttgttatggacaagttctcagatgatgacacagatactgaacttgatttggatagcccgacagagggcttcgcgtcgattgcagatgccattgaggacgtacggcaaggaaaacttgtgattgttgttgatgacgaatcaagggaaaatgaaggagatctgataatggctgcctccttggttaccccagaggcgatggcttttatagtaagacatggaacaggaattgtttgtgtcagcattaaagaagatgatctggaaagactatgccttcctttgatggttaccacaaaagaaaacgaggagaagctatgcactgcttttactgttacagtggatgcaaaagagggcacaactactggagtatctgccaaagacagggcaaaaacagttatgactcttgcatctcctgactctaggcctgaggacttcaaccgccctggtcatattttccctttgaaatacagagaagggggtgttctgaaacgagctggacacacagaggcatcggttgaccttgccatgctggctggattacctcctgttgctgtcctttgtgagattgtggatgatgcagatggttccatggctcgcctgccaaagttgcgtgtctttgctgaaagggaaaatttgaagattatatctattgctgacttgattaggtataggaggaaaagagacaggctagttgaacgtgcttctgttgcacgcttgccttctcaatggggcaatggccatgcatattgctacagatctgctattgatggcatcgagcatcttgccatggtgaaaggtgatattggtgatggccaagacattatggtgagggtgcactctgagtgcctcacaggcgacatttttagatcggcaagatgcgattgcggtgaccagcttgcaatggcaattgagatgattgagaaggccggaaggggcgtaatagtttatctccgtggacacgaaggacggggtatcggtctgggccacaagcttcgtgcttataacttgcaggatgatgggcgtgatactgtggaagctaatgaagaacttggtcttcctgtggactcacgagaatatgggattggcgcacagatactacgggacctaggagtccgttcgatgaagctgatgactaatagccctgcgaaatatagtggtctgaagggttatggactgagcattgcgggcagggtgcccttggttacgccaattaccagcgagaaccgtaagtacctcgagaccaaaagaacaaagatggggcatgtatatggattggctaatgcgcaggttaaccagccaagtggtagccagagcacagaagagaagcattgagcccaaaaaagtgatgcagtcttctttttgggagttcctgaaatcttctccctcgatatttccatatattctttttttctatatttccatatattctttctttcacatagaaggccgttttgttcttcaactgtagctgtaggtttcaagatggttaatgagcctaataaaagcaagtttaataatataagcaactgttcttgtaaggagctttacagtctgtcttatatagccgatatgtataatggttagctttcacaatgaatatatgatcaactgtttttctcac

SEQ ID NO: 9639 - protein, 457 aa, Zea mays subsp. mays
  peptide (1)..(457): Ceres Seq. ID no. 13493485
  misc_feature (1)..(439): Homolog of NCBI NO: 27735197 NR Description: Riboflavin biosynthesis protein ribA [Includes:
  misc_feature (22)..(453): Homolog of NCBI NO: 7436011 NR Description: GTP cyclohydrolase II (EC 3.5.4.25) / 3,
  misc_feature (71)..(439): Homolog of NCBI NO: 30697989 NR Description: GTP cyclohydrolase II;
  misc_feature (26)..(438): Homolog of NCBI NO: 29367375 NR Description: GTP cyclohydrolase
  misc_feature (26)..(437): Homolog of NCBI NO: 18424277 NR Description: GTP cyclohydrolase II /
  misc_feature (5)..(416): Homolog of NCBI NO: 25290324 NR Description: probable GTP cyclohydrolase [imported] - thaliana >gi|4544447|gb|AAD22355.1| putative GTP cyclohydrolase
  misc_feature (5)..(416): Homolog of NCBI NO: 30681714 NR Description: GTP cyclohydrolase -related [Arabidopsis thaliana]
  misc_feature (39)..(435): Homolog of NCBI NO: 23111383 NR Description: hypothetical protein [Desulfitobacterium
  misc_feature (42)..(441): Homolog of NCBI NO: 23018011 NR Description: hypothetical protein [Thermobifida fusca]
  misc_feature (39)..(450): Homolog of NCBI NO: 23020139 NR Description: hypothetical protein [Clostridium thermocellum
MDSMMTPEILSANLALVMDKFSDDDTDTELDLDSPTEGFASIADAIEDVRQGKLVIVVDDESRENEGDLIMAASLVTPEAMAFIVRHGTGIVCVSIKEDDLERLCLPLMVTTKENEEKLCTAFTVTVDAKEGTTTGVSAKDRAKTVMTLASPDSRPEDFNRPGHIFPLKYREGGVLKRAGHTEASVDLAMLAGLPPVAVLCEIVDDADGSMARLPKLRVFAERENLKIISIADLIRYRRKRDRLVERASVARLPSQWGNGHAYCYRSAIDGIEHLAMVKGDIGDGQDIMVRVHSECLTGDIFRSARCDCGDQLAMAIEMIEKAGRGVIVYLRGHEGRGIGLGHKLRAYNLQDDGRDTVEANEELGLPVDSREYGIGAQILRDLGVRSMKLMTNSPAKYSGLKGYGLSIAGRVPLVTPITSENRKYLETKRTKMGHVYGLANAQVNQPSGSQSTEEKH

SEQ ID NO: 9640 - protein, 454 aa, Zea mays subsp. mays
  peptide (1)..(454): Ceres Seq. ID no. 13493486
  misc_feature (1)..(436): Homolog of NCBI NO: 27735197 NR Description: Riboflavin biosynthesis protein ribA [Includes:
  misc_feature (19)..(450): Homolog of NCBI NO: 7436011 NR Description: GTP cyclohydrolase II (EC 3.5.4.25) / 3,
  misc_feature (68)..(436): Homolog of NCBI NO: 30697989 NR Description: GTP cyclohydrolase II;
  misc_feature (23)..(435): Homolog of NCBI NO: 29367375 NR Description: GTP cyclohydrolase
  misc_feature (23)..(434): Homolog of NCBI NO: 18424277 NR Description: GTP cyclohydrolase II /
  misc_feature (2)..(413): Homolog of NCBI NO: 25290324 NR Description: probable GTP cyclohydrolase [imported] - thaliana >gi|4544447|gb|AAD22355.1| putative GTP cyclohydrolase
  misc_feature (2)..(413): Homolog of NCBI NO: 30681714 NR Description: GTP cyclohydrolase -related [Arabidopsis thaliana]
  misc_feature (36)..(432): Homolog of NCBI NO: 23111383 NR Description: hypothetical protein [Desulfitobacterium
  misc_feature (39)..(438): Homolog of NCBI NO: 23018011 NR Description: hypothetical protein [Thermobifida fusca]
  misc_feature (36)..(447): Homolog of NCBI NO: 23020139 NR Description: hypothetical protein [Clostridium thermocellum
MMTPEILSANLALVMDKFSDDDTDTELDLDSPTEGFASIADAIEDVRQGKLVIVVDDESRENEGDLIMAASLVTPEAMAFIVRHGTGIVCVSIKEDDLERLCLPLMVTTKENEEKLCTAFTVTVDAKEGTTTGVSAKDRAKTVMTLASPDSRPEDFNRPGHIFPLKYREGGVLKRAGHTEASVDLAMLAGLPPVAVLCEIVDDADGSMARLPKLRVFAERENLKIISIADLIRYRRKRDRLVERASVARLPSQWGNGHAYCYRSAIDGIEHLAMVKGDIGDGQDIMVRVHSECLTGDIFRSARCDCGDQLAMAIEMIEKAGRGVIVYLRGHEGRGIGLGHKLRAYNLQDDGRDTVEANEELGLPVDSREYGIGAQILRDLGVRSMKLMTNSPAKYSGLKGYGLSIAGRVPLVTPITSENRKYLETKRTKMGHVYGLANAQVNQPSGSQSTEEKH

SEQ ID NO: 9641 - protein, 453 aa, Zea mays subsp. mays
  peptide (1)..(453): Ceres Seq. ID no. 13493487
  misc_feature (1)..(435): Homolog of NCBI NO: 27735197 NR Description: Riboflavin biosynthesis protein ribA [Includes:
  misc_feature (18)..(449): Homolog of NCBI NO: 7436011 NR Description: GTP cyclohydrolase II (EC 3.5.4.25) / 3,
  misc_feature (67)..(435): Homolog of NCBI NO: 30697989 NR Description: GTP cyclohydrolase II;
  misc_feature (22)..(434): Homolog of NCBI NO: 29367375 NR Description: GTP cyclohydrolase
  misc_feature (22)..(433): Homolog of NCBI NO: 18424277 NR Description: GTP cyclohydrolase II /
  misc_feature (1)..(412): Homolog of NCBI NO: 25290324 NR Description: probable GTP cyclohydrolase [imported] - thaliana >gi|4544447|gb|AAD22355.1| putative GTP cyclohydrolase
  misc_feature (1)..(412): Homolog of NCBI NO: 30681714 NR Description: GTP cyclohydrolase -related [Arabidopsis thaliana]
  misc_feature (35)..(431): Homolog of NCBI NO: 23111383 NR Description: hypothetical protein [Desulfitobacterium
  misc_feature (38)..(437): Homolog of NCBI NO: 23018011 NR Description: hypothetical protein [Thermobifida fusca]
  misc_feature (35)..(446): Homolog of NCBI NO: 23020139 NR Description: hypothetical protein [Clostridium thermocellum
MTPEILSANLALVMDKFSDDDTDTELDLDSPTEGFASIADAIEDVRQGKLVIVVDDESRENEGDLIMAASLVTPEAMAFIVRHGTGIVCVSIKEDDLERLCLPLMVTTKENEEKLCTAFTVTVDAKEGTTTGVSAKDRAKTVMTLASPDSRPEDFNRPGHIFPLKYREGGVLKRAGHTEASVDLAMLAGLPPVAVLCEIVDDADGSMARLPKLRVFAERENLKIISIADLIRYRRKRDRLVERASVARLPSQWGNGHAYCYRSAIDGIEHLAMVKGDIGDGQDIMVRVHSECLTGDIFRSARCDCGDQLAMAIEMIEKAGRGVIVYLRGHEGRGIGLGHKLRAYNLQDDGRDTVEANEELGLPVDSREYGIGAQILRDLGVRSMKLMTNSPAKYSGLKGYGLSIAGRVPLVTPITSENRKYLETKRTKMGHVYGLANAQVNQPSGSQSTEEKH

SEQ ID NO: 9642 - DNA, 1528 bp, Zea mays subsp. mays
  misc_feature (1)..(1528): Ceres Seq. ID no. 12354371
  misc_feature: MA Experiment ID: 108546 Result: Down-regulated in Transcription
  misc_feature: MA Experiment 108546 PARAMETER Experiment Name: Zm_Imbibed_Seeds_P Parameter: Age (day) Value: 3 vs. 2
  misc_feature: MA Experiment 108546 PARAMETER Experiment Name: Zm_Imbibed_Seeds_P Parameter: Organism Value: Zea mays
  misc_feature: MA Experiment 108546 PARAMETER Experiment Name: Zm_Imbibed_Seeds_P Parameter: Plant Line Value: 35A19
  misc_feature: MA Experiment 108546 PARAMETER Experiment Name: Zm_Imbibed_Seeds_P Parameter: Tissue Value: Roots vs. Embryo
agtgagtagtagccaaccttggtctccacttcctgctgccaagtgccgacgcgagtccgtccctcttctcctccgcatccaaagaaaccagaccacaagacatcgagagaacagttgcggccttgctggcacggggatagatcttctccactccaatggcgggcttctcacggccgaacaactcgctcctcctcaagatgcctgcgactttggccagtagccacaccccgaacctctcaagcctcctgttctacgaccagaaccatggccaagctgtaaatgcaaatgcagcagcgatgacgatggtggaggacgacgcctcactccagagctcatctgcagtgctcgacacctccccgcagccacagggcagtgctgctgctgcgtctccgatggagaggaagaggaagcctgcagaagacagtgctacactcagctctctcaatccaaggaggattgcaagcagcagcaggagagcaagagcaggcggggaaagaggccccacaacaaggaggctaatactgaggagaagagcgctactgaagacgaggccaccagggggtacatccatgtgagggcgaggaggggtcaggcaacggacagccacagccttgcagagagggtaaggagagagaggatcagtgagaggatgaggatgctgcaagcactggtccctggttgtgacaaggttactggaaaggccctgattctggatgagattatcaactatgtgcagtccctgcagaaccaagttgagttcctttccatgaggattgcctccatgagcccagtgctatatgggttcggactggatagtgatggcctccatgaccacgcacaaaagatgggagtcatgttccaggaagcccttgcaatggcaggtccagtgctgagccaagccagcccagcagctccatctgaagccatcatggacaccaccacaccttactcactgcatggccatggccagggttccatctctttttcccaggacaatggcagcagcacttacctgatgcagcatcagcaagcagcgggggagccaacaagacagcaggagctgctcagccagttggtgttcaacaacatgtgctctttccagtaggggtggggagcatttgggtgagaggaagcgaggaatggaccccacattgacaataggaaggaaataatgctgcgagatttggtaggagcatgcacgtaccagatgagtttgagatgttggatctagtccatccccttgtctggatttggagagagcagtagcaagtagatcgagcctgctgtttgtttacacattttgagagactttgtagtatttgtaactcctttattgggcattgtccatgaggattttctcagcggctgcaccttccatctcaccgtgttgttgtagttcttgagcaatcggttgttagtacatacgagagctattttgttctttgccaaacagtgattgactgttccatccattcagtcttgtctagctccaagcatctgcaaatcgctacgttgttttctttaaccc

SEQ ID NO: 9643 - protein, 151 aa, Zea mays subsp. mays
  peptide (1)..(151): Ceres Seq. ID no. 12354372
  misc_feature (1)..(151): Homolog of NCBI NO: 38175541 NR Description: bHLH transcription factor-like protein [Oryza
  misc_feature (1)..(113): Homolog of NCBI NO: 5923912 NR Description: bHLH transcription factor GBOF-1 [Tulipa
  misc_feature (1)..(80): Homolog of NCBI NO: 18423212 NR Description: Expressed protein; protein id: At5g50915.1, by cDNA: 36971., supported by cDNA: gi_15982882, supported by
  misc_feature (1)..(85): Homolog of NCBI NO: 15222679 NR Description: bHLH protein; protein id: At1g26260.1
  misc_feature (1)..(47): Homolog of NCBI NO: 30681559 NR Description: expressed protein [Arabidopsis thaliana]
  misc_feature (1)..(101): Homolog of NCBI NO: 30697769 NR Description: DNA-binding protein -related [Arabidopsis
  misc_feature (1)..(56): Homolog of NCBI NO: 15231450 NR Description: bHLH protein; protein id: At3g07340.1, supported cDNA: gi_20127063 [Arabidopsis thaliana]
  misc_feature (1)..(56): Homolog of NCBI NO: 20127064 NR Description: putative bHLH transcription factor [Arabidopsis
  misc_feature (1)..(85): Homolog of NCBI NO: 29647487 NR Description: OJ1191_A10.7 [Oryza sativa (japonica
  misc_feature (1)..(111): Homolog of NCBI NO: 20127044 NR Description: putative bHLH transcription factor [Arabidopsis
MRMLQALVPGCDKVTGKALILDEIINYVQSLQNQVEFLSMRIASMSPVLYGFGLDSDGLHDHAQKMGVMFQEALAMAGPVLSQASPAAPSEAIMDTTTPYSLHGHGQGSISFSQDNGSSTYLMQHQQAAGEPTRQQELLSQLVFNNMCSFQ

SEQ ID NO: 9644 - protein, 149 aa, Zea mays subsp. mays
  peptide (1)..(149): Ceres Seq. ID no. 12354373
  misc_feature (1)..(149): Homolog of NCBI NO: 38175541 NR Description: bHLH transcription factor-like protein [Oryza
  misc_feature (1)..(111): Homolog of NCBI NO: 5923912 NR Description: bHLH transcription factor GBOF-1 [Tulipa
  misc_feature (1)..(78): Homolog of NCBI NO: 18423212 NR Description: Expressed protein; protein id: At5g50915.1, by cDNA: 36971., supported by cDNA: gi_15982882, supported by
  misc_feature (1)..(83): Homolog of NCBI NO: 15222679 NR Description: bHLH protein; protein id: At1g26260.1
  misc_feature (1)..(45): Homolog of NCBI NO: 30681559 NR Description: expressed protein [Arabidopsis thaliana]
  misc_feature (1)..(99): Homolog of NCBI NO: 30697769 NR Description: DNA-binding protein -related [Arabidopsis
  misc_feature (1)..(54): Homolog of NCBI NO: 15231450 NR Description: bHLH protein; protein id: At3g07340.1, supported cDNA: gi_20127063 [Arabidopsis thaliana]
  misc_feature (1)..(54): Homolog of NCBI NO: 20127064 NR Description: putative bHLH transcription factor [Arabidopsis
  misc_feature (1)..(83): Homolog of NCBI NO: 29647487 NR Description: OJ1191_A10.7 [Oryza sativa (japonica
  misc_feature (1)..(109): Homolog of NCBI NO: 20127044 NR Description: putative bHLH transcription factor [Arabidopsis
MLQALVPGCDKVTGKALILDEIINYVQSLQNQVEFLSMRIASMSPVLYGFGLDSDGLHDHAQKMGVMFQEALAMAGPVLSQASPAAPSEAIMDTTTPYSLHGHGQGSISFSQDNGSSTYLMQHQQAAGEPTRQQELLSQLVFNNMCSFQ

SEQ ID NO: 9645 - protein, 139 aa, Zea mays subsp. mays
  peptide (1)..(139): Ceres Seq. ID no. 12354374
MAGFSRPNNSLLLKMPATLASSHTPNLSSLLFYDQNHGQAVNANAAAMTMVEDDASLQSSSAVLDTSPQPQGSAAAASPMERKRKPAEDSATLSSLNPRRIASSSRRARAGGERGPTTRRLILRRRALLKTRPPGGTSM

SEQ ID NO: 9646 - DNA, 1542 bp, Zea mays subsp. mays
  misc_feature (1)..(1542): Ceres Seq. ID no. 12354375
  misc_feature: MA Experiment ID: 108527 Result: Up-regulated in Transcription
  misc_feature: MA Experiment 108527 PARAMETER Experiment Name: Zm_5mM_NO_P Parameter: Age (day) Value: 8
  misc_feature: MA Experiment 108527 PARAMETER Experiment Name: Zm_5mM_NO_P Parameter: Organism Value: Zea mays
  misc_feature: MA Experiment 108527 PARAMETER Experiment Name: Zm_5mM_NO_P Parameter: Plant Line Value: 35A19
  misc_feature: MA Experiment 108527 PARAMETER Experiment Name: Zm_5mM_NO_P Parameter: Timepoint (hr) Value: 6
  misc_feature: MA Experiment 108527 PARAMETER Experiment Name: Zm_5mM_NO_P Parameter: Tissue Value: Aerial
  misc_feature: MA Experiment 108527 PARAMETER Experiment Name: Zm_5mM_NO_P Parameter: Treatment Value: 5mM NO vs. No Treatment
  misc_feature: MA Experiment ID: 20000478 Result: Up-regulated in Transcription
  misc_feature: MA Experiment 20000478 PARAMETER Experiment Name: Zm_5mM_SA_P Parameter: Age (day) Value: 11
  misc_feature: MA Experiment 20000478 PARAMETER Experiment Name: Zm_5mM_SA_P Parameter: Organism Value: Zea mays
  misc_feature: MA Experiment 20000478 PARAMETER Experiment Name: Zm_5mM_SA_P Parameter: Plant Line Value: 35A19
  misc_feature: MA Experiment 20000478 PARAMETER Experiment Name: Zm_5mM_SA_P Parameter: Timepoint (hr) Value: 72
  misc_feature: MA Experiment 20000478 PARAMETER Experiment Name: Zm_5mM_SA_P Parameter: Tissue Value: Aerial
  misc_feature: MA Experiment 20000478 PARAMETER Experiment Name: Zm_5mM_SA_P Parameter: Treatment Value: 5mM SA vs. No Treatment
  misc_feature: MA Experiment ID: 20001610 Result: Up-regulated in Transcription
  misc_feature: MA Experiment 20001610 PARAMETER Experiment Name: Zm_50ppm_KNO3_L-to-H_P Parameter: Age (day) Value: 19
  misc_feature: MA Experiment 20001610 PARAMETER Experiment Name: Zm_50ppm_KNO3_L-to-H_P Parameter: Organism Value: Zea mays
  misc_feature: MA Experiment 20001610 PARAMETER Experiment Name: Zm_50ppm_KNO3_L-to-H_P Parameter: Plant Line Value: 35A19
  misc_feature: MA Experiment 20001610 PARAMETER Experiment Name: Zm_50ppm_KNO3_L-to-H_P Parameter: Timepoint (hr) Value: 2
  misc_feature: MA Experiment 20001610 PARAMETER Experiment Name: Zm_50ppm_KNO3_L-to-H_P Parameter: Tissue Value: Roots
  misc_feature: MA Experiment 20001610 PARAMETER Experiment Name: Zm_50ppm_KNO3_L-to-H_P Parameter: Treatment Value: 50ppm KNO3 vs. 50ppm KCl
accgctgttcttgctgagttgttgtggacaaaaagagcacaaaagtgggtagggcaagccaaccacactcgcagccagcctgcctgctcgcccgcccgccattcttgccgattcgagtcgacgtcacgcctccggcgcccccttcggttgtcacctcgggggtcgcggattggtggagtggaggatttgagcggcgcggccatggatacaacctctagggccgccaagatcccgtcgctccaccagacggagatcaactgggataacctcgacaagaccaagctctacgtggtgggcgcaggcatgttcagcggggtcaccgtggcgctgtaccctgtatcggtggtcaagacccggatgcaggttgcctctggggatgccatggggaggaacgcgctggctaccttcaagaacatccttaaggtggacggcgtgccagggctgtaccgggggtttcctactgttataattggggctgtaccaactaggattatcttcctcacggcgcttgagacaaccaaagcagcctctctcaagcttgttgagcccttcaagctgtcagagccggtgcaggccgcctttgccaatggccttgccggtctgtcggcatccacatgttcgcaggctatttttgtcccaattgatgtgatcagccagaaattgatggttcaagggtattctggtaatgtcagatacaaaggtggagtagatgttgctcgcaaggtcataaaggctgatggcattaaggggctctacagaggatttggactgtctgttatgacctatgcaccatcgagtgctgtgtggtgggcgagttatggttctagccagcgcataatttggagtgcccttggccatttgcataacaaagaagaggctcctagccaattgaaaatagttggtgttcaagcatcaggggggatttttgctggtgctgtgacctcttttgttacgactcccatagatacaatcaagaccaggctgcaggttatggataatgaaaataagccaaaagctggggaagttgttaaaagattgatcgctgaagatggatggaaaggtttgtacagagggttgggtccaagatttttcagctcatcagcttggggtacctcaatgatagtatgctacgagtacctgaagcgcttgtgtgctaaagttgaagaggtctgacttctgttcttactattctggaagttttgtattagaagaagtgaaataatgctgtatgtcgacaacattgacaccaccggaagcttcagttcttgctgacgtaggtgaaagcattcaacatggatgtttgatggtgtacttcatttggtgctagacaatagtctttacaaactttgcttctctgggctatatctcaaaaaatgtaggggcctatatttttttgctcatatgatgaatatgggtttggcggattattttaggtgagtataaacgatatcagatgtacacacttctcattcttttatacatgaaggctattttagcgaggctgtatgattatgaccagtctggatgattgagaccagttgt

SEQ ID NO: 9647 - protein, 390 aa, Zea mays subsp. mays
  peptide (1)..(390): Ceres Seq. ID no. 12354376
  misc_feature (68)..(390): Homolog of NCBI NO: 21326111 NR Description: putative mitochondrial carrier protein [Sorghum
  misc_feature (68)..(390): Homolog of NCBI NO: 12061241 NR Description: 36I5.1 [Oryza sativa (japonica cultivar-group)]
  misc_feature (68)..(389): Homolog of NCBI NO: 18496651 NR Description: putative mitochondrial carrier protein [Triticum
  misc_feature (68)..(389): Homolog of NCBI NO: 12278522 NR Description: putative mitochondrial carrier protein [Hordeum
  misc_feature (68)..(389): Homolog of NCBI NO: 18417739 NR Description: mitochondrial carrier protein family; protein id: supported by cDNA: 18738., supported by cDNA: gi_18252182, by cDNA: gi_20258916 [Arabidopsis thaliana]
  misc_feature (68)..(389): Homolog of NCBI NO: 21553961 NR Description: putative mitochondrial carrier protein
  misc_feature (68)..(281): Homolog of NCBI NO: 11358653 NR Description: probable mitochondrial carrier protein - thaliana >gi|9755609|emb|CAC01763.1| putative mitochondrial
  misc_feature (293)..(389): Homolog of NCBI NO: 11358653 NR Description: probable mitochondrial carrier protein - thaliana >gi|9755609|emb|CAC01763.1| putative mitochondrial
  misc_feature (60)..(386): Homolog of NCBI NO: 37534064 NR Description: putative Tricarboxylate transport protein,
  misc_feature (114)..(388): Homolog of NCBI NO: 34894824 NR Description: P0554D10.15 [Oryza sativa (japonica
TAVLAELLWTKRAQKWVGQANHTRSQPACSPARHSCRFESTSRLRRPLRLSPRGSRIGGVEDLSGAAMDTTSRAAKIPSLHQTEINWDNLDKTKLYVVGAGMFSGVTVALYPVSVVKTRMQVASGDAMGRNALATFKNILKVDGVPGLYRGFPTVIIGAVPTRIIFLTALETTKAASLKLVEPFKLSEPVQAAFANGLAGLSASTCSQAIFVPIDVISQKLMVQGYSGNVRYKGGVDVARKVIKADGIKGLYRGFGLSVMTYAPSSAVWWASYGSSQRIIWSALGHLHNKEEAPSQLKIVGVQASGGIFAGAVTSFVTTPIDTIKTRLQVMDNENKPKAGEVVKRLIAEDGWKGLYRGLGPRFFSSSAWGTSMIVCYEYLKRLCAKVEEV

SEQ ID NO: 9648 - protein, 323 aa, Zea mays subsp. mays
  peptide (1)..(323): Ceres Seq. ID no. 12354377
  misc_feature (1)..(214): Homolog of NCBI NO: 11358653 NR Description: probable mitochondrial carrier protein - thaliana >gi|9755609|emb|CAC01763.1| putative mitochondrial
  misc_feature (226)..(322): Homolog of NCBI NO: 11358653 NR Description: probable mitochondrial carrier protein - thaliana >gi|9755609|emb|CAC01763.1| putative mitochondrial
  misc_feature (1)..(319): Homolog of NCBI NO: 37534064 NR Description: putative Tricarboxylate transport protein,
  misc_feature (47)..(321): Homolog of NCBI NO: 34894824 NR Description: P0554D10.15 [Oryza sativa (japonica
  misc_feature (1)..(323): Homolog of NCBI NO: 21326111 NR Description: putative mitochondrial carrier protein [Sorghum
  misc_feature (1)..(323): Homolog of NCBI NO: 12061241 NR Description: 36I5.1 [Oryza sativa (japonica cultivar-group)]
  misc_feature (1)..(322): Homolog of NCBI NO: 18496651 NR Description: putative mitochondrial carrier protein [Triticum
  misc_feature (1)..(322): Homolog of NCBI NO: 12278522 NR Description: putative mitochondrial carrier protein [Hordeum
  misc_feature (1)..(322): Homolog of NCBI NO: 18417739 NR Description: mitochondrial carrier protein family; protein id: supported by cDNA: 18738., supported by cDNA: gi_18252182, by cDNA: gi_20258916 [Arabidopsis thaliana]
  misc_feature (1)..(322): Homolog of NCBI NO: 21553961 NR Description: putative mitochondrial carrier protein
MDTTSRAAKIPSLHQTEINWDNLDKTKLYVVGAGMFSGVTVALYPVSVVKTRMQVASGDAMGRNALATFKNILKVDGVPGLYRGFPTVIIGAVPTRIIFLTALETTKAASLKLVEPFKLSEPVQAAFANGLAGLSASTCSQAIFVPIDVISQKLMVQGYSGNVRYKGGVDVARKVIKADGIKGLYRGFGLSVMTYAPSSAVWWASYGSSQRIIWSALGHLHNKEEAPSQLKIVGVQASGGIFAGAVTSFVTTPIDTIKTRLQVMDNENKPKAGEVVKRLIAEDGWKGLYRGLGPRFFSSSAWGTSMIVCYEYLKRLCAKVEEV

SEQ ID NO: 9649 - protein, 289 aa, Zea mays subsp. mays
  peptide (1)..(289): Ceres Seq. ID no. 12354378
  misc_feature (1)..(289): Homolog of NCBI NO: 21326111 NR Description: putative mitochondrial carrier protein [Sorghum
  misc_feature (1)..(289): Homolog of NCBI NO: 12061241 NR Description: 36I5.1 [Oryza sativa (japonica cultivar-group)]
  misc_feature (1)..(288): Homolog of NCBI NO: 18496651 NR Description: putative mitochondrial carrier protein [Triticum
  misc_feature (1)..(288): Homolog of NCBI NO: 12278522 NR Description: putative mitochondrial carrier protein [Hordeum
  misc_feature (1)..(288): Homolog of NCBI NO: 18417739 NR Description: mitochondrial carrier protein family; protein id: supported by cDNA: 18738., supported by cDNA: gi_18252182, by cDNA: gi_20258916 [Arabidopsis thaliana]
  misc_feature (1)..(288): Homolog of NCBI NO: 21553961 NR Description: putative mitochondrial carrier protein
  misc_feature (1)..(180): Homolog of NCBI NO: 11358653 NR Description: probable mitochondrial carrier protein - thaliana >gi|9755609|emb|CAC01763.1| putative mitochondrial
  misc_feature (192)..(288): Homolog of NCBI NO: 11358653 NR Description: probable mitochondrial carrier protein - thaliana >gi|9755609|emb|CAC01763.1| putative mitochondrial
  misc_feature (1)..(285): Homolog of NCBI NO: 37534064 NR Description: putative Tricarboxylate transport protein,
  misc_feature (13)..(287): Homolog of NCBI NO: 34894824 NR Description: P0554D10.15 [Oryza sativa (japonica
MFSGVTVALYPVSVVKTRMQVASGDAMGRNALATFKNILKVDGVPGLYRGFPTVIIGAVPTRIIFLTALETTKAASLKLVEPFKLSEPVQAAFANGLAGLSASTCSQAIFVPIDVISQKLMVQGYSGNVRYKGGVDVARKVIKADGIKGLYRGFGLSVMTYAPSSAVWWASYGSSQRIIWSALGHLHNKEEAPSQLKIVGVQASGGIFAGAVTSFVTTPIDTIKTRLQVMDNENKPKAGEVVKRLIAEDGWKGLYRGLGPRFFSSSAWGTSMIVCYEYLKRLCAKVEEV

SEQ ID NO: 9650 - DNA, 1770 bp, Zea mays subsp. mays
  misc_feature (1)..(1770): Ceres Seq. ID no. 12356921
  misc_feature: MA Experiment ID: 108522 Result: Down-regulated in Transcription
  misc_feature: MA Experiment 108522 PARAMETER Experiment Name: Zm_42deg_Heat_P Parameter: Age (day) Value: 8
  misc_feature: MA Experiment 108522 PARAMETER Experiment Name: Zm_42deg_Heat_P Parameter: Organism Value: Zea mays
  misc_feature: MA Experiment 108522 PARAMETER Experiment Name: Zm_42deg_Heat_P Parameter: Plant Line Value: 35A19
  misc_feature: MA Experiment 108522 PARAMETER Experiment Name: Zm_42deg_Heat_P Parameter: Temperature (deg C) Value: 42 vs. 22
  misc_feature: MA Experiment 108522 PARAMETER Experiment Name: Zm_42deg_Heat_P Parameter: Timepoint (hr) Value: 1
  misc_feature: MA Experiment 108522 PARAMETER Experiment Name: Zm_42deg_Heat_P Parameter: Tissue Value: Aerial
  misc_feature: MA Experiment ID: 108528 Result: Up-regulated in Transcription
  misc_feature: MA Experiment 108528 PARAMETER Experiment Name: Zm_Imbibed_Seeds_P Parameter: Age (day) Value: 5 vs. 2
  misc_feature: MA Experiment 108528 PARAMETER Experiment Name: Zm_Imbibed_Seeds_P Parameter: Organism Value: Zea mays
  misc_feature: MA Experiment 108528 PARAMETER Experiment Name: Zm_Imbibed_Seeds_P Parameter: Plant Line Value: 35A19
  misc_feature: MA Experiment 108528 PARAMETER Experiment Name: Zm_Imbibed_Seeds_P Parameter: Tissue Value: Aerial vs. Embryo
  misc_feature: MA Experiment ID: 108530 Result: Up-regulated in Transcription
  misc_feature: MA Experiment 108530 PARAMETER Experiment Name: Zm_Imbibed_Seeds_P Parameter: Age (day) Value: 6 vs. 2
  misc_feature: MA Experiment 108530 PARAMETER Experiment Name: Zm_Imbibed_Seeds_P Parameter: Organism Value: Zea mays
  misc_feature: MA Experiment 108530 PARAMETER Experiment Name: Zm_Imbibed_Seeds_P Parameter: Plant Line Value: 35A19
  misc_feature: MA Experiment 108530 PARAMETER Experiment Name: Zm_Imbibed_Seeds_P Parameter: Tissue Value: Aerial vs. Embryo
  misc_feature: MA Experiment ID: 108536 Result: Down-regulated in Transcription
  misc_feature: MA Experiment 108536 PARAMETER Experiment Name: Zm_Meristem_P Parameter: Age (day) Value: 8
  misc_feature: MA Experiment 108536 PARAMETER Experiment Name: Zm_Meristem_P Parameter: Organism Value: Zea mays
  misc_feature: MA Experiment 108536 PARAMETER Experiment Name: Zm_Meristem_P Parameter: Plant Line Value: 35A19
  misc_feature: MA Experiment 108536 PARAMETER Experiment Name: Zm_Meristem_P Parameter: Tissue Value: Shoot Meristem vs. Above Shoot Meristem
  misc_feature: MA Experiment ID: 108544 Result: Down-regulated in Transcription
  misc_feature: MA Experiment ID: 108545 Result: Up-regulated in Transcription
  misc_feature: MA Experiment 108545 PARAMETER Experiment Name: Zm_Imbibed_Seeds_P Parameter: Age (day) Value: 3 vs. 2
  misc_feature: MA Experiment 108545 PARAMETER Experiment Name: Zm_Imbibed_Seeds_P Parameter: Organism Value: Zea mays
  misc_feature: MA Experiment 108545 PARAMETER Experiment Name: Zm_Imbibed_Seeds_P Parameter: Plant Line Value: 35A19
  misc_feature: MA Experiment 108545 PARAMETER Experiment Name: Zm_Imbibed_Seeds_P Parameter: Tissue Value: Aerial vs. Embryo
  misc_feature: MA Experiment ID: 108547 Result: Up-regulated in Transcription
  misc_feature: MA Experiment 108547 PARAMETER Experiment Name: Zm_Imbibed_Seeds_P Parameter: Age (day) Value: 4 vs. 2
  misc_feature: MA Experiment 108547 PARAMETER Experiment Name: Zm_Imbibed_Seeds_P Parameter: Organism Value: Zea mays
  misc_feature: MA Experiment 108547 PARAMETER Experiment Name: Zm_Imbibed_Seeds_P Parameter: Plant Line Value: 35A19
  misc_feature: MA Experiment 108547 PARAMETER Experiment Name: Zm_Imbibed_Seeds_P Parameter: Tissue Value: Aerial vs. Embryo
  misc_feature: MA Experiment ID: 108556 Result: Down-regulated in Transcription
  misc_feature: MA Experiment 108556 PARAMETER Experiment Name: Zm_Drought_P Parameter: Age (day) Value: 9
  misc_feature: MA Experiment 108556 PARAMETER Experiment Name: Zm_Drought_P Parameter: Organism Value: Zea mays
  misc_feature: MA Experiment 108556 PARAMETER Experiment Name: Zm_Drought_P Parameter: Plant Line Value: 35A19
  misc_feature: MA Experiment 108556 PARAMETER Experiment Name: Zm_Drought_P Parameter: Timepoint (hr) Value: 24
  misc_feature: MA Experiment 108556 PARAMETER Experiment Name: Zm_Drought_P Parameter: Tissue Value: Aerial
  misc_feature: MA Experiment 108556 PARAMETER Experiment Name: Zm_Drought_P Parameter: Treatment Value: Drought vs. No Drought
  misc_feature: MA Experiment ID: 108687 Result: Down-regulated in Transcription
  misc_feature: MA Experiment 108687 PARAMETER Experiment Name: Zm_Embryos-Flowers__P Parameter: Tissue Value: Embryo vs. Aerial+
  misc_feature: MA Experiment ID: 20000478 Result: Down-regulated in Transcription
  misc_feature: MA Experiment 20000478 PARAMETER Experiment Name: Zm_5mM_SA_P Parameter: Age (day) Value: 11
  misc_feature: MA Experiment 20000478 PARAMETER Experiment Name: Zm_5mM_SA_P Parameter: Organism Value: Zea mays
  misc_feature: MA Experiment 20000478 PARAMETER Experiment Name: Zm_5mM_SA_P Parameter: Plant Line Value: 35A19
  misc_feature: MA Experiment 20000478 PARAMETER Experiment Name: Zm_5mM_SA_P Parameter: Timepoint (hr) Value: 72
  misc_feature: MA Experiment 20000478 PARAMETER Experiment Name: Zm_5mM_SA_P Parameter: Tissue Value: Aerial
  misc_feature: MA Experiment 20000478 PARAMETER Experiment Name: Zm_5mM_SA_P Parameter: Treatment Value: 5mM SA vs. No Treatment
  misc_feature: MA Experiment ID: 20000480 Result: Down-regulated in Transcription
  misc_feature: MA Experiment 20000480 PARAMETER Experiment Name: Zm_Drought_P Parameter: Age (day) Value: 11
  misc_feature: MA Experiment 20000480 PARAMETER Experiment Name: Zm_Drought_P Parameter: Organism Value: Zea mays
  misc_feature: MA Experiment 20000480 PARAMETER Experiment Name: Zm_Drought_P Parameter: Plant Line Value: 35A19
  misc_feature: MA Experiment 20000480 PARAMETER Experiment Name: Zm_Drought_P Parameter: Timepoint (hr) Value: 72
  misc_feature: MA Experiment 20000480 PARAMETER Experiment Name: Zm_Drought_P Parameter: Tissue Value: Aerial
  misc_feature: MA Experiment 20000480 PARAMETER Experiment Name: Zm_Drought_P Parameter: Treatment Value: Drought vs. No Drought
atcatcactacacactacaaacactaccaccatccagcagctagcagaaggcagaagcagctagtgtagatagccggcggctggctgagaccaccacctctccctttcctttcttctctttgctttgctccctctcatctcatcttcccttcccttctccagctaacactacagctttctagggctcacaccgcagcaccgatccagcgccgtccggtcgtcgatccacatcaccattattccatccccctgataacgatcgagccccagccctccctcgctctccgggctgagctagccggacgaattcgggcgtgcggcttcgagctctcgcttatatcagcgccgcgcgcgccggccggcggccggaggagccactatcatccccggcgtttgattcggccagagcagcggccatggtcgaatatatttgatctctctcgatctgatctgagctgagccggctggtggcccgggaaggacgaagtgtgtcgccacctataatttgatgatgtttgtgtcatcatgatcggtggctagcagaataagagatgataagcggcaacctcaacaatgaagagctggggggcggcgggtgcaccaaggccgaggggccgggcgcggccggcggcgccggcgccgtcgtcgcaaagagtcccgtgctgtcgagctcccggcactggccgccgtcgacggagtcgaggatcgtgcgcgtgtcgcgggtcttcggcggcaaggaccggcacagcaaggtgaggacggtcaaggggctgcgcgaccggcgcgtgcggctgtccgtgccgacggcgatccagctctacgacctccaggaccggctgggcctcagccagccgagcaagttggtggactggctgctcgacgccgcgcaggacgagatcgacaagctgcctccgctccagttcccgccgcaagggcaggacctcgtcgcccatctcccgccgtccatggtggcgcccttcgccaacgttgcagccgaccgggccgccgccgccgctgccgccgcagaacgcgtcggccgcgatggccgaaggcggcaaacgccactgccacggaggcatcaaagggctcatgggcatgggcctcaacaattctatcggcctcgccaacgccaccatgccgctggctcacggcttgtactacacgcccggtgagtcttggaccaatggaggcaatgccgccgtccatgatcatcaggtgagccacggcggcacctcgcctcagacggtggctcaccactcgccgttctcgtctctgctgtctcttgctgctccggggccccagctcgtcttctactcgccggaaggcggcggcttcgccatgaaagaagccaccgatcatcagttcgctgtagatagcctcgatcactcgcaaggccagctctcactgagctcagctagaagcttccttcaccccggcaaccagggatgatattaggtcactgatctctactgctccaagaaggtacgtagaacaataaagcttggtgtagtagtaatcaagtactcgtttgaaggctccgtaaagcttgcaactgcagttttgagatgttattgtttggtatgatcgagtagaggggctctagcgtagagagctgctagcatgcatagtaattaaggttaattttgcaggacatgcaatgcaattcgttgcttcttttttatacaaggaagtaaccggtcatggggtttgtggtgtgtgtgtgtgttggcaatgtaataacaattttataattcgttcttgaatttgtgc

SEQ ID NO: 9651 - protein, 206 aa, Zea mays subsp. mays
  peptide (1)..(206): Ceres Seq. ID no. 12356922
  misc_feature (48)..(139): Pfam Name: TCP family transcription factor Pfam Description: TCP family transcription factor
  misc_feature (19)..(139): Homolog of NCBI NO: 34909780 NR Description: P0512C01.32 [Oryza sativa (japonica
  misc_feature (38)..(125): Homolog of NCBI NO: 15239489 NR Description: DNA binding protein - like; protein id: [Arabidopsis thaliana] >gi|10177320|dbj|BAB10646.1|
  misc_feature (8)..(134): Homolog of NCBI NO: 18396089 NR Description: expressed protein; protein id: At3g02150.1, by cDNA: 15552. [Arabidopsis thaliana]
  misc_feature (8)..(134): Homolog of NCBI NO: 30678498 NR Description: TCP family transcription factor TFPD [Arabidopsis >gi|6041802|gb|AAF02122.1|AC009755_15 unknown protein thaliana] >gi|6513919|gb|AAF14823.1|AC011664_5 unknown protein
  misc_feature (34)..(126): Homolog of NCBI NO: 15241512 NR Description: putative helix-loop-helix DNA binding protein;
  misc_feature (42)..(199): Homolog of NCBI NO: 18397402 NR Description: expressed protein; protein id: At1g30210.1, by cDNA: gi_14334669, supported by cDNA: gi_16323136 [Arabidopsis
  misc_feature (32)..(182): Homolog of NCBI NO: 7486304 NR Description: hypothetical protein F28J12.50 - Arabidopsis
  misc_feature (32)..(182): Homolog of NCBI NO: 18415079 NR Description: teosinte branched1 - like protein; protein id: supported by cDNA: gi_14194128, supported by cDNA: gi_14194170 thaliana] >gi|14194129|gb|AAK56259.1|AF367270_1
  misc_feature (50)..(182): Homolog of NCBI NO: 25369264 NR Description: probable basic helix-loop-helix DNA binding
  misc_feature (44)..(174): Homolog of NCBI NO: 33146716 NR Description: putative transcription factor PCF6 [Oryza sativa
MISGNLNNEELGGGGCTKAEGPGAAGGAGAVVAKSPVLSSSRHWPPSTESRIVRVSRVFGGKDRHSKVRTVKGLRDRRVRLSVPTAIQLYDLQDRLGLSQPSKLVDWLLDAAQDEIDKLPPLQFPPQGQDLVAHLPPSMVAPFANVAADRAAAAAAAAERVGRDGRRRQTPLPRRHQRAHGHGPQQFYRPRQRHHAAGSRLVLHAR

SEQ ID NO: 9652 - protein, 135 aa, Zea mays subsp. mays
  peptide (1)..(135): Ceres Seq. ID no. 12356923
MAEGGKRHCHGGIKGLMGMGLNNSIGLANATMPLAHGLYYTPGESWTNGGNAAVHDHQVSHGGTSPQTVAHHSPFSSLLSLAAPGPQLVFYSPEGGGFAMKEATDHQFAVDSLDHSQGQLSLSSARSFLHPGNQG

SEQ ID NO: 9653 - protein, 119 aa, Zea mays subsp. mays
  peptide (1)..(119): Ceres Seq. ID no. 12356924
MGMGLNNSIGLANATMPLAHGLYYTPGESWTNGGNAAVHDHQVSHGGTSPQTVAHHSPFSSLLSLAAPGPQLVFYSPEGGGFAMKEATDHQFAVDSLDHSQGQLSLSSARSFLHPGNQG

SEQ ID NO: 9654 - DNA, 1423 bp, Zea mays subsp. mays
  misc_feature (1)..(1423): Ceres Seq. ID no. 13570861
  misc_feature: MA Experiment ID: 108527 Result: Up-regulated in Transcription
  misc_feature: MA Experiment 108527 PARAMETER Experiment Name: Zm_5mM_NO_P Parameter: Age (day) Value: 8
  misc_feature: MA Experiment 108527 PARAMETER Experiment Name: Zm_5mM_NO_P Parameter: Organism Value: Zea mays
  misc_feature: MA Experiment 108527 PARAMETER Experiment Name: Zm_5mM_NO_P Parameter: Plant Line Value: 35A19
  misc_feature: MA Experiment 108527 PARAMETER Experiment Name: Zm_5mM_NO_P Parameter: Timepoint (hr) Value: 6
  misc_feature: MA Experiment 108527 PARAMETER Experiment Name: Zm_5mM_NO_P Parameter: Tissue Value: Aerial
  misc_feature: MA Experiment 108527 PARAMETER Experiment Name: Zm_5mM_NO_P Parameter: Treatment Value: 5mM NO vs. No Treatment
  misc_feature: MA Experiment ID: 108535 Result: Down-regulated in Transcription
  misc_feature: MA Experiment 108535 PARAMETER Experiment Name: Zm_Meristem_P Parameter: Age (day) Value: 8
  misc_feature: MA Experiment 108535 PARAMETER Experiment Name: Zm_Meristem_P Parameter: Organism Value: Zea mays
  misc_feature: MA Experiment 108535 PARAMETER Experiment Name: Zm_Meristem_P Parameter: Plant Line Value: 35A19
  misc_feature: MA Experiment 108535 PARAMETER Experiment Name: Zm_Meristem_P Parameter: Tissue Value: Root Meristem vs. Above Root Meristem
  misc_feature: MA Experiment ID: 108536 Result: Down-regulated in Transcription
  misc_feature: MA Experiment 108536 PARAMETER Experiment Name: Zm_Meristem_P Parameter: Age (day) Value: 8
  misc_feature: MA Experiment 108536 PARAMETER Experiment Name: Zm_Meristem_P Parameter: Organism Value: Zea mays
  misc_feature: MA Experiment 108536 PARAMETER Experiment Name: Zm_Meristem_P Parameter: Plant Line Value: 35A19
  misc_feature: MA Experiment 108536 PARAMETER Experiment Name: Zm_Meristem_P Parameter: Tissue Value: Shoot Meristem vs. Above Shoot Meristem
  misc_feature: MA Experiment ID: 108543 Result: Up-regulated in Transcription
  misc_feature: MA Experiment ID: 108544 Result: Up-regulated in Transcription
  misc_feature: MA Experiment ID: 108687 Result: Down-regulated in Transcription
  misc_feature: MA Experiment 108687 PARAMETER Experiment Name: Zm_Embryos-Flowers__P Parameter: Tissue Value: Embryo vs. Aerial+
  misc_feature: MA Experiment ID: 108688 Result: Down-regulated in Transcription
  misc_feature: MA Experiment 108688 PARAMETER Experiment Name: Zm_Embryos-Flowers__P Parameter: Tissue Value: Immature Flowers vs. Aerial+
  misc_feature: MA Experiment ID: 20000535 Result: Down-regulated in Transcription
  misc_feature: MA Experiment 20000535 PARAMETER Experiment Name: Zm_Hybrid_Seed_Dev_P Parameter: DAP Value: 30 vs. 12
  misc_feature: MA Experiment 20000535 PARAMETER Experiment Name: Zm_Hybrid_Seed_Dev_P Parameter: Organism Value: Zea mays
  misc_feature: MA Experiment 20000535 PARAMETER Experiment Name: Zm_Hybrid_Seed_Dev_P Parameter: Plant Line Value: 35A19
  misc_feature: MA Experiment 20000535 PARAMETER Experiment Name: Zm_Hybrid_Seed_Dev_P Parameter: Tissue Value: Embryo vs. Unfert Floret
  misc_feature: MA Experiment ID: 20001608 Result: Down-regulated in Transcription
  misc_feature: MA Experiment 20001608 PARAMETER Experiment Name: Zm_50ppm_KNO3_L-to-H_P Parameter: Age (day) Value: 21
  misc_feature: MA Experiment 20001608 PARAMETER Experiment Name: Zm_50ppm_KNO3_L-to-H_P Parameter: Organism Value: Zea mays
  misc_feature: MA Experiment 20001608 PARAMETER Experiment Name: Zm_50ppm_KNO3_L-to-H_P Parameter: Plant Line Value: 35A19
  misc_feature: MA Experiment 20001608 PARAMETER Experiment Name: Zm_50ppm_KNO3_L-to-H_P Parameter: Timepoint (hr) Value: 48
  misc_feature: MA Experiment 20001608 PARAMETER Experiment Name: Zm_50ppm_KNO3_L-to-H_P Parameter: Tissue Value: Shoots
  misc_feature: MA Experiment 20001608 PARAMETER Experiment Name: Zm_50ppm_KNO3_L-to-H_P Parameter: Treatment Value: 50ppm KNO3 vs. 50ppm KCl
caaccccgcacgcacaactggccgcgccaaggcaaagctagaagaagacaacgcaaagggagaggacagaggaggagcagaggacgatgggcagcggcggcgctaacactgcccccctcctcaccccctacaagatgggaaaattcgatgttacccacagggtagtcctcgcaccactgacgagacagcggtcctacggcaacgttccccagcctcatgccatactgtactatcagcagagggcgactaaaggaggtcttctgatcgctgaggccacgggggtttcagacactgctcaagggtacaaggacactcctggcatttggacccatgagcaagtcgaagcatggaagccgatcgtagacggggttcaccagaaaggagggatatttttctgtcagatttggcacgtagggagagtctccaattccacgtttcagcctaatgggcaggctccaatttcaagcaccgataagccactaaagcctcaagtgagagccaatggtatagacgtggctactttcgcagttcctagacgcttagagactgatgaaatccctttggtcgtcaatgatttcagggtagctgctcgaaatgcgattgaagctggatttgatggtgtcgaaatccatggagctcacggttacctgattgatcagtttctaaaggacggggtcaacgaccgcacagacaaatacggtggcagtctggagaaccgctgccggtttgcactggaagtaactcaagccgtggtcgacgaaattggagctgacaaggtcgggataaggctgtcaccattcgctagctactcggaggcgccggactcggacccggaagctctgggcctgtacatggcgaacgcgctgaacgagttcgggattctctactgccacatcgtggagccgcggatggtgaaactcggtgaaaagttcgaaaccccctacagccttcgcccgataagggacgctttcaggggaacgttcatcgttgccggcggctacggcagggaggatgggaatcgagcgatctccactgggtatgctgatttggtcgcgttcgggcgcttgttcttggctaatcctgacctgcctcggaggttcgaagtagacgctccccttaacaagtacaacagagacacgttttacatccctgatccggttgttggatacactgactacccatttctttcgtcagatgtataaatgttctcttttcagcaatctgctttttagattgtgtagtaactggttggtgtaccagtaaattattagaggaataaaccattggtctgaatgcctcattctcatatatatggacaaaagcaatatgatcgttgtaattgtgcctcaaatcttatagttgtaaaaaatattgtgaagaagctcagtcagttgtcattgtaaaaaatattgtgaagaagctc

SEQ ID NO: 9655 - protein, 371 aa, Zea mays subsp. mays
  peptide (1)..(371): Ceres Seq. ID no. 13570862
  misc_feature (10)..(345): Pfam Name: NADH:flavin oxidoreductase / NADH oxidase family Pfam Description: NADH:flavin oxidoreductase / NADH oxidase family
  misc_feature (1)..(369): Homolog of NCBI NO: 15223138 NR Description: 12-oxophytodienoate reductase (OPR1) [Arabidopsis
  misc_feature (10)..(369): Homolog of NCBI NO: 7449901 NR Description: probable 12-oxophytodienoate reductase (EC
  misc_feature (1)..(369): Homolog of NCBI NO: 21593388 NR Description: 12-oxophytodienoate reductase (OPR1) [Arabidopsis
  misc_feature (8)..(369): Homolog of NCBI NO: 15223140 NR Description: 12-oxophytodienoate reductase (OPR2) [Arabidopsis
  misc_feature (1)..(369): Homolog of NCBI NO: 4894182 NR Description: 12-oxophytodienoate reductase [Lycopersicon
  misc_feature (8)..(369): Homolog of NCBI NO: 26450549 NR Description: putative 12-oxophytodienoate reductase OPR2
  misc_feature (1)..(369): Homolog of NCBI NO: 2765083 NR Description: 12-oxophytodienoate reductase [Arabidopsis
  misc_feature (1)..(369): Homolog of NCBI NO: 14277800 NR Description: Chain A, Crystal Structure Of 12-Oxophytodienoate
  misc_feature (1)..(370): Homolog of NCBI NO: 13516922 NR Description: 12-oxophytodienoic acid 10, 11-reductase [Pisum
  misc_feature (10)..(370): Homolog of NCBI NO: 7449902 NR Description: probable 12-oxophytodienoate reductase (EC
MGSGGANTAPLLTPYKMGKFDVTHRVVLAPLTRQRSYGNVPQPHAILYYQQRATKGGLLIAEATGVSDTAQGYKDTPGIWTHEQVEAWKPIVDGVHQKGGIFFCQIWHVGRVSNSTFQPNGQAPISSTDKPLKPQVRANGIDVATFAVPRRLETDEIPLVVNDFRVAARNAIEAGFDGVEIHGAHGYLIDQFLKDGVNDRTDKYGGSLENRCRFALEVTQAVVDEIGADKVGIRLSPFASYSEAPDSDPEALGLYMANALNEFGILYCHIVEPRMVKLGEKFETPYSLRPIRDAFRGTFIVAGGYGREDGNRAISTGYADLVAFGRLFLANPDLPRRFEVDAPLNKYNRDTFYIPDPVVGYTDYPFLSSDV

SEQ ID NO: 9656 - protein, 355 aa, Zea mays subsp. mays
  peptide (1)..(355): Ceres Seq. ID no. 13570863
  misc_feature (1)..(329): Pfam Name: NADH:flavin oxidoreductase / NADH oxidase family Pfam Description: NADH:flavin oxidoreductase / NADH oxidase family
  misc_feature (1)..(353): Homolog of NCBI NO: 15223138 NR Description: 12-oxophytodienoate reductase (OPR1) [Arabidopsis
  misc_feature (1)..(353): Homolog of NCBI NO: 7449901 NR Description: probable 12-oxophytodienoate reductase (EC
  misc_feature (1)..(353): Homolog of NCBI NO: 21593388 NR Description: 12-oxophytodienoate reductase (OPR1) [Arabidopsis
  misc_feature (1)..(353): Homolog of NCBI NO: 15223140 NR Description: 12-oxophytodienoate reductase (OPR2) [Arabidopsis
  misc_feature (1)..(353): Homolog of NCBI NO: 4894182 NR Description: 12-oxophytodienoate reductase [Lycopersicon
  misc_feature (1)..(353): Homolog of NCBI NO: 26450549 NR Description: putative 12-oxophytodienoate reductase OPR2
  misc_feature (1)..(353): Homolog of NCBI NO: 2765083 NR Description: 12-oxophytodienoate reductase [Arabidopsis
  misc_feature (1)..(353): Homolog of NCBI NO: 14277800 NR Description: Chain A, Crystal Structure Of 12-Oxophytodienoate
  misc_feature (1)..(354): Homolog of NCBI NO: 13516922 NR Description: 12-oxophytodienoic acid 10, 11-reductase [Pisum
  misc_feature (1)..(354): Homolog of NCBI NO: 7449902 NR Description: probable 12-oxophytodienoate reductase (EC
MGKFDVTHRVVLAPLTRQRSYGNVPQPHAILYYQQRATKGGLLIAEATGVSDTAQGYKDTPGIWTHEQVEAWKPIVDGVHQKGGIFFCQIWHVGRVSNSTFQPNGQAPISSTDKPLKPQVRANGIDVATFAVPRRLETDEIPLVVNDFRVAARNAIEAGFDGVEIHGAHGYLIDQFLKDGVNDRTDKYGGSLENRCRFALEVTQAVVDEIGADKVGIRLSPFASYSEAPDSDPEALGLYMANALNEFGILYCHIVEPRMVKLGEKFETPYSLRPIRDAFRGTFIVAGGYGREDGNRAISTGYADLVAFGRLFLANPDLPRRFEVDAPLNKYNRDTFYIPDPVVGYTDYPFLSSDV

SEQ ID NO: 9657 - DNA, 1473 bp, Zea mays subsp. mays
  misc_feature (1)..(1473): Ceres Seq. ID no. 12347344
  misc_feature: MA Experiment ID: 20000534 Result: Down-regulated in Transcription
  misc_feature: MA Experiment 20000534 PARAMETER Experiment Name: Zm_Hybrid_Pollen_P Parameter: Age (day) Value: 8
  misc_feature: MA Experiment 20000534 PARAMETER Experiment Name: Zm_Hybrid_Pollen_P Parameter: Organism Value: Zea mays
  misc_feature: MA Experiment 20000534 PARAMETER Experiment Name: Zm_Hybrid_Pollen_P Parameter: Plant Line Value: 35A19
  misc_feature: MA Experiment 20000534 PARAMETER Experiment Name: Zm_Hybrid_Pollen_P Parameter: Tissue Value: Pollen vs. Aerial
gcacgagaccattacctataacatcctaatcgaaaagagtagaggtgctactacgccacaagcgcaaccctacaagagcacaaacaaagtggagttttacgggccgctagggctaggcaagcccatggaggagatgctcatggctggaaacgcgaatccaaacccaccgccagctgctgcgccctcggcacccggggcccagacccagagccagaggggtggtggcgctcctcctcccgctgcgggtgcggcagcgcctagcgctggcgcgaccgtaggggcggcgggcacggagcggcgggcgcggccgcacaaggagaaggcgctcaactgcccgcggtgcaactccaccaacaccaagttctgctattacaacaactacagcctgcagcagccgcgctacttctgcaagacctgccgccgctactggaccgagggcggctcgctccgcaacgtcccggtgggcggcggctccaggaagaacaagcgcagctcgtcctcggcggcctccacctccgcggcgatgtccggcacggtctccgtgaagaaccccaagctggtgcacgagggcgcgcaccacgacctcaacctggccttccctcaccacaacaacggccgcgctctgcagccaccggagttcccgtcgtcgttcccgaacctggagagcagcagcgtgtgctaccccggagccgccatgctgggcaacggcgccgccggcaggggcatgggcgcgctctcggctatggagctgctcaggagcaccggctgctacgtccccctgcagcacgttcagctagggatgcccgccgagtacgcagcacccgcgggattcacgcttggcgagttccgcattcccccgccgccgcagtctcagagtgtgctcgggttctcgctggacacgcacggaacggggggttacagcgccggcgggttgcaggagagcgcggtgggcaggatgctcttccccttcgaggacttgaagccggcggtgagcgcagctggcggcggtgcaagcaacgacggagctgatcatcgtcaaaacgaccacaggaaagatcaagctgcaggcgacggcagcagcgtcaccggtggccacgagactccaggcgggttctggagcaatagcttgatcggaaatggcagcagcaatggtggtggaggccattggtaaggcggcgcggcatgcatggctcatgcacgcgcgcgccgttggcagcatgcggagatagggatagagacaaggatccaagttatcaagagggtacggtggaggaggtgattagtgttcacatatatggcgtttgatttttctctggttgtttaatttttctcggatcttcgtgttcttgtgtgtaaatcgacatcgacttggggggctaacacagcaggatatacagattgttaaggcggtggtgaaccggtgatttacagctagcttctcttatccaatggatctcttgtttctgattgtgc

SEQ ID NO: 9658 - protein, 389 aa, Zea mays subsp. mays
  peptide (1)..(389): Ceres Seq. ID no. 12347345
  misc_feature (105)..(166): Pfam Name: Dof domain, zinc finger Pfam Description: Dof domain, zinc finger
  misc_feature (31)..(291): Homolog of NCBI NO: 20372847 NR Description: dof zinc finger protein [Hordeum vulgare subsp.
  misc_feature (31)..(291): Homolog of NCBI NO: 20372895 NR Description: dof zinc finger protein [Hordeum vulgare subsp.
  misc_feature (289)..(389): Homolog of NCBI NO: 20372847 NR Description: dof zinc finger protein [Hordeum vulgare subsp.
  misc_feature (289)..(389): Homolog of NCBI NO: 20372895 NR Description: dof zinc finger protein [Hordeum vulgare subsp.
  misc_feature (36)..(311): Homolog of NCBI NO: 4996642 NR Description: Dof zinc finger protein [Oryza sativa]
  misc_feature (36)..(388): Homolog of NCBI NO: 4996640 NR Description: Dof zinc finger protein [Oryza sativa]
  misc_feature (45)..(388): Homolog of NCBI NO: 38344272 NR Description: OSJNBa0005N02.10 [Oryza sativa (japonica
  misc_feature (49)..(387): Homolog of NCBI NO: 4996642 NR Description: Dof zinc finger protein [Oryza sativa]
  misc_feature (140)..(381): Homolog of NCBI NO: 4996640 NR Description: Dof zinc finger protein [Oryza sativa]
  misc_feature (140)..(381): Homolog of NCBI NO: 38344272 NR Description: OSJNBa0005N02.10 [Oryza sativa (japonica
HETITYNILIEKSRGATTPQAQPYKSTNKVEFYGPLGLGKPMEEMLMAGNANPNPPPAAAPSAPGAQTQSQRGGGAPPPAAGAAAPSAGATVGAAGTERRARPHKEKALNCPRCNSTNTKFCYYNNYSLQQPRYFCKTCRRYWTEGGSLRNVPVGGGSRKNKRSSSSAASTSAAMSGTVSVKNPKLVHEGAHHDLNLAFPHHNNGRALQPPEFPSSFPNLESSSVCYPGAAMLGNGAAGRGMGALSAMELLRSTGCYVPLQHVQLGMPAEYAAPAGFTLGEFRIPPPPQSQSVLGFSLDTHGTGGYSAGGLQESAVGRMLFPFEDLKPAVSAAGGGASNDGADHRQNDHRKDQAAGDGSSVTGGHETPGGFWSNSLIGNGSSNGGGGHW

SEQ ID NO: 9659 - protein, 348 aa, Zea mays subsp. mays
  peptide (1)..(348): Ceres Seq. ID no. 12347346
  misc_feature (64)..(125): Pfam Name: Dof domain, zinc finger Pfam Description: Dof domain, zinc finger
  misc_feature (1)..(250): Homolog of NCBI NO: 20372847 NR Description: dof zinc finger protein [Hordeum vulgare subsp.
  misc_feature (1)..(250): Homolog of NCBI NO: 20372895 NR Description: dof zinc finger protein [Hordeum vulgare subsp.
  misc_feature (248)..(348): Homolog of NCBI NO: 20372847 NR Description: dof zinc finger protein [Hordeum vulgare subsp.
  misc_feature (248)..(348): Homolog of NCBI NO: 20372895 NR Description: dof zinc finger protein [Hordeum vulgare subsp.
  misc_feature (1)..(270): Homolog of NCBI NO: 4996642 NR Description: Dof zinc finger protein [Oryza sativa]
  misc_feature (1)..(347): Homolog of NCBI NO: 4996640 NR Description: Dof zinc finger protein [Oryza sativa]
  misc_feature (4)..(347): Homolog of NCBI NO: 38344272 NR Description: OSJNBa0005N02.10 [Oryza sativa (japonica
  misc_feature (8)..(346): Homolog of NCBI NO: 4996642 NR Description: Dof zinc finger protein [Oryza sativa]
  misc_feature (99)..(340): Homolog of NCBI NO: 4996640 NR Description: Dof zinc finger protein [Oryza sativa]
  misc_feature (99)..(340): Homolog of NCBI NO: 38344272 NR Description: OSJNBa0005N02.10 [Oryza sativa (japonica
MEEMLMAGNANPNPPPAAAPSAPGAQTQSQRGGGAPPPAAGAAAPSAGATVGAAGTERRARPHKEKALNCPRCNSTNTKFCYYNNYSLQQPRYFCKTCRRYWTEGGSLRNVPVGGGSRKNKRSSSSAASTSAAMSGTVSVKNPKLVHEGAHHDLNLAFPHHNNGRALQPPEFPSSFPNLESSSVCYPGAAMLGNGAAGRGMGALSAMELLRSTGCYVPLQHVQLGMPAEYAAPAGFTLGEFRIPPPPQSQSVLGFSLDTHGTGGYSAGGLQESAVGRMLFPFEDLKPAVSAAGGGASNDGADHRQNDHRKDQAAGDGSSVTGGHETPGGFWSNSLIGNGSSNGGGGHW

SEQ ID NO: 9660 - protein, 345 aa, Zea mays subsp. mays
  peptide (1)..(345): Ceres Seq. ID no. 12347347
  misc_feature (61)..(122): Pfam Name: Dof domain, zinc finger Pfam Description: Dof domain, zinc finger
  misc_feature (1)..(247): Homolog of NCBI NO: 20372847 NR Description: dof zinc finger protein [Hordeum vulgare subsp.
  misc_feature (1)..(247): Homolog of NCBI NO: 20372895 NR Description: dof zinc finger protein [Hordeum vulgare subsp.
  misc_feature (245)..(345): Homolog of NCBI NO: 20372847 NR Description: dof zinc finger protein [Hordeum vulgare subsp.
  misc_feature (245)..(345): Homolog of NCBI NO: 20372895 NR Description: dof zinc finger protein [Hordeum vulgare subsp.
  misc_feature (1)..(267): Homolog of NCBI NO: 4996642 NR Description: Dof zinc finger protein [Oryza sativa]
  misc_feature (1)..(344): Homolog of NCBI NO: 4996640 NR Description: Dof zinc finger protein [Oryza sativa]
  misc_feature (1)..(344): Homolog of NCBI NO: 38344272 NR Description: OSJNBa0005N02.10 [Oryza sativa (japonica
  misc_feature (5)..(343): Homolog of NCBI NO: 4996642 NR Description: Dof zinc finger protein [Oryza sativa]
  misc_feature (96)..(337): Homolog of NCBI NO: 4996640 NR Description: Dof zinc finger protein [Oryza sativa]
  misc_feature (96)..(337): Homolog of NCBI NO: 38344272 NR Description: OSJNBa0005N02.10 [Oryza sativa (japonica
MLMAGNANPNPPPAAAPSAPGAQTQSQRGGGAPPPAAGAAAPSAGATVGAAGTERRARPHKEKALNCPRCNSTNTKFCYYNNYSLQQPRYFCKTCRRYWTEGGSLRNVPVGGGSRKNKRSSSSAASTSAAMSGTVSVKNPKLVHEGAHHDLNLAFPHHNNGRALQPPEFPSSFPNLESSSVCYPGAAMLGNGAAGRGMGALSAMELLRSTGCYVPLQHVQLGMPAEYAAPAGFTLGEFRIPPPPQSQSVLGFSLDTHGTGGYSAGGLQESAVGRMLFPFEDLKPAVSAAGGGASNDGADHRQNDHRKDQAAGDGSSVTGGHETPGGFWSNSLIGNGSSNGGGGHW

SEQ ID NO: 9661 - DNA, 1171 bp, Zea mays subsp. mays
  misc_feature (1)..(1171): Ceres Seq. ID no. 12374998
  misc_feature: MA Experiment ID: 108515 Result: Up-regulated in Transcription
  misc_feature: MA Experiment 108515 PARAMETER Experiment Name: Zm_2mM_SA_P Parameter: Age (day) Value: 8
  misc_feature: MA Experiment 108515 PARAMETER Experiment Name: Zm_2mM_SA_P Parameter: Organism Value: Zea mays
  misc_feature: MA Experiment 108515 PARAMETER Experiment Name: Zm_2mM_SA_P Parameter: Plant Line Value: 35A19
  misc_feature: MA Experiment 108515 PARAMETER Experiment Name: Zm_2mM_SA_P Parameter: Timepoint (hr) Value: 12
  misc_feature: MA Experiment 108515 PARAMETER Experiment Name: Zm_2mM_SA_P Parameter: Tissue Value: Aerial
  misc_feature: MA Experiment 108515 PARAMETER Experiment Name: Zm_2mM_SA_P Parameter: Treatment Value: 2mM SA vs. No Treatment
  misc_feature: MA Experiment ID: 108522 Result: Down-regulated in Transcription
  misc_feature: MA Experiment 108522 PARAMETER Experiment Name: Zm_42deg_Heat_P Parameter: Age (day) Value: 8
  misc_feature: MA Experiment 108522 PARAMETER Experiment Name: Zm_42deg_Heat_P Parameter: Organism Value: Zea mays
  misc_feature: MA Experiment 108522 PARAMETER Experiment Name: Zm_42deg_Heat_P Parameter: Plant Line Value: 35A19
  misc_feature: MA Experiment 108522 PARAMETER Experiment Name: Zm_42deg_Heat_P Parameter: Temperature (deg C) Value: 42 vs. 22
  misc_feature: MA Experiment 108522 PARAMETER Experiment Name: Zm_42deg_Heat_P Parameter: Timepoint (hr) Value: 1
  misc_feature: MA Experiment 108522 PARAMETER Experiment Name: Zm_42deg_Heat_P Parameter: Tissue Value: Aerial
  misc_feature: MA Experiment ID: 108536 Result: Up-regulated in Transcription
  misc_feature: MA Experiment 108536 PARAMETER Experiment Name: Zm_Meristem_P Parameter: Age (day) Value: 8
  misc_feature: MA Experiment 108536 PARAMETER Experiment Name: Zm_Meristem_P Parameter: Organism Value: Zea mays
  misc_feature: MA Experiment 108536 PARAMETER Experiment Name: Zm_Meristem_P Parameter: Plant Line Value: 35A19
  misc_feature: MA Experiment 108536 PARAMETER Experiment Name: Zm_Meristem_P Parameter: Tissue Value: Shoot Meristem vs. Above Shoot Meristem
  misc_feature: MA Experiment ID: 108544 Result: Down-regulated in Transcription
  misc_feature: MA Experiment ID: 108556 Result: Down-regulated in Transcription
  misc_feature: MA Experiment 108556 PARAMETER Experiment Name: Zm_Drought_P Parameter: Age (day) Value: 9
  misc_feature: MA Experiment 108556 PARAMETER Experiment Name: Zm_Drought_P Parameter: Organism Value: Zea mays
  misc_feature: MA Experiment 108556 PARAMETER Experiment Name: Zm_Drought_P Parameter: Plant Line Value: 35A19
  misc_feature: MA Experiment 108556 PARAMETER Experiment Name: Zm_Drought_P Parameter: Timepoint (hr) Value: 24
  misc_feature: MA Experiment 108556 PARAMETER Experiment Name: Zm_Drought_P Parameter: Tissue Value: Aerial
  misc_feature: MA Experiment 108556 PARAMETER Experiment Name: Zm_Drought_P Parameter: Treatment Value: Drought vs. No Drought
  misc_feature: MA Experiment ID: 20000478 Result: Down-regulated in Transcription
  misc_feature: MA Experiment 20000478 PARAMETER Experiment Name: Zm_5mM_SA_P Parameter: Age (day) Value: 11
  misc_feature: MA Experiment 20000478 PARAMETER Experiment Name: Zm_5mM_SA_P Parameter: Organism Value: Zea mays
  misc_feature: MA Experiment 20000478 PARAMETER Experiment Name: Zm_5mM_SA_P Parameter: Plant Line Value: 35A19
  misc_feature: MA Experiment 20000478 PARAMETER Experiment Name: Zm_5mM_SA_P Parameter: Timepoint (hr) Value: 72
  misc_feature: MA Experiment 20000478 PARAMETER Experiment Name: Zm_5mM_SA_P Parameter: Tissue Value: Aerial
  misc_feature: MA Experiment 20000478 PARAMETER Experiment Name: Zm_5mM_SA_P Parameter: Treatment Value: 5mM SA vs. No Treatment
  misc_feature: MA Experiment ID: 20000479 Result: Down-regulated in Transcription
  misc_feature: MA Experiment 20000479 PARAMETER Experiment Name: Zm_Drought_P Parameter: Age (day) Value: 10
  misc_feature: MA Experiment 20000479 PARAMETER Experiment Name: Zm_Drought_P Parameter: Organism Value: Zea mays
  misc_feature: MA Experiment 20000479 PARAMETER Experiment Name: Zm_Drought_P Parameter: Plant Line Value: 35A19
  misc_feature: MA Experiment 20000479 PARAMETER Experiment Name: Zm_Drought_P Parameter: Timepoint (hr) Value: 48
  misc_feature: MA Experiment 20000479 PARAMETER Experiment Name: Zm_Drought_P Parameter: Tissue Value: Aerial
  misc_feature: MA Experiment 20000479 PARAMETER Experiment Name: Zm_Drought_P Parameter: Treatment Value: Drought vs. No Drought
  misc_feature: MA Experiment ID: 20000480 Result: Down-regulated in Transcription
  misc_feature: MA Experiment 20000480 PARAMETER Experiment Name: Zm_Drought_P Parameter: Age (day) Value: 11
  misc_feature: MA Experiment 20000480 PARAMETER Experiment Name: Zm_Drought_P Parameter: Organism Value: Zea mays
  misc_feature: MA Experiment 20000480 PARAMETER Experiment Name: Zm_Drought_P Parameter: Plant Line Value: 35A19
  misc_feature: MA Experiment 20000480 PARAMETER Experiment Name: Zm_Drought_P Parameter: Timepoint (hr) Value: 72
  misc_feature: MA Experiment 20000480 PARAMETER Experiment Name: Zm_Drought_P Parameter: Tissue Value: Aerial
  misc_feature: MA Experiment 20000480 PARAMETER Experiment Name: Zm_Drought_P Parameter: Treatment Value: Drought vs. No Drought
aagatgggtagcagaagcagccagtttccgtcaatggcactggccatggccacggtgctgatggcactggccggggtagccgccacagcgcgagccggcggcggcatcgccatctactggggccagaacggcaacgaggggacgctggcgcagacctgcgccacgggcaactacaggttcgtcaacgtggccttcctccccacgttcggcaaggggcagacgccggcgcttaacctggcgggccactgcgacccagcgagcggcgggtgcacgggcgtgggcgcggacgtcaaggcgtgccagcgcatgggcgtcaaggtcctgctctccatcggcgggggcgtcggcagctacgggctctcgtcccgggccgacgcccggagcgtcgcggcgtacctctgggacaactacctcggcggcggcggcggcggcgggtccgagtccagctccaggcccctcggcgacgccgtcctcgacggcgtcgacttcgacatcgagagcggcgggggcatgtactgggacgacctggcccggttcctcaagtcctactcccggcgcgggcgcgcgcggaggcccgtgtacctgtccgctgcgccgcagtgcccgttcccggacgcgtcgctgggcaccgcgctcgcgcacggggctgttcgactacgtgtgggtgcagttctacaacaacccgccgtgccagtacagcgcgagcgccggcgtgggcagcctggcgaaagcgtgggcgcagtggacgtccatcagggcggggcgggtgttcctcggcctccccgccgcgccccaggccgctggcagcgggttcgtgccggcgagcgacctcgtggcgcaggtgctgccggtggtcaagaactccaccaagtacgggggcatcatgctctggtccaggtactacgacgggctcacggggtacagcgacgcggtcaagtcctacgttgagctagccagcctcgtgtcatgtcgggcgtgcaggagggagtaggactgtaggaggcacatgcttccatgtgcgtgcacgtgcggggcgttatcatacctatgggtatactgggtcgctattcgctaaggaagagaccggaaagaagcaaatcgcaaatacagcttcttagcggtgtttgtttgggattataatccacttagattatataaaaaaaaaaaaaaa

SEQ ID NO: 9662 - protein, 315 aa, Zea mays subsp. mays
  peptide (1)..(315): Ceres Seq. ID no. 12374999
  misc_feature (34)..(215): Pfam Name: Glycosyl hydrolases family 18 Pfam Description: Glycosyl hydrolases family 18
  misc_feature (6)..(215): Homolog of NCBI NO: 7451375 NR Description: chitinase (EC 3.2.1.14) III C10501 - rice
  misc_feature (19)..(215): Homolog of NCBI NO: 34908482 NR Description: chitinase [Oryza sativa (japonica cultivar-group)]
  misc_feature (6)..(215): Homolog of NCBI NO: 2425170 NR Description: basic class III chitinase OsChib3b [Oryza sativa
  misc_feature (20)..(215): Homolog of NCBI NO: 27817953 NR Description: putative class III acidic chitinase [Oryza sativa
  misc_feature (2)..(215): Homolog of NCBI NO: 10954033 NR Description: class III acidic chitinase [Malus x domestica]
  misc_feature (15)..(215): Homolog of NCBI NO: 3451147 NR Description: chitinase [Hevea brasiliensis]
  misc_feature (15)..(215): Homolog of NCBI NO: 20981684 NR Description: Hevamine A precursor [Includes: Chitinase ;
  misc_feature (12)..(215): Homolog of NCBI NO: 4530607 NR Description: chitinase [Fragaria x ananassa]
  misc_feature (2)..(215): Homolog of NCBI NO: 34908480 NR Description: putative chitinase [Oryza sativa (japonica >gi|20161646|dbj|BAB90565.1| putative chitinase [Oryza sativa
  misc_feature (12)..(215): Homolog of NCBI NO: 28848952 NR Description: acidic class III chitinase [Rehmannia glutinosa]
KMGSRSSQFPSMALAMATVLMALAGVAATARAGGGIAIYWGQNGNEGTLAQTCATGNYRFVNVAFLPTFGKGQTPALNLAGHCDPASGGCTGVGADVKACQRMGVKVLLSIGGGVGSYGLSSRADARSVAAYLWDNYLGGGGGGGSESSSRPLGDAVLDGVDFDIESGGGMYWDDLARFLKSYSRRGRARRPVYLSAAPQCPFPDASLGTALAHGAVRLRVGAVLQQPAVPVQRERRRGQPGESVGAVDVHQGGAGVPRPPRRAPGRWQRVRAGERPRGAGAAGGQELHQVRGHHALVQVLRRAHGVQRRGQVLR

SEQ ID NO: 9663 - protein, 314 aa, Zea mays subsp. mays
  peptide (1)..(314): Ceres Seq. ID no. 12375000
  misc_feature (33)..(214): Pfam Name: Glycosyl hydrolases family 18 Pfam Description: Glycosyl hydrolases family 18
  misc_feature (5)..(214): Homolog of NCBI NO: 7451375 NR Description: chitinase (EC 3.2.1.14) III C10501 - rice
  misc_feature (18)..(214): Homolog of NCBI NO: 34908482 NR Description: chitinase [Oryza sativa (japonica cultivar-group)]
  misc_feature (5)..(214): Homolog of NCBI NO: 2425170 NR Description: basic class III chitinase OsChib3b [Oryza sativa
  misc_feature (19)..(214): Homolog of NCBI NO: 27817953 NR Description: putative class III acidic chitinase [Oryza sativa
  misc_feature (1)..(214): Homolog of NCBI NO: 10954033 NR Description: class III acidic chitinase [Malus x domestica]
  misc_feature (14)..(214): Homolog of NCBI NO: 3451147 NR Description: chitinase [Hevea brasiliensis]
  misc_feature (14)..(214): Homolog of NCBI NO: 20981684 NR Description: Hevamine A precursor [Includes: Chitinase ;
  misc_feature (11)..(214): Homolog of NCBI NO: 4530607 NR Description: chitinase [Fragaria x ananassa]
  misc_feature (1)..(214): Homolog of NCBI NO: 34908480 NR Description: putative chitinase [Oryza sativa (japonica >gi|20161646|dbj|BAB90565.1| putative chitinase [Oryza sativa
  misc_feature (11)..(214): Homolog of NCBI NO: 28848952 NR Description: acidic class III chitinase [Rehmannia glutinosa]
MGSRSSQFPSMALAMATVLMALAGVAATARAGGGIAIYWGQNGNEGTLAQTCATGNYRFVNVAFLPTFGKGQTPALNLAGHCDPASGGCTGVGADVKACQRMGVKVLLSIGGGVGSYGLSSRADARSVAAYLWDNYLGGGGGGGSESSSRPLGDAVLDGVDFDIESGGGMYWDDLARFLKSYSRRGRARRPVYLSAAPQCPFPDASLGTALAHGAVRLRVGAVLQQPAVPVQRERRRGQPGESVGAVDVHQGGAGVPRPPRRAPGRWQRVRAGERPRGAGAAGGQELHQVRGHHALVQVLRRAHGVQRRGQVLR

SEQ ID NO: 9664 - protein, 304 aa, Zea mays subsp. mays
  peptide (1)..(304): Ceres Seq. ID no. 12375001
  misc_feature (23)..(204): Pfam Name: Glycosyl hydrolases family 18 Pfam Description: Glycosyl hydrolases family 18
  misc_feature (1)..(204): Homolog of NCBI NO: 7451375 NR Description: chitinase (EC 3.2.1.14) III C10501 - rice
  misc_feature (8)..(204): Homolog of NCBI NO: 34908482 NR Description: chitinase [Oryza sativa (japonica cultivar-group)]
  misc_feature (1)..(204): Homolog of NCBI NO: 2425170 NR Description: basic class III chitinase OsChib3b [Oryza sativa
  misc_feature (9)..(204): Homolog of NCBI NO: 27817953 NR Description: putative class III acidic chitinase [Oryza sativa
  misc_feature (1)..(204): Homolog of NCBI NO: 10954033 NR Description: class III acidic chitinase [Malus x domestica]
  misc_feature (4)..(204): Homolog of NCBI NO: 3451147 NR Description: chitinase [Hevea brasiliensis]
  misc_feature (4)..(204): Homolog of NCBI NO: 20981684 NR Description: Hevamine A precursor [Includes: Chitinase ;
  misc_feature (1)..(204): Homolog of NCBI NO: 4530607 NR Description: chitinase [Fragaria x ananassa]
  misc_feature (1)..(204): Homolog of NCBI NO: 34908480 NR Description: putative chitinase [Oryza sativa (japonica >gi|20161646|dbj|BAB90565.1| putative chitinase [Oryza sativa
  misc_feature (1)..(204): Homolog of NCBI NO: 28848952 NR Description: acidic class III chitinase [Rehmannia glutinosa]
MALAMATVLMALAGVAATARAGGGIAIYWGQNGNEGTLAQTCATGNYRFVNVAFLPTFGKGQTPALNLAGHCDPASGGCTGVGADVKACQRMGVKVLLSIGGGVGSYGLSSRADARSVAAYLWDNYLGGGGGGGSESSSRPLGDAVLDGVDFDIESGGGMYWDDLARFLKSYSRRGRARRPVYLSAAPQCPFPDASLGTALAHGAVRLRVGAVLQQPAVPVQRERRRGQPGESVGAVDVHQGGAGVPRPPRRAPGRWQRVRAGERPRGAGAAGGQELHQVRGHHALVQVLRRAHGVQRRGQVLR

SEQ ID NO: 9665 - DNA, 1768 bp, Zea mays subsp. mays
  misc_feature (1)..(1768): Ceres Seq. ID no. 12354379
  misc_feature: MA Experiment ID: 20000534 Result: Down-regulated in Transcription
  misc_feature: MA Experiment 20000534 PARAMETER Experiment Name: Zm_Hybrid_Pollen_P Parameter: Age (day) Value: 8
  misc_feature: MA Experiment 20000534 PARAMETER Experiment Name: Zm_Hybrid_Pollen_P Parameter: Organism Value: Zea mays
  misc_feature: MA Experiment 20000534 PARAMETER Experiment Name: Zm_Hybrid_Pollen_P Parameter: Plant Line Value: 35A19
  misc_feature: MA Experiment 20000534 PARAMETER Experiment Name: Zm_Hybrid_Pollen_P Parameter: Tissue Value: Pollen vs. Aerial
aaaatccgcttcaagtccgtcgattgttgttttgtctttcctctttctctatcgaaaacggagcgcctgatacgatagtagcagcacagctagctctcctccccagaatctcgccggattccgccccccgccgcgccctcgcttccgccgcaggttcgcgtctgtgcccgcgcgtgttgtactgccggcggacggcggtgttggtggtggttggtggagttgccgacgacggtaggctatggactaccggccctccgacagcagcggaactgatgatgatcttccacaatttccacataagagtatcagaggcagcggacgtgtcagtggtaatgggcgagctgttgttcctgctggttcatatgctagggcaccaactgatatggtagcacaagttcaacaacttgagcaagaagcatatcgctcagtccttcgtgcattcaaagcccagtctgatgccattacatgggagaaggaaggtctcatgactgaacttaggaaggagctaagagtatctgacaaagcacacagggaactgttaaatagagtcaacaacgataatattatatgtagcataagggaatggagatcaacaggagggcttcaggcaagcttgtctaataacccacaactgattcatgactctgttcccagtcctaccacctctggccgtaagaggcaaaagacatctcaatctgttcctgctttacctgcaccgcctcctgcgatgcattcacaacagctggctacaccaacacagccatcatcttcaactgctaggaaagcagtacccccaggccataaaggcaaaaagatgaaaccaggtcagaaggtaccaggtggctctgcagccaagcctataccatcttcagcaggtcctagtggaagaggaccgcacatgaataggggtggttctgctcctgaagctcaagctcagaatgtcgatccattgattggtcgtaaagtgattagtcggtggcctgaagacaatagtttctatgaagcagtcatatacgaatatgatgctgaaacgggccttcatgcactggtttatgacatcgatacggaagatgaaacctgggagtgggttgatcttaaagagatgggacctgaagacataagatggcaagaggatgactctgggatagaccctgttacatatctgcgcagccggggtggcccaactagtggcgttaggaagccagcaggtcgcggtgggcccatgccaggttctgtaagaggaagaggattacagaaaaacatgcctaagaaagattttccacctccacaaaatggtgttggcaagagaagttccgatgacattgatatccttcataccgagagcctaataaaagaggtggggaaagtttttagcgttagcaatcctgatccacaggaagtagaaaaggcaaagaaagcactgaaggagcaagaacagtcgttgattgacgccatagcaaggcttgctgaggcatcagatggtgaaagtgatgggcacaatcgtgggcgaaggaacttgtatgctgctaaccagcatcaagcaagctacgttggtgccatgcccgtcggtgacagagctggtgccatgtaaacactgcatgaacgcatgcacaacataaaataactgcctgttgtacaatccatcgctaatatttattctggatttaggtctctgtaggctcttttgctttgggatacttgtttttttttacaattgtaattcagaacgctgaccatgtaaagcttgtagatgcgtgtttctgtctcc

SEQ ID NO: 9666 - protein, 450 aa, Zea mays subsp. mays
  peptide (1)..(450): Ceres Seq. ID no. 12354380
  misc_feature (49)..(122): Pfam Name: ENT domain Pfam Description: ENT domain
  misc_feature (1)..(445): Homolog of NCBI NO: 38637206 NR Description: unknown protein [Oryza sativa (japonica
  misc_feature (206)..(419): Homolog of NCBI NO: 15229958 NR Description: unknown protein; protein id: At3g12140.1
  misc_feature (49)..(159): Homolog of NCBI NO: 15229958 NR Description: unknown protein; protein id: At3g12140.1
  misc_feature (206)..(427): Homolog of NCBI NO: 9294111 NR Description: emb|CAB88266.1~gene_id:T23B7.8~similar to unknown
  misc_feature (49)..(159): Homolog of NCBI NO: 9294111 NR Description: emb|CAB88266.1~gene_id:T23B7.8~similar to unknown
  misc_feature (236)..(419): Homolog of NCBI NO: 15240146 NR Description: putative protein; protein id: At5g06780.1, by cDNA: 157058., supported by cDNA: gi_16226578 [Arabidopsis >gi|9759306|dbj|BAB09812.1|
  misc_feature (48)..(184): Homolog of NCBI NO: 15240146 NR Description: putative protein; protein id: At5g06780.1, by cDNA: 157058., supported by cDNA: gi_16226578 [Arabidopsis >gi|9759306|dbj|BAB09812.1|
  misc_feature (236)..(419): Homolog of NCBI NO: 21553685 NR Description: unknown [Arabidopsis thaliana]
  misc_feature (49)..(184): Homolog of NCBI NO: 21553685 NR Description: unknown [Arabidopsis thaliana]
  misc_feature (1)..(329): Homolog of NCBI NO: 11358228 NR Description: hypothetical protein T24H18.190 - Arabidopsis >gi|7630058|emb|CAB88266.1| putative protein [Arabidopsis
MDYRPSDSSGTDDDLPQFPHKSIRGSGRVSGNGRAVVPAGSYARAPTDMVAQVQQLEQEAYRSVLRAFKAQSDAITWEKEGLMTELRKELRVSDKAHRELLNRVNNDNIICSIREWRSTGGLQASLSNNPQLIHDSVPSPTTSGRKRQKTSQSVPALPAPPPAMHSQQLATPTQPSSSTARKAVPPGHKGKKMKPGQKVPGGSAAKPIPSSAGPSGRGPHMNRGGSAPEAQAQNVDPLIGRKVISRWPEDNSFYEAVIYEYDAETGLHALVYDIDTEDETWEWVDLKEMGPEDIRWQEDDSGIDPVTYLRSRGGPTSGVRKPAGRGGPMPGSVRGRGLQKNMPKKDFPPPQNGVGKRSSDDIDILHTESLIKEVGKVFSVSNPDPQEVEKAKKALKEQEQSLIDAIARLAEASDGESDGHNRGRRNLYAANQHQASYVGAMPVGDRAGAM

SEQ ID NO: 9667 - protein, 402 aa, Zea mays subsp. mays
  peptide (1)..(402): Ceres Seq. ID no. 12354381
  misc_feature (1)..(74): Pfam Name: ENT domain Pfam Description: ENT domain
  misc_feature (1)..(397): Homolog of NCBI NO: 38637206 NR Description: unknown protein [Oryza sativa (japonica
  misc_feature (158)..(371): Homolog of NCBI NO: 15229958 NR Description: unknown protein; protein id: At3g12140.1
  misc_feature (1)..(111): Homolog of NCBI NO: 15229958 NR Description: unknown protein; protein id: At3g12140.1
  misc_feature (158)..(379): Homolog of NCBI NO: 9294111 NR Description: emb|CAB88266.1~gene_id:T23B7.8~similar to unknown
  misc_feature (1)..(111): Homolog of NCBI NO: 9294111 NR Description: emb|CAB88266.1~gene_id:T23B7.8~similar to unknown
  misc_feature (188)..(371): Homolog of NCBI NO: 15240146 NR Description: putative protein; protein id: At5g06780.1, by cDNA: 157058., supported by cDNA: gi_16226578 [Arabidopsis >gi|9759306|dbj|BAB09812.1|
  misc_feature (1)..(136): Homolog of NCBI NO: 15240146 NR Description: putative protein; protein id: At5g06780.1, by cDNA: 157058., supported by cDNA: gi_16226578 [Arabidopsis >gi|9759306|dbj|BAB09812.1|
  misc_feature (188)..(371): Homolog of NCBI NO: 21553685 NR Description: unknown [Arabidopsis thaliana]
  misc_feature (1)..(136): Homolog of NCBI NO: 21553685 NR Description: unknown [Arabidopsis thaliana]
  misc_feature (1)..(281): Homolog of NCBI NO: 11358228 NR Description: hypothetical protein T24H18.190 - Arabidopsis >gi|7630058|emb|CAB88266.1| putative protein [Arabidopsis
MVAQVQQLEQEAYRSVLRAFKAQSDAITWEKEGLMTELRKELRVSDKAHRELLNRVNNDNIICSIREWRSTGGLQASLSNNPQLIHDSVPSPTTSGRKRQKTSQSVPALPAPPPAMHSQQLATPTQPSSSTARKAVPPGHKGKKMKPGQKVPGGSAAKPIPSSAGPSGRGPHMNRGGSAPEAQAQNVDPLIGRKVISRWPEDNSFYEAVIYEYDAETGLHALVYDIDTEDETWEWVDLKEMGPEDIRWQEDDSGIDPVTYLRSRGGPTSGVRKPAGRGGPMPGSVRGRGLQKNMPKKDFPPPQNGVGKRSSDDIDILHTESLIKEVGKVFSVSNPDPQEVEKAKKALKEQEQSLIDAIARLAEASDGESDGHNRGRRNLYAANQHQASYVGAMPVGDRAGAM

SEQ ID NO: 9668 - protein, 368 aa, Zea mays subsp. mays
  peptide (1)..(368): Ceres Seq. ID no. 12354382
  misc_feature (1)..(363): Homolog of NCBI NO: 38637206 NR Description: unknown protein [Oryza sativa (japonica
  misc_feature (124)..(337): Homolog of NCBI NO: 15229958 NR Description: unknown protein; protein id: At3g12140.1
  misc_feature (1)..(77): Homolog of NCBI NO: 15229958 NR Description: unknown protein; protein id: At3g12140.1
  misc_feature (124)..(345): Homolog of NCBI NO: 9294111 NR Description: emb|CAB88266.1~gene_id:T23B7.8~similar to unknown
  misc_feature (1)..(77): Homolog of NCBI NO: 9294111 NR Description: emb|CAB88266.1~gene_id:T23B7.8~similar to unknown
  misc_feature (154)..(337): Homolog of NCBI NO: 15240146 NR Description: putative protein; protein id: At5g06780.1, by cDNA: 157058., supported by cDNA: gi_16226578 [Arabidopsis >gi|9759306|dbj|BAB09812.1|
  misc_feature (1)..(102): Homolog of NCBI NO: 15240146 NR Description: putative protein; protein id: At5g06780.1, by cDNA: 157058., supported by cDNA: gi_16226578 [Arabidopsis >gi|9759306|dbj|BAB09812.1|
  misc_feature (154)..(337): Homolog of NCBI NO: 21553685 NR Description: unknown [Arabidopsis thaliana]
  misc_feature (1)..(102): Homolog of NCBI NO: 21553685 NR Description: unknown [Arabidopsis thaliana]
  misc_feature (1)..(247): Homolog of NCBI NO: 11358228 NR Description: hypothetical protein T24H18.190 - Arabidopsis >gi|7630058|emb|CAB88266.1| putative protein [Arabidopsis
MTELRKELRVSDKAHRELLNRVNNDNIICSIREWRSTGGLQASLSNNPQLIHDSVPSPTTSGRKRQKTSQSVPALPAPPPAMHSQQLATPTQPSSSTARKAVPPGHKGKKMKPGQKVPGGSAAKPIPSSAGPSGRGPHMNRGGSAPEAQAQNVDPLIGRKVISRWPEDNSFYEAVIYEYDAETGLHALVYDIDTEDETWEWVDLKEMGPEDIRWQEDDSGIDPVTYLRSRGGPTSGVRKPAGRGGPMPGSVRGRGLQKNMPKKDFPPPQNGVGKRSSDDIDILHTESLIKEVGKVFSVSNPDPQEVEKAKKALKEQEQSLIDAIARLAEASDGESDGHNRGRRNLYAANQHQASYVGAMPVGDRAGAM

SEQ ID NO: 9669 - DNA, 1632 bp, Zea mays subsp. mays
  misc_feature (1)..(1632): Ceres Seq. ID no. 12391417
  misc_feature: MA Experiment ID: 108504 Result: Up-regulated in Transcription
  misc_feature: MA Experiment 108504 PARAMETER Experiment Name: Zm_Drought_P Parameter: Age (day) Value: 8
  misc_feature: MA Experiment 108504 PARAMETER Experiment Name: Zm_Drought_P Parameter: Organism Value: Zea mays
  misc_feature: MA Experiment 108504 PARAMETER Experiment Name: Zm_Drought_P Parameter: Plant Line Value: 35A19
  misc_feature: MA Experiment 108504 PARAMETER Experiment Name: Zm_Drought_P Parameter: Timepoint (hr) Value: 12
  misc_feature: MA Experiment 108504 PARAMETER Experiment Name: Zm_Drought_P Parameter: Tissue Value: Aerial
  misc_feature: MA Experiment 108504 PARAMETER Experiment Name: Zm_Drought_P Parameter: Treatment Value: Drought vs. No Drought
  misc_feature: MA Experiment ID: 108529 Result: Down-regulated in Transcription
  misc_feature: MA Experiment 108529 PARAMETER Experiment Name: Zm_Imbibed_Seeds_P Parameter: Age (day) Value: 5 vs. 2
  misc_feature: MA Experiment 108529 PARAMETER Experiment Name: Zm_Imbibed_Seeds_P Parameter: Organism Value: Zea mays
  misc_feature: MA Experiment 108529 PARAMETER Experiment Name: Zm_Imbibed_Seeds_P Parameter: Plant Line Value: 35A19
  misc_feature: MA Experiment 108529 PARAMETER Experiment Name: Zm_Imbibed_Seeds_P Parameter: Tissue Value: Roots vs. Embryo
  misc_feature: MA Experiment ID: 108544 Result: Down-regulated in Transcription
  misc_feature: MA Experiment ID: 108546 Result: Down-regulated in Transcription
  misc_feature: MA Experiment 108546 PARAMETER Experiment Name: Zm_Imbibed_Seeds_P Parameter: Age (day) Value: 3 vs. 2
  misc_feature: MA Experiment 108546 PARAMETER Experiment Name: Zm_Imbibed_Seeds_P Parameter: Organism Value: Zea mays
  misc_feature: MA Experiment 108546 PARAMETER Experiment Name: Zm_Imbibed_Seeds_P Parameter: Plant Line Value: 35A19
  misc_feature: MA Experiment 108546 PARAMETER Experiment Name: Zm_Imbibed_Seeds_P Parameter: Tissue Value: Roots vs. Embryo
  misc_feature: MA Experiment ID: 108689 Result: Up-regulated in Transcription
  misc_feature: MA Experiment 108689 PARAMETER Experiment Name: Zm_Drought_Roots_P Parameter: Age (day) Value: 9
  misc_feature: MA Experiment 108689 PARAMETER Experiment Name: Zm_Drought_Roots_P Parameter: Organism Value: Zea mays
  misc_feature: MA Experiment 108689 PARAMETER Experiment Name: Zm_Drought_Roots_P Parameter: Plant Line Value: 35A19
  misc_feature: MA Experiment 108689 PARAMETER Experiment Name: Zm_Drought_Roots_P Parameter: Timepoint (hr) Value: 24
  misc_feature: MA Experiment 108689 PARAMETER Experiment Name: Zm_Drought_Roots_P Parameter: Tissue Value: Roots
  misc_feature: MA Experiment 108689 PARAMETER Experiment Name: Zm_Drought_Roots_P Parameter: Treatment Value: Drought vs. No Drought
  misc_feature: MA Experiment ID: 20000479 Result: Up-regulated in Transcription
  misc_feature: MA Experiment 20000479 PARAMETER Experiment Name: Zm_Drought_P Parameter: Age (day) Value: 10
  misc_feature: MA Experiment 20000479 PARAMETER Experiment Name: Zm_Drought_P Parameter: Organism Value: Zea mays
  misc_feature: MA Experiment 20000479 PARAMETER Experiment Name: Zm_Drought_P Parameter: Plant Line Value: 35A19
  misc_feature: MA Experiment 20000479 PARAMETER Experiment Name: Zm_Drought_P Parameter: Timepoint (hr) Value: 48
  misc_feature: MA Experiment 20000479 PARAMETER Experiment Name: Zm_Drought_P Parameter: Tissue Value: Aerial
  misc_feature: MA Experiment 20000479 PARAMETER Experiment Name: Zm_Drought_P Parameter: Treatment Value: Drought vs. No Drought
gcacgagaccattacctagaacatcctaatcgaaaaaacaacatacttctagattctggtcgatcgtcgatgaggccggcgccggagacaagcacgcggcggccgcagctgcgtcgccgtcgtccagtgccattggtgacggtggccgtgtctttggcgctcatctcgctggcgtgccttcctgtcttcgcggatgcaagcagagcgctgcaccgcgaccgggaggagcaccggaggcagcaccaccgcacggaggacaagaagagccgcgtctcgctccctcccgacgctgacggcgactctccgcccgagcctccggactccggcggcgcgccgccgcctgccgacgacagcgactgcggcaacgtgttcgacgtgagggcgttcggcgcgtcgggcgacggctcgtgcgtcgacgacgacacggccgcgttccgcgcggtgtggaaggcggcgtgctcctccgactccgccgcggccacgctgctggtgccgtcggacggcgtgttcaccatcgcctccaccatcttctccgggccgtgcaagcccgacctcaccttccaaatcgatggcgtcctcatgccgccggacggcccggcgagctggccggcgacggacagccggaaacagtggatagtcttctacaaggccgatcgcttgacgctggcgggggaaggcaccatcgaaggcaacggtgaggagtggtgggatctgccgtgcaagcctcacaggggtccaaacggatcgacgctgcgcggaccatgtgacagccccgcgctcatacgattcttctcgagcaatgacgtgacggtatgcggcctgcggatcgagaacagcccgcagttccacctcaggttcgacgactgcgagcgcgtgcgcgtcgacggcctcttcgtcagctcgccggcgtccagccccaacacggacggcgtccacgtcgagaacaccaagtccgtccagatcctcaactctaggatctacaacggcgacgactgcgtctccatcggcgccggatgctccgatgtccacgtcgagaacataacatgcggccacggccatggaattagcatcggcagcctgggtgtccacaacacccacgcctgcgtgtccaacgtcacggtccggaacgtgcggatactcgactccgacaacggcgtccggatcaagacgtggcagggcggcgccggcgcggtgtcggcggtcgagttcaccggcgtgcagatgcagaacgtgaagaactgcatcgtcatcgaccagtactactgcctcggccacgggtgcgccaaccagacctccgcggtgcgcgtggccggcgtcgcgtacagggacatccacggcacgtacaacccgcaggccggcgcgcccatccgcctcgcgtgcagcgacgccgtcgcctgcacggacatcaccatgtctggcgtcgagctgctgccggccggcggggacgacggagcactgctcgccgacccctactgctggaacgcgtacggggtcatggagacgctcacgctgccaccggtgtactgcttgctggagggcagcccggagtctctccaggatccgctcaccagttgctgagatgagatcgttttctttactaacaaagatttctctcctgagacagtcaacgcg

SEQ ID NO: 9670 - protein, 525 aa, Zea mays subsp. mays
  peptide (1)..(525): Ceres Seq. ID no. 12391418
  misc_feature (153)..(476): Pfam Name: Glycosyl hydrolases family 28 Pfam Description: Glycosyl hydrolases family 28
  misc_feature (92)..(525): Homolog of NCBI NO: 34894822 NR Description: putative polygalacturonase PG2 [Oryza sativa
  misc_feature (54)..(525): Homolog of NCBI NO: 15221078 NR Description: polygalacturonase, putative; protein id: supported by cDNA: gi_15292728, supported by cDNA: gi_15294255, by cDNA: gi_20465274 [Arabidopsis thaliana]
  misc_feature (54)..(525): Homolog of NCBI NO: 15294256 NR Description: At1g48100/F21D18_17 [Arabidopsis thaliana]
  misc_feature (54)..(525): Homolog of NCBI NO: 25405916 NR Description: protein F21D18.18 [imported] - Arabidopsis >gi|8778527|gb|AAF79535.1|AC023673_23 F21D18.18 [Arabidopsis
  misc_feature (64)..(522): Homolog of NCBI NO: 18378969 NR Description: polygalacturonase, putative; protein id: [Arabidopsis thaliana] >gi|25406725|pir||B86155 probable
  misc_feature (79)..(525): Homolog of NCBI NO: 34894418 NR Description: putative polygalacturonase-like protein [Oryza
  misc_feature (111)..(516): Homolog of NCBI NO: 15223598 NR Description: polygalacturonase, putative; protein id: [Arabidopsis thaliana] >gi|25289348|pir||A96609 probable
  misc_feature (101)..(482): Homolog of NCBI NO: 15234359 NR Description: polygalacturonase, putative; protein id: [Arabidopsis thaliana] >gi|25289357|pir||C85024 probable
  misc_feature (252)..(515): Homolog of NCBI NO: 18406803 NR Description: polygalacturonase, putative; protein id: supported by cDNA: gi_16974584 [Arabidopsis thaliana] At1g60590/F8A5_12 [Arabidopsis thaliana]
  misc_feature (252)..(515): Homolog of NCBI NO: 25404278 NR Description: probable polygalacturonase F8A5.12 [imported] - thaliana >gi|2462753|gb|AAB71972.1| putative polygalacturonase
ARDHYLEHPNRKNNILLDSGRSSMRPAPETSTRRPQLRRRRPVPLVTVAVSLALISLACLPVFADASRALHRDREEHRRQHHRTEDKKSRVSLPPDADGDSPPEPPDSGGAPPPADDSDCGNVFDVRAFGASGDGSCVDDDTAAFRAVWKAACSSDSAAATLLVPSDGVFTIASTIFSGPCKPDLTFQIDGVLMPPDGPASWPATDSRKQWIVFYKADRLTLAGEGTIEGNGEEWWDLPCKPHRGPNGSTLRGPCDSPALIRFFSSNDVTVCGLRIENSPQFHLRFDDCERVRVDGLFVSSPASSPNTDGVHVENTKSVQILNSRIYNGDDCVSIGAGCSDVHVENITCGHGHGISIGSLGVHNTHACVSNVTVRNVRILDSDNGVRIKTWQGGAGAVSAVEFTGVQMQNVKNCIVIDQYYCLGHGCANQTSAVRVAGVAYRDIHGTYNPQAGAPIRLACSDAVACTDITMSGVELLPAGGDDGALLADPYCWNAYGVMETLTLPPVYCLLEGSPESLQDPLTSC

SEQ ID NO: 9671 - protein, 502 aa, Zea mays subsp. mays
  peptide (1)..(502): Ceres Seq. ID no. 12391419
  misc_feature (130)..(453): Pfam Name: Glycosyl hydrolases family 28 Pfam Description: Glycosyl hydrolases family 28
  misc_feature (69)..(502): Homolog of NCBI NO: 34894822 NR Description: putative polygalacturonase PG2 [Oryza sativa
  misc_feature (31)..(502): Homolog of NCBI NO: 15221078 NR Description: polygalacturonase, putative; protein id: supported by cDNA: gi_15292728, supported by cDNA: gi_15294255, by cDNA: gi_20465274 [Arabidopsis thaliana]
  misc_feature (31)..(502): Homolog of NCBI NO: 15294256 NR Description: At1g48100/F21D18_17 [Arabidopsis thaliana]
  misc_feature (31)..(502): Homolog of NCBI NO: 25405916 NR Description: protein F21D18.18 [imported] - Arabidopsis >gi|8778527|gb|AAF79535.1|AC023673_23 F21D18.18 [Arabidopsis
  misc_feature (41)..(499): Homolog of NCBI NO: 18378969 NR Description: polygalacturonase, putative; protein id: [Arabidopsis thaliana] >gi|25406725|pir||B86155 probable
  misc_feature (56)..(502): Homolog of NCBI NO: 34894418 NR Description: putative polygalacturonase-like protein [Oryza
  misc_feature (88)..(493): Homolog of NCBI NO: 15223598 NR Description: polygalacturonase, putative; protein id: [Arabidopsis thaliana] >gi|25289348|pir||A96609 probable
  misc_feature (78)..(459): Homolog of NCBI NO: 15234359 NR Description: polygalacturonase, putative; protein id: [Arabidopsis thaliana] >gi|25289357|pir||C85024 probable
  misc_feature (229)..(492): Homolog of NCBI NO: 18406803 NR Description: polygalacturonase, putative; protein id: supported by cDNA: gi_16974584 [Arabidopsis thaliana] At1g60590/F8A5_12 [Arabidopsis thaliana]
  misc_feature (229)..(492): Homolog of NCBI NO: 25404278 NR Description: probable polygalacturonase F8A5.12 [imported] - thaliana >gi|2462753|gb|AAB71972.1| putative polygalacturonase
MRPAPETSTRRPQLRRRRPVPLVTVAVSLALISLACLPVFADASRALHRDREEHRRQHHRTEDKKSRVSLPPDADGDSPPEPPDSGGAPPPADDSDCGNVFDVRAFGASGDGSCVDDDTAAFRAVWKAACSSDSAAATLLVPSDGVFTIASTIFSGPCKPDLTFQIDGVLMPPDGPASWPATDSRKQWIVFYKADRLTLAGEGTIEGNGEEWWDLPCKPHRGPNGSTLRGPCDSPALIRFFSSNDVTVCGLRIENSPQFHLRFDDCERVRVDGLFVSSPASSPNTDGVHVENTKSVQILNSRIYNGDDCVSIGAGCSDVHVENITCGHGHGISIGSLGVHNTHACVSNVTVRNVRILDSDNGVRIKTWQGGAGAVSAVEFTGVQMQNVKNCIVIDQYYCLGHGCANQTSAVRVAGVAYRDIHGTYNPQAGAPIRLACSDAVACTDITMSGVELLPAGGDDGALLADPYCWNAYGVMETLTLPPVYCLLEGSPESLQDPLTSC

SEQ ID NO: 9672 - protein, 332 aa, Zea mays subsp. mays
  peptide (1)..(332): Ceres Seq. ID no. 12391420
  misc_feature (1)..(283): Pfam Name: Glycosyl hydrolases family 28 Pfam Description: Glycosyl hydrolases family 28
  misc_feature (1)..(332): Homolog of NCBI NO: 34894822 NR Description: putative polygalacturonase PG2 [Oryza sativa
  misc_feature (1)..(332): Homolog of NCBI NO: 15221078 NR Description: polygalacturonase, putative; protein id: supported by cDNA: gi_15292728, supported by cDNA: gi_15294255, by cDNA: gi_20465274 [Arabidopsis thaliana]
  misc_feature (1)..(332): Homolog of NCBI NO: 15294256 NR Description: At1g48100/F21D18_17 [Arabidopsis thaliana]
  misc_feature (1)..(332): Homolog of NCBI NO: 25405916 NR Description: protein F21D18.18 [imported] - Arabidopsis >gi|8778527|gb|AAF79535.1|AC023673_23 F21D18.18 [Arabidopsis
  misc_feature (1)..(329): Homolog of NCBI NO: 18378969 NR Description: polygalacturonase, putative; protein id: [Arabidopsis thaliana] >gi|25406725|pir||B86155 probable
  misc_feature (1)..(332): Homolog of NCBI NO: 34894418 NR Description: putative polygalacturonase-like protein [Oryza
  misc_feature (1)..(323): Homolog of NCBI NO: 15223598 NR Description: polygalacturonase, putative; protein id: [Arabidopsis thaliana] >gi|25289348|pir||A96609 probable
  misc_feature (1)..(289): Homolog of NCBI NO: 15234359 NR Description: polygalacturonase, putative; protein id: [Arabidopsis thaliana] >gi|25289357|pir||C85024 probable
  misc_feature (59)..(322): Homolog of NCBI NO: 18406803 NR Description: polygalacturonase, putative; protein id: supported by cDNA: gi_16974584 [Arabidopsis thaliana] At1g60590/F8A5_12 [Arabidopsis thaliana]
  misc_feature (59)..(322): Homolog of NCBI NO: 25404278 NR Description: probable polygalacturonase F8A5.12 [imported] - thaliana >gi|2462753|gb|AAB71972.1| putative polygalacturonase
MPPDGPASWPATDSRKQWIVFYKADRLTLAGEGTIEGNGEEWWDLPCKPHRGPNGSTLRGPCDSPALIRFFSSNDVTVCGLRIENSPQFHLRFDDCERVRVDGLFVSSPASSPNTDGVHVENTKSVQILNSRIYNGDDCVSIGAGCSDVHVENITCGHGHGISIGSLGVHNTHACVSNVTVRNVRILDSDNGVRIKTWQGGAGAVSAVEFTGVQMQNVKNCIVIDQYYCLGHGCANQTSAVRVAGVAYRDIHGTYNPQAGAPIRLACSDAVACTDITMSGVELLPAGGDDGALLADPYCWNAYGVMETLTLPPVYCLLEGSPESLQDPLTSC

SEQ ID NO: 9673 - DNA, 1273 bp, Zea mays subsp. mays
  misc_feature (1)..(1273): Ceres Seq. ID no. 12350633
  misc_feature: MA Experiment ID: 108529 Result: Up-regulated in Transcription
  misc_feature: MA Experiment 108529 PARAMETER Experiment Name: Zm_Imbibed_Seeds_P Parameter: Age (day) Value: 5 vs. 2
  misc_feature: MA Experiment 108529 PARAMETER Experiment Name: Zm_Imbibed_Seeds_P Parameter: Organism Value: Zea mays
  misc_feature: MA Experiment 108529 PARAMETER Experiment Name: Zm_Imbibed_Seeds_P Parameter: Plant Line Value: 35A19
  misc_feature: MA Experiment 108529 PARAMETER Experiment Name: Zm_Imbibed_Seeds_P Parameter: Tissue Value: Roots vs. Embryo
  misc_feature: MA Experiment ID: 108544 Result: Down-regulated in Transcription
  misc_feature: MA Experiment ID: 108546 Result: Up-regulated in Transcription
  misc_feature: MA Experiment 108546 PARAMETER Experiment Name: Zm_Imbibed_Seeds_P Parameter: Age (day) Value: 3 vs. 2
  misc_feature: MA Experiment 108546 PARAMETER Experiment Name: Zm_Imbibed_Seeds_P Parameter: Organism Value: Zea mays
  misc_feature: MA Experiment 108546 PARAMETER Experiment Name: Zm_Imbibed_Seeds_P Parameter: Plant Line Value: 35A19
  misc_feature: MA Experiment 108546 PARAMETER Experiment Name: Zm_Imbibed_Seeds_P Parameter: Tissue Value: Roots vs. Embryo
  misc_feature: MA Experiment ID: 20000626 Result: Up-regulated in Transcription
  misc_feature: MA Experiment 20000626 PARAMETER Experiment Name: Zm_Herbicide-Treatments_P Parameter: Timepoint (hr) Value: 12
  misc_feature: MA Experiment 20000626 PARAMETER Experiment Name: Zm_Herbicide-Treatments_P Parameter: Tissue Value: Aerial
  misc_feature: MA Experiment 20000626 PARAMETER Experiment Name: Zm_Herbicide-Treatments_P Parameter: Treatment Value: Roundup vs. No Treatment
agattcatcggagatcatcgggaggagagcactaactgggcgacgcacaggcacagcatggggcagcggttcaatctgaccatgtcgctcctcgccgtcgtcgtcctagcgcttctcgccgcgcccgtgtgcctccgccgcgcaggtcaagacgaccgacacgcgctggagcttccagctccctttacccagcggggtcagcggcgccgagagcctcgcgttcgacggcaagggcgaggggccctacgccggcgtctcagacggccgtgtcctcaagtggggcggcagcgccgtcggctggaccacgttcgcgcacagcgccaactacaggaagatccccctgtgcacggccggcgtagtgccgtcggcggagaccgagagcatgtgcggccgccccctgggcctccagttccacgccaagaccggcgacctctacatcgccgacgcctacctggggctcacgcgggtcggcccgggaggcggcgaggccgaggtgctggcgaccggtgcggacgacggcgtcccgttcaacttcgtcaacggcctcgacgtcgacgaggccaccggcgacgtctacttcaccgactcgagcgcgacgtacccgaggaggttcaacacagagatcatgatgaacgcggacgcgacggggcggctgctcaggtacgacgcgcgcacgaggagcgtctccgtgctcaaggccggactgccgtacccgaacggcgtggcggtcagccccgacggcgagcaggtcgtggtcgcgcacaccgtgccctgccaggcgttcaggtacttcctccggggcgcccggaaggggcagtacgagctgctggcggacctgccgggctacccggacaacgtgaggcgggatggcaggggtggctactgggtggcgctgaaccaggagaagcagcggctggacgcgactccggcgacgggccccgtgaagcacctcgtcggggtccgcctggacgcccacggcgtggaggtggaggagcttacggcggccaagggtgtcacgctgagcgacgtggcggagacgaaggggaagctgtggctgggctccatcgagctcgagtacgtcggactcgttgcttgagcggctgcgtaccacactagcaacgttagctatggtcatgttatgttaggaattaggattaggaattaggattaggaattggattagcaagtacgagcgagtagcctttagtttcatgtcttcgcgtgacaaacatcgttattttaccgattatcaataaatttcatttattgcttg

SEQ ID NO: 9674 - protein, 371 aa, Zea mays subsp. mays
  peptide (1)..(371): Ceres Seq. ID no. 12350634
  misc_feature (278)..(336): Pfam Name: Collagen triple helix repeat (20 copies) Pfam Description: Collagen triple helix repeat (20 copies)
  misc_feature (46)..(343): Homolog of NCBI NO: 11362193 NR Description: hypothetical protein [imported] - Microbacterium (fragment) >gi|1679831|emb|CAA55649.1| unknown [Microbacterium
  misc_feature (69)..(363): Homolog of NCBI NO: 11362193 NR Description: hypothetical protein [imported] - Microbacterium (fragment) >gi|1679831|emb|CAA55649.1| unknown [Microbacterium
RFIGDHREESTNWATHRHSMGQRFNLTMSLLAVVVLALLAAPVCLRRAGQDDRHALELPAPFTQRGQRRREPRVRRQGRGALRRRLRRPCPQVGRQRRRLDHVRAQRQLQEDPPVHGRRSAVGGDREHVRPPPGPPVPRQDRRPLHRRRLPGAHAGRPGRRRGRGAGDRCGRRRPVQLRQRPRRRRGHRRRLLHRLERDVPEEVQHRDHDERGRDGAAAQVRRAHEERLRAQGRTAVPERRGGQPRRRAGRGRAHRALPGVQVLPPGRPEGAVRAAGGPAGLPGQREAGWQGWLLGGAEPGEAAAGRDSGDGPREAPRRGPPGRPRRGGGGAYGGQGCHAERRGGDEGEAVAGLHRARVRRTRCLSGCVPH

SEQ ID NO: 9675 - protein, 352 aa, Zea mays subsp. mays
  peptide (1)..(352): Ceres Seq. ID no. 12350635
  misc_feature (259)..(317): Pfam Name: Collagen triple helix repeat (20 copies) Pfam Description: Collagen triple helix repeat (20 copies)
  misc_feature (27)..(324): Homolog of NCBI NO: 11362193 NR Description: hypothetical protein [imported] - Microbacterium (fragment) >gi|1679831|emb|CAA55649.1| unknown [Microbacterium
  misc_feature (50)..(344): Homolog of NCBI NO: 11362193 NR Description: hypothetical protein [imported] - Microbacterium (fragment) >gi|1679831|emb|CAA55649.1| unknown [Microbacterium
MGQRFNLTMSLLAVVVLALLAAPVCLRRAGQDDRHALELPAPFTQRGQRRREPRVRRQGRGALRRRLRRPCPQVGRQRRRLDHVRAQRQLQEDPPVHGRRSAVGGDREHVRPPPGPPVPRQDRRPLHRRRLPGAHAGRPGRRRGRGAGDRCGRRRPVQLRQRPRRRRGHRRRLLHRLERDVPEEVQHRDHDERGRDGAAAQVRRAHEERLRAQGRTAVPERRGGQPRRRAGRGRAHRALPGVQVLPPGRPEGAVRAAGGPAGLPGQREAGWQGWLLGGAEPGEAAAGRDSGDGPREAPRRGPPGRPRRGGGGAYGGQGCHAERRGGDEGEAVAGLHRARVRRTRCLSGCVPH

SEQ ID NO: 9676 - protein, 344 aa, Zea mays subsp. mays
  peptide (1)..(344): Ceres Seq. ID no. 12350636
  misc_feature (251)..(309): Pfam Name: Collagen triple helix repeat (20 copies) Pfam Description: Collagen triple helix repeat (20 copies)
  misc_feature (19)..(316): Homolog of NCBI NO: 11362193 NR Description: hypothetical protein [imported] - Microbacterium (fragment) >gi|1679831|emb|CAA55649.1| unknown [Microbacterium
  misc_feature (42)..(336): Homolog of NCBI NO: 11362193 NR Description: hypothetical protein [imported] - Microbacterium (fragment) >gi|1679831|emb|CAA55649.1| unknown [Microbacterium
MSLLAVVVLALLAAPVCLRRAGQDDRHALELPAPFTQRGQRRREPRVRRQGRGALRRRLRRPCPQVGRQRRRLDHVRAQRQLQEDPPVHGRRSAVGGDREHVRPPPGPPVPRQDRRPLHRRRLPGAHAGRPGRRRGRGAGDRCGRRRPVQLRQRPRRRRGHRRRLLHRLERDVPEEVQHRDHDERGRDGAAAQVRRAHEERLRAQGRTAVPERRGGQPRRRAGRGRAHRALPGVQVLPPGRPEGAVRAAGGPAGLPGQREAGWQGWLLGGAEPGEAAAGRDSGDGPREAPRRGPPGRPRRGGGGAYGGQGCHAERRGGDEGEAVAGLHRARVRRTRCLSGCVPH

SEQ ID NO: 9677 - DNA, 1409 bp, Zea mays subsp. mays
  misc_feature (1)..(1409): Ceres Seq. ID no. 12415269
  misc_feature: MA Experiment ID: 108543 Result: Down-regulated in Transcription
gcacgagaccattacctagaacatcctaatcgaaaagtttacaccgagggttctctctttgtctgttcactgttctactgggacgaccccaaatccccaaatcgaaaggggccgtccggctcagggtttctcgacggctccttgccctctccgccatggacgcacagcgagccctccttgacgagctcatgggcacagctcgcaacctaacggaggaggagaagaaggggcacaaagagctgaagtgggacgatccggacgtgtgcggcccttacatggttcgattctgtcctcacgaccttttcgtcaacaccaagagcaatatcgggccgtgctcgaggatccacgatccgaagctcaaggaaagctttgagaagtctcctaggcacgatacttatatgcaaaggtttgaggcagagcttgcacaacaatgtgagaaattggtaatggacttagatagaaagataaggcgtggtcgagaaaggctggctcacgattctgctgtgccaatgccaatccctggaaattagctgagctgctttcagtgcgaaaagaacaggtgaagaagctgctggatcaaattgaggagcttggtgaggctggtaaagtggatgaagctgaggcacttatgagaagggttgacattttaaacgctgagaagacagctttagctaacgaagcagacaacaaagtagctatgcttgagaagaagatggaactttgtgaaacatgtggatcattcttagttgctgatgatgctcttgagagaacgcagtcccatgtgactgggaaacaacacattggttatggcatggttagggatttcctggcagaatacaaggcagcaaaagagaagacaaaagaggaagagcggcttgcaagggagcagaaagcagaggagcatcggaaacagaggggaaaagagtatgatagtgggggcagggatagagataccagaagggagaggtctggggagcgtgactttgaccgtgatcgtcagtatgagcgaagcagaggaagagatagggtttatgattacagggacagaggatcagaacaccgaagcaatcgctacagaaatgggagggattctgaaagaggtggacacagatacaggagtggtggtatgacaaatgaccgagggagaatgaggagcagatcacgttctccaaccaggcatggctatggaagatctagaagtccagatcattagctgcctagctggacatttagatagttttattcacagttgggactcatgaggtagacagttcccttctgctatttattactgtacaatgggttttattgaagtgtcgcacttttttaagtctctgatctgttgtaacagctctgttggaaccctacagtctccctattttgcatggggaaaaattcccaggtcggtg

SEQ ID NO: 9678 - protein, 194 aa, Zea mays subsp. mays
  peptide (1)..(194): Ceres Seq. ID no. 12415270
  misc_feature (1)..(94): Pfam Name: LUC7 N_terminus Pfam Description: LUC7 N_terminus
  misc_feature (1)..(185): Homolog of NCBI NO: 28411928 NR Description: OSJNBa0027N13.9 [Oryza sativa (japonica
  misc_feature (1)..(188): Homolog of NCBI NO: 30524685 NR Description: salt tolerance protein 3 [Beta vulgaris]
  misc_feature (1)..(161): Homolog of NCBI NO: 15242081 NR Description: arginine-aspartate-rich RNA binding protein-like; id: At5g51410.1, supported by cDNA: gi_1699050, supported by gi_18377713 [Arabidopsis thaliana] >gi|1699023|gb|AAB68037.1|
  misc_feature (1)..(193): Homolog of NCBI NO: 19923485 NR Description: cisplatin resistance-associated overexpressed
  misc_feature (1)..(193): Homolog of NCBI NO: 23956166 NR Description: RIKEN cDNA 3300001P08 [Mus musculus]
  misc_feature (1)..(193): Homolog of NCBI NO: 7023491 NR Description: unnamed protein product [Homo sapiens]
  misc_feature (1)..(161): Homolog of NCBI NO: 1699053 NR Description: putative aspartate-arginine-rich mRNA binding
  misc_feature (1)..(88): Homolog of NCBI NO: 12852160 NR Description: unnamed protein product [Mus musculus]
  misc_feature (1)..(88): Homolog of NCBI NO: 28422640 NR Description: Similar to cisplatin resistance-associated
  misc_feature (1)..(154): Homolog of NCBI NO: 21536228 NR Description: Luc7 homolog (S. cerevisiae)-like; RIKEN cDNA gene; RIKEN cDNA 1810045C04 gene [Mus musculus]
MRRVDILNAEKTALANEADNKVAMLEKKMELCETCGSFLVADDALERTQSHVTGKQHIGYGMVRDFLAEYKAAKEKTKEEERLAREQKAEEHRKQRGKEYDSGGRDRDTRRERSGERDFDRDRQYERSRGRDRVYDYRDRGSEHRSNRYRNGRDSERGGHRYRSGGMTNDRGRMRSRSRSPTRHGYGRSRSPDH

SEQ ID NO: 9679 - protein, 171 aa, Zea mays subsp. mays
  peptide (1)..(171): Ceres Seq. ID no. 12415271
  misc_feature (1)..(71): Pfam Name: LUC7 N_terminus Pfam Description: LUC7 N_terminus
  misc_feature (1)..(162): Homolog of NCBI NO: 28411928 NR Description: OSJNBa0027N13.9 [Oryza sativa (japonica
  misc_feature (1)..(165): Homolog of NCBI NO: 30524685 NR Description: salt tolerance protein 3 [Beta vulgaris]
  misc_feature (1)..(138): Homolog of NCBI NO: 15242081 NR Description: arginine-aspartate-rich RNA binding protein-like; id: At5g51410.1, supported by cDNA: gi_1699050, supported by gi_18377713 [Arabidopsis thaliana] >gi|1699023|gb|AAB68037.1|
  misc_feature (1)..(170): Homolog of NCBI NO: 19923485 NR Description: cisplatin resistance-associated overexpressed
  misc_feature (1)..(170): Homolog of NCBI NO: 23956166 NR Description: RIKEN cDNA 3300001P08 [Mus musculus]
  misc_feature (1)..(170): Homolog of NCBI NO: 7023491 NR Description: unnamed protein product [Homo sapiens]
  misc_feature (1)..(138): Homolog of NCBI NO: 1699053 NR Description: putative aspartate-arginine-rich mRNA binding
  misc_feature (1)..(65): Homolog of NCBI NO: 12852160 NR Description: unnamed protein product [Mus musculus]
  misc_feature (1)..(65): Homolog of NCBI NO: 28422640 NR Description: Similar to cisplatin resistance-associated
  misc_feature (1)..(131): Homolog of NCBI NO: 21536228 NR Description: Luc7 homolog (S. cerevisiae)-like; RIKEN cDNA gene; RIKEN cDNA 1810045C04 gene [Mus musculus]
MLEKKMELCETCGSFLVADDALERTQSHVTGKQHIGYGMVRDFLAEYKAAKEKTKEEERLAREQKAEEHRKQRGKEYDSGGRDRDTRRERSGERDFDRDRQYERSRGRDRVYDYRDRGSEHRSNRYRNGRDSERGGHRYRSGGMTNDRGRMRSRSRSPTRHGYGRSRSPDH

SEQ ID NO: 9680 - protein, 166 aa, Zea mays subsp. mays
  peptide (1)..(166): Ceres Seq. ID no. 12415272
  misc_feature (1)..(66): Pfam Name: LUC7 N_terminus Pfam Description: LUC7 N_terminus
  misc_feature (1)..(157): Homolog of NCBI NO: 28411928 NR Description: OSJNBa0027N13.9 [Oryza sativa (japonica
  misc_feature (1)..(160): Homolog of NCBI NO: 30524685 NR Description: salt tolerance protein 3 [Beta vulgaris]
  misc_feature (1)..(133): Homolog of NCBI NO: 15242081 NR Description: arginine-aspartate-rich RNA binding protein-like; id: At5g51410.1, supported by cDNA: gi_1699050, supported by gi_18377713 [Arabidopsis thaliana] >gi|1699023|gb|AAB68037.1|
  misc_feature (1)..(165): Homolog of NCBI NO: 19923485 NR Description: cisplatin resistance-associated overexpressed
  misc_feature (1)..(165): Homolog of NCBI NO: 23956166 NR Description: RIKEN cDNA 3300001P08 [Mus musculus]
  misc_feature (1)..(165): Homolog of NCBI NO: 7023491 NR Description: unnamed protein product [Homo sapiens]
  misc_feature (1)..(133): Homolog of NCBI NO: 1699053 NR Description: putative aspartate-arginine-rich mRNA binding
  misc_feature (1)..(60): Homolog of NCBI NO: 12852160 NR Description: unnamed protein product [Mus musculus]
  misc_feature (1)..(60): Homolog of NCBI NO: 28422640 NR Description: Similar to cisplatin resistance-associated
  misc_feature (1)..(126): Homolog of NCBI NO: 21536228 NR Description: Luc7 homolog (S. cerevisiae)-like; RIKEN cDNA gene; RIKEN cDNA 1810045C04 gene [Mus musculus]
MELCETCGSFLVADDALERTQSHVTGKQHIGYGMVRDFLAEYKAAKEKTKEEERLAREQKAEEHRKQRGKEYDSGGRDRDTRRERSGERDFDRDRQYERSRGRDRVYDYRDRGSEHRSNRYRNGRDSERGGHRYRSGGMTNDRGRMRSRSRSPTRHGYGRSRSPDH

SEQ ID NO: 9681 - DNA, 1129 bp, Zea mays subsp. mays
  misc_feature (1)..(1129): Ceres Seq. ID no. 12416011
  misc_feature: MA Experiment ID: 108535 Result: Up-regulated in Transcription
  misc_feature: MA Experiment 108535 PARAMETER Experiment Name: Zm_Meristem_P Parameter: Age (day) Value: 8
  misc_feature: MA Experiment 108535 PARAMETER Experiment Name: Zm_Meristem_P Parameter: Organism Value: Zea mays
  misc_feature: MA Experiment 108535 PARAMETER Experiment Name: Zm_Meristem_P Parameter: Plant Line Value: 35A19
  misc_feature: MA Experiment 108535 PARAMETER Experiment Name: Zm_Meristem_P Parameter: Tissue Value: Root Meristem vs. Above Root Meristem
  misc_feature: MA Experiment ID: 108544 Result: Down-regulated in Transcription
caaaataatgattctactgacctggttgctctaatggatagcctaggccgcacctgcccgaacttgaggaacatgcacatctcatcagaccgcttgtgcaacgaagctgtgtttgctctagagagtgctaacctcaggggcatgtgcatgctctccttggttctaggttcaaaaataacagatgcagctgtcgcatcgattgttcgttcttacgcgagcttggagctgctcgatttaagcgggtctggcatcactgacaatgggcttgggatgatcagcaacacgttccctaacaccctaacacgtctgctccttgctctgtgcccaaacatcaccccatgcgggattcaggtggctgcagccacagctgccgctccttcgcctcatggactgtggcaagagcatatgtgctaccccccagcctgaagctgggagatcatactctggcgatctaactgatgggatcaaattctgctccaaattacctgtccagagaaagcagcaggctacttgccagaagctgatcataaagcatagcgccctgaagaagctcagcctgtggggctgttcagggatcgatgccctgtacgtgagctgcccggagctggtcgagctgaacctcaactcctgcacgaaccttcatccagagcggctgctgttccagtgccccaagctggaagacgtgcacgtcaacgggtgccgtgacatgctggtcggagccatcaggaaccaggtccttaacgagttcgcggccgcggcgccccgggtgccctgcaagcggctggccgacgggtccaagcgcgtgcacgtgccccactacatggtagagcagctggaggaacatgagaaatggggcagcaggccgcggaagagccagtgcaccgttcatctcacctaggctaggcgcctgttaagtgagaggccctggtgatcgccggcgtcaggagcttgcggcgtcgatacagcgagactagatggaaatggtacggatatttttcgatatccgtcggttatgaaatggtcaaaactttatatggataatctatatctaaatccaaatatttgaaatctgactttctgaatccagctactcaaaatcgtcagatttgaagacaaatatagccattcg

SEQ ID NO: 9682 - protein, 170 aa, Zea mays subsp. mays
  peptide (1)..(170): Ceres Seq. ID no. 12416012
  misc_feature (1)..(167): Homolog of NCBI NO: 18087570 NR Description: AT3g54650/T5N23_10 [Arabidopsis thaliana]
  misc_feature (1)..(118): Homolog of NCBI NO: 18410106 NR Description: F-box protein family, AtFBL17; protein id:
MDCGKSICATPQPEAGRSYSGDLTDGIKFCSKLPVQRKQQATCQKLIIKHSALKKLSLWGCSGIDALYVSCPELVELNLNSCTNLHPERLLFQCPKLEDVHVNGCRDMLVGAIRNQVLNEFAAAAPRVPCKRLADGSKRVHVPHYMVEQLEEHEKWGSRPRKSQCTVHLT

SEQ ID NO: 9683 - protein, 141 aa, Zea mays subsp. mays
  peptide (1)..(141): Ceres Seq. ID no. 12416013
  misc_feature (1)..(121): Homolog of NCBI NO: 18087570 NR Description: AT3g54650/T5N23_10 [Arabidopsis thaliana]
  misc_feature (1)..(121): Homolog of NCBI NO: 18410106 NR Description: F-box protein family, AtFBL17; protein id:
QNNDSTDLVALMDSLGRTCPNLRNMHISSDRLCNEAVFALESANLRGMCMLSLVLGSKITDAAVASIVRSYASLELLDLSGSGITDNGLGMISNTFPNTLTRLLLALCPNITPCGIQVAAATAAAPSPHGLWQEHMCYPPA

SEQ ID NO: 9684 - protein, 130 aa, Zea mays subsp. mays
  peptide (1)..(130): Ceres Seq. ID no. 12416014
  misc_feature (1)..(110): Homolog of NCBI NO: 18087570 NR Description: AT3g54650/T5N23_10 [Arabidopsis thaliana]
  misc_feature (1)..(110): Homolog of NCBI NO: 18410106 NR Description: F-box protein family, AtFBL17; protein id:
MDSLGRTCPNLRNMHISSDRLCNEAVFALESANLRGMCMLSLVLGSKITDAAVASIVRSYASLELLDLSGSGITDNGLGMISNTFPNTLTRLLLALCPNITPCGIQVAAATAAAPSPHGLWQEHMCYPPA

SEQ ID NO: 9685 - DNA, 1173 bp, Zea mays subsp. mays
  misc_feature (1)..(1173): Ceres Seq. ID no. 12365916
  misc_feature: MA Experiment ID: 108504 Result: Up-regulated in Transcription
  misc_feature: MA Experiment 108504 PARAMETER Experiment Name: Zm_Drought_P Parameter: Age (day) Value: 8
  misc_feature: MA Experiment 108504 PARAMETER Experiment Name: Zm_Drought_P Parameter: Organism Value: Zea mays
  misc_feature: MA Experiment 108504 PARAMETER Experiment Name: Zm_Drought_P Parameter: Plant Line Value: 35A19
  misc_feature: MA Experiment 108504 PARAMETER Experiment Name: Zm_Drought_P Parameter: Timepoint (hr) Value: 12
  misc_feature: MA Experiment 108504 PARAMETER Experiment Name: Zm_Drought_P Parameter: Tissue Value: Aerial
  misc_feature: MA Experiment 108504 PARAMETER Experiment Name: Zm_Drought_P Parameter: Treatment Value: Drought vs. No Drought
  misc_feature: MA Experiment ID: 108528 Result: Up-regulated in Transcription
  misc_feature: MA Experiment 108528 PARAMETER Experiment Name: Zm_Imbibed_Seeds_P Parameter: Age (day) Value: 5 vs. 2
  misc_feature: MA Experiment 108528 PARAMETER Experiment Name: Zm_Imbibed_Seeds_P Parameter: Organism Value: Zea mays
  misc_feature: MA Experiment 108528 PARAMETER Experiment Name: Zm_Imbibed_Seeds_P Parameter: Plant Line Value: 35A19
  misc_feature: MA Experiment 108528 PARAMETER Experiment Name: Zm_Imbibed_Seeds_P Parameter: Tissue Value: Aerial vs. Embryo
  misc_feature: MA Experiment ID: 108540 Result: Up-regulated in Transcription
  misc_feature: MA Experiment 108540 PARAMETER Experiment Name: Zm_20percent_PEG_P Parameter: Age (day) Value: 8
  misc_feature: MA Experiment 108540 PARAMETER Experiment Name: Zm_20percent_PEG_P Parameter: Organism Value: Zea mays
  misc_feature: MA Experiment 108540 PARAMETER Experiment Name: Zm_20percent_PEG_P Parameter: Plant Line Value: 35A19
  misc_feature: MA Experiment 108540 PARAMETER Experiment Name: Zm_20percent_PEG_P Parameter: Timepoint (hr) Value: 6
  misc_feature: MA Experiment 108540 PARAMETER Experiment Name: Zm_20percent_PEG_P Parameter: Tissue Value: Aerial
  misc_feature: MA Experiment 108540 PARAMETER Experiment Name: Zm_20percent_PEG_P Parameter: Treatment Value: 20percent PEG vs. No Treatment
  misc_feature: MA Experiment ID: 108543 Result: Down-regulated in Transcription
  misc_feature: MA Experiment ID: 108544 Result: Up-regulated in Transcription
  misc_feature: MA Experiment ID: 108556 Result: Up-regulated in Transcription
  misc_feature: MA Experiment 108556 PARAMETER Experiment Name: Zm_Drought_P Parameter: Age (day) Value: 9
  misc_feature: MA Experiment 108556 PARAMETER Experiment Name: Zm_Drought_P Parameter: Organism Value: Zea mays
  misc_feature: MA Experiment 108556 PARAMETER Experiment Name: Zm_Drought_P Parameter: Plant Line Value: 35A19
  misc_feature: MA Experiment 108556 PARAMETER Experiment Name: Zm_Drought_P Parameter: Timepoint (hr) Value: 24
  misc_feature: MA Experiment 108556 PARAMETER Experiment Name: Zm_Drought_P Parameter: Tissue Value: Aerial
  misc_feature: MA Experiment 108556 PARAMETER Experiment Name: Zm_Drought_P Parameter: Treatment Value: Drought vs. No Drought
  misc_feature: MA Experiment ID: 108559 Result: Up-regulated in Transcription
  misc_feature: MA Experiment 108559 PARAMETER Experiment Name: Zm_5mM_NO_P Parameter: Age (day) Value: 8
  misc_feature: MA Experiment 108559 PARAMETER Experiment Name: Zm_5mM_NO_P Parameter: Organism Value: Zea mays
  misc_feature: MA Experiment 108559 PARAMETER Experiment Name: Zm_5mM_NO_P Parameter: Plant Line Value: 35A19
  misc_feature: MA Experiment 108559 PARAMETER Experiment Name: Zm_5mM_NO_P Parameter: Timepoint (hr) Value: 12
  misc_feature: MA Experiment 108559 PARAMETER Experiment Name: Zm_5mM_NO_P Parameter: Tissue Value: Aerial
  misc_feature: MA Experiment 108559 PARAMETER Experiment Name: Zm_5mM_NO_P Parameter: Treatment Value: 5mM NO vs. No Treatment
  misc_feature: MA Experiment ID: 108687 Result: Down-regulated in Transcription
  misc_feature: MA Experiment 108687 PARAMETER Experiment Name: Zm_Embryos-Flowers__P Parameter: Tissue Value: Embryo vs. Aerial+
  misc_feature: MA Experiment ID: 20000108 Result: Down-regulated in Transcription
  misc_feature: MA Experiment 20000108 PARAMETER Experiment Name: Zm_Root-Tips_P Parameter: Age (day) Value: 12
  misc_feature: MA Experiment 20000108 PARAMETER Experiment Name: Zm_Root-Tips_P Parameter: Organism Value: Zea mays
  misc_feature: MA Experiment 20000108 PARAMETER Experiment Name: Zm_Root-Tips_P Parameter: Tissue Value: Root tips vs. Root mid region    35
  misc_feature: MA Experiment 20000108 PARAMETER Experiment Name: Zm_Root-Tips_P Parameter: Tissue Value: Root tips vs. Root mid region   Sequence Listing-Misc Features (4)
  misc_feature: MA Experiment ID: 20000477 Result: Up-regulated in Transcription
  misc_feature: MA Experiment 20000477 PARAMETER Experiment Name: Zm_5mM_SA_P Parameter: Age (day) Value: 10
  misc_feature: MA Experiment 20000477 PARAMETER Experiment Name: Zm_5mM_SA_P Parameter: Organism Value: Zea mays
  misc_feature: MA Experiment 20000477 PARAMETER Experiment Name: Zm_5mM_SA_P Parameter: Plant Line Value: 35A19
  misc_feature: MA Experiment 20000477 PARAMETER Experiment Name: Zm_5mM_SA_P Parameter: Timepoint (hr) Value: 48
  misc_feature: MA Experiment 20000477 PARAMETER Experiment Name: Zm_5mM_SA_P Parameter: Tissue Value: Aerial
  misc_feature: MA Experiment 20000477 PARAMETER Experiment Name: Zm_5mM_SA_P Parameter: Treatment Value: 5mM SA vs. No Treatment
  misc_feature: MA Experiment ID: 20000478 Result: Up-regulated in Transcription
  misc_feature: MA Experiment 20000478 PARAMETER Experiment Name: Zm_5mM_SA_P Parameter: Age (day) Value: 11
  misc_feature: MA Experiment 20000478 PARAMETER Experiment Name: Zm_5mM_SA_P Parameter: Organism Value: Zea mays
  misc_feature: MA Experiment 20000478 PARAMETER Experiment Name: Zm_5mM_SA_P Parameter: Plant Line Value: 35A19
  misc_feature: MA Experiment 20000478 PARAMETER Experiment Name: Zm_5mM_SA_P Parameter: Timepoint (hr) Value: 72
  misc_feature: MA Experiment 20000478 PARAMETER Experiment Name: Zm_5mM_SA_P Parameter: Tissue Value: Aerial
  misc_feature: MA Experiment 20000478 PARAMETER Experiment Name: Zm_5mM_SA_P Parameter: Treatment Value: 5mM SA vs. No Treatment
  misc_feature: MA Experiment ID: 20000479 Result: Up-regulated in Transcription
  misc_feature: MA Experiment 20000479 PARAMETER Experiment Name: Zm_Drought_P Parameter: Age (day) Value: 10
  misc_feature: MA Experiment 20000479 PARAMETER Experiment Name: Zm_Drought_P Parameter: Organism Value: Zea mays
  misc_feature: MA Experiment 20000479 PARAMETER Experiment Name: Zm_Drought_P Parameter: Plant Line Value: 35A19
  misc_feature: MA Experiment 20000479 PARAMETER Experiment Name: Zm_Drought_P Parameter: Timepoint (hr) Value: 48
  misc_feature: MA Experiment 20000479 PARAMETER Experiment Name: Zm_Drought_P Parameter: Tissue Value: Aerial
  misc_feature: MA Experiment 20000479 PARAMETER Experiment Name: Zm_Drought_P Parameter: Treatment Value: Drought vs. No Drought
  misc_feature: MA Experiment ID: 20000480 Result: Up-regulated in Transcription
  misc_feature: MA Experiment 20000480 PARAMETER Experiment Name: Zm_Drought_P Parameter: Age (day) Value: 11
  misc_feature: MA Experiment 20000480 PARAMETER Experiment Name: Zm_Drought_P Parameter: Organism Value: Zea mays
  misc_feature: MA Experiment 20000480 PARAMETER Experiment Name: Zm_Drought_P Parameter: Plant Line Value: 35A19
  misc_feature: MA Experiment 20000480 PARAMETER Experiment Name: Zm_Drought_P Parameter: Timepoint (hr) Value: 72
  misc_feature: MA Experiment 20000480 PARAMETER Experiment Name: Zm_Drought_P Parameter: Tissue Value: Aerial
  misc_feature: MA Experiment 20000480 PARAMETER Experiment Name: Zm_Drought_P Parameter: Treatment Value: Drought vs. No Drought
  misc_feature: MA Experiment ID: 20000487 Result: Up-regulated in Transcription
  misc_feature: MA Experiment 20000487 PARAMETER Experiment Name: Zm_50mM_NH4NO3_L_to_H_P Parameter: Organism Value: Zea mays
  misc_feature: MA Experiment 20000487 PARAMETER Experiment Name: Zm_50mM_NH4NO3_L_to_H_P Parameter: Timepoint (hr) Value: 4
  misc_feature: MA Experiment 20000487 PARAMETER Experiment Name: Zm_50mM_NH4NO3_L_to_H_P Parameter: Tissue Value: Leaves
  misc_feature: MA Experiment 20000487 PARAMETER Experiment Name: Zm_50mM_NH4NO3_L_to_H_P Parameter: Treatment Value: 50mM NH4NO3 vs. 100mM Mannitol
  misc_feature: MA Experiment ID: 20000488 Result: Up-regulated in Transcription
  misc_feature: MA Experiment 20000488 PARAMETER Experiment Name: Zm_50mM_NH4NO3_L_to_H_P Parameter: Organism Value: Zea mays
  misc_feature: MA Experiment 20000488 PARAMETER Experiment Name: Zm_50mM_NH4NO3_L_to_H_P Parameter: Timepoint (hr) Value: 8
  misc_feature: MA Experiment 20000488 PARAMETER Experiment Name: Zm_50mM_NH4NO3_L_to_H_P Parameter: Tissue Value: Leaves
  misc_feature: MA Experiment 20000488 PARAMETER Experiment Name: Zm_50mM_NH4NO3_L_to_H_P Parameter: Treatment Value: 50mM NH4NO3 vs. 100mM Mannitol
  misc_feature: MA Experiment ID: 20000534 Result: Down-regulated in Transcription
  misc_feature: MA Experiment 20000534 PARAMETER Experiment Name: Zm_Hybrid_Pollen_P Parameter: Age (day) Value: 8
  misc_feature: MA Experiment 20000534 PARAMETER Experiment Name: Zm_Hybrid_Pollen_P Parameter: Organism Value: Zea mays
  misc_feature: MA Experiment 20000534 PARAMETER Experiment Name: Zm_Hybrid_Pollen_P Parameter: Plant Line Value: 35A19
  misc_feature: MA Experiment 20000534 PARAMETER Experiment Name: Zm_Hybrid_Pollen_P Parameter: Tissue Value: Pollen vs. Aerial
  misc_feature: MA Experiment ID: 20000535 Result: Down-regulated in Transcription
  misc_feature: MA Experiment 20000535 PARAMETER Experiment Name: Zm_Hybrid_Seed_Dev_P Parameter: DAP Value: 30 vs. 12
  misc_feature: MA Experiment 20000535 PARAMETER Experiment Name: Zm_Hybrid_Seed_Dev_P Parameter: Organism Value: Zea mays
  misc_feature: MA Experiment 20000535 PARAMETER Experiment Name: Zm_Hybrid_Seed_Dev_P Parameter: Plant Line Value: 35A19
  misc_feature: MA Experiment 20000535 PARAMETER Experiment Name: Zm_Hybrid_Seed_Dev_P Parameter: Tissue Value: Embryo vs. Unfert Floret
  misc_feature: MA Experiment ID: 20000629 Result: Down-regulated in Transcription
  misc_feature: MA Experiment 20000629 PARAMETER Experiment Name: Zm_Herbicide-Treatments_P Parameter: Timepoint (hr) Value: 12
  misc_feature: MA Experiment 20000629 PARAMETER Experiment Name: Zm_Herbicide-Treatments_P Parameter: Tissue Value: Aerial
  misc_feature: MA Experiment 20000629 PARAMETER Experiment Name: Zm_Herbicide-Treatments_P Parameter: Treatment Value: Trimec vs. No Treatment
  misc_feature: MA Experiment ID: 20001613 Result: Up-regulated in Transcription
  misc_feature: MA Experiment 20001613 PARAMETER Experiment Name: Zm_50ppm_KNO3_L-to-H_P Parameter: Age (day) Value: 20
  misc_feature: MA Experiment 20001613 PARAMETER Experiment Name: Zm_50ppm_KNO3_L-to-H_P Parameter: Organism Value: Zea mays
  misc_feature: MA Experiment 20001613 PARAMETER Experiment Name: Zm_50ppm_KNO3_L-to-H_P Parameter: Plant Line Value: 35A19
  misc_feature: MA Experiment 20001613 PARAMETER Experiment Name: Zm_50ppm_KNO3_L-to-H_P Parameter: Timepoint (hr) Value: 24
  misc_feature: MA Experiment 20001613 PARAMETER Experiment Name: Zm_50ppm_KNO3_L-to-H_P Parameter: Tissue Value: Roots
  misc_feature: MA Experiment 20001613 PARAMETER Experiment Name: Zm_50ppm_KNO3_L-to-H_P Parameter: Treatment Value: 50ppm KNO3 vs. 50ppm KCl
agtagtcctctcctctcctcccatccatgcttcggtccacgcacccacccagccccaccagcggcagctccgcggcgccggcgtccagctccgacgccgcggcgatggtcgggggcggcgcggcggcgggcagcggcggcgcaccgagcggcgccaagctgctgcagatcctcaacgtgcgggtcgtgggcagcggcgaccgcgtggtggtgctgtcccacgggttcggcacggaccagtcggcgtggagccgcgtgctcccctacctcacccgcgaccaccgcgtggtgctctacgacctcgtctgcgccggcagcgtcaacccggagcacttcgacttccgccgctacgacacgctcgactcgtacgtcgacgacctcctcgccatcctcgacgcgctccgcatcgcgcgctgcgccttcgtcggccactccgtctccgccatgatcggcatcctcgcctccatccgccgccccgagctcttcgccaagctcgtactcatcggcgcgtcgcccaggttcctgaacgaccacgactaccacggcgggttcgagctgccggagatccagcaggtgttcgacgcgatggcggccaactactcggcgtgggcgaccgggtacgccccgctggcggtgggcgcggacgtgccggcggcggtgcaggagttcagccgcaccctgttcaacatgcggccggacatctccctccacgtgtgccgcaccgtgttcaacaccgacctccgcggcgtgctgggcatggtgcggtccccctgcgtggtggtgcagaccacccgcgacgtctccgtcccggcctccgtcgccgcctacctcaaggcccacctcggcggccgcaccgccgtcgagttcctccagaccgagggccacctcccgcacctcagcgcccccggcctcctcgcgcaggtgctccgccgcgcgctcgcccggtactagcggagcgcctgccacctacggtcctggtggtcatcggtattttttaccgcctcgatttaccctgtgccgagaccggggacggggatcagataatgtggcgacccgcgccgtttgctgtgcgcgccatgactgtagactgtagtacgagtgtacgacttgttctggacttctggtacccgatttttttactgctttttaatggagagccgagcagtagcactgg

SEQ ID NO: 9686 - protein, 390 aa, Zea mays subsp. mays
  peptide (1)..(390): Ceres Seq. ID no. 12365917
  misc_feature (9)..(321): Homolog of NCBI NO: 22960097 NR Description: hypothetical protein [Rhodobacter sphaeroides]
  misc_feature (15)..(312): Homolog of NCBI NO: 29247944 NR Description: GLP_26_54603_52153 [Giardia lamblia ATCC 50803]
  misc_feature (41)..(302): Homolog of NCBI NO: 79833 NR Description: hypothetical 119.5K protein (uvrA region) -
  misc_feature (3)..(321): Homolog of NCBI NO: 23018788 NR Description: hypothetical protein [Thermobifida fusca]
  misc_feature (31)..(318): Homolog of NCBI NO: 29247944 NR Description: GLP_26_54603_52153 [Giardia lamblia ATCC 50803]
  misc_feature (84)..(359): Homolog of NCBI NO: 23018788 NR Description: hypothetical protein [Thermobifida fusca]
VVLSSPPIHASVHAPTQPHQRQLRGAGVQLRRRGDGRGRRGGGQRRRTERRQAAADPQRAGRGQRRPRGGAVPRVRHGPVGVEPRAPLPHPRPPRGALRPRLRRQRQPGALRLPPLRHARLVRRRPPRHPRRAPHRALRLRRPLRLRHDRHPRLHPPPRALRQARTHRRVAQVPERPRLPRRVRAAGDPAGVRRDGGQLLGVGDRVRPAGGGRGRAGGGAGVQPHPVQHAAGHLPPRVPHRVQHRPPRRAGHGAVPLRGGADHPRRLRPGLRRRLPQGPPRRPHRRRVPPDRGPPPAPQRPRPPRAGAPPRARPVLAERLPPTVLVVIGIFYRLDLPCAETGDGDQIMWRPAPFAVRAMTVDCSTSVRLVLDFWYPIFLLLFNGEPSSST

SEQ ID NO: 9687 - protein, 307 aa, Zea mays subsp. mays; identical to SEQ ID NO: 8425
  peptide (1)..(307): Ceres Seq. ID no. 12365918
  misc_feature (85)..(302): Pfam Name: alpha/beta hydrolase fold Pfam Description: alpha/beta hydrolase fold
  misc_feature (45)..(306): Homolog of NCBI NO: 21593927 NR Description: unknown [Arabidopsis thaliana]
  misc_feature (45)..(306): Homolog of NCBI NO: 18396732 NR Description: expressed protein; protein id: At3g03990.1, by cDNA: 6052., supported by cDNA: gi_17381266, supported by gi_20453358 [Arabidopsis thaliana]
  misc_feature (165)..(302): Homolog of NCBI NO: 40736991 NR Description: putative hydrolases [Oryza sativa (japonica
  misc_feature (50)..(166): Homolog of NCBI NO: 40736991 NR Description: putative hydrolases [Oryza sativa (japonica
  misc_feature (50)..(302): Homolog of NCBI NO: 15235567 NR Description: putative protein; protein id: At4g37470.1, by cDNA: gi_15810302, supported by cDNA: gi_20259140 [Arabidopsis
  misc_feature (50)..(301): Homolog of NCBI NO: 24216360 NR Description: Predicted hydrolases or acyltransferases, hydrolase superfamily [Leptospira interrogans serovar lai str. >gi|24197640|gb|AAN50859.1|AE011521_5 Predicted hydrolases or
  misc_feature (45)..(304): Homolog of NCBI NO: 15230110 NR Description: unknown protein; protein id: At3g24420.1
  misc_feature (49)..(305): Homolog of NCBI NO: 34912326 NR Description: P0451D05.26 [Oryza sativa (japonica
  misc_feature (51)..(305): Homolog of NCBI NO: 22298700 NR Description: ORF_ID:tlr1157~hypothetical protein
  misc_feature (50)..(300): Homolog of NCBI NO: 16080463 NR Description: similar to hydrolase [Bacillus subtilis]

SEQ ID NO: 9688 - protein, 281 aa, Zea mays subsp. mays
  peptide (1)..(281): Ceres Seq. ID no. 12365919
  misc_feature (59)..(276): Pfam Name: alpha/beta hydrolase fold Pfam Description: alpha/beta hydrolase fold
  misc_feature (19)..(280): Homolog of NCBI NO: 21593927 NR Description: unknown [Arabidopsis thaliana]
  misc_feature (19)..(280): Homolog of NCBI NO: 18396732 NR Description: expressed protein; protein id: At3g03990.1, by cDNA: 6052., supported by cDNA: gi_17381266, supported by gi_20453358 [Arabidopsis thaliana]
  misc_feature (139)..(276): Homolog of NCBI NO: 40736991 NR Description: putative hydrolases [Oryza sativa (japonica
  misc_feature (24)..(140): Homolog of NCBI NO: 40736991 NR Description: putative hydrolases [Oryza sativa (japonica
  misc_feature (24)..(276): Homolog of NCBI NO: 15235567 NR Description: putative protein; protein id: At4g37470.1, by cDNA: gi_15810302, supported by cDNA: gi_20259140 [Arabidopsis
  misc_feature (24)..(275): Homolog of NCBI NO: 24216360 NR Description: Predicted hydrolases or acyltransferases, hydrolase superfamily [Leptospira interrogans serovar lai str. >gi|24197640|gb|AAN50859.1|AE011521_5 Predicted hydrolases or
  misc_feature (19)..(278): Homolog of NCBI NO: 15230110 NR Description: unknown protein; protein id: At3g24420.1
  misc_feature (23)..(279): Homolog of NCBI NO: 34912326 NR Description: P0451D05.26 [Oryza sativa (japonica
  misc_feature (25)..(279): Homolog of NCBI NO: 22298700 NR Description: ORF_ID:tlr1157~hypothetical protein
  misc_feature (24)..(274): Homolog of NCBI NO: 16080463 NR Description: similar to hydrolase [Bacillus subtilis]
MVGGGAAAGSGGAPSGAKLLQILNVRVVGSGDRVVVLSHGFGTDQSAWSRVLPYLTRDHRVVLYDLVCAGSVNPEHFDFRRYDTLDSYVDDLLAILDALRIARCAFVGHSVSAMIGILASIRRPELFAKLVLIGASPRFLNDHDYHGGFELPEIQQVFDAMAANYSAWATGYAPLAVGADVPAAVQEFSRTLFNMRPDISLHVCRTVFNTDLRGVLGMVRSPCVVVQTTRDVSVPASVAAYLKAHLGGRTAVEFLQTEGHLPHLSAPGLLAQVLRRALARY

SEQ ID NO: 9689 - DNA, 1537 bp, Zea mays subsp. mays
  misc_feature (1)..(1537): Ceres Seq. ID no. 12361456
  misc_feature: MA Experiment ID: 108533 Result: Up-regulated in Transcription
  misc_feature: MA Experiment 108533 PARAMETER Experiment Name: Zm_4deg_Cold_P Parameter: Age (hr) Value: 8
  misc_feature: MA Experiment 108533 PARAMETER Experiment Name: Zm_4deg_Cold_P Parameter: Organism Value: Zea mays
  misc_feature: MA Experiment 108533 PARAMETER Experiment Name: Zm_4deg_Cold_P Parameter: Plant Line Value: 35A19
  misc_feature: MA Experiment 108533 PARAMETER Experiment Name: Zm_4deg_Cold_P Parameter: Temperature (deg C) Value: 4 vs. 22
  misc_feature: MA Experiment 108533 PARAMETER Experiment Name: Zm_4deg_Cold_P Parameter: Timepoint (hr) Value: 1
  misc_feature: MA Experiment 108533 PARAMETER Experiment Name: Zm_4deg_Cold_P Parameter: Tissue Value: Aerial
  misc_feature: MA Experiment ID: 108534 Result: Up-regulated in Transcription
  misc_feature: MA Experiment 108534 PARAMETER Experiment Name: Zm_4deg_Cold_P Parameter: Age (hr) Value: 8
  misc_feature: MA Experiment 108534 PARAMETER Experiment Name: Zm_4deg_Cold_P Parameter: Organism Value: Zea mays
  misc_feature: MA Experiment 108534 PARAMETER Experiment Name: Zm_4deg_Cold_P Parameter: Plant Line Value: 35A19
  misc_feature: MA Experiment 108534 PARAMETER Experiment Name: Zm_4deg_Cold_P Parameter: Temperature (deg C) Value: 4 vs. 22
  misc_feature: MA Experiment 108534 PARAMETER Experiment Name: Zm_4deg_Cold_P Parameter: Timepoint (hr) Value: 6
  misc_feature: MA Experiment 108534 PARAMETER Experiment Name: Zm_4deg_Cold_P Parameter: Tissue Value: Aerial
  misc_feature: MA Experiment ID: 108535 Result: Down-regulated in Transcription
  misc_feature: MA Experiment 108535 PARAMETER Experiment Name: Zm_Meristem_P Parameter: Age (day) Value: 8
  misc_feature: MA Experiment 108535 PARAMETER Experiment Name: Zm_Meristem_P Parameter: Organism Value: Zea mays
  misc_feature: MA Experiment 108535 PARAMETER Experiment Name: Zm_Meristem_P Parameter: Plant Line Value: 35A19
  misc_feature: MA Experiment 108535 PARAMETER Experiment Name: Zm_Meristem_P Parameter: Tissue Value: Root Meristem vs. Above Root Meristem
  misc_feature: MA Experiment ID: 108543 Result: Up-regulated in Transcription
  misc_feature: MA Experiment ID: 108687 Result: Down-regulated in Transcription
  misc_feature: MA Experiment 108687 PARAMETER Experiment Name: Zm_Embryos-Flowers__P Parameter: Tissue Value: Embryo vs. Aerial+
  misc_feature: MA Experiment ID: 20000108 Result: Down-regulated in Transcription
  misc_feature: MA Experiment 20000108 PARAMETER Experiment Name: Zm_Root-Tips_P Parameter: Age (day) Value: 12
  misc_feature: MA Experiment 20000108 PARAMETER Experiment Name: Zm_Root-Tips_P Parameter: Organism Value: Zea mays
  misc_feature: MA Experiment 20000108 PARAMETER Experiment Name: Zm_Root-Tips_P Parameter: Tissue Value: Root tips vs. Root mid region    35
  misc_feature: MA Experiment 20000108 PARAMETER Experiment Name: Zm_Root-Tips_P Parameter: Tissue Value: Root tips vs. Root mid region   Sequence Listing-Misc Features (4)
  misc_feature: MA Experiment ID: 20000492 Result: Down-regulated in Transcription
  misc_feature: MA Experiment 20000492 PARAMETER Experiment Name: Zm_Hybrid_Seed_Dev_P Parameter: DAP Value: 12
  misc_feature: MA Experiment 20000492 PARAMETER Experiment Name: Zm_Hybrid_Seed_Dev_P Parameter: Organism Value: Zea mays
  misc_feature: MA Experiment 20000492 PARAMETER Experiment Name: Zm_Hybrid_Seed_Dev_P Parameter: Plant Line Value: 35A19
  misc_feature: MA Experiment 20000492 PARAMETER Experiment Name: Zm_Hybrid_Seed_Dev_P Parameter: Tissue Value: Fert Kernel vs. Unfert Floret
  misc_feature: MA Experiment ID: 20000532 Result: Up-regulated in Transcription
  misc_feature: MA Experiment 20000532 PARAMETER Experiment Name: Zm_0.001percent_MeJA_P Parameter: Age (day) Value: 10
  misc_feature: MA Experiment 20000532 PARAMETER Experiment Name: Zm_0.001percent_MeJA_P Parameter: Organism Value: Zea mays
  misc_feature: MA Experiment 20000532 PARAMETER Experiment Name: Zm_0.001percent_MeJA_P Parameter: Plant Line Value: 35A19
  misc_feature: MA Experiment 20000532 PARAMETER Experiment Name: Zm_0.001percent_MeJA_P Parameter: Timepoint (hr) Value: 48
  misc_feature: MA Experiment 20000532 PARAMETER Experiment Name: Zm_0.001percent_MeJA_P Parameter: Tissue Value: Aerial
  misc_feature: MA Experiment 20000532 PARAMETER Experiment Name: Zm_0.001percent_MeJA_P Parameter: Treatment Value: 0.001percent MeJA vs. No Treatment
  misc_feature: MA Experiment ID: 20000535 Result: Down-regulated in Transcription
  misc_feature: MA Experiment 20000535 PARAMETER Experiment Name: Zm_Hybrid_Seed_Dev_P Parameter: DAP Value: 30 vs. 12
  misc_feature: MA Experiment 20000535 PARAMETER Experiment Name: Zm_Hybrid_Seed_Dev_P Parameter: Organism Value: Zea mays
  misc_feature: MA Experiment 20000535 PARAMETER Experiment Name: Zm_Hybrid_Seed_Dev_P Parameter: Plant Line Value: 35A19
  misc_feature: MA Experiment 20000535 PARAMETER Experiment Name: Zm_Hybrid_Seed_Dev_P Parameter: Tissue Value: Embryo vs. Unfert Floret
  misc_feature: MA Experiment ID: 20000626 Result: Down-regulated in Transcription
  misc_feature: MA Experiment 20000626 PARAMETER Experiment Name: Zm_Herbicide-Treatments_P Parameter: Timepoint (hr) Value: 12
  misc_feature: MA Experiment 20000626 PARAMETER Experiment Name: Zm_Herbicide-Treatments_P Parameter: Tissue Value: Aerial
  misc_feature: MA Experiment 20000626 PARAMETER Experiment Name: Zm_Herbicide-Treatments_P Parameter: Treatment Value: Roundup vs. No Treatment
gcacgagaccattacctagaacatcctaatcgaaaaagctattcgcgggaccgtatccgagcaggacagcaggttgttcagcgatcactcgagcggtcgagccctcgcgccgcggagagtgtctccagtctcaagtacagcggaggatggagagcggcttgcttgacaccgccgcggctgccggtctctgcccggtggcggccgggcgccgccgcgtcgggagcacgggcacggcgaggtgcttcctcagctgctcctgcgcttccagagactgcagggtgagcgcgtcctactcccactccatcagccggatgctgagcggggtgcggtcggcggcgcgcaagaggctcttcaggagcgacccggccgagctgctgggcgtcgccaactggtcggagacgggcggcggcggcgccgggggccaccagcactggtggacggcgctggagaacaacttcgtgctggaggccaccgacgacgagtacggcggggtcgtcgtcgacgccgatcggctgccggccgacagggccgccttcgcgcgctccctcgcggcgtcgctctcctactggaagtccgtggggaagaaaggggtgtggttgaaattaccggtggatctagccgagttcgtccctttagcagtgaaggaaggcttcaagtaccaccacgcggaggaagcgtatttgatgatgacgtactggatccccgatgaaccgaatatgctcccagcaaatgcttctcatcaggttggggttgggggttttgtgatcaacgaccaaatggaggttctagtggtgcaagagaagtaccgcggatcgtcgctggatggcgtatggaaactccccacaggcttcattcttgcgtctgaggaaatctacacgggggccagcagagaggtgaaggaggaaaccggggtcgacaccgagttcgttgacgtcgttgctttcaggcatgcccacaacgtggcgtttcacaagtccgacctcttcttcatctgcatgctgaggcctgtgtcgagtgagatcaagattgacgagacagagattcaggcagcgaagtggatggcgctggaggagttcgtgaagcagcccttcatccaggaagaccacatcttccagaagatcatggacatctgcatccagcgcctccgcaagtgctactgtgggctgacgccgcaccacgtcgtctccaagttcgacgacagaacgtccacgctctactacaatgtcgccgagcccgaggacgtgaactgcagcgccgcctgatgtaatatgatgtgagggggagggggagccaccccagcatctactagtctaatttttgctgcgcagaagtttcatgatgcagcagtgttagtcgtgcgattactgagagtgaaatactagtggcagactgcgcgaggcaatagagttgccgagcctgtacatatacgtgtagggcatatgcataaccagagagctgtatatcccggggcggatccccgggcaggaggaaaattttcattgccgccgtaaattacaatttaactttagctcgccct

SEQ ID NO: 9690 - protein, 371 aa, Zea mays subsp. mays
  peptide (1)..(371): Ceres Seq. ID no. 12361457
  misc_feature (198)..(329): Pfam Name: NUDIX domain Pfam Description: NUDIX domain
  misc_feature (1)..(371): Homolog of NCBI NO: 38346172 NR Description: OSJNBa0079A21.19 [Oryza sativa (japonica
  misc_feature (98)..(369): Homolog of NCBI NO: 21928133 NR Description: AT5g47240/MQL5_10 [Arabidopsis thaliana]
  misc_feature (98)..(369): Homolog of NCBI NO: 8809607 NR Description: mutT domain protein-like [Arabidopsis thaliana]
  misc_feature (98)..(369): Homolog of NCBI NO: 18422772 NR Description: mutT domain protein-like; protein id:
  misc_feature (98)..(369): Homolog of NCBI NO: 21593371 NR Description: mutT domain protein-like [Arabidopsis thaliana]
  misc_feature (105)..(362): Homolog of NCBI NO: 18422823 NR Description: MutT domain protein-like; protein id: supported by cDNA: gi_14596036, supported by cDNA: gi_17978726
  misc_feature (105)..(362): Homolog of NCBI NO: 9758793 NR Description: MutT domain protein-like [Arabidopsis thaliana]
  misc_feature (105)..(362): Homolog of NCBI NO: 38564312 NR Description: At4g25434 [Arabidopsis thaliana]
  misc_feature (105)..(256): Homolog of NCBI NO: 30686884 NR Description: MutT/nudix family protein [Arabidopsis thaliana]
  misc_feature (256)..(362): Homolog of NCBI NO: 30686884 NR Description: MutT/nudix family protein [Arabidopsis thaliana]
MESGLLDTAAAAGLCPVAAGRRRVGSTGTARCFLSCSCASRDCRVSASYSHSISRMLSGVRSAARKRLFRSDPAELLGVANWSETGGGGAGGHQHWWTALENNFVLEATDDEYGGVVVDADRLPADRAAFARSLAASLSYWKSVGKKGVWLKLPVDLAEFVPLAVKEGFKYHHAEEAYLMMTYWIPDEPNMLPANASHQVGVGGFVINDQMEVLVVQEKYRGSSLDGVWKLPTGFILASEEIYTGASREVKEETGVDTEFVDVVAFRHAHNVAFHKSDLFFICMLRPVSSEIKIDETEIQAAKWMALEEFVKQPFIQEDHIFQKIMDICIQRLRKCYCGLTPHHVVSKFDDRTSTLYYNVAEPEDVNCSAA

SEQ ID NO: 9691 - protein, 316 aa, Zea mays subsp. mays
  peptide (1)..(316): Ceres Seq. ID no. 12361458
  misc_feature (143)..(274): Pfam Name: NUDIX domain Pfam Description: NUDIX domain
  misc_feature (1)..(316): Homolog of NCBI NO: 38346172 NR Description: OSJNBa0079A21.19 [Oryza sativa (japonica
  misc_feature (43)..(314): Homolog of NCBI NO: 21928133 NR Description: AT5g47240/MQL5_10 [Arabidopsis thaliana]
  misc_feature (43)..(314): Homolog of NCBI NO: 8809607 NR Description: mutT domain protein-like [Arabidopsis thaliana]
  misc_feature (43)..(314): Homolog of NCBI NO: 21593371 NR Description: mutT domain protein-like [Arabidopsis thaliana]
  misc_feature (43)..(314): Homolog of NCBI NO: 18422772 NR Description: mutT domain protein-like; protein id:
  misc_feature (50)..(307): Homolog of NCBI NO: 18422823 NR Description: MutT domain protein-like; protein id: supported by cDNA: gi_14596036, supported by cDNA: gi_17978726
  misc_feature (50)..(307): Homolog of NCBI NO: 9758793 NR Description: MutT domain protein-like [Arabidopsis thaliana]
  misc_feature (50)..(307): Homolog of NCBI NO: 38564312 NR Description: At4g25434 [Arabidopsis thaliana]
  misc_feature (50)..(201): Homolog of NCBI NO: 30686884 NR Description: MutT/nudix family protein [Arabidopsis thaliana]
  misc_feature (201)..(307): Homolog of NCBI NO: 30686884 NR Description: MutT/nudix family protein [Arabidopsis thaliana]
MLSGVRSAARKRLFRSDPAELLGVANWSETGGGGAGGHQHWWTALENNFVLEATDDEYGGVVVDADRLPADRAAFARSLAASLSYWKSVGKKGVWLKLPVDLAEFVPLAVKEGFKYHHAEEAYLMMTYWIPDEPNMLPANASHQVGVGGFVINDQMEVLVVQEKYRGSSLDGVWKLPTGFILASEEIYTGASREVKEETGVDTEFVDVVAFRHAHNVAFHKSDLFFICMLRPVSSEIKIDETEIQAAKWMALEEFVKQPFIQEDHIFQKIMDICIQRLRKCYCGLTPHHVVSKFDDRTSTLYYNVAEPEDVNCSAA

SEQ ID NO: 9692 - protein, 192 aa, Zea mays subsp. mays
  peptide (1)..(192): Ceres Seq. ID no. 12361459
  misc_feature (19)..(150): Pfam Name: NUDIX domain Pfam Description: NUDIX domain
  misc_feature (1)..(192): Homolog of NCBI NO: 38346172 NR Description: OSJNBa0079A21.19 [Oryza sativa (japonica
  misc_feature (1)..(190): Homolog of NCBI NO: 21928133 NR Description: AT5g47240/MQL5_10 [Arabidopsis thaliana]
  misc_feature (1)..(190): Homolog of NCBI NO: 8809607 NR Description: mutT domain protein-like [Arabidopsis thaliana]
  misc_feature (1)..(190): Homolog of NCBI NO: 21593371 NR Description: mutT domain protein-like [Arabidopsis thaliana]
  misc_feature (1)..(190): Homolog of NCBI NO: 18422772 NR Description: mutT domain protein-like; protein id:
  misc_feature (1)..(183): Homolog of NCBI NO: 18422823 NR Description: MutT domain protein-like; protein id: supported by cDNA: gi_14596036, supported by cDNA: gi_17978726
  misc_feature (1)..(183): Homolog of NCBI NO: 9758793 NR Description: MutT domain protein-like [Arabidopsis thaliana]
  misc_feature (1)..(183): Homolog of NCBI NO: 38564312 NR Description: At4g25434 [Arabidopsis thaliana]
  misc_feature (1)..(77): Homolog of NCBI NO: 30686884 NR Description: MutT/nudix family protein [Arabidopsis thaliana]
  misc_feature (77)..(183): Homolog of NCBI NO: 30686884 NR Description: MutT/nudix family protein [Arabidopsis thaliana]
MMTYWIPDEPNMLPANASHQVGVGGFVINDQMEVLVVQEKYRGSSLDGVWKLPTGFILASEEIYTGASREVKEETGVDTEFVDVVAFRHAHNVAFHKSDLFFICMLRPVSSEIKIDETEIQAAKWMALEEFVKQPFIQEDHIFQKIMDICIQRLRKCYCGLTPHHVVSKFDDRTSTLYYNVAEPEDVNCSAA

SEQ ID NO: 9693 - DNA, 1159 bp, Zea mays subsp. mays
  misc_feature (1)..(1159): Ceres Seq. ID no. 12365990
  misc_feature: MA Experiment ID: 108523 Result: Down-regulated in Transcription
  misc_feature: MA Experiment 108523 PARAMETER Experiment Name: Zm_42deg_Heat_P Parameter: Age (day) Value: 8
  misc_feature: MA Experiment 108523 PARAMETER Experiment Name: Zm_42deg_Heat_P Parameter: Organism Value: Zea mays
  misc_feature: MA Experiment 108523 PARAMETER Experiment Name: Zm_42deg_Heat_P Parameter: Plant Line Value: 35A19
  misc_feature: MA Experiment 108523 PARAMETER Experiment Name: Zm_42deg_Heat_P Parameter: Temperature (deg C) Value: 42 vs. 22
  misc_feature: MA Experiment 108523 PARAMETER Experiment Name: Zm_42deg_Heat_P Parameter: Timepoint (hr) Value: 6
  misc_feature: MA Experiment 108523 PARAMETER Experiment Name: Zm_42deg_Heat_P Parameter: Tissue Value: Aerial
  misc_feature: MA Experiment ID: 108535 Result: Down-regulated in Transcription
  misc_feature: MA Experiment 108535 PARAMETER Experiment Name: Zm_Meristem_P Parameter: Age (day) Value: 8
  misc_feature: MA Experiment 108535 PARAMETER Experiment Name: Zm_Meristem_P Parameter: Organism Value: Zea mays
  misc_feature: MA Experiment 108535 PARAMETER Experiment Name: Zm_Meristem_P Parameter: Plant Line Value: 35A19
  misc_feature: MA Experiment 108535 PARAMETER Experiment Name: Zm_Meristem_P Parameter: Tissue Value: Root Meristem vs. Above Root Meristem
  misc_feature: MA Experiment ID: 108544 Result: Down-regulated in Transcription
  misc_feature: MA Experiment ID: 108597 Result: Down-regulated in Transcription
  misc_feature: MA Experiment 108597 PARAMETER Experiment Name: Zm_100uM_ABA_P Parameter: Age (day) Value: 9
  misc_feature: MA Experiment 108597 PARAMETER Experiment Name: Zm_100uM_ABA_P Parameter: Organism Value: Zea mays
  misc_feature: MA Experiment 108597 PARAMETER Experiment Name: Zm_100uM_ABA_P Parameter: Plant Line Value: 35A19
  misc_feature: MA Experiment 108597 PARAMETER Experiment Name: Zm_100uM_ABA_P Parameter: Timepoint (hr) Value: 24
  misc_feature: MA Experiment 108597 PARAMETER Experiment Name: Zm_100uM_ABA_P Parameter: Tissue Value: Aerial
  misc_feature: MA Experiment 108597 PARAMETER Experiment Name: Zm_100uM_ABA_P Parameter: Treatment Value: 100uM ABA vs. No Treatment
  misc_feature: MA Experiment ID: 108687 Result: Down-regulated in Transcription
  misc_feature: MA Experiment 108687 PARAMETER Experiment Name: Zm_Embryos-Flowers__P Parameter: Tissue Value: Embryo vs. Aerial+
  misc_feature: MA Experiment ID: 20000479 Result: Down-regulated in Transcription
  misc_feature: MA Experiment 20000479 PARAMETER Experiment Name: Zm_Drought_P Parameter: Age (day) Value: 10
  misc_feature: MA Experiment 20000479 PARAMETER Experiment Name: Zm_Drought_P Parameter: Organism Value: Zea mays
  misc_feature: MA Experiment 20000479 PARAMETER Experiment Name: Zm_Drought_P Parameter: Plant Line Value: 35A19
  misc_feature: MA Experiment 20000479 PARAMETER Experiment Name: Zm_Drought_P Parameter: Timepoint (hr) Value: 48
  misc_feature: MA Experiment 20000479 PARAMETER Experiment Name: Zm_Drought_P Parameter: Tissue Value: Aerial
  misc_feature: MA Experiment 20000479 PARAMETER Experiment Name: Zm_Drought_P Parameter: Treatment Value: Drought vs. No Drought
  misc_feature: MA Experiment ID: 20000480 Result: Down-regulated in Transcription
  misc_feature: MA Experiment 20000480 PARAMETER Experiment Name: Zm_Drought_P Parameter: Age (day) Value: 11
  misc_feature: MA Experiment 20000480 PARAMETER Experiment Name: Zm_Drought_P Parameter: Organism Value: Zea mays
  misc_feature: MA Experiment 20000480 PARAMETER Experiment Name: Zm_Drought_P Parameter: Plant Line Value: 35A19
  misc_feature: MA Experiment 20000480 PARAMETER Experiment Name: Zm_Drought_P Parameter: Timepoint (hr) Value: 72
  misc_feature: MA Experiment 20000480 PARAMETER Experiment Name: Zm_Drought_P Parameter: Tissue Value: Aerial
  misc_feature: MA Experiment 20000480 PARAMETER Experiment Name: Zm_Drought_P Parameter: Treatment Value: Drought vs. No Drought
  misc_feature: MA Experiment ID: 20000534 Result: Down-regulated in Transcription
  misc_feature: MA Experiment 20000534 PARAMETER Experiment Name: Zm_Hybrid_Pollen_P Parameter: Age (day) Value: 8
  misc_feature: MA Experiment 20000534 PARAMETER Experiment Name: Zm_Hybrid_Pollen_P Parameter: Organism Value: Zea mays
  misc_feature: MA Experiment 20000534 PARAMETER Experiment Name: Zm_Hybrid_Pollen_P Parameter: Plant Line Value: 35A19
  misc_feature: MA Experiment 20000534 PARAMETER Experiment Name: Zm_Hybrid_Pollen_P Parameter: Tissue Value: Pollen vs. Aerial
atattggtagctcatcatcgatccagcagcacacagacgagccgacacaagcagttagctatagctgctagcctgatcgccaatggccaccgccggcagcaagcaaggaggaggctcgtccaagccgcctgcggctggtcaggagttggacccgaggtacgagtgggaggagaacgccagcagcttcatcctccgcatccacctctcaggcttcaggaaacaagatttcagggtgcaagtcgacggcgccggccgcctcaccgtccgtggccagcgctccgacgccgccgccaacgccaggcactcccgcttcaacaaggtcttccagctgccctccacctccaacctcgacgacatcgccggccgcttcgaccttggagtcctcacgctcaccgtgcccaagcgcctgcccgcgcccgcaaaggaagaccagcagcaggccaagaagcccgaggatgccgctgccgctgccgccaccaagcaggtggcgggagccaagggcgccaaatcggagccggagcagcagcacaaggaggaggcggcggcaaaggaagataagcccaagacgaccgccgcagcacctgcaccggcagccgacacgacggcaaaggaagataagcccaaggccgccgccgcagcacctgcaccggcagccgacacgaagaagcagcccgagacgcaggccaacgcagagagcaaggcgacggatccgaccgaaagcctggcggagcggcgcaccgaggaagagcgggccaatgcaaatgctgcagctgcggcggagcaccagagaaaggcatgccgtggcttcaaggagcgcgtggcggaggagctccaggggctggcgggctccgagtgggcggagggccttgtggagacgatcaagaggaacagggaggtggtcgccgtcgccgtcgccgccttctccctcggcgtcttcgtctccagcaggctcttctccaggtccagcaggaactagaagccaaccatgcatgcatctctcttttgtgacaatcgtaatagcgcttgtcaccaccacaaactacgtatactgacacatacagtccatgatgtggatatatacatgcactgcacagacacaagtgaattgtaaacatgtttataaatgtatcagaaacaagtttatacatgtaacagtgtc

SEQ ID NO: 9694 - protein, 297 aa, Zea mays subsp. mays
  peptide (1)..(297): Ceres Seq. ID no. 12365991
  misc_feature (116)..(203): Pfam Name: MARCKS family Pfam Description: MARCKS family
  misc_feature (76)..(295): Homolog of NCBI NO: 34912188 NR Description: P0700A11.20 [Oryza sativa (japonica
  misc_feature (21)..(254): Homolog of NCBI NO: 34912188 NR Description: P0700A11.20 [Oryza sativa (japonica
  misc_feature (6)..(172): Homolog of NCBI NO: 34912180 NR Description: P0700A11.16 [Oryza sativa (japonica
  misc_feature (20)..(253): Homolog of NCBI NO: 18483234 NR Description: small heat shock-like protein [Sorghum bicolor]
  misc_feature (35)..(154): Homolog of NCBI NO: 21397266 NR Description: Putative small heat shock protein [Oryza sativa
  misc_feature (20)..(223): Homolog of NCBI NO: 18414724 NR Description: expressed protein; protein id: At5g04890.1, by cDNA: gi_7407072 [Arabidopsis thaliana]
  misc_feature (28)..(171): Homolog of NCBI NO: 34912184 NR Description: P0700A11.18 [Oryza sativa (japonica
MATAGSKQGGGSSKPPAAGQELDPRYEWEENASSFILRIHLSGFRKQDFRVQVDGAGRLTVRGQRSDAAANARHSRFNKVFQLPSTSNLDDIAGRFDLGVLTLTVPKRLPAPAKEDQQQAKKPEDAAAAAATKQVAGAKGAKSEPEQQHKEEAAAKEDKPKTTAAAPAPAADTTAKEDKPKAAAAAPAPAADTKKQPETQANAESKATDPTESLAERRTEEERANANAAAAAEHQRKACRGFKERVAEELQGLAGSEWAEGLVETIKRNREVVAVAVAAFSLGVFVSSRLFSRSSRN

SEQ ID NO: 9695 - protein, 198 aa, Zea mays subsp. mays
  peptide (1)..(198): Ceres Seq. ID no. 12365992
  misc_feature (1)..(67): Pfam Name: Extensin-like region Pfam Description: Extensin-like region
  misc_feature (1)..(177): Homolog of NCBI NO: 34872074 NR Description: similar to Ser/Arg-related nuclear matrix
  misc_feature (1)..(163): Homolog of NCBI NO: 15219287 NR Description: arginine/serine-rich protein, putative; protein At1g16610.1, supported by cDNA: gi_15027956, supported by cDNA:
  misc_feature (1)..(177): Homolog of NCBI NO: 5032119 NR Description: Ser/Arg-related nuclear matrix protein (plenty of
  misc_feature (1)..(177): Homolog of NCBI NO: 23274133 NR Description: Similar to serine/arginine repetitive matrix 1
  misc_feature (1)..(176): Homolog of NCBI NO: 11360318 NR Description: probable mucin DKFZp434C196.1 - human (fragment)
  misc_feature (1)..(99): Homolog of NCBI NO: 25989119 NR Description: unknown [Streptomyces aureofaciens]
  misc_feature (1)..(175): Homolog of NCBI NO: 25143299 NR Description: pre-mRNA splicing SR protein related RSR-1 (68.2
  misc_feature (1)..(182): Homolog of NCBI NO: 7949115 NR Description: Ser/Arg-related nuclear matrix protein;
  misc_feature (1)..(175): Homolog of NCBI NO: 7949115 NR Description: Ser/Arg-related nuclear matrix protein;
  misc_feature (1)..(133): Homolog of NCBI NO: 25143299 NR Description: pre-mRNA splicing SR protein related RSR-1 (68.2
MPLPLPPPSRWREPRAPNRSRSSSTRRRRRQRKISPRRPPQHLHRQPTRRQRKISPRPPPQHLHRQPTRRSSPRRRPTQRARRRIRPKAWRSGAPRKSGPMQMLQLRRSTRERHAVASRSAWRRSSRGWRAPSGRRALWRRSRGTGRWSPSPSPPSPSASSSPAGSSPGPAGTRSQPCMHLSFVTIVIALVTTTNYVY

SEQ ID NO: 9696 - protein, 185 aa, Zea mays subsp. mays
  peptide (1)..(185): Ceres Seq. ID no. 12365993
ILVAHHRSSSTQTSRHKQLAIAASLIANGHRRQQARRRLVQAACGWSGVGPEVRVGGERQQLHPPHPPLRLQETRFQGASRRRRPPHRPWPALRRRRQRQALPLQQGLPAALHLQPRRHRRPLRPWSPHAHRAQAPARARKGRPAAGQEARGCRCRCRHQAGGGSQGRQIGAGAAAQGGGGGKGR

SEQ ID NO: 9697 - DNA, 1302 bp, Zea mays subsp. mays
  misc_feature (1)..(1302): Ceres Seq. ID no. 12349766
  misc_feature: MA Experiment ID: 20000492 Result: Down-regulated in Transcription
  misc_feature: MA Experiment 20000492 PARAMETER Experiment Name: Zm_Hybrid_Seed_Dev_P Parameter: DAP Value: 12
  misc_feature: MA Experiment 20000492 PARAMETER Experiment Name: Zm_Hybrid_Seed_Dev_P Parameter: Organism Value: Zea mays
  misc_feature: MA Experiment 20000492 PARAMETER Experiment Name: Zm_Hybrid_Seed_Dev_P Parameter: Plant Line Value: 35A19
  misc_feature: MA Experiment 20000492 PARAMETER Experiment Name: Zm_Hybrid_Seed_Dev_P Parameter: Tissue Value: Fert Kernel vs. Unfert Floret
  misc_feature: MA Experiment ID: 20000535 Result: Down-regulated in Transcription
  misc_feature: MA Experiment 20000535 PARAMETER Experiment Name: Zm_Hybrid_Seed_Dev_P Parameter: DAP Value: 30 vs. 12
  misc_feature: MA Experiment 20000535 PARAMETER Experiment Name: Zm_Hybrid_Seed_Dev_P Parameter: Organism Value: Zea mays
  misc_feature: MA Experiment 20000535 PARAMETER Experiment Name: Zm_Hybrid_Seed_Dev_P Parameter: Plant Line Value: 35A19
  misc_feature: MA Experiment 20000535 PARAMETER Experiment Name: Zm_Hybrid_Seed_Dev_P Parameter: Tissue Value: Embryo vs. Unfert Floret
gtgggcgtggacacgttgactttttcaactgtctgcccctgatgtccgttggctcccgacggaggccgccgccgccgcatcaccaccgtcgcgccatgacacctgcctcctccgtctccgtccccgcgccggttcccgcgccccctaagcctctctacctccggggcccggtcatcgcaggcgccgtcgcgctggccgcgtttctcctcctcgccgccgcctacgccaccaggcgagcagggtccccgccggccgccctcctctcccacccagctgtttccaccaggttcttctccttcgacctggtgcgcgagtaccctcacgacccggccgccttcacccagggtatcttgtacgcgggaaatgacacgcttttcgagtccactggcctctacggcaggtcttcagttcgaaaggttgagcttcagaccggaaaagttttggttaaccaccaaatggacggagatgtgtttggagaaggtttaactcttcttggtgacagattgtttcaggttacctggttgaagaacgacgggtttatatatgaccggcataacttctccaaatgcacgagttttacccataaaatgcgagatggttggggtctggcgactgatggaaaagttctttttggcagtgatggcacctcaatgctgtataagctggattcaaagtcacttgaagtcatgaaagtggtgactgtcaagtatcacggtaatcaagtcccctatcttaatgagctggaatatatagatggtgaagtctgggcaaatgtctggcagacagattgcatagctagagtgtcccctgaagatggcctagtggtgtgttggatctttcttcatgagctgaggcggcagttgtggaactcaggcaacacgaatattgacgtcttaaacgggatagcttgggatgaaagaaggcacagattatttgtgacagggaaactgtggccaaagctatatgagatcaagctacgggcagtagatggtccagcagatggatctgtagaaaagctttgtccaaaagccagcttctatcgctgaagagtgtagaaccgcatatacactgggtgtgctaacatgggccttcatttgtttaaacgcacgatgcgaaggatgtggagatgtgagtacgtacatgtttgatctggtaccactgtcatatatatatacacccatgagttagtagatgtagctgtacattgttgtgacctgtatgaattttgatgatggctgtgttgtttgtgttaagagtgaattgcaacagattttgatgcattcaatgcaacttaatagcttg

SEQ ID NO: 9698 - protein, 347 aa, Zea mays subsp. mays
  peptide (1)..(347): Ceres Seq. ID no. 12349767
  misc_feature (54)..(333): Pfam Name: Glutamine cyclotransferase Pfam Description: Glutamine cyclotransferase
  misc_feature (32)..(347): Homolog of NCBI NO: 24413973 NR Description: putative glutaminyl-peptide cyclotransferase
  misc_feature (92)..(340): Homolog of NCBI NO: 18416607 NR Description: glutamine cyclotransferase precursor - like protein id: At4g25720.1, supported by cDNA: 114197. [Arabidopsis >gi|25054886|gb|AAN71928.1| putative glutamine cyclotransferase
  misc_feature (92)..(340): Homolog of NCBI NO: 21536884 NR Description: glutamine cyclotransferase precursor-like protein
  misc_feature (93)..(340): Homolog of NCBI NO: 7484740 NR Description: glutaminyl-peptide cyclotransferase (EC 2.3.2.5) - papaya >gi|3342798|gb|AAC27745.1| glutamine cyclotransferase
  misc_feature (92)..(340): Homolog of NCBI NO: 7484984 NR Description: glutaminyl-peptide cyclotransferase homolog - Arabidopsis thaliana >gi|4914464|emb|CAB43703.1| glutamine
  misc_feature (83)..(334): Homolog of NCBI NO: 21231655 NR Description: glutamine cyclotransferase [Xanthomonas pv. campestris str. ATCC 33913] >gi|21113351|gb|AAM41496.1| cyclotransferase [Xanthomonas campestris pv. campestris str. ATCC
  misc_feature (87)..(325): Homolog of NCBI NO: 21243055 NR Description: glutamine cyclotransferase [Xanthomonas pv. citri str. 306] >gi|21108567|gb|AAM37173.1| glutamine
  misc_feature (65)..(325): Homolog of NCBI NO: 31790364 NR Description: putative glutamine cyclotransferase [uncultured
  misc_feature (39)..(325): Homolog of NCBI NO: 22970826 NR Description: hypothetical protein [Chloroflexus aurantiacus]
  misc_feature (97)..(324): Homolog of NCBI NO: 16124007 NR Description: putative exported protein [Yersinia pestis]
GRGHVDFFNCLPLMSVGSRRRPPPPHHHRRAMTPASSVSVPAPVPAPPKPLYLRGPVIAGAVALAAFLLLAAAYATRRAGSPPAALLSHPAVSTRFFSFDLVREYPHDPAAFTQGILYAGNDTLFESTGLYGRSSVRKVELQTGKVLVNHQMDGDVFGEGLTLLGDRLFQVTWLKNDGFIYDRHNFSKCTSFTHKMRDGWGLATDGKVLFGSDGTSMLYKLDSKSLEVMKVVTVKYHGNQVPYLNELEYIDGEVWANVWQTDCIARVSPEDGLVVCWIFLHELRRQLWNSGNTNIDVLNGIAWDERRHRLFVTGKLWPKLYEIKLRAVDGPADGSVEKLCPKASFYR

SEQ ID NO: 9699 - protein, 334 aa, Zea mays subsp. mays
  peptide (1)..(334): Ceres Seq. ID no. 12349768
  misc_feature (41)..(320): Pfam Name: Glutamine cyclotransferase Pfam Description: Glutamine cyclotransferase
  misc_feature (19)..(334): Homolog of NCBI NO: 24413973 NR Description: putative glutaminyl-peptide cyclotransferase
  misc_feature (79)..(327): Homolog of NCBI NO: 18416607 NR Description: glutamine cyclotransferase precursor - like protein id: At4g25720.1, supported by cDNA: 114197. [Arabidopsis >gi|25054886|gb|AAN71928.1| putative glutamine cyclotransferase
  misc_feature (79)..(327): Homolog of NCBI NO: 21536884 NR Description: glutamine cyclotransferase precursor-like protein
  misc_feature (80)..(327): Homolog of NCBI NO: 7484740 NR Description: glutaminyl-peptide cyclotransferase (EC 2.3.2.5) - papaya >gi|3342798|gb|AAC27745.1| glutamine cyclotransferase
  misc_feature (79)..(327): Homolog of NCBI NO: 7484984 NR Description: glutaminyl-peptide cyclotransferase homolog - Arabidopsis thaliana >gi|4914464|emb|CAB43703.1| glutamine
  misc_feature (70)..(321): Homolog of NCBI NO: 21231655 NR Description: glutamine cyclotransferase [Xanthomonas pv. campestris str. ATCC 33913] >gi|21113351|gb|AAM41496.1| cyclotransferase [Xanthomonas campestris pv. campestris str. ATCC
  misc_feature (74)..(312): Homolog of NCBI NO: 21243055 NR Description: glutamine cyclotransferase [Xanthomonas pv. citri str. 306] >gi|21108567|gb|AAM37173.1| glutamine
  misc_feature (52)..(312): Homolog of NCBI NO: 31790364 NR Description: putative glutamine cyclotransferase [uncultured
  misc_feature (26)..(312): Homolog of NCBI NO: 22970826 NR Description: hypothetical protein [Chloroflexus aurantiacus]
  misc_feature (84)..(311): Homolog of NCBI NO: 16124007 NR Description: putative exported protein [Yersinia pestis]
MSVGSRRRPPPPHHHRRAMTPASSVSVPAPVPAPPKPLYLRGPVIAGAVALAAFLLLAAAYATRRAGSPPAALLSHPAVSTRFFSFDLVREYPHDPAAFTQGILYAGNDTLFESTGLYGRSSVRKVELQTGKVLVNHQMDGDVFGEGLTLLGDRLFQVTWLKNDGFIYDRHNFSKCTSFTHKMRDGWGLATDGKVLFGSDGTSMLYKLDSKSLEVMKVVTVKYHGNQVPYLNELEYIDGEVWANVWQTDCIARVSPEDGLVVCWIFLHELRRQLWNSGNTNIDVLNGIAWDERRHRLFVTGKLWPKLYEIKLRAVDGPADGSVEKLCPKASFYR

SEQ ID NO: 9700 - protein, 316 aa, Zea mays subsp. mays
  peptide (1)..(316): Ceres Seq. ID no. 12349769
  misc_feature (23)..(302): Pfam Name: Glutamine cyclotransferase Pfam Description: Glutamine cyclotransferase
  misc_feature (1)..(316): Homolog of NCBI NO: 24413973 NR Description: putative glutaminyl-peptide cyclotransferase
  misc_feature (61)..(309): Homolog of NCBI NO: 18416607 NR Description: glutamine cyclotransferase precursor - like protein id: At4g25720.1, supported by cDNA: 114197. [Arabidopsis >gi|25054886|gb|AAN71928.1| putative glutamine cyclotransferase
  misc_feature (61)..(309): Homolog of NCBI NO: 21536884 NR Description: glutamine cyclotransferase precursor-like protein
  misc_feature (62)..(309): Homolog of NCBI NO: 7484740 NR Description: glutaminyl-peptide cyclotransferase (EC 2.3.2.5) - papaya >gi|3342798|gb|AAC27745.1| glutamine cyclotransferase
  misc_feature (61)..(309): Homolog of NCBI NO: 7484984 NR Description: glutaminyl-peptide cyclotransferase homolog - Arabidopsis thaliana >gi|4914464|emb|CAB43703.1| glutamine
  misc_feature (52)..(303): Homolog of NCBI NO: 21231655 NR Description: glutamine cyclotransferase [Xanthomonas pv. campestris str. ATCC 33913] >gi|21113351|gb|AAM41496.1| cyclotransferase [Xanthomonas campestris pv. campestris str. ATCC
  misc_feature (56)..(294): Homolog of NCBI NO: 21243055 NR Description: glutamine cyclotransferase [Xanthomonas pv. citri str. 306] >gi|21108567|gb|AAM37173.1| glutamine
  misc_feature (34)..(294): Homolog of NCBI NO: 31790364 NR Description: putative glutamine cyclotransferase [uncultured
  misc_feature (8)..(294): Homolog of NCBI NO: 22970826 NR Description: hypothetical protein [Chloroflexus aurantiacus]
  misc_feature (66)..(293): Homolog of NCBI NO: 16124007 NR Description: putative exported protein [Yersinia pestis]
MTPASSVSVPAPVPAPPKPLYLRGPVIAGAVALAAFLLLAAAYATRRAGSPPAALLSHPAVSTRFFSFDLVREYPHDPAAFTQGILYAGNDTLFESTGLYGRSSVRKVELQTGKVLVNHQMDGDVFGEGLTLLGDRLFQVTWLKNDGFIYDRHNFSKCTSFTHKMRDGWGLATDGKVLFGSDGTSMLYKLDSKSLEVMKVVTVKYHGNQVPYLNELEYIDGEVWANVWQTDCIARVSPEDGLVVCWIFLHELRRQLWNSGNTNIDVLNGIAWDERRHRLFVTGKLWPKLYEIKLRAVDGPADGSVEKLCPKASFYR

SEQ ID NO: 9701 - DNA, 1519 bp, Zea mays subsp. mays
  misc_feature (1)..(1519): Ceres Seq. ID no. 12354390
  misc_feature: MA Experiment ID: 108535 Result: Up-regulated in Transcription
  misc_feature: MA Experiment 108535 PARAMETER Experiment Name: Zm_Meristem_P Parameter: Age (day) Value: 8
  misc_feature: MA Experiment 108535 PARAMETER Experiment Name: Zm_Meristem_P Parameter: Organism Value: Zea mays
  misc_feature: MA Experiment 108535 PARAMETER Experiment Name: Zm_Meristem_P Parameter: Plant Line Value: 35A19
  misc_feature: MA Experiment 108535 PARAMETER Experiment Name: Zm_Meristem_P Parameter: Tissue Value: Root Meristem vs. Above Root Meristem
  misc_feature: MA Experiment ID: 20000108 Result: Up-regulated in Transcription
  misc_feature: MA Experiment 20000108 PARAMETER Experiment Name: Zm_Root-Tips_P Parameter: Age (day) Value: 12
  misc_feature: MA Experiment 20000108 PARAMETER Experiment Name: Zm_Root-Tips_P Parameter: Organism Value: Zea mays
  misc_feature: MA Experiment 20000108 PARAMETER Experiment Name: Zm_Root-Tips_P Parameter: Tissue Value: Root tips vs. Root mid region    35
  misc_feature: MA Experiment 20000108 PARAMETER Experiment Name: Zm_Root-Tips_P Parameter: Tissue Value: Root tips vs. Root mid region   Sequence Listing-Misc Features (4)
  misc_feature: MA Experiment ID: 20000488 Result: Up-regulated in Transcription
  misc_feature: MA Experiment 20000488 PARAMETER Experiment Name: Zm_50mM_NH4NO3_L_to_H_P Parameter: Organism Value: Zea mays
  misc_feature: MA Experiment 20000488 PARAMETER Experiment Name: Zm_50mM_NH4NO3_L_to_H_P Parameter: Timepoint (hr) Value: 8
  misc_feature: MA Experiment 20000488 PARAMETER Experiment Name: Zm_50mM_NH4NO3_L_to_H_P Parameter: Tissue Value: Leaves
  misc_feature: MA Experiment 20000488 PARAMETER Experiment Name: Zm_50mM_NH4NO3_L_to_H_P Parameter: Treatment Value: 50mM NH4NO3 vs. 100mM Mannitol
  misc_feature: MA Experiment ID: 20000492 Result: Up-regulated in Transcription
  misc_feature: MA Experiment 20000492 PARAMETER Experiment Name: Zm_Hybrid_Seed_Dev_P Parameter: DAP Value: 12
  misc_feature: MA Experiment 20000492 PARAMETER Experiment Name: Zm_Hybrid_Seed_Dev_P Parameter: Organism Value: Zea mays
  misc_feature: MA Experiment 20000492 PARAMETER Experiment Name: Zm_Hybrid_Seed_Dev_P Parameter: Plant Line Value: 35A19
  misc_feature: MA Experiment 20000492 PARAMETER Experiment Name: Zm_Hybrid_Seed_Dev_P Parameter: Tissue Value: Fert Kernel vs. Unfert Floret
  misc_feature: MA Experiment ID: 20001606 Result: Up-regulated in Transcription
  misc_feature: MA Experiment 20001606 PARAMETER Experiment Name: Zm_50ppm_KNO3_L-to-H_P Parameter: Age (day) Value: 19
  misc_feature: MA Experiment 20001606 PARAMETER Experiment Name: Zm_50ppm_KNO3_L-to-H_P Parameter: Organism Value: Zea mays
  misc_feature: MA Experiment 20001606 PARAMETER Experiment Name: Zm_50ppm_KNO3_L-to-H_P Parameter: Plant Line Value: 35A19
  misc_feature: MA Experiment 20001606 PARAMETER Experiment Name: Zm_50ppm_KNO3_L-to-H_P Parameter: Timepoint (hr) Value: 8
  misc_feature: MA Experiment 20001606 PARAMETER Experiment Name: Zm_50ppm_KNO3_L-to-H_P Parameter: Tissue Value: Shoots
  misc_feature: MA Experiment 20001606 PARAMETER Experiment Name: Zm_50ppm_KNO3_L-to-H_P Parameter: Treatment Value: 50ppm KNO3 vs. 50ppm KCl
  misc_feature: MA Experiment ID: 20001608 Result: Up-regulated in Transcription
  misc_feature: MA Experiment 20001608 PARAMETER Experiment Name: Zm_50ppm_KNO3_L-to-H_P Parameter: Age (day) Value: 21
  misc_feature: MA Experiment 20001608 PARAMETER Experiment Name: Zm_50ppm_KNO3_L-to-H_P Parameter: Organism Value: Zea mays
  misc_feature: MA Experiment 20001608 PARAMETER Experiment Name: Zm_50ppm_KNO3_L-to-H_P Parameter: Plant Line Value: 35A19
  misc_feature: MA Experiment 20001608 PARAMETER Experiment Name: Zm_50ppm_KNO3_L-to-H_P Parameter: Timepoint (hr) Value: 48
  misc_feature: MA Experiment 20001608 PARAMETER Experiment Name: Zm_50ppm_KNO3_L-to-H_P Parameter: Tissue Value: Shoots
  misc_feature: MA Experiment 20001608 PARAMETER Experiment Name: Zm_50ppm_KNO3_L-to-H_P Parameter: Treatment Value: 50ppm KNO3 vs. 50ppm KCl
agacgtgaatccaagcgtgcaagcaagcggcggtaatggcggcggctctgcaagccacgccgctcaaaaccctatccatctcccgccggcgcgtcggcggcgcgggggcgcggccgcgtccgatggcggcgagcttccgatgctccgcggcggcgaggagctacaatatcacgctcctccccggagacggcatcggccctgaggtggtcgccgtcgccaaggacgtgctgtccctcgccggcgccctcgaaggcgtcgagctccggttccaggagaagcttgtgggtggctcggccctggacgccaccggcgtgccgctccccgacgagacactcgacgcggccaagggttccgacgccgtcctcctcggcgccattggaggctataagtgggataacaatgagaagcacctcaagcctgagaccgggctgctgcagctccgtgccggacttggggtctttgccaatctgcgaccagctgcagtattgccgcagttggtagatgcatccactctgaagaaagaggtagctgaaggtgttgacatcatggttgtcagagagcttactggaggcatctacttcggcaaacccaggggttttggaacaaatgacaatggagatgacattgggttcaacacagaagtttatccagcttctgagattgatcgtatcgcacgagtcgcatttgaggttgctcgcaagagaagagggagactatgctcggttgacaaagcaaatgtcttggaggcatctatgctttggaggaaaagggtgactgcactagcttcggaattccctgatattgagctctcacacatgtatgttgataatgctgcgatgcagcttgttaggaatcctaagcagtttgacacaattgtcacaaacaatatttttggtgacatattatctgatgaagcatcaatgattacgggaagtattggaatgctcccatctgccagtgttggtgaatcgggacctggtctttttgaacctattcatggctctgcccctgatattgctggacaggacaaggccaatccattggctacaattcttagtgcagcgatgctattgagatatggcctaggagaagaaaatgctgcgaacagaattgaagctgcagttactgaaacactgaaccatgggttccgaactggggacatatattctcctggaacaacattggttggatgcaagcggatgggggaagaagtcctgaagacagtgaactcactgaaggaagtggctgctgtaaactgatgcatgttggtacttaatttataaccctacaggatgagatggttgaaagggacttgcattttattagaagttgagcctggtgaaagagagcactgcgtctggttttgaatcgcaactgtagcggctgaaccgacggtcttttttcatttctggtgtttgttggccttcctgtaactcaattttgtacaaggaaggataagcatatgtatgataaaatgggatagtttatgccagttgaataaaatatgttctataacttc

SEQ ID NO: 9702 - protein, 407 aa, Zea mays subsp. mays
  peptide (1)..(407): Ceres Seq. ID no. 12354391
  misc_feature (45)..(393): Pfam Name: Isocitrate/isopropylmalate dehydrogenase Pfam Description: Isocitrate/isopropylmalate dehydrogenase
  misc_feature (1)..(399): Homolog of NCBI NO: 126201 NR Description: 3-isopropylmalate dehydrogenase, chloroplast
  misc_feature (1)..(399): Homolog of NCBI NO: 15220167 NR Description: putative 3-isopropylmalate dehydrogenase; protein At1g80560.1, supported by cDNA: 152141., supported by cDNA:
  misc_feature (1)..(399): Homolog of NCBI NO: 17064730 NR Description: putative 3-isopropylmalate dehydrogenase
  misc_feature (1)..(399): Homolog of NCBI NO: 21553584 NR Description: putative 3-isopropylmalate dehydrogenase
  misc_feature (35)..(399): Homolog of NCBI NO: 15221631 NR Description: 3-methyladenine DNA glycosylase, putative;
  misc_feature (35)..(399): Homolog of NCBI NO: 21592944 NR Description: 3-methyladenine DNA glycosylase, putative
  misc_feature (35)..(399): Homolog of NCBI NO: 21759267 NR Description: 3-isopropylmalate dehydrogenase 1, chloroplast
  misc_feature (35)..(399): Homolog of NCBI NO: 15241338 NR Description: 3-isopropylmalate dehydrogenase; protein id:
  misc_feature (35)..(399): Homolog of NCBI NO: 18377879 NR Description: AT5g14200/MUA22_20 [Arabidopsis thaliana]
  misc_feature (84)..(399): Homolog of NCBI NO: 26451517 NR Description: putative 3-isopropylmalate dehydrogenase
MAAALQATPLKTLSISRRRVGGAGARPRPMAASFRCSAAARSYNITLLPGDGIGPEVVAVAKDVLSLAGALEGVELRFQEKLVGGSALDATGVPLPDETLDAAKGSDAVLLGAIGGYKWDNNEKHLKPETGLLQLRAGLGVFANLRPAAVLPQLVDASTLKKEVAEGVDIMVVRELTGGIYFGKPRGFGTNDNGDDIGFNTEVYPASEIDRIARVAFEVARKRRGRLCSVDKANVLEASMLWRKRVTALASEFPDIELSHMYVDNAAMQLVRNPKQFDTIVTNNIFGDILSDEASMITGSIGMLPSASVGESGPGLFEPIHGSAPDIAGQDKANPLATILSAAMLLRYGLGEENAANRIEAAVTETLNHGFRTGDIYSPGTTLVGCKRMGEEVLKTVNSLKEVAAVN

SEQ ID NO: 9703 - protein, 378 aa, Zea mays subsp. mays
  peptide (1)..(378): Ceres Seq. ID no. 12354392
  misc_feature (16)..(364): Pfam Name: Isocitrate/isopropylmalate dehydrogenase Pfam Description: Isocitrate/isopropylmalate dehydrogenase
  misc_feature (1)..(370): Homolog of NCBI NO: 126201 NR Description: 3-isopropylmalate dehydrogenase, chloroplast
  misc_feature (1)..(370): Homolog of NCBI NO: 15220167 NR Description: putative 3-isopropylmalate dehydrogenase; protein At1g80560.1, supported by cDNA: 152141., supported by cDNA:
  misc_feature (1)..(370): Homolog of NCBI NO: 17064730 NR Description: putative 3-isopropylmalate dehydrogenase
  misc_feature (1)..(370): Homolog of NCBI NO: 21553584 NR Description: putative 3-isopropylmalate dehydrogenase
  misc_feature (6)..(370): Homolog of NCBI NO: 15221631 NR Description: 3-methyladenine DNA glycosylase, putative;
  misc_feature (6)..(370): Homolog of NCBI NO: 21592944 NR Description: 3-methyladenine DNA glycosylase, putative
  misc_feature (6)..(370): Homolog of NCBI NO: 21759267 NR Description: 3-isopropylmalate dehydrogenase 1, chloroplast
  misc_feature (6)..(370): Homolog of NCBI NO: 15241338 NR Description: 3-isopropylmalate dehydrogenase; protein id:
  misc_feature (6)..(370): Homolog of NCBI NO: 18377879 NR Description: AT5g14200/MUA22_20 [Arabidopsis thaliana]
  misc_feature (55)..(370): Homolog of NCBI NO: 26451517 NR Description: putative 3-isopropylmalate dehydrogenase
MAASFRCSAAARSYNITLLPGDGIGPEVVAVAKDVLSLAGALEGVELRFQEKLVGGSALDATGVPLPDETLDAAKGSDAVLLGAIGGYKWDNNEKHLKPETGLLQLRAGLGVFANLRPAAVLPQLVDASTLKKEVAEGVDIMVVRELTGGIYFGKPRGFGTNDNGDDIGFNTEVYPASEIDRIARVAFEVARKRRGRLCSVDKANVLEASMLWRKRVTALASEFPDIELSHMYVDNAAMQLVRNPKQFDTIVTNNIFGDILSDEASMITGSIGMLPSASVGESGPGLFEPIHGSAPDIAGQDKANPLATILSAAMLLRYGLGEENAANRIEAAVTETLNHGFRTGDIYSPGTTLVGCKRMGEEVLKTVNSLKEVAAVN

SEQ ID NO: 9704 - protein, 237 aa, Zea mays subsp. mays
  peptide (1)..(237): Ceres Seq. ID no. 12354393
  misc_feature (1)..(223): Pfam Name: Isocitrate/isopropylmalate dehydrogenase Pfam Description: Isocitrate/isopropylmalate dehydrogenase
  misc_feature (1)..(229): Homolog of NCBI NO: 15220167 NR Description: putative 3-isopropylmalate dehydrogenase; protein At1g80560.1, supported by cDNA: 152141., supported by cDNA:
  misc_feature (1)..(229): Homolog of NCBI NO: 17064730 NR Description: putative 3-isopropylmalate dehydrogenase
  misc_feature (1)..(229): Homolog of NCBI NO: 21553584 NR Description: putative 3-isopropylmalate dehydrogenase
  misc_feature (1)..(229): Homolog of NCBI NO: 15221631 NR Description: 3-methyladenine DNA glycosylase, putative;
  misc_feature (1)..(229): Homolog of NCBI NO: 21592944 NR Description: 3-methyladenine DNA glycosylase, putative
  misc_feature (1)..(229): Homolog of NCBI NO: 126201 NR Description: 3-isopropylmalate dehydrogenase, chloroplast
  misc_feature (1)..(229): Homolog of NCBI NO: 21759267 NR Description: 3-isopropylmalate dehydrogenase 1, chloroplast
  misc_feature (1)..(229): Homolog of NCBI NO: 15241338 NR Description: 3-isopropylmalate dehydrogenase; protein id:
  misc_feature (1)..(229): Homolog of NCBI NO: 18377879 NR Description: AT5g14200/MUA22_20 [Arabidopsis thaliana]
  misc_feature (1)..(229): Homolog of NCBI NO: 26451517 NR Description: putative 3-isopropylmalate dehydrogenase
MVVRELTGGIYFGKPRGFGTNDNGDDIGFNTEVYPASEIDRIARVAFEVARKRRGRLCSVDKANVLEASMLWRKRVTALASEFPDIELSHMYVDNAAMQLVRNPKQFDTIVTNNIFGDILSDEASMITGSIGMLPSASVGESGPGLFEPIHGSAPDIAGQDKANPLATILSAAMLLRYGLGEENAANRIEAAVTETLNHGFRTGDIYSPGTTLVGCKRMGEEVLKTVNSLKEVAAVN

SEQ ID NO: 9705 - DNA, 1470 bp, Zea mays subsp. mays
  misc_feature (1)..(1470): Ceres Seq. ID no. 12365924
  misc_feature: MA Experiment ID: 108544 Result: Up-regulated in Transcription
gcttggtacgtgcccacacacgtaccaaataaacgtacactgaccgacgtcgtcgtttcacgttgcaagattgcatcttgccgatcatcgcaacgtcggctagctctgtgacaatggcgaagagcagacgggagatctcgtttggtttggccgtcgtcctgtccctaacggccgccgcactcgtgcgaaccggacacggcgccgacgccgccttcgcgagggcgagcgggacacgtttcacgatcggtgggcggccgttctactcgaacggcttcaacgcgtactggctcatgtacatggcgtcggacccggccgaccggagcaaggcgacggccgcgctggacgaggcggcccgcctcggcggccacgctcgtgcggacgtgggcgttcagcgacggcggctaccgcgcgctgcaggtgtcgcccggggtgtacgacgaggaggtgttcaggggtctagactatgtgatatccgaagcaaagaagcgcgggatccatttaatcctgagcctggtgaacaactgggacgggtacggcgggaagaagcagtacgtgcagtgggcaagaacccaggggcacagcctgaattctgatgacgacttcttcacggacagcgtgaccaaagggttctacaagaaccatgtcaaggcagtcctcacgagagtgaacaagatgacgggagtggcgtacaaggacgagcctgccatcttcgcgtgggagctcatgaacgagcctcgctgccagaggcgacctctccgggaagacgctgcaggcctggattacggagatggccggctacgtcaagtccgtggatcccaaccacatggtagagatcgggctcgagggcttctacggcgagtccacgcccgaccgcaagcgccagttcaacccgggagggtacaccgtcggcaccgacttcatctccaacaacctgatccccggcgtcgacttcgccacgatccactcctaccccgaccaatgggtgcccggcgcgagcgacggcgcgcaggtggcgttcatgcggcggtggatggcgtcgcacgccggcgacgccgcggcggtgctgcggaagccgctgctggtggcggagttcggctggtccgcgcgctccaacagctacacggtgtccatgcgggacgcctacttccgcatggtgtacgaggcgatctacgcgtcggcgagagcgggagggccgctcgcggggggcctcttctggcaggtcatggtgcccgggatggagagctggaccgacggctacgacgtcgtgctcgaccgtagcccatccacggctgccgtcgtcggccaggagtgctcccggatgaccggactcaactaggtgtcctagctagtagccagtagcggtggactgattcgtgctggttcaaatgttcaaggcagccacggagagccggagacatgaccaatggatgtgctctaataatttaaagtaataacaaaaaaaatatcttt

SEQ ID NO: 9706 - protein, 201 aa, Zea mays subsp. mays
  peptide (1)..(201): Ceres Seq. ID no. 12365925
  misc_feature (1)..(24): Homolog of NCBI NO: 10178872 NR Description: (1-4)-beta-mannan endohydrolase [Coffea arabica]
  misc_feature (1)..(24): Homolog of NCBI NO: 34912090 NR Description: putative mannan endo-1,4-beta-mannosidase [Oryza
  misc_feature (1)..(24): Homolog of NCBI NO: 29786430 NR Description: endo-beta-1,4-mannanase [Lactuca sativa]
  misc_feature (1)..(24): Homolog of NCBI NO: 10129675 NR Description: (1-4)-beta-mannan endohydrolase [Coffea arabica]
  misc_feature (1)..(27): Homolog of NCBI NO: 15239973 NR Description: glycosyl hydrolase family 5/cellulase
  misc_feature (1)..(24): Homolog of NCBI NO: 37544517 NR Description: mannan endo-1,4-beta-mannosidase precursor
  misc_feature (1)..(23): Homolog of NCBI NO: 15529113 NR Description: endo-beta-mannanase [Lycopersicon esculentum]
  misc_feature (1)..(23): Homolog of NCBI NO: 21307619 NR Description: mannan endo-1,4-beta-mannosidase [Lycopersicon
  misc_feature (1)..(23): Homolog of NCBI NO: 22382040 NR Description: inactive endo-beta-mannanase [Lycopersicon
  misc_feature (1)..(24): Homolog of NCBI NO: 9836826 NR Description: (1-4)-beta-mannan endohydrolase precursor
MTGVAYKDEPAIFAWELMNEPRCQRRPLREDAAGLDYGDGRLRQVRGSQPHGRDRARGLLRRVHARPQAPVQPGRVHRRHRLHLQQPDPRRRLRHDPLLPRPMGARRERRRAGGVHAAVDGVARRRRRGGAAEAAAGGGVRLVRALQQLHGVHAGRLLPHGVRGDLRVGESGRAARGGPLLAGHGARDGELDRRLRRRARP

SEQ ID NO: 9707 - protein, 184 aa, Zea mays subsp. mays
  peptide (1)..(184): Ceres Seq. ID no. 12365926
  misc_feature (1)..(34): Homolog of NCBI NO: 3834388 NR Description: beta-1,4-mannanase [Geobacillus
  misc_feature (1)..(18): Homolog of NCBI NO: 23028336 NR Description: hypothetical protein [Microbulbifer degradans
MNEPRCQRRPLREDAAGLDYGDGRLRQVRGSQPHGRDRARGLLRRVHARPQAPVQPGRVHRRHRLHLQQPDPRRRLRHDPLLPRPMGARRERRRAGGVHAAVDGVARRRRRGGAAEAAAGGGVRLVRALQQLHGVHAGRLLPHGVRGDLRVGESGRAARGGPLLAGHGARDGELDRRLRRRARP

SEQ ID NO: 9708 - protein, 182 aa, Zea mays subsp. mays
  peptide (1)..(182): Ceres Seq. ID no. 12365927
  misc_feature (1)..(139): Pfam Name: Cellulase (glycosyl hydrolase family 5) Pfam Description: Cellulase (glycosyl hydrolase family 5)
  misc_feature (1)..(181): Homolog of NCBI NO: 10178872 NR Description: (1-4)-beta-mannan endohydrolase [Coffea arabica]
  misc_feature (1)..(182): Homolog of NCBI NO: 34912090 NR Description: putative mannan endo-1,4-beta-mannosidase [Oryza
  misc_feature (1)..(182): Homolog of NCBI NO: 29786430 NR Description: endo-beta-1,4-mannanase [Lactuca sativa]
  misc_feature (1)..(182): Homolog of NCBI NO: 10129675 NR Description: (1-4)-beta-mannan endohydrolase [Coffea arabica]
  misc_feature (1)..(179): Homolog of NCBI NO: 15239973 NR Description: glycosyl hydrolase family 5/cellulase
  misc_feature (1)..(181): Homolog of NCBI NO: 37544517 NR Description: mannan endo-1,4-beta-mannosidase precursor
  misc_feature (1)..(182): Homolog of NCBI NO: 15529113 NR Description: endo-beta-mannanase [Lycopersicon esculentum]
  misc_feature (1)..(171): Homolog of NCBI NO: 21307619 NR Description: mannan endo-1,4-beta-mannosidase [Lycopersicon
  misc_feature (1)..(171): Homolog of NCBI NO: 22382040 NR Description: inactive endo-beta-mannanase [Lycopersicon
  misc_feature (1)..(181): Homolog of NCBI NO: 9836826 NR Description: (1-4)-beta-mannan endohydrolase precursor
MAGYVKSVDPNHMVEIGLEGFYGESTPDRKRQFNPGGYTVGTDFISNNLIPGVDFATIHSYPDQWVPGASDGAQVAFMRRWMASHAGDAAAVLRKPLLVAEFGWSARSNSYTVSMRDAYFRMVYEAIYASARAGGPLAGGLFWQVMVPGMESWTDGYDVVLDRSPSTAAVVGQECSRMTGLN

SEQ ID NO: 9709 - DNA, 1954 bp, Zea mays subsp. mays
  misc_feature (1)..(1954): Ceres Seq. ID no. 12366011
  misc_feature: MA Experiment ID: 108504 Result: Down-regulated in Transcription
  misc_feature: MA Experiment 108504 PARAMETER Experiment Name: Zm_Drought_P Parameter: Age (day) Value: 8
  misc_feature: MA Experiment 108504 PARAMETER Experiment Name: Zm_Drought_P Parameter: Organism Value: Zea mays
  misc_feature: MA Experiment 108504 PARAMETER Experiment Name: Zm_Drought_P Parameter: Plant Line Value: 35A19
  misc_feature: MA Experiment 108504 PARAMETER Experiment Name: Zm_Drought_P Parameter: Timepoint (hr) Value: 12
  misc_feature: MA Experiment 108504 PARAMETER Experiment Name: Zm_Drought_P Parameter: Tissue Value: Aerial
  misc_feature: MA Experiment 108504 PARAMETER Experiment Name: Zm_Drought_P Parameter: Treatment Value: Drought vs. No Drought
  misc_feature: MA Experiment ID: 108522 Result: Down-regulated in Transcription
  misc_feature: MA Experiment 108522 PARAMETER Experiment Name: Zm_42deg_Heat_P Parameter: Age (day) Value: 8
  misc_feature: MA Experiment 108522 PARAMETER Experiment Name: Zm_42deg_Heat_P Parameter: Organism Value: Zea mays
  misc_feature: MA Experiment 108522 PARAMETER Experiment Name: Zm_42deg_Heat_P Parameter: Plant Line Value: 35A19
  misc_feature: MA Experiment 108522 PARAMETER Experiment Name: Zm_42deg_Heat_P Parameter: Temperature (deg C) Value: 42 vs. 22
  misc_feature: MA Experiment 108522 PARAMETER Experiment Name: Zm_42deg_Heat_P Parameter: Timepoint (hr) Value: 1
  misc_feature: MA Experiment 108522 PARAMETER Experiment Name: Zm_42deg_Heat_P Parameter: Tissue Value: Aerial
  misc_feature: MA Experiment ID: 108527 Result: Down-regulated in Transcription
  misc_feature: MA Experiment 108527 PARAMETER Experiment Name: Zm_5mM_NO_P Parameter: Age (day) Value: 8
  misc_feature: MA Experiment 108527 PARAMETER Experiment Name: Zm_5mM_NO_P Parameter: Organism Value: Zea mays
  misc_feature: MA Experiment 108527 PARAMETER Experiment Name: Zm_5mM_NO_P Parameter: Plant Line Value: 35A19
  misc_feature: MA Experiment 108527 PARAMETER Experiment Name: Zm_5mM_NO_P Parameter: Timepoint (hr) Value: 6
  misc_feature: MA Experiment 108527 PARAMETER Experiment Name: Zm_5mM_NO_P Parameter: Tissue Value: Aerial
  misc_feature: MA Experiment 108527 PARAMETER Experiment Name: Zm_5mM_NO_P Parameter: Treatment Value: 5mM NO vs. No Treatment
  misc_feature: MA Experiment ID: 108528 Result: Up-regulated in Transcription
  misc_feature: MA Experiment 108528 PARAMETER Experiment Name: Zm_Imbibed_Seeds_P Parameter: Age (day) Value: 5 vs. 2
  misc_feature: MA Experiment 108528 PARAMETER Experiment Name: Zm_Imbibed_Seeds_P Parameter: Organism Value: Zea mays
  misc_feature: MA Experiment 108528 PARAMETER Experiment Name: Zm_Imbibed_Seeds_P Parameter: Plant Line Value: 35A19
  misc_feature: MA Experiment 108528 PARAMETER Experiment Name: Zm_Imbibed_Seeds_P Parameter: Tissue Value: Aerial vs. Embryo
  misc_feature: MA Experiment ID: 108530 Result: Up-regulated in Transcription
  misc_feature: MA Experiment 108530 PARAMETER Experiment Name: Zm_Imbibed_Seeds_P Parameter: Age (day) Value: 6 vs. 2
  misc_feature: MA Experiment 108530 PARAMETER Experiment Name: Zm_Imbibed_Seeds_P Parameter: Organism Value: Zea mays
  misc_feature: MA Experiment 108530 PARAMETER Experiment Name: Zm_Imbibed_Seeds_P Parameter: Plant Line Value: 35A19
  misc_feature: MA Experiment 108530 PARAMETER Experiment Name: Zm_Imbibed_Seeds_P Parameter: Tissue Value: Aerial vs. Embryo
  misc_feature: MA Experiment ID: 108535 Result: Up-regulated in Transcription
  misc_feature: MA Experiment 108535 PARAMETER Experiment Name: Zm_Meristem_P Parameter: Age (day) Value: 8
  misc_feature: MA Experiment 108535 PARAMETER Experiment Name: Zm_Meristem_P Parameter: Organism Value: Zea mays
  misc_feature: MA Experiment 108535 PARAMETER Experiment Name: Zm_Meristem_P Parameter: Plant Line Value: 35A19
  misc_feature: MA Experiment 108535 PARAMETER Experiment Name: Zm_Meristem_P Parameter: Tissue Value: Root Meristem vs. Above Root Meristem
  misc_feature: MA Experiment ID: 108536 Result: Down-regulated in Transcription
  misc_feature: MA Experiment 108536 PARAMETER Experiment Name: Zm_Meristem_P Parameter: Age (day) Value: 8
  misc_feature: MA Experiment 108536 PARAMETER Experiment Name: Zm_Meristem_P Parameter: Organism Value: Zea mays
  misc_feature: MA Experiment 108536 PARAMETER Experiment Name: Zm_Meristem_P Parameter: Plant Line Value: 35A19
  misc_feature: MA Experiment 108536 PARAMETER Experiment Name: Zm_Meristem_P Parameter: Tissue Value: Shoot Meristem vs. Above Shoot Meristem
  misc_feature: MA Experiment ID: 108544 Result: Down-regulated in Transcription
  misc_feature: MA Experiment ID: 108545 Result: Up-regulated in Transcription
  misc_feature: MA Experiment 108545 PARAMETER Experiment Name: Zm_Imbibed_Seeds_P Parameter: Age (day) Value: 3 vs. 2
  misc_feature: MA Experiment 108545 PARAMETER Experiment Name: Zm_Imbibed_Seeds_P Parameter: Organism Value: Zea mays
  misc_feature: MA Experiment 108545 PARAMETER Experiment Name: Zm_Imbibed_Seeds_P Parameter: Plant Line Value: 35A19
  misc_feature: MA Experiment 108545 PARAMETER Experiment Name: Zm_Imbibed_Seeds_P Parameter: Tissue Value: Aerial vs. Embryo
  misc_feature: MA Experiment ID: 108547 Result: Up-regulated in Transcription
  misc_feature: MA Experiment 108547 PARAMETER Experiment Name: Zm_Imbibed_Seeds_P Parameter: Age (day) Value: 4 vs. 2
  misc_feature: MA Experiment 108547 PARAMETER Experiment Name: Zm_Imbibed_Seeds_P Parameter: Organism Value: Zea mays
  misc_feature: MA Experiment 108547 PARAMETER Experiment Name: Zm_Imbibed_Seeds_P Parameter: Plant Line Value: 35A19
  misc_feature: MA Experiment 108547 PARAMETER Experiment Name: Zm_Imbibed_Seeds_P Parameter: Tissue Value: Aerial vs. Embryo
  misc_feature: MA Experiment ID: 108556 Result: Down-regulated in Transcription
  misc_feature: MA Experiment 108556 PARAMETER Experiment Name: Zm_Drought_P Parameter: Age (day) Value: 9
  misc_feature: MA Experiment 108556 PARAMETER Experiment Name: Zm_Drought_P Parameter: Organism Value: Zea mays
  misc_feature: MA Experiment 108556 PARAMETER Experiment Name: Zm_Drought_P Parameter: Plant Line Value: 35A19
  misc_feature: MA Experiment 108556 PARAMETER Experiment Name: Zm_Drought_P Parameter: Timepoint (hr) Value: 24
  misc_feature: MA Experiment 108556 PARAMETER Experiment Name: Zm_Drought_P Parameter: Tissue Value: Aerial
  misc_feature: MA Experiment 108556 PARAMETER Experiment Name: Zm_Drought_P Parameter: Treatment Value: Drought vs. No Drought
  misc_feature: MA Experiment ID: 108597 Result: Down-regulated in Transcription
  misc_feature: MA Experiment 108597 PARAMETER Experiment Name: Zm_100uM_ABA_P Parameter: Age (day) Value: 9
  misc_feature: MA Experiment 108597 PARAMETER Experiment Name: Zm_100uM_ABA_P Parameter: Organism Value: Zea mays
  misc_feature: MA Experiment 108597 PARAMETER Experiment Name: Zm_100uM_ABA_P Parameter: Plant Line Value: 35A19
  misc_feature: MA Experiment 108597 PARAMETER Experiment Name: Zm_100uM_ABA_P Parameter: Timepoint (hr) Value: 24
  misc_feature: MA Experiment 108597 PARAMETER Experiment Name: Zm_100uM_ABA_P Parameter: Tissue Value: Aerial
  misc_feature: MA Experiment 108597 PARAMETER Experiment Name: Zm_100uM_ABA_P Parameter: Treatment Value: 100uM ABA vs. No Treatment
  misc_feature: MA Experiment ID: 108689 Result: Up-regulated in Transcription
  misc_feature: MA Experiment 108689 PARAMETER Experiment Name: Zm_Drought_Roots_P Parameter: Age (day) Value: 9
  misc_feature: MA Experiment 108689 PARAMETER Experiment Name: Zm_Drought_Roots_P Parameter: Organism Value: Zea mays
  misc_feature: MA Experiment 108689 PARAMETER Experiment Name: Zm_Drought_Roots_P Parameter: Plant Line Value: 35A19
  misc_feature: MA Experiment 108689 PARAMETER Experiment Name: Zm_Drought_Roots_P Parameter: Timepoint (hr) Value: 24
  misc_feature: MA Experiment 108689 PARAMETER Experiment Name: Zm_Drought_Roots_P Parameter: Tissue Value: Roots
  misc_feature: MA Experiment 108689 PARAMETER Experiment Name: Zm_Drought_Roots_P Parameter: Treatment Value: Drought vs. No Drought
  misc_feature: MA Experiment ID: 20000477 Result: Down-regulated in Transcription
  misc_feature: MA Experiment 20000477 PARAMETER Experiment Name: Zm_5mM_SA_P Parameter: Age (day) Value: 10
  misc_feature: MA Experiment 20000477 PARAMETER Experiment Name: Zm_5mM_SA_P Parameter: Organism Value: Zea mays
  misc_feature: MA Experiment 20000477 PARAMETER Experiment Name: Zm_5mM_SA_P Parameter: Plant Line Value: 35A19
  misc_feature: MA Experiment 20000477 PARAMETER Experiment Name: Zm_5mM_SA_P Parameter: Timepoint (hr) Value: 48
  misc_feature: MA Experiment 20000477 PARAMETER Experiment Name: Zm_5mM_SA_P Parameter: Tissue Value: Aerial
  misc_feature: MA Experiment 20000477 PARAMETER Experiment Name: Zm_5mM_SA_P Parameter: Treatment Value: 5mM SA vs. No Treatment
  misc_feature: MA Experiment ID: 20000478 Result: Down-regulated in Transcription
  misc_feature: MA Experiment 20000478 PARAMETER Experiment Name: Zm_5mM_SA_P Parameter: Age (day) Value: 11
  misc_feature: MA Experiment 20000478 PARAMETER Experiment Name: Zm_5mM_SA_P Parameter: Organism Value: Zea mays
  misc_feature: MA Experiment 20000478 PARAMETER Experiment Name: Zm_5mM_SA_P Parameter: Plant Line Value: 35A19
  misc_feature: MA Experiment 20000478 PARAMETER Experiment Name: Zm_5mM_SA_P Parameter: Timepoint (hr) Value: 72
  misc_feature: MA Experiment 20000478 PARAMETER Experiment Name: Zm_5mM_SA_P Parameter: Tissue Value: Aerial
  misc_feature: MA Experiment 20000478 PARAMETER Experiment Name: Zm_5mM_SA_P Parameter: Treatment Value: 5mM SA vs. No Treatment
  misc_feature: MA Experiment ID: 20000479 Result: Down-regulated in Transcription
  misc_feature: MA Experiment 20000479 PARAMETER Experiment Name: Zm_Drought_P Parameter: Age (day) Value: 10
  misc_feature: MA Experiment 20000479 PARAMETER Experiment Name: Zm_Drought_P Parameter: Organism Value: Zea mays
  misc_feature: MA Experiment 20000479 PARAMETER Experiment Name: Zm_Drought_P Parameter: Plant Line Value: 35A19
  misc_feature: MA Experiment 20000479 PARAMETER Experiment Name: Zm_Drought_P Parameter: Timepoint (hr) Value: 48
  misc_feature: MA Experiment 20000479 PARAMETER Experiment Name: Zm_Drought_P Parameter: Tissue Value: Aerial
  misc_feature: MA Experiment 20000479 PARAMETER Experiment Name: Zm_Drought_P Parameter: Treatment Value: Drought vs. No Drought
  misc_feature: MA Experiment ID: 20000480 Result: Down-regulated in Transcription
  misc_feature: MA Experiment 20000480 PARAMETER Experiment Name: Zm_Drought_P Parameter: Age (day) Value: 11
  misc_feature: MA Experiment 20000480 PARAMETER Experiment Name: Zm_Drought_P Parameter: Organism Value: Zea mays
  misc_feature: MA Experiment 20000480 PARAMETER Experiment Name: Zm_Drought_P Parameter: Plant Line Value: 35A19
  misc_feature: MA Experiment 20000480 PARAMETER Experiment Name: Zm_Drought_P Parameter: Timepoint (hr) Value: 72
  misc_feature: MA Experiment 20000480 PARAMETER Experiment Name: Zm_Drought_P Parameter: Tissue Value: Aerial
  misc_feature: MA Experiment 20000480 PARAMETER Experiment Name: Zm_Drought_P Parameter: Treatment Value: Drought vs. No Drought
  misc_feature: MA Experiment ID: 20000487 Result: Down-regulated in Transcription
  misc_feature: MA Experiment 20000487 PARAMETER Experiment Name: Zm_50mM_NH4NO3_L_to_H_P Parameter: Organism Value: Zea mays
  misc_feature: MA Experiment 20000487 PARAMETER Experiment Name: Zm_50mM_NH4NO3_L_to_H_P Parameter: Timepoint (hr) Value: 4
  misc_feature: MA Experiment 20000487 PARAMETER Experiment Name: Zm_50mM_NH4NO3_L_to_H_P Parameter: Tissue Value: Leaves
  misc_feature: MA Experiment 20000487 PARAMETER Experiment Name: Zm_50mM_NH4NO3_L_to_H_P Parameter: Treatment Value: 50mM NH4NO3 vs. 100mM Mannitol
  misc_feature: MA Experiment ID: 20000532 Result: Down-regulated in Transcription
  misc_feature: MA Experiment 20000532 PARAMETER Experiment Name: Zm_0.001percent_MeJA_P Parameter: Age (day) Value: 10
  misc_feature: MA Experiment 20000532 PARAMETER Experiment Name: Zm_0.001percent_MeJA_P Parameter: Organism Value: Zea mays
  misc_feature: MA Experiment 20000532 PARAMETER Experiment Name: Zm_0.001percent_MeJA_P Parameter: Plant Line Value: 35A19
  misc_feature: MA Experiment 20000532 PARAMETER Experiment Name: Zm_0.001percent_MeJA_P Parameter: Timepoint (hr) Value: 48
  misc_feature: MA Experiment 20000532 PARAMETER Experiment Name: Zm_0.001percent_MeJA_P Parameter: Tissue Value: Aerial
  misc_feature: MA Experiment 20000532 PARAMETER Experiment Name: Zm_0.001percent_MeJA_P Parameter: Treatment Value: 0.001percent MeJA vs. No Treatment
  misc_feature: MA Experiment ID: 20000533 Result: Down-regulated in Transcription
  misc_feature: MA Experiment 20000533 PARAMETER Experiment Name: Zm_0.001percent_MeJA_P Parameter: Age (day) Value: 11
  misc_feature: MA Experiment 20000533 PARAMETER Experiment Name: Zm_0.001percent_MeJA_P Parameter: Organism Value: Zea mays
  misc_feature: MA Experiment 20000533 PARAMETER Experiment Name: Zm_0.001percent_MeJA_P Parameter: Plant Line Value: 35A19
  misc_feature: MA Experiment 20000533 PARAMETER Experiment Name: Zm_0.001percent_MeJA_P Parameter: Timepoint (hr) Value: 72
  misc_feature: MA Experiment 20000533 PARAMETER Experiment Name: Zm_0.001percent_MeJA_P Parameter: Tissue Value: Aerial
  misc_feature: MA Experiment 20000533 PARAMETER Experiment Name: Zm_0.001percent_MeJA_P Parameter: Treatment Value: 0.001percent MeJA vs. No Treatment
  misc_feature: MA Experiment ID: 20000535 Result: Up-regulated in Transcription
  misc_feature: MA Experiment 20000535 PARAMETER Experiment Name: Zm_Hybrid_Seed_Dev_P Parameter: DAP Value: 30 vs. 12
  misc_feature: MA Experiment 20000535 PARAMETER Experiment Name: Zm_Hybrid_Seed_Dev_P Parameter: Organism Value: Zea mays
  misc_feature: MA Experiment 20000535 PARAMETER Experiment Name: Zm_Hybrid_Seed_Dev_P Parameter: Plant Line Value: 35A19
  misc_feature: MA Experiment 20000535 PARAMETER Experiment Name: Zm_Hybrid_Seed_Dev_P Parameter: Tissue Value: Embryo vs. Unfert Floret
  misc_feature: MA Experiment ID: 20000626 Result: Down-regulated in Transcription
  misc_feature: MA Experiment 20000626 PARAMETER Experiment Name: Zm_Herbicide-Treatments_P Parameter: Timepoint (hr) Value: 12
  misc_feature: MA Experiment 20000626 PARAMETER Experiment Name: Zm_Herbicide-Treatments_P Parameter: Tissue Value: Aerial
  misc_feature: MA Experiment 20000626 PARAMETER Experiment Name: Zm_Herbicide-Treatments_P Parameter: Treatment Value: Roundup vs. No Treatment
  misc_feature: MA Experiment ID: 20000630 Result: Down-regulated in Transcription
  misc_feature: MA Experiment 20000630 PARAMETER Experiment Name: Zm_Herbicide-Treatments_P Parameter: Timepoint (hr) Value: 4
  misc_feature: MA Experiment 20000630 PARAMETER Experiment Name: Zm_Herbicide-Treatments_P Parameter: Tissue Value: Aerial
  misc_feature: MA Experiment 20000630 PARAMETER Experiment Name: Zm_Herbicide-Treatments_P Parameter: Treatment Value: Roundup vs. No Treatment
cccaatcccaagatgaatgctacgtaggtagacagtgttcttgtggtgacgtgacctccacagagtgcagagatgggagaagctgaagaagcgccaggagacagcaatggtgaggcactggagctcctcatgtccatggcgtcctcttcgctggcctgctctgtctcgcagttcccagccaagtggcagtccatcaaggacaagctccagctgctctgctgcagcctcaattcactctgcggcggcggcggtgaccacgacgacgacgacgacaaggagcatcctgtgttggctgagcttctgcggctggcttcagcaaccgtgaggagcatccaggtcgttgcttctcagtgcagcgacgggtcatacaagggtggaaggcttcgtctgaggagcgacctggacaacctgagctgcaagctcgatgcgcacatgaagcagctcaaggagatggccgtctcgtccggggcgccgtcgccgtccaaggccattgtcgccgtcaggcccagcgccgaggccagcgtgggtgagaaggccttctacctcaaggatctcttttccaggatcaggatcggcggcaccgtccagaggagccaggcactggccgccatcagggagctgttggtggaagacgagctctgtgcgaaggttgtcgccctcgacgtcgacgacggcgtcgccctgctcacggggttcctcgagtccaccgacgcgcgcatccaagaagaggctgccggcgccgtcgccgtcgtcgcgagctccgagcgttacaggggaatgctggtgaaggcaggggtgatcgccccgctcgtccagctgctggagaacgcggacaccgccagcgagctgggcaagcagagggcggcgcacgcgctgagggagctgacggagaactccgacaacgtgtgggccgtctgcgcgcacggcggcctcaccacgctgctgcacgcctgcgcccacgccggcagcagcagcaagctcgtcagctcctcttttgcagtgctgaggaacctcagtcggatggaggaagtgaagatgttcatggtggagcaaggggtggtcacggagctggtgaagctctcccagaagaaggaggaggtccgcaagctcggcgccgtcgaattgctccacgccatggctctggatgacgccgacgtcagggaggaagccgtcggcatgggggtgatccagtccctcctccagttgatataccccgaccttccctactcgtacaaggccagggaggttgctcttgctgccatctggttcttctgcttctcttctgcaaactccttggatgacctcatcagctcggatgttcttggctggctgctcttctacctgaacaacggcgactacgccgtcctcgaatgtacgctcaagattctgaggcatctctccgaggtttctgaggagtacaaccggatgatgggcagagcagggtatttgagcgccctgtcaggcttgcttggagcgaaatcctgtcgagtccgggaaatggcggcgcaggttctttccagcttgctgatgcttcaccccaaccgtgccatcttcatccaagacggcgacaatctgaacaggctgctgcagctccttgatccagccgagggcaagttgatggcgaaggacttgatcctctctgctatcatgtccctggctgagaccaacagcggaaggaagaagattgtgacgtcggaaaatttctgcagcctgaaagaactggcagaatctggtgacttcgacgccaagaagatcgtcaggaaactatctactaacagactgcaaaccatcttcagcaaaatatggagtgtctagattattcctgactcccctttttcactgaggcttagctctagtctatttgatgtccatagtattttttctctggctttgcttgtaatctcggcgcatccatcattttgattcctttgtgatatatattgcaacttcggtt

SEQ ID NO: 9710 - protein, 580 aa, Zea mays subsp. mays
  peptide (1)..(580): Ceres Seq. ID no. 12366012
  misc_feature (1)..(580): Homolog of NCBI NO: 34394021 NR Description: arm repeat containing protein-like [Oryza sativa
  misc_feature (1)..(578): Homolog of NCBI NO: 18407140 NR Description: expressed protein; protein id: At1g61350.1, by cDNA: gi_16209657, supported by cDNA: gi_18700124 [Arabidopsis
  misc_feature (1)..(578): Homolog of NCBI NO: 16209658 NR Description: At1g61350/T1F9_16 [Arabidopsis thaliana]
  misc_feature (1)..(578): Homolog of NCBI NO: 15224987 NR Description: hypothetical protein; protein id: At2g05810.1, by cDNA: gi_20466607 [Arabidopsis thaliana]
  misc_feature (87)..(576): Homolog of NCBI NO: 37536190 NR Description: putative arm repeat containing protein [Oryza
  misc_feature (75)..(576): Homolog of NCBI NO: 15241309 NR Description: putative protein; protein id: At5g50900.1, by cDNA: gi_14532769 [Arabidopsis thaliana] gene_id:K3K7.4~pir||T02475~similar to unknown protein
  misc_feature (75)..(576): Homolog of NCBI NO: 14532770 NR Description: unknown protein [Arabidopsis thaliana]
  misc_feature (147)..(576): Homolog of NCBI NO: 18378889 NR Description: expressed protein; protein id: At1g01830.1, by cDNA: gi_16604588, supported by cDNA: gi_20258992 [Arabidopsis >gi|16604589|gb|AAL24151.1| unknown protein [Arabidopsis
  misc_feature (147)..(576): Homolog of NCBI NO: 25518344 NR Description: hypothetical protein T1N6.25 [imported] - thaliana >gi|8671849|gb|AAF78412.1|AC009273_18 Contains to an unknown protein F17K2.25 gi|7485635 from Arabidopsis
  misc_feature (144)..(576): Homolog of NCBI NO: 15225552 NR Description: unknown protein; protein id: At2g45720.1
MGEAEEAPGDSNGEALELLMSMASSSLACSVSQFPAKWQSIKDKLQLLCCSLNSLCGGGGDHDDDDDKEHPVLAELLRLASATVRSIQVVASQCSDGSYKGGRLRLRSDLDNLSCKLDAHMKQLKEMAVSSGAPSPSKAIVAVRPSAEASVGEKAFYLKDLFSRIRIGGTVQRSQALAAIRELLVEDELCAKVVALDVDDGVALLTGFLESTDARIQEEAAGAVAVVASSERYRGMLVKAGVIAPLVQLLENADTASELGKQRAAHALRELTENSDNVWAVCAHGGLTTLLHACAHAGSSSKLVSSSFAVLRNLSRMEEVKMFMVEQGVVTELVKLSQKKEEVRKLGAVELLHAMALDDADVREEAVGMGVIQSLLQLIYPDLPYSYKAREVALAAIWFFCFSSANSLDDLISSDVLGWLLFYLNNGDYAVLECTLKILRHLSEVSEEYNRMMGRAGYLSALSGLLGAKSCRVREMAAQVLSSLLMLHPNRAIFIQDGDNLNRLLQLLDPAEGKLMAKDLILSAIMSLAETNSGRKKIVTSENFCSLKELAESGDFDAKKIVRKLSTNRLQTIFSKIWSV

SEQ ID NO: 9711 - protein, 561 aa, Zea mays subsp. mays
  peptide (1)..(561): Ceres Seq. ID no. 12366013
  misc_feature (1)..(561): Homolog of NCBI NO: 34394021 NR Description: arm repeat containing protein-like [Oryza sativa
  misc_feature (1)..(559): Homolog of NCBI NO: 18407140 NR Description: expressed protein; protein id: At1g61350.1, by cDNA: gi_16209657, supported by cDNA: gi_18700124 [Arabidopsis
  misc_feature (1)..(559): Homolog of NCBI NO: 16209658 NR Description: At1g61350/T1F9_16 [Arabidopsis thaliana]
  misc_feature (1)..(559): Homolog of NCBI NO: 15224987 NR Description: hypothetical protein; protein id: At2g05810.1, by cDNA: gi_20466607 [Arabidopsis thaliana]
  misc_feature (68)..(557): Homolog of NCBI NO: 37536190 NR Description: putative arm repeat containing protein [Oryza
  misc_feature (56)..(557): Homolog of NCBI NO: 15241309 NR Description: putative protein; protein id: At5g50900.1, by cDNA: gi_14532769 [Arabidopsis thaliana] gene_id:K3K7.4~pir||T02475~similar to unknown protein
  misc_feature (56)..(557): Homolog of NCBI NO: 14532770 NR Description: unknown protein [Arabidopsis thaliana]
  misc_feature (128)..(557): Homolog of NCBI NO: 18378889 NR Description: expressed protein; protein id: At1g01830.1, by cDNA: gi_16604588, supported by cDNA: gi_20258992 [Arabidopsis >gi|16604589|gb|AAL24151.1| unknown protein [Arabidopsis
  misc_feature (128)..(557): Homolog of NCBI NO: 25518344 NR Description: hypothetical protein T1N6.25 [imported] - thaliana >gi|8671849|gb|AAF78412.1|AC009273_18 Contains to an unknown protein F17K2.25 gi|7485635 from Arabidopsis
  misc_feature (125)..(557): Homolog of NCBI NO: 15225552 NR Description: unknown protein; protein id: At2g45720.1
MSMASSSLACSVSQFPAKWQSIKDKLQLLCCSLNSLCGGGGDHDDDDDKEHPVLAELLRLASATVRSIQVVASQCSDGSYKGGRLRLRSDLDNLSCKLDAHMKQLKEMAVSSGAPSPSKAIVAVRPSAEASVGEKAFYLKDLFSRIRIGGTVQRSQALAAIRELLVEDELCAKVVALDVDDGVALLTGFLESTDARIQEEAAGAVAVVASSERYRGMLVKAGVIAPLVQLLENADTASELGKQRAAHALRELTENSDNVWAVCAHGGLTTLLHACAHAGSSSKLVSSSFAVLRNLSRMEEVKMFMVEQGVVTELVKLSQKKEEVRKLGAVELLHAMALDDADVREEAVGMGVIQSLLQLIYPDLPYSYKAREVALAAIWFFCFSSANSLDDLISSDVLGWLLFYLNNGDYAVLECTLKILRHLSEVSEEYNRMMGRAGYLSALSGLLGAKSCRVREMAAQVLSSLLMLHPNRAIFIQDGDNLNRLLQLLDPAEGKLMAKDLILSAIMSLAETNSGRKKIVTSENFCSLKELAESGDFDAKKIVRKLSTNRLQTIFSKIWSV

SEQ ID NO: 9712 - protein, 559 aa, Zea mays subsp. mays
  peptide (1)..(559): Ceres Seq. ID no. 12366014
  misc_feature (1)..(559): Homolog of NCBI NO: 34394021 NR Description: arm repeat containing protein-like [Oryza sativa
  misc_feature (1)..(557): Homolog of NCBI NO: 18407140 NR Description: expressed protein; protein id: At1g61350.1, by cDNA: gi_16209657, supported by cDNA: gi_18700124 [Arabidopsis
  misc_feature (1)..(557): Homolog of NCBI NO: 16209658 NR Description: At1g61350/T1F9_16 [Arabidopsis thaliana]
  misc_feature (1)..(557): Homolog of NCBI NO: 15224987 NR Description: hypothetical protein; protein id: At2g05810.1, by cDNA: gi_20466607 [Arabidopsis thaliana]
  misc_feature (66)..(555): Homolog of NCBI NO: 37536190 NR Description: putative arm repeat containing protein [Oryza
  misc_feature (54)..(555): Homolog of NCBI NO: 15241309 NR Description: putative protein; protein id: At5g50900.1, by cDNA: gi_14532769 [Arabidopsis thaliana] gene_id:K3K7.4~pir||T02475~similar to unknown protein
  misc_feature (54)..(555): Homolog of NCBI NO: 14532770 NR Description: unknown protein [Arabidopsis thaliana]
  misc_feature (126)..(555): Homolog of NCBI NO: 18378889 NR Description: expressed protein; protein id: At1g01830.1, by cDNA: gi_16604588, supported by cDNA: gi_20258992 [Arabidopsis >gi|16604589|gb|AAL24151.1| unknown protein [Arabidopsis
  misc_feature (126)..(555): Homolog of NCBI NO: 25518344 NR Description: hypothetical protein T1N6.25 [imported] - thaliana >gi|8671849|gb|AAF78412.1|AC009273_18 Contains to an unknown protein F17K2.25 gi|7485635 from Arabidopsis
  misc_feature (123)..(555): Homolog of NCBI NO: 15225552 NR Description: unknown protein; protein id: At2g45720.1
MASSSLACSVSQFPAKWQSIKDKLQLLCCSLNSLCGGGGDHDDDDDKEHPVLAELLRLASATVRSIQVVASQCSDGSYKGGRLRLRSDLDNLSCKLDAHMKQLKEMAVSSGAPSPSKAIVAVRPSAEASVGEKAFYLKDLFSRIRIGGTVQRSQALAAIRELLVEDELCAKVVALDVDDGVALLTGFLESTDARIQEEAAGAVAVVASSERYRGMLVKAGVIAPLVQLLENADTASELGKQRAAHALRELTENSDNVWAVCAHGGLTTLLHACAHAGSSSKLVSSSFAVLRNLSRMEEVKMFMVEQGVVTELVKLSQKKEEVRKLGAVELLHAMALDDADVREEAVGMGVIQSLLQLIYPDLPYSYKAREVALAAIWFFCFSSANSLDDLISSDVLGWLLFYLNNGDYAVLECTLKILRHLSEVSEEYNRMMGRAGYLSALSGLLGAKSCRVREMAAQVLSSLLMLHPNRAIFIQDGDNLNRLLQLLDPAEGKLMAKDLILSAIMSLAETNSGRKKIVTSENFCSLKELAESGDFDAKKIVRKLSTNRLQTIFSKIWSV

SEQ ID NO: 9713 - DNA, 2131 bp, Zea mays subsp. mays
  misc_feature (1)..(2131): Ceres Seq. ID no. 12367699
  misc_feature: MA Experiment ID: 108528 Result: Down-regulated in Transcription
  misc_feature: MA Experiment 108528 PARAMETER Experiment Name: Zm_Imbibed_Seeds_P Parameter: Age (day) Value: 5 vs. 2
  misc_feature: MA Experiment 108528 PARAMETER Experiment Name: Zm_Imbibed_Seeds_P Parameter: Organism Value: Zea mays
  misc_feature: MA Experiment 108528 PARAMETER Experiment Name: Zm_Imbibed_Seeds_P Parameter: Plant Line Value: 35A19
  misc_feature: MA Experiment 108528 PARAMETER Experiment Name: Zm_Imbibed_Seeds_P Parameter: Tissue Value: Aerial vs. Embryo
  misc_feature: MA Experiment ID: 108529 Result: Up-regulated in Transcription
  misc_feature: MA Experiment 108529 PARAMETER Experiment Name: Zm_Imbibed_Seeds_P Parameter: Age (day) Value: 5 vs. 2
  misc_feature: MA Experiment 108529 PARAMETER Experiment Name: Zm_Imbibed_Seeds_P Parameter: Organism Value: Zea mays
  misc_feature: MA Experiment 108529 PARAMETER Experiment Name: Zm_Imbibed_Seeds_P Parameter: Plant Line Value: 35A19
  misc_feature: MA Experiment 108529 PARAMETER Experiment Name: Zm_Imbibed_Seeds_P Parameter: Tissue Value: Roots vs. Embryo
  misc_feature: MA Experiment ID: 108543 Result: Up-regulated in Transcription
  misc_feature: MA Experiment ID: 20000535 Result: Down-regulated in Transcription
  misc_feature: MA Experiment 20000535 PARAMETER Experiment Name: Zm_Hybrid_Seed_Dev_P Parameter: DAP Value: 30 vs. 12
  misc_feature: MA Experiment 20000535 PARAMETER Experiment Name: Zm_Hybrid_Seed_Dev_P Parameter: Organism Value: Zea mays
  misc_feature: MA Experiment 20000535 PARAMETER Experiment Name: Zm_Hybrid_Seed_Dev_P Parameter: Plant Line Value: 35A19
  misc_feature: MA Experiment 20000535 PARAMETER Experiment Name: Zm_Hybrid_Seed_Dev_P Parameter: Tissue Value: Embryo vs. Unfert Floret
ataacacaacaatctctctcccctcactccctctctgcagcgcgcagctttcaaagcgttgggagagatggcagaggagacgcaaccagaggccgcagccgccgccgcgcccgccgcggccgaggtagtcgtgaccgaagctgcgccggcggaggcggaggtgcctgcggcggcggaagctgaagccgaggccaaggatgagaagaaaggtgacgaggcggagctcaccgccgatgacgcgggggtggggaccggctcgttcaaggaggaaagcaacctggtggaagacctgcccgacccggagaagaaggcgctcgacgagttcaagcagctgatcgctgctgccctcgccgccggtgagttcaacctgcctcccccgccgccgccgccgaaggccaaggaaacaaaggtggaggaagccaaggccgaggagcccgccaaagaagagcccgcggccgaggcggaggaagccaaggcccaggtggctgcggatgccccggttgaggaggtcaagacggaggtgccgccggccgaggaggccaaggctgagacactggctgaggaagccaagccttccgagcccgagccgcaggagaagaccgtcgtggtcactgaggaggagactgccaccaagacggtggaagcaatcgaggaaaccgtcgtgtccgcccccgccgccatcccggaggaagcagcggcgccggaggcggtggtcgaggctcaggcgaccgcgcctgaacccgtgctgatttggggcgtgccgctgggtcggcgacgacgagcgcacggacacggttctgctcaagttcctgcgtgcgcgggagttcaaggtgaaggaggccatggcgatgctcaagtccgcggtgctgtggcgcaagcgcttcggcatcacctcgctcctcgacgccgaccttggcctgacggagctggagaacgtggtgttctaccgcggcacggaccgcgaaggccaccccgtgtgctacaacgtctacggcgagttccaggacaaggatctctacgagaaggccttcggcgacgatgagaagagggagcgcttcctcaagtggcgcatccagctgctggagcgcggcattctgtcgaagctggacttctcgcccagcggcatctgctccatggttcaggttaccgacctcaagaactcgccgcccatgctcggcaagcaccgcgccgtcacccgccaggctgtcacgctgctccaggacaactaccccgagttcattgccaagaaggtgttcatcaatgtgccgtggtggtatctagccgccaacaagatgatgagcccgttcctcacacagcgcaccaagagcaagttcgtctttgctagcccagccaaatcagcagcgactctattcagatacatcgcaccggaacaagttcctgtccaatttggaggcctcttcaaggaggatgatcctgagttcaccacctctgacactgtctccgagctcactatcaaaccatcctcaaaagaaaccgttgagatccctgtcaccgagaactccacaattgtatgggaactccgggtgctgagttgggaagtgagctatggcgccgagttcacccccgacgcggagggtgggtacaccgtcattgtacagaagacaaggaaggtgcctgctaacgaggaaccgatcatgaagggaagcttcaaggcaggcgagcctggaaaacttgtgctaactgtgaacaaccctgcatccaagaagaagactctactttacagatcgaaggtgaagagcgccagcgagtgagtgtgaggtcacgccgctagctgcctgggccctacagttaaaacgatctacagcatgatagaagagagaaggaaccttttggtttggttcgttaatttactgggatttgctgggttttttattttttgggttcgcattctacattttgtttggttgaaaccaaagtgagcttgtttttgtgacagtagatgggagaagtataatggcattgtgtgatggatggttgttgatgagggcagggaggacgaaaatgaggggaaggaaaggctggagaatgtctgttcctctgtagatgtgtgttctgtacattgcatctcttggattctcattgatatgttaaaatttaggagtacttggtc

SEQ ID NO: 9714 - protein, 324 aa, Zea mays subsp. mays
  peptide (1)..(324): Ceres Seq. ID no. 12367700
  misc_feature (165)..(233): Pfam Name: CRAL/TRIO, N-terminus Pfam Description: CRAL/TRIO, N-terminus
  misc_feature (1)..(223): Homolog of NCBI NO: 34907288 NR Description: contains ESTs
  misc_feature (1)..(233): Homolog of NCBI NO: 34907288 NR Description: contains ESTs
  misc_feature (1)..(82): Homolog of NCBI NO: 34907288 NR Description: contains ESTs
  misc_feature (105)..(233): Homolog of NCBI NO: 8894548 NR Description: hypothetical protein [Cicer arietinum]
  misc_feature (3)..(239): Homolog of NCBI NO: 15218382 NR Description: cytosolic factor, putative; protein id: supported by cDNA: gi_15028180, supported by cDNA: gi_21280860 thaliana] >gi|25406149|pir||H96744 probable cytosolic factor
  misc_feature (1)..(102): Homolog of NCBI NO: 15218383 NR Description: cytosolic factor, putative; protein id: supported by cDNA: gi_15081613 [Arabidopsis thaliana]
  misc_feature (1)..(90): Homolog of NCBI NO: 30680992 NR Description: expressed protein [Arabidopsis thaliana]
  misc_feature (63)..(102): Homolog of NCBI NO: 15081614 NR Description: At1g72160/T9N14_8 [Arabidopsis thaliana]
  misc_feature (1)..(90): Homolog of NCBI NO: 25407487 NR Description: hypothetical protein AT4g09160 [imported] - thaliana >gi|7267559|emb|CAB78040.1| putative protein
  misc_feature (5)..(226): Homolog of NCBI NO: 15219901 NR Description: unknown protein; protein id: At1g22530.1
MAEETQPEAAAAAAPAAAEVVVTEAAPAEAEVPAAAEAEAEAKDEKKGDEAELTADDAGVGTGSFKEESNLVEDLPDPEKKALDEFKQLIAAALAAGEFNLPPPPPPPKAKETKVEEAKAEEPAKEEPAAEAEEAKAQVAADAPVEEVKTEVPPAEEAKAETLAEEAKPSEPEPQEKTVVVTEEETATKTVEAIEETVVSAPAAIPEEAAAPEAVVEAQATAPEPVLIWGVPLGRRRRAHGHGSAQVPACAGVQGEGGHGDAQVRGAVAQALRHHLAPRRRPWPDGAGERGVLPRHGPRRPPRVLQRLRRVPGQGSLREGLRRR

SEQ ID NO: 9715 - protein, 309 aa, Zea mays subsp. mays
  peptide (1)..(309): Ceres Seq. ID no. 12367701
  misc_feature (34)..(204): Pfam Name: CRAL/TRIO domain Pfam Description: CRAL/TRIO domain
  misc_feature (1)..(309): Homolog of NCBI NO: 34907288 NR Description: contains ESTs
  misc_feature (1)..(309): Homolog of NCBI NO: 8894548 NR Description: hypothetical protein [Cicer arietinum]
  misc_feature (1)..(305): Homolog of NCBI NO: 15218382 NR Description: cytosolic factor, putative; protein id: supported by cDNA: gi_15028180, supported by cDNA: gi_21280860 thaliana] >gi|25406149|pir||H96744 probable cytosolic factor
  misc_feature (1)..(305): Homolog of NCBI NO: 15218383 NR Description: cytosolic factor, putative; protein id: supported by cDNA: gi_15081613 [Arabidopsis thaliana]
  misc_feature (1)..(305): Homolog of NCBI NO: 30680992 NR Description: expressed protein [Arabidopsis thaliana]
  misc_feature (1)..(305): Homolog of NCBI NO: 15081614 NR Description: At1g72160/T9N14_8 [Arabidopsis thaliana]
  misc_feature (1)..(225): Homolog of NCBI NO: 25407487 NR Description: hypothetical protein AT4g09160 [imported] - thaliana >gi|7267559|emb|CAB78040.1| putative protein
  misc_feature (225)..(305): Homolog of NCBI NO: 25407487 NR Description: hypothetical protein AT4g09160 [imported] - thaliana >gi|7267559|emb|CAB78040.1| putative protein
  misc_feature (1)..(306): Homolog of NCBI NO: 15219901 NR Description: unknown protein; protein id: At1g22530.1
  misc_feature (1)..(308): Homolog of NCBI NO: 18397616 NR Description: expressed protein; protein id: At1g30690.1, by cDNA: gi_14334977 [Arabidopsis thaliana]
MAMLKSAVLWRKRFGITSLLDADLGLTELENVVFYRGTDREGHPVCYNVYGEFQDKDLYEKAFGDDEKRERFLKWRIQLLERGILSKLDFSPSGICSMVQVTDLKNSPPMLGKHRAVTRQAVTLLQDNYPEFIAKKVFINVPWWYLAANKMMSPFLTQRTKSKFVFASPAKSAATLFRYIAPEQVPVQFGGLFKEDDPEFTTSDTVSELTIKPSSKETVEIPVTENSTIVWELRVLSWEVSYGAEFTPDAEGGYTVIVQKTRKVPANEEPIMKGSFKAGEPGKLVLTVNNPASKKKTLLYRSKVKSASE

SEQ ID NO: 9716 - protein, 307 aa, Zea mays subsp. mays
  peptide (1)..(307): Ceres Seq. ID no. 12367702
  misc_feature (32)..(202): Pfam Name: CRAL/TRIO domain Pfam Description: CRAL/TRIO domain
  misc_feature (1)..(307): Homolog of NCBI NO: 34907288 NR Description: contains ESTs
  misc_feature (1)..(307): Homolog of NCBI NO: 8894548 NR Description: hypothetical protein [Cicer arietinum]
  misc_feature (1)..(303): Homolog of NCBI NO: 15218382 NR Description: cytosolic factor, putative; protein id: supported by cDNA: gi_15028180, supported by cDNA: gi_21280860 thaliana] >gi|25406149|pir||H96744 probable cytosolic factor
  misc_feature (1)..(303): Homolog of NCBI NO: 15218383 NR Description: cytosolic factor, putative; protein id: supported by cDNA: gi_15081613 [Arabidopsis thaliana]
  misc_feature (1)..(303): Homolog of NCBI NO: 30680992 NR Description: expressed protein [Arabidopsis thaliana]
  misc_feature (1)..(303): Homolog of NCBI NO: 15081614 NR Description: At1g72160/T9N14_8 [Arabidopsis thaliana]
  misc_feature (1)..(223): Homolog of NCBI NO: 25407487 NR Description: hypothetical protein AT4g09160 [imported] - thaliana >gi|7267559|emb|CAB78040.1| putative protein
  misc_feature (223)..(303): Homolog of NCBI NO: 25407487 NR Description: hypothetical protein AT4g09160 [imported] - thaliana >gi|7267559|emb|CAB78040.1| putative protein
  misc_feature (1)..(304): Homolog of NCBI NO: 15219901 NR Description: unknown protein; protein id: At1g22530.1
  misc_feature (1)..(306): Homolog of NCBI NO: 18397616 NR Description: expressed protein; protein id: At1g30690.1, by cDNA: gi_14334977 [Arabidopsis thaliana]
MLKSAVLWRKRFGITSLLDADLGLTELENVVFYRGTDREGHPVCYNVYGEFQDKDLYEKAFGDDEKRERFLKWRIQLLERGILSKLDFSPSGICSMVQVTDLKNSPPMLGKHRAVTRQAVTLLQDNYPEFIAKKVFINVPWWYLAANKMMSPFLTQRTKSKFVFASPAKSAATLFRYIAPEQVPVQFGGLFKEDDPEFTTSDTVSELTIKPSSKETVEIPVTENSTIVWELRVLSWEVSYGAEFTPDAEGGYTVIVQKTRKVPANEEPIMKGSFKAGEPGKLVLTVNNPASKKKTLLYRSKVKSASE

SEQ ID NO: 9717 - DNA, 1295 bp, Zea mays subsp. mays
  misc_feature (1)..(1295): Ceres Seq. ID no. 12354202
  misc_feature: MA Experiment ID: 108523 Result: Down-regulated in Transcription
  misc_feature: MA Experiment 108523 PARAMETER Experiment Name: Zm_42deg_Heat_P Parameter: Age (day) Value: 8
  misc_feature: MA Experiment 108523 PARAMETER Experiment Name: Zm_42deg_Heat_P Parameter: Organism Value: Zea mays
  misc_feature: MA Experiment 108523 PARAMETER Experiment Name: Zm_42deg_Heat_P Parameter: Plant Line Value: 35A19
  misc_feature: MA Experiment 108523 PARAMETER Experiment Name: Zm_42deg_Heat_P Parameter: Temperature (deg C) Value: 42 vs. 22
  misc_feature: MA Experiment 108523 PARAMETER Experiment Name: Zm_42deg_Heat_P Parameter: Timepoint (hr) Value: 6
  misc_feature: MA Experiment 108523 PARAMETER Experiment Name: Zm_42deg_Heat_P Parameter: Tissue Value: Aerial
  misc_feature: MA Experiment ID: 108543 Result: Up-regulated in Transcription
  misc_feature: MA Experiment ID: 108556 Result: Down-regulated in Transcription
  misc_feature: MA Experiment 108556 PARAMETER Experiment Name: Zm_Drought_P Parameter: Age (day) Value: 9
  misc_feature: MA Experiment 108556 PARAMETER Experiment Name: Zm_Drought_P Parameter: Organism Value: Zea mays
  misc_feature: MA Experiment 108556 PARAMETER Experiment Name: Zm_Drought_P Parameter: Plant Line Value: 35A19
  misc_feature: MA Experiment 108556 PARAMETER Experiment Name: Zm_Drought_P Parameter: Timepoint (hr) Value: 24
  misc_feature: MA Experiment 108556 PARAMETER Experiment Name: Zm_Drought_P Parameter: Tissue Value: Aerial
  misc_feature: MA Experiment 108556 PARAMETER Experiment Name: Zm_Drought_P Parameter: Treatment Value: Drought vs. No Drought
  misc_feature: MA Experiment ID: 20000479 Result: Down-regulated in Transcription
  misc_feature: MA Experiment 20000479 PARAMETER Experiment Name: Zm_Drought_P Parameter: Age (day) Value: 10
  misc_feature: MA Experiment 20000479 PARAMETER Experiment Name: Zm_Drought_P Parameter: Organism Value: Zea mays
  misc_feature: MA Experiment 20000479 PARAMETER Experiment Name: Zm_Drought_P Parameter: Plant Line Value: 35A19
  misc_feature: MA Experiment 20000479 PARAMETER Experiment Name: Zm_Drought_P Parameter: Timepoint (hr) Value: 48
  misc_feature: MA Experiment 20000479 PARAMETER Experiment Name: Zm_Drought_P Parameter: Tissue Value: Aerial
  misc_feature: MA Experiment 20000479 PARAMETER Experiment Name: Zm_Drought_P Parameter: Treatment Value: Drought vs. No Drought
  misc_feature: MA Experiment ID: 20000480 Result: Down-regulated in Transcription
  misc_feature: MA Experiment 20000480 PARAMETER Experiment Name: Zm_Drought_P Parameter: Age (day) Value: 11
  misc_feature: MA Experiment 20000480 PARAMETER Experiment Name: Zm_Drought_P Parameter: Organism Value: Zea mays
  misc_feature: MA Experiment 20000480 PARAMETER Experiment Name: Zm_Drought_P Parameter: Plant Line Value: 35A19
  misc_feature: MA Experiment 20000480 PARAMETER Experiment Name: Zm_Drought_P Parameter: Timepoint (hr) Value: 72
  misc_feature: MA Experiment 20000480 PARAMETER Experiment Name: Zm_Drought_P Parameter: Tissue Value: Aerial
  misc_feature: MA Experiment 20000480 PARAMETER Experiment Name: Zm_Drought_P Parameter: Treatment Value: Drought vs. No Drought
  misc_feature: MA Experiment ID: 20000492 Result: Down-regulated in Transcription
  misc_feature: MA Experiment 20000492 PARAMETER Experiment Name: Zm_Hybrid_Seed_Dev_P Parameter: DAP Value: 12
  misc_feature: MA Experiment 20000492 PARAMETER Experiment Name: Zm_Hybrid_Seed_Dev_P Parameter: Organism Value: Zea mays
  misc_feature: MA Experiment 20000492 PARAMETER Experiment Name: Zm_Hybrid_Seed_Dev_P Parameter: Plant Line Value: 35A19
  misc_feature: MA Experiment 20000492 PARAMETER Experiment Name: Zm_Hybrid_Seed_Dev_P Parameter: Tissue Value: Fert Kernel vs. Unfert Floret
aggaaatgactcgtcaacgcaactaccccaagtcgccgctgagccactctctccgtccgcgaatccgtaaatggaaggggacgaaatgctcagggttaagctcggcaggcagggccttgaggtgtccaagcttggcttcgggtgcatgggcctcactggagtgtacaacgcccctgttcctgaccaagctgggatcgacataatcaagcacgcgtttgaggccggcatcaccttcttcgacaccgctgatgcctatgggccacacaccaacgaggtcctgctcggaaaggcattgaaacattttcctcgtgagaaggtgcaaattgccaccaaatgtggcattgcaggatttgatgcaagtggcatgcgtgtgaagggcactccagattatgttcgagcttgttgtgaagcaagccttcagcgccttgctactgactacattgatatatactaccaacatcgcattgatcagtcagtgcctatagaggaaactatgggagagctcaagaagttggttgaagaagggaaagtgaggtatgttggcttatcagaggctagtgccgataccattcgacgggcacatgctgtccatccaattactgcggtgcagttggagtggtcactatggaccagagatatagaggaagatataattccagtctgcagggagcttggtattggaatagttccatatagcccacttggccgtggcttctttgctggcagggcagctgtagaacgtgttccatcagaaagtctattgtctaaacatccaagatattctggggaaaacttggagaagaataaagttctgtatacacgacttgaaatgttgtccaagaagtatgggtgcacacctgctcaactcgctctctcctgggttcttcatcaaggagaagatgtggtccccatccctggaacaacaaaagccaagaaccttgacgaaaatatcggtgctgtaaaggtaaggctgagcaaggaagacctcgaagaaatctcaggcgcattccctgctggtgaggtggctgggtctagactccttggagtcttggagcctttttcctggaggctcgcaaataccccgcctccaaaatagcgagttcagatgcaaattcttggccatcctaccatttaggtcatgttatgttagatcatatctacatgatgcaaatgattgttcctgtgctcgcgcgtgaaaatgcatgtacctgaaacaaagagatgtaacagttggttctctgtgtggaacgtgctgattgctatagttgatcaaagaaatacgttggaattaagtt

SEQ ID NO: 9718 - protein, 341 aa, Zea mays subsp. mays
  peptide (1)..(341): Ceres Seq. ID no. 12354203
  misc_feature (1)..(341): Homolog of NCBI NO: 37534402 NR Description: putative polyprotein [Oryza sativa (japonica group)] >gi|31432120|gb|AAP53790.1| putative polyprotein [Oryza
  misc_feature (2)..(339): Homolog of NCBI NO: 15219786 NR Description: auxin-induced protein, putative; protein id: [Arabidopsis thaliana] >gi|25316215|pir||C96632 hypothetical
  misc_feature (8)..(339): Homolog of NCBI NO: 18406861 NR Description: auxin-induced protein, putative; protein id: supported by cDNA: gi_15912324, supported by cDNA: gi_20466377, by cDNA: gi_6562979 [Arabidopsis thaliana]
  misc_feature (8)..(339): Homolog of NCBI NO: 38344997 NR Description: OSJNBa0008A08.11 [Oryza sativa (japonica
  misc_feature (8)..(339): Homolog of NCBI NO: 6562980 NR Description: auxin-induced atb2 [Arabidopsis thaliana]
  misc_feature (8)..(339): Homolog of NCBI NO: 30696459 NR Description: aldo/keto reductase family [Arabidopsis thaliana] At1g60730/F8A5_24 [Arabidopsis thaliana]
  misc_feature (8)..(339): Homolog of NCBI NO: 25316216 NR Description: hypothetical protein F8A5.24 [imported] -
  misc_feature (2)..(339): Homolog of NCBI NO: 30102704 NR Description: At1g60680 [Arabidopsis thaliana]
  misc_feature (8)..(309): Homolog of NCBI NO: 7447933 NR Description: auxin-induced protein - common sunflower
  misc_feature (2)..(339): Homolog of NCBI NO: 30696451 NR Description: aldo/keto reductase family [Arabidopsis thaliana]
MEGDEMLRVKLGRQGLEVSKLGFGCMGLTGVYNAPVPDQAGIDIIKHAFEAGITFFDTADAYGPHTNEVLLGKALKHFPREKVQIATKCGIAGFDASGMRVKGTPDYVRACCEASLQRLATDYIDIYYQHRIDQSVPIEETMGELKKLVEEGKVRYVGLSEASADTIRRAHAVHPITAVQLEWSLWTRDIEEDIIPVCRELGIGIVPYSPLGRGFFAGRAAVERVPSESLLSKHPRYSGENLEKNKVLYTRLEMLSKKYGCTPAQLALSWVLHQGEDVVPIPGTTKAKNLDENIGAVKVRLSKEDLEEISGAFPAGEVAGSRLLGVLEPFSWRLANTPPPK

SEQ ID NO: 9719 - protein, 336 aa, Zea mays subsp. mays
  peptide (1)..(336): Ceres Seq. ID no. 12354204
  misc_feature (3)..(304): Homolog of NCBI NO: 7447933 NR Description: auxin-induced protein - common sunflower
  misc_feature (1)..(334): Homolog of NCBI NO: 30696451 NR Description: aldo/keto reductase family [Arabidopsis thaliana]
  misc_feature (1)..(336): Homolog of NCBI NO: 37534402 NR Description: putative polyprotein [Oryza sativa (japonica group)] >gi|31432120|gb|AAP53790.1| putative polyprotein [Oryza
  misc_feature (1)..(334): Homolog of NCBI NO: 15219786 NR Description: auxin-induced protein, putative; protein id: [Arabidopsis thaliana] >gi|25316215|pir||C96632 hypothetical
  misc_feature (3)..(334): Homolog of NCBI NO: 18406861 NR Description: auxin-induced protein, putative; protein id: supported by cDNA: gi_15912324, supported by cDNA: gi_20466377, by cDNA: gi_6562979 [Arabidopsis thaliana]
  misc_feature (3)..(334): Homolog of NCBI NO: 38344997 NR Description: OSJNBa0008A08.11 [Oryza sativa (japonica
  misc_feature (3)..(334): Homolog of NCBI NO: 6562980 NR Description: auxin-induced atb2 [Arabidopsis thaliana]
  misc_feature (3)..(334): Homolog of NCBI NO: 30696459 NR Description: aldo/keto reductase family [Arabidopsis thaliana] At1g60730/F8A5_24 [Arabidopsis thaliana]
  misc_feature (3)..(334): Homolog of NCBI NO: 25316216 NR Description: hypothetical protein F8A5.24 [imported] -
  misc_feature (1)..(334): Homolog of NCBI NO: 30102704 NR Description: At1g60680 [Arabidopsis thaliana]
MLRVKLGRQGLEVSKLGFGCMGLTGVYNAPVPDQAGIDIIKHAFEAGITFFDTADAYGPHTNEVLLGKALKHFPREKVQIATKCGIAGFDASGMRVKGTPDYVRACCEASLQRLATDYIDIYYQHRIDQSVPIEETMGELKKLVEEGKVRYVGLSEASADTIRRAHAVHPITAVQLEWSLWTRDIEEDIIPVCRELGIGIVPYSPLGRGFFAGRAAVERVPSESLLSKHPRYSGENLEKNKVLYTRLEMLSKKYGCTPAQLALSWVLHQGEDVVPIPGTTKAKNLDENIGAVKVRLSKEDLEEISGAFPAGEVAGSRLLGVLEPFSWRLANTPPPK

SEQ ID NO: 9720 - protein, 316 aa, Zea mays subsp. mays
  peptide (1)..(316): Ceres Seq. ID no. 12354205
  misc_feature (1)..(316): Homolog of NCBI NO: 37534402 NR Description: putative polyprotein [Oryza sativa (japonica group)] >gi|31432120|gb|AAP53790.1| putative polyprotein [Oryza
  misc_feature (1)..(314): Homolog of NCBI NO: 15219786 NR Description: auxin-induced protein, putative; protein id: [Arabidopsis thaliana] >gi|25316215|pir||C96632 hypothetical
  misc_feature (1)..(314): Homolog of NCBI NO: 18406861 NR Description: auxin-induced protein, putative; protein id: supported by cDNA: gi_15912324, supported by cDNA: gi_20466377, by cDNA: gi_6562979 [Arabidopsis thaliana]
  misc_feature (1)..(314): Homolog of NCBI NO: 38344997 NR Description: OSJNBa0008A08.11 [Oryza sativa (japonica
  misc_feature (1)..(314): Homolog of NCBI NO: 6562980 NR Description: auxin-induced atb2 [Arabidopsis thaliana]
  misc_feature (1)..(314): Homolog of NCBI NO: 30696459 NR Description: aldo/keto reductase family [Arabidopsis thaliana] At1g60730/F8A5_24 [Arabidopsis thaliana]
  misc_feature (1)..(314): Homolog of NCBI NO: 25316216 NR Description: hypothetical protein F8A5.24 [imported] -
  misc_feature (1)..(314): Homolog of NCBI NO: 30102704 NR Description: At1g60680 [Arabidopsis thaliana]
  misc_feature (1)..(284): Homolog of NCBI NO: 7447933 NR Description: auxin-induced protein - common sunflower
  misc_feature (1)..(314): Homolog of NCBI NO: 30696451 NR Description: aldo/keto reductase family [Arabidopsis thaliana]
MGLTGVYNAPVPDQAGIDIIKHAFEAGITFFDTADAYGPHTNEVLLGKALKHFPREKVQIATKCGIAGFDASGMRVKGTPDYVRACCEASLQRLATDYIDIYYQHRIDQSVPIEETMGELKKLVEEGKVRYVGLSEASADTIRRAHAVHPITAVQLEWSLWTRDIEEDIIPVCRELGIGIVPYSPLGRGFFAGRAAVERVPSESLLSKHPRYSGENLEKNKVLYTRLEMLSKKYGCTPAQLALSWVLHQGEDVVPIPGTTKAKNLDENIGAVKVRLSKEDLEEISGAFPAGEVAGSRLLGVLEPFSWRLANTPPPK

SEQ ID NO: 9721 - DNA, 1346 bp, Zea mays subsp. mays
  misc_feature (1)..(1346): Ceres Seq. ID no. 12369832
  misc_feature: MA Experiment ID: 108523 Result: Up-regulated in Transcription
  misc_feature: MA Experiment 108523 PARAMETER Experiment Name: Zm_42deg_Heat_P Parameter: Age (day) Value: 8
  misc_feature: MA Experiment 108523 PARAMETER Experiment Name: Zm_42deg_Heat_P Parameter: Organism Value: Zea mays
  misc_feature: MA Experiment 108523 PARAMETER Experiment Name: Zm_42deg_Heat_P Parameter: Plant Line Value: 35A19
  misc_feature: MA Experiment 108523 PARAMETER Experiment Name: Zm_42deg_Heat_P Parameter: Temperature (deg C) Value: 42 vs. 22
  misc_feature: MA Experiment 108523 PARAMETER Experiment Name: Zm_42deg_Heat_P Parameter: Timepoint (hr) Value: 6
  misc_feature: MA Experiment 108523 PARAMETER Experiment Name: Zm_42deg_Heat_P Parameter: Tissue Value: Aerial
  misc_feature: MA Experiment ID: 108527 Result: Up-regulated in Transcription
  misc_feature: MA Experiment 108527 PARAMETER Experiment Name: Zm_5mM_NO_P Parameter: Age (day) Value: 8
  misc_feature: MA Experiment 108527 PARAMETER Experiment Name: Zm_5mM_NO_P Parameter: Organism Value: Zea mays
  misc_feature: MA Experiment 108527 PARAMETER Experiment Name: Zm_5mM_NO_P Parameter: Plant Line Value: 35A19
  misc_feature: MA Experiment 108527 PARAMETER Experiment Name: Zm_5mM_NO_P Parameter: Timepoint (hr) Value: 6
  misc_feature: MA Experiment 108527 PARAMETER Experiment Name: Zm_5mM_NO_P Parameter: Tissue Value: Aerial
  misc_feature: MA Experiment 108527 PARAMETER Experiment Name: Zm_5mM_NO_P Parameter: Treatment Value: 5mM NO vs. No Treatment
  misc_feature: MA Experiment ID: 108559 Result: Up-regulated in Transcription
  misc_feature: MA Experiment 108559 PARAMETER Experiment Name: Zm_5mM_NO_P Parameter: Age (day) Value: 8
  misc_feature: MA Experiment 108559 PARAMETER Experiment Name: Zm_5mM_NO_P Parameter: Organism Value: Zea mays
  misc_feature: MA Experiment 108559 PARAMETER Experiment Name: Zm_5mM_NO_P Parameter: Plant Line Value: 35A19
  misc_feature: MA Experiment 108559 PARAMETER Experiment Name: Zm_5mM_NO_P Parameter: Timepoint (hr) Value: 12
  misc_feature: MA Experiment 108559 PARAMETER Experiment Name: Zm_5mM_NO_P Parameter: Tissue Value: Aerial
  misc_feature: MA Experiment 108559 PARAMETER Experiment Name: Zm_5mM_NO_P Parameter: Treatment Value: 5mM NO vs. No Treatment
  misc_feature: MA Experiment ID: 20000492 Result: Down-regulated in Transcription
  misc_feature: MA Experiment 20000492 PARAMETER Experiment Name: Zm_Hybrid_Seed_Dev_P Parameter: DAP Value: 12
  misc_feature: MA Experiment 20000492 PARAMETER Experiment Name: Zm_Hybrid_Seed_Dev_P Parameter: Organism Value: Zea mays
  misc_feature: MA Experiment 20000492 PARAMETER Experiment Name: Zm_Hybrid_Seed_Dev_P Parameter: Plant Line Value: 35A19
  misc_feature: MA Experiment 20000492 PARAMETER Experiment Name: Zm_Hybrid_Seed_Dev_P Parameter: Tissue Value: Fert Kernel vs. Unfert Floret
  misc_feature: MA Experiment ID: 20000535 Result: Down-regulated in Transcription
  misc_feature: MA Experiment 20000535 PARAMETER Experiment Name: Zm_Hybrid_Seed_Dev_P Parameter: DAP Value: 30 vs. 12
  misc_feature: MA Experiment 20000535 PARAMETER Experiment Name: Zm_Hybrid_Seed_Dev_P Parameter: Organism Value: Zea mays
  misc_feature: MA Experiment 20000535 PARAMETER Experiment Name: Zm_Hybrid_Seed_Dev_P Parameter: Plant Line Value: 35A19
  misc_feature: MA Experiment 20000535 PARAMETER Experiment Name: Zm_Hybrid_Seed_Dev_P Parameter: Tissue Value: Embryo vs. Unfert Floret
cgtctttgtatccatttgtttggttcttacttcttagttgtgtgccatagagattctaccatccccacgtccagctccccgcctcttccctgctgcatctgcacttgcacgccgctcacacatgctatttttgttcacttgttcttgcttcttgctgtggttgttaaactgacttggtcctgataatcctccgcgttctaatgatgtgctgtcgctgcaccatgcgcgtgttgtcgtcagagcctagggctggtgaagcccatggaggagatgctgatggcggccagcgcgggcgctgcaaatccgagccaaggctcgaatccgaacccgccgccgccggcggcgcccctgacgggcgcgggtagcaccgagcggcgcgcgcggccgcagaaggagaaggcgctcaactgcccgcggtgcaactccaccaacaccaaattctgctactacaacaactacagcctccagcagccacgctacttctgcaagacgtgccgccgctactggacggagggcggatccctccgcagcgtccccgtgggcggcggctcccgcaagaacaagcgctcctcgtcgtcatcgtcgtcggcggcggcggcgtccgcttccacctcctcctcggccacgagctcgtccatggccagcacactgggggcggcgtccaagagtccggagctggcgcacgacctcaacctagcgttcccgcaccatggtggccagcacgccgccgagttcccggcgttcccgagcctgcagagcagcaacgacatgtgcgaccccggtggcgggatgacgagcaacggccggggcggcggcgcggggcccgcggtcggcgcgctctcggcaacggagctctggcggagctccggctgctacatgccgctgcagatgccaggagattacacggcagcagggttcgcgctcggggagttccgcacgccgctgctgcctgacgcgcacgggccggggtcgtccggtgctgccgcagcggcggggtacggttgcagcgcggggctgccgcagggcgtgccggacaacgcgggcaggttattgttccctttcgaggacttgaagccgccggttagccctggaggtggtggtgtggccggaggtggtgcaagtgcaaccggtggcgccggcgacggaaatagcagccacgatcagtttgaccacaacaaggagcaaggcggaggcggcagccccggtgccggtgccgggcacgacacggcggggttctggagcagggtttacaatttcggacggaaatttccgaaattttcttgatttgggtggtatccgaaaaatatatgtttttgaaattgacattttaatataaatttttgttt

SEQ ID NO: 9722 - protein, 340 aa, Zea mays subsp. mays
  peptide (1)..(340): Ceres Seq. ID no. 12369833
  misc_feature (43)..(105): Pfam Name: Dof domain, zinc finger Pfam Description: Dof domain, zinc finger
  misc_feature (1)..(333): Homolog of NCBI NO: 4996640 NR Description: Dof zinc finger protein [Oryza sativa]
  misc_feature (4)..(333): Homolog of NCBI NO: 38344272 NR Description: OSJNBa0005N02.10 [Oryza sativa (japonica
  misc_feature (21)..(228): Homolog of NCBI NO: 20372847 NR Description: dof zinc finger protein [Hordeum vulgare subsp.
  misc_feature (21)..(228): Homolog of NCBI NO: 20372895 NR Description: dof zinc finger protein [Hordeum vulgare subsp.
  misc_feature (237)..(312): Homolog of NCBI NO: 20372847 NR Description: dof zinc finger protein [Hordeum vulgare subsp.
  misc_feature (237)..(312): Homolog of NCBI NO: 20372895 NR Description: dof zinc finger protein [Hordeum vulgare subsp.
  misc_feature (36)..(168): Homolog of NCBI NO: 7489130 NR Description: finger protein Dof - common tobacco (fragment)
  misc_feature (1)..(325): Homolog of NCBI NO: 29124139 NR Description: putative DNA-binding protein [Oryza sativa
  misc_feature (36)..(168): Homolog of NCBI NO: 7489124 NR Description: finger protein BBF1.1 - common tobacco (fragment)
  misc_feature (1)..(151): Homolog of NCBI NO: 7487175 NR Description: hypothetical protein T19F6.50 - Arabidopsis >gi|5668634|emb|CAB51649.1| putative protein [Arabidopsis >gi|7269255|emb|CAB81324.1| putative protein [Arabidopsis
MEEMLMAASAGAANPSQGSNPNPPPPAAPLTGAGSTERRARPQKEKALNCPRCNSTNTKFCYYNNYSLQQPRYFCKTCRRYWTEGGSLRSVPVGGGSRKNKRSSSSSSSAAAASASTSSSATSSSMASTLGAASKSPELAHDLNLAFPHHGGQHAAEFPAFPSLQSSNDMCDPGGGMTSNGRGGGAGPAVGALSATELWRSSGCYMPLQMPGDYTAAGFALGEFRTPLLPDAHGPGSSGAAAAAGYGCSAGLPQGVPDNAGRLLFPFEDLKPPVSPGGGGVAGGGASATGGAGDGNSSHDQFDHNKEQGGGGSPGAGAGHDTAGFWSRVYNFGRKFPKFS

SEQ ID NO: 9723 - protein, 337 aa, Zea mays subsp. mays
  peptide (1)..(337): Ceres Seq. ID no. 12369834
  misc_feature (40)..(102): Pfam Name: Dof domain, zinc finger Pfam Description: Dof domain, zinc finger
  misc_feature (1)..(330): Homolog of NCBI NO: 4996640 NR Description: Dof zinc finger protein [Oryza sativa]
  misc_feature (1)..(330): Homolog of NCBI NO: 38344272 NR Description: OSJNBa0005N02.10 [Oryza sativa (japonica
  misc_feature (18)..(225): Homolog of NCBI NO: 20372847 NR Description: dof zinc finger protein [Hordeum vulgare subsp.
  misc_feature (18)..(225): Homolog of NCBI NO: 20372895 NR Description: dof zinc finger protein [Hordeum vulgare subsp.
  misc_feature (234)..(309): Homolog of NCBI NO: 20372847 NR Description: dof zinc finger protein [Hordeum vulgare subsp.
  misc_feature (234)..(309): Homolog of NCBI NO: 20372895 NR Description: dof zinc finger protein [Hordeum vulgare subsp.
  misc_feature (33)..(165): Homolog of NCBI NO: 7489130 NR Description: finger protein Dof - common tobacco (fragment)
  misc_feature (1)..(322): Homolog of NCBI NO: 29124139 NR Description: putative DNA-binding protein [Oryza sativa
  misc_feature (33)..(165): Homolog of NCBI NO: 7489124 NR Description: finger protein BBF1.1 - common tobacco (fragment)
  misc_feature (1)..(148): Homolog of NCBI NO: 7487175 NR Description: hypothetical protein T19F6.50 - Arabidopsis >gi|5668634|emb|CAB51649.1| putative protein [Arabidopsis >gi|7269255|emb|CAB81324.1| putative protein [Arabidopsis
MLMAASAGAANPSQGSNPNPPPPAAPLTGAGSTERRARPQKEKALNCPRCNSTNTKFCYYNNYSLQQPRYFCKTCRRYWTEGGSLRSVPVGGGSRKNKRSSSSSSSAAAASASTSSSATSSSMASTLGAASKSPELAHDLNLAFPHHGGQHAAEFPAFPSLQSSNDMCDPGGGMTSNGRGGGAGPAVGALSATELWRSSGCYMPLQMPGDYTAAGFALGEFRTPLLPDAHGPGSSGAAAAAGYGCSAGLPQGVPDNAGRLLFPFEDLKPPVSPGGGGVAGGGASATGGAGDGNSSHDQFDHNKEQGGGGSPGAGAGHDTAGFWSRVYNFGRKFPKFS

SEQ ID NO: 9724 - protein, 335 aa, Zea mays subsp. mays
  peptide (1)..(335): Ceres Seq. ID no. 12369835
  misc_feature (38)..(100): Pfam Name: Dof domain, zinc finger Pfam Description: Dof domain, zinc finger
  misc_feature (1)..(328): Homolog of NCBI NO: 4996640 NR Description: Dof zinc finger protein [Oryza sativa]
  misc_feature (1)..(328): Homolog of NCBI NO: 38344272 NR Description: OSJNBa0005N02.10 [Oryza sativa (japonica
  misc_feature (16)..(223): Homolog of NCBI NO: 20372847 NR Description: dof zinc finger protein [Hordeum vulgare subsp.
  misc_feature (16)..(223): Homolog of NCBI NO: 20372895 NR Description: dof zinc finger protein [Hordeum vulgare subsp.
  misc_feature (232)..(307): Homolog of NCBI NO: 20372847 NR Description: dof zinc finger protein [Hordeum vulgare subsp.
  misc_feature (232)..(307): Homolog of NCBI NO: 20372895 NR Description: dof zinc finger protein [Hordeum vulgare subsp.
  misc_feature (31)..(163): Homolog of NCBI NO: 7489130 NR Description: finger protein Dof - common tobacco (fragment)
  misc_feature (1)..(320): Homolog of NCBI NO: 29124139 NR Description: putative DNA-binding protein [Oryza sativa
  misc_feature (31)..(163): Homolog of NCBI NO: 7489124 NR Description: finger protein BBF1.1 - common tobacco (fragment)
  misc_feature (1)..(146): Homolog of NCBI NO: 7487175 NR Description: hypothetical protein T19F6.50 - Arabidopsis >gi|5668634|emb|CAB51649.1| putative protein [Arabidopsis >gi|7269255|emb|CAB81324.1| putative protein [Arabidopsis
MAASAGAANPSQGSNPNPPPPAAPLTGAGSTERRARPQKEKALNCPRCNSTNTKFCYYNNYSLQQPRYFCKTCRRYWTEGGSLRSVPVGGGSRKNKRSSSSSSSAAAASASTSSSATSSSMASTLGAASKSPELAHDLNLAFPHHGGQHAAEFPAFPSLQSSNDMCDPGGGMTSNGRGGGAGPAVGALSATELWRSSGCYMPLQMPGDYTAAGFALGEFRTPLLPDAHGPGSSGAAAAAGYGCSAGLPQGVPDNAGRLLFPFEDLKPPVSPGGGGVAGGGASATGGAGDGNSSHDQFDHNKEQGGGGSPGAGAGHDTAGFWSRVYNFGRKFPKFS

SEQ ID NO: 9725 - DNA, 1028 bp, Zea mays subsp. mays
  misc_feature (1)..(1028): Ceres Seq. ID no. 12349386
  misc_feature: MA Experiment ID: 108689 Result: Up-regulated in Transcription
  misc_feature: MA Experiment 108689 PARAMETER Experiment Name: Zm_Drought_Roots_P Parameter: Age (day) Value: 9
  misc_feature: MA Experiment 108689 PARAMETER Experiment Name: Zm_Drought_Roots_P Parameter: Organism Value: Zea mays
  misc_feature: MA Experiment 108689 PARAMETER Experiment Name: Zm_Drought_Roots_P Parameter: Plant Line Value: 35A19
  misc_feature: MA Experiment 108689 PARAMETER Experiment Name: Zm_Drought_Roots_P Parameter: Timepoint (hr) Value: 24
  misc_feature: MA Experiment 108689 PARAMETER Experiment Name: Zm_Drought_Roots_P Parameter: Tissue Value: Roots
  misc_feature: MA Experiment 108689 PARAMETER Experiment Name: Zm_Drought_Roots_P Parameter: Treatment Value: Drought vs. No Drought
  misc_feature: MA Experiment ID: 20000480 Result: Up-regulated in Transcription
  misc_feature: MA Experiment 20000480 PARAMETER Experiment Name: Zm_Drought_P Parameter: Age (day) Value: 11
  misc_feature: MA Experiment 20000480 PARAMETER Experiment Name: Zm_Drought_P Parameter: Organism Value: Zea mays
  misc_feature: MA Experiment 20000480 PARAMETER Experiment Name: Zm_Drought_P Parameter: Plant Line Value: 35A19
  misc_feature: MA Experiment 20000480 PARAMETER Experiment Name: Zm_Drought_P Parameter: Timepoint (hr) Value: 72
  misc_feature: MA Experiment 20000480 PARAMETER Experiment Name: Zm_Drought_P Parameter: Tissue Value: Aerial
  misc_feature: MA Experiment 20000480 PARAMETER Experiment Name: Zm_Drought_P Parameter: Treatment Value: Drought vs. No Drought
  misc_feature: MA Experiment ID: 20000488 Result: Down-regulated in Transcription
  misc_feature: MA Experiment 20000488 PARAMETER Experiment Name: Zm_50mM_NH4NO3_L_to_H_P Parameter: Organism Value: Zea mays
  misc_feature: MA Experiment 20000488 PARAMETER Experiment Name: Zm_50mM_NH4NO3_L_to_H_P Parameter: Timepoint (hr) Value: 8
  misc_feature: MA Experiment 20000488 PARAMETER Experiment Name: Zm_50mM_NH4NO3_L_to_H_P Parameter: Tissue Value: Leaves
  misc_feature: MA Experiment 20000488 PARAMETER Experiment Name: Zm_50mM_NH4NO3_L_to_H_P Parameter: Treatment Value: 50mM NH4NO3 vs. 100mM Mannitol
  misc_feature: MA Experiment ID: 20000535 Result: Down-regulated in Transcription
  misc_feature: MA Experiment 20000535 PARAMETER Experiment Name: Zm_Hybrid_Seed_Dev_P Parameter: DAP Value: 30 vs. 12
  misc_feature: MA Experiment 20000535 PARAMETER Experiment Name: Zm_Hybrid_Seed_Dev_P Parameter: Organism Value: Zea mays
  misc_feature: MA Experiment 20000535 PARAMETER Experiment Name: Zm_Hybrid_Seed_Dev_P Parameter: Plant Line Value: 35A19
  misc_feature: MA Experiment 20000535 PARAMETER Experiment Name: Zm_Hybrid_Seed_Dev_P Parameter: Tissue Value: Embryo vs. Unfert Floret
gcgtggtttgagtgtttgaccacggcagcaagagcagcccgctccgctcctcctcccctgccgaagcaccacacagcagaagcgaaaacggcaggaaggccaatcgggcctgccaggcatgcttgcccgctgccgcaggtgaggcgacccgcagccgtccgagacgcaccccggcgcaagcgcgcatccgccatggatccggcgtccgaggagctcgagcgccgcagccgctatctcaactcgctcatccgccgtactaagctcagcgccaccccggctccccctcctcagccggagccggagcacgaggtagcgccaccgaatccggagccggagccggagaccgcggttgggaagcgcgaggaggccaaggcggatccagtggtcgttgaggaggagaaccgggaggccaaagtggcgggggacgggaaggggaaagagatcaaggggaaggacgacgggggtcccaaggaggacaacagcaggaaggtgtcagtgcgggtgcgcgcggccgacatgcccttaccgctgcagcgccgcgcggtccggctcgcctacgaagccatcgccgccatgccgcgcctcgacagcaagcgcctcgccctcgcgctcaagaaggaatttgatacggcatatggtgccagcttggcattgcattgttggaacaagctttggttcctatgtcactcactctctgggcggtttcttgtacttctccgtcgacaaggcctatattctcctcttcagaaccgctgtcgagccattagcccatccgcgatgaggggccatgaaacagtctactagctagcgcattctgtattcgacatttaactgtagaagggtaaggagagtagaacgatcatcgcccccaccccccaatgcaaatatgtagaactaatctgctgtagctagttttttccatgtactgtgcactaatcggccatgtggaccttaccattagcttccagagttgtagcttgactcaactcagttcttccgcacgaggggaatttactttcgcatcttgt

SEQ ID NO: 9726 - protein, 267 aa, Zea mays subsp. mays
  peptide (1)..(267): Ceres Seq. ID no. 12349387
  misc_feature (165)..(220): Pfam Name: Dynein light chain type 1 Pfam Description: Dynein light chain type 1
  misc_feature (65)..(236): Homolog of NCBI NO: 38567715 NR Description: B1358B12.13 [Oryza sativa (japonica
  misc_feature (157)..(220): Homolog of NCBI NO: 15220678 NR Description: dynein light subunit lc6, flagellar outer arm; id: At1g23220.1, supported by cDNA: gi_17380801, supported by gi_20465366 [Arabidopsis thaliana]
  misc_feature (164)..(220): Homolog of NCBI NO: 34913978 NR Description: dynein light chain - like protein [Oryza sativa
  misc_feature (168)..(213): Homolog of NCBI NO: 34909728 NR Description: putative dynein light chain [Oryza sativa
  misc_feature (167)..(214): Homolog of NCBI NO: 15233288 NR Description: putative dynein light chain protein; protein id: supported by cDNA: 254721. [Arabidopsis thaliana] gb|AAF29412.1~gene_id:MSL1.16~similar to unknown protein
AWFECLTTAARAARSAPPPLPKHHTAEAKTAGRPIGPARHACPLPQVRRPAAVRDAPRRKRASAMDPASEELERRSRYLNSLIRRTKLSATPAPPPQPEPEHEVAPPNPEPEPETAVGKREEAKADPVVVEEENREAKVAGDGKGKEIKGKDDGGPKEDNSRKVSVRVRAADMPLPLQRRAVRLAYEAIAAMPRLDSKRLALALKKEFDTAYGASLALHCWNKLWFLCHSLSGRFLVLLRRQGLYSPLQNRCRAISPSAMRGHETVY

SEQ ID NO: 9727 - protein, 203 aa, Zea mays subsp. mays
  peptide (1)..(203): Ceres Seq. ID no. 12349388
  misc_feature (101)..(156): Pfam Name: Dynein light chain type 1 Pfam Description: Dynein light chain type 1
  misc_feature (1)..(172): Homolog of NCBI NO: 38567715 NR Description: B1358B12.13 [Oryza sativa (japonica
  misc_feature (93)..(156): Homolog of NCBI NO: 15220678 NR Description: dynein light subunit lc6, flagellar outer arm; id: At1g23220.1, supported by cDNA: gi_17380801, supported by gi_20465366 [Arabidopsis thaliana]
  misc_feature (100)..(156): Homolog of NCBI NO: 34913978 NR Description: dynein light chain - like protein [Oryza sativa
  misc_feature (104)..(149): Homolog of NCBI NO: 34909728 NR Description: putative dynein light chain [Oryza sativa
  misc_feature (103)..(150): Homolog of NCBI NO: 15233288 NR Description: putative dynein light chain protein; protein id: supported by cDNA: 254721. [Arabidopsis thaliana] gb|AAF29412.1~gene_id:MSL1.16~similar to unknown protein
MDPASEELERRSRYLNSLIRRTKLSATPAPPPQPEPEHEVAPPNPEPEPETAVGKREEAKADPVVVEEENREAKVAGDGKGKEIKGKDDGGPKEDNSRKVSVRVRAADMPLPLQRRAVRLAYEAIAAMPRLDSKRLALALKKEFDTAYGASLALHCWNKLWFLCHSLSGRFLVLLRRQGLYSPLQNRCRAISPSAMRGHETVY

SEQ ID NO: 9728 - DNA, 1389 bp, Zea mays subsp. mays
  misc_feature (1)..(1389): Ceres Seq. ID no. 12416088
  misc_feature: MA Experiment ID: 108523 Result: Up-regulated in Transcription
  misc_feature: MA Experiment 108523 PARAMETER Experiment Name: Zm_42deg_Heat_P Parameter: Age (day) Value: 8
  misc_feature: MA Experiment 108523 PARAMETER Experiment Name: Zm_42deg_Heat_P Parameter: Organism Value: Zea mays
  misc_feature: MA Experiment 108523 PARAMETER Experiment Name: Zm_42deg_Heat_P Parameter: Plant Line Value: 35A19
  misc_feature: MA Experiment 108523 PARAMETER Experiment Name: Zm_42deg_Heat_P Parameter: Temperature (deg C) Value: 42 vs. 22
  misc_feature: MA Experiment 108523 PARAMETER Experiment Name: Zm_42deg_Heat_P Parameter: Timepoint (hr) Value: 6
  misc_feature: MA Experiment 108523 PARAMETER Experiment Name: Zm_42deg_Heat_P Parameter: Tissue Value: Aerial
gcacgagaccattacctagaacatcctaatcgaaaaatatacggcgaaagccctattcgtgcccgcggccgtggatagataggtcagtgacgattgagaaacccgtagtcggagcagaggaggggtagaagatggtgttcggtcaggtggtgatcggcccgccgggctccggcaagaccacctactgcaacggcatgtcgcagttcctctccctcctcggcaggaaggttgcgtttgtcaatttggaccctgcaaatgacgcattgccatatgagtgtgccataaacatcgaggacctcataaaactcagtgatgtcatgtctgagcattcgcttggccctaatggagggcttgtgtattgcatggattacttggagaagaatattgattggcttgaagaaaaactgaagccttttattgaagatcactatctgttatttgattttcctggtcaagtggaattgttcttccttcactcaaatgcaagaagtgttattaataaactcatcaaaaagatggacttgaggcttactgctgttcaccttattgatgcccatttatgctgtgatcctggaaagtatgtcagtgctttgcttctttcactatcaacgatgctacacttggaattgccacatatcaatgtcttgtcaaagattgacctcattgagaactatggaaatttagcattcaaccttgacttctacactgatgtccaagatctttcttatttgcaatatcatcttgagcaggatccccgctcagccaagtacaggaaactgactaaggagctctgtgatgtgattgatgattttggtttagtcaatttttcaactttggacatccaggacaaggaaagtgttggcaatcttgtgaagctgattgacaagagcaacggatatatattttcttctattgacagtagtgctgttgagttcagcaaaattgcagcggcgcctcttgattgggactactacagaacagcggaagtgcaggagaagtacatgaaagatgatgagttcgcgcaactgacaagcaggatgcaatgaggctggcggtgccgtcccgcacccccactttggtagcacaacgggtgaacggtgaaccacgacagtgtggcacgtcgaacttcggttgccagaacgatgtgaaacctgtctaaattcatgtagctcagttgtaggtgtttactgaagctaattgctatagttgcctgatcttctgggagtaccctttgggcagtaaaaaaatgcacttgtcacctgtgaccaaccggtcaggtcctgttttgtttgttcgcttcaacttcgaactgcatcagctacaatctttagagacaaaatattgtagtgtttggactactgcagttgtaatctttaaagacaacattgc

SEQ ID NO: 9729 - protein, 304 aa, Zea mays subsp. mays
  peptide (1)..(304): Ceres Seq. ID no. 12416089
  misc_feature (7)..(256): Pfam Name: Conserved hypothetical ATP binding protein Pfam Description: Conserved hypothetical ATP binding protein
  misc_feature (1)..(282): Homolog of NCBI NO: 15242226 NR Description: putative protein; protein id: At5g22370.1 thaliana] >gi|9757818|dbj|BAB08336.1|
  misc_feature (3)..(298): Homolog of NCBI NO: 34871770 NR Description: similar to expressed sequence AI838661 [Rattus
  misc_feature (3)..(304): Homolog of NCBI NO: 19527098 NR Description: expressed sequence AI838661 [Mus musculus]
  misc_feature (3)..(291): Homolog of NCBI NO: 33303753 NR Description: hypothetical protein FLJ10349 [synthetic
  misc_feature (3)..(291): Homolog of NCBI NO: 40254895 NR Description: hypothetical protein FLJ10349 [Homo sapiens] unnamed protein product [Homo sapiens] Hypothetical protein FLJ10349 [Homo sapiens]
  misc_feature (3)..(291): Homolog of NCBI NO: 7981259 NR Description: dJ50O24.2.1 (novel protein (translation of cDNA
  misc_feature (3)..(291): Homolog of NCBI NO: 14250403 NR Description: Unknown (protein for MGC:9656) [Homo sapiens]
  misc_feature (3)..(291): Homolog of NCBI NO: 7022323 NR Description: unnamed protein product [Homo sapiens]
  misc_feature (1)..(295): Homolog of NCBI NO: 6324836 NR Description: Protein required for cell viability; Yor262wp
  misc_feature (1)..(294): Homolog of NCBI NO: 27735409 NR Description: Similar to expressed sequence AI838661 [Xenopus
MVFGQVVIGPPGSGKTTYCNGMSQFLSLLGRKVAFVNLDPANDALPYECAINIEDLIKLSDVMSEHSLGPNGGLVYCMDYLEKNIDWLEEKLKPFIEDHYLLFDFPGQVELFFLHSNARSVINKLIKKMDLRLTAVHLIDAHLCCDPGKYVSALLLSLSTMLHLELPHINVLSKIDLIENYGNLAFNLDFYTDVQDLSYLQYHLEQDPRSAKYRKLTKELCDVIDDFGLVNFSTLDIQDKESVGNLVKLIDKSNGYIFSSIDSSAVEFSKIAAAPLDWDYYRTAEVQEKYMKDDEFAQLTSRMQ

SEQ ID NO: 9730 - protein, 283 aa, Zea mays subsp. mays
  peptide (1)..(283): Ceres Seq. ID no. 12416090
  misc_feature (1)..(235): Pfam Name: Conserved hypothetical ATP binding protein Pfam Description: Conserved hypothetical ATP binding protein
  misc_feature (1)..(261): Homolog of NCBI NO: 15242226 NR Description: putative protein; protein id: At5g22370.1 thaliana] >gi|9757818|dbj|BAB08336.1|
  misc_feature (1)..(277): Homolog of NCBI NO: 34871770 NR Description: similar to expressed sequence AI838661 [Rattus
  misc_feature (1)..(283): Homolog of NCBI NO: 19527098 NR Description: expressed sequence AI838661 [Mus musculus]
  misc_feature (1)..(270): Homolog of NCBI NO: 33303753 NR Description: hypothetical protein FLJ10349 [synthetic
  misc_feature (1)..(270): Homolog of NCBI NO: 40254895 NR Description: hypothetical protein FLJ10349 [Homo sapiens] unnamed protein product [Homo sapiens] Hypothetical protein FLJ10349 [Homo sapiens]
  misc_feature (1)..(270): Homolog of NCBI NO: 7981259 NR Description: dJ50O24.2.1 (novel protein (translation of cDNA
  misc_feature (1)..(270): Homolog of NCBI NO: 14250403 NR Description: Unknown (protein for MGC:9656) [Homo sapiens]
  misc_feature (1)..(270): Homolog of NCBI NO: 7022323 NR Description: unnamed protein product [Homo sapiens]
  misc_feature (1)..(274): Homolog of NCBI NO: 6324836 NR Description: Protein required for cell viability; Yor262wp
  misc_feature (1)..(273): Homolog of NCBI NO: 27735409 NR Description: Similar to expressed sequence AI838661 [Xenopus
MSQFLSLLGRKVAFVNLDPANDALPYECAINIEDLIKLSDVMSEHSLGPNGGLVYCMDYLEKNIDWLEEKLKPFIEDHYLLFDFPGQVELFFLHSNARSVINKLIKKMDLRLTAVHLIDAHLCCDPGKYVSALLLSLSTMLHLELPHINVLSKIDLIENYGNLAFNLDFYTDVQDLSYLQYHLEQDPRSAKYRKLTKELCDVIDDFGLVNFSTLDIQDKESVGNLVKLIDKSNGYIFSSIDSSAVEFSKIAAAPLDWDYYRTAEVQEKYMKDDEFAQLTSRMQ

SEQ ID NO: 9731 - protein, 242 aa, Zea mays subsp. mays
  peptide (1)..(242): Ceres Seq. ID no. 12416091
  misc_feature (1)..(194): Pfam Name: Conserved hypothetical ATP binding protein Pfam Description: Conserved hypothetical ATP binding protein
  misc_feature (1)..(220): Homolog of NCBI NO: 15242226 NR Description: putative protein; protein id: At5g22370.1 thaliana] >gi|9757818|dbj|BAB08336.1|
  misc_feature (1)..(236): Homolog of NCBI NO: 34871770 NR Description: similar to expressed sequence AI838661 [Rattus
  misc_feature (1)..(242): Homolog of NCBI NO: 19527098 NR Description: expressed sequence AI838661 [Mus musculus]
  misc_feature (1)..(229): Homolog of NCBI NO: 33303753 NR Description: hypothetical protein FLJ10349 [synthetic
  misc_feature (1)..(229): Homolog of NCBI NO: 40254895 NR Description: hypothetical protein FLJ10349 [Homo sapiens] unnamed protein product [Homo sapiens] Hypothetical protein FLJ10349 [Homo sapiens]
  misc_feature (1)..(229): Homolog of NCBI NO: 7981259 NR Description: dJ50O24.2.1 (novel protein (translation of cDNA
  misc_feature (1)..(229): Homolog of NCBI NO: 14250403 NR Description: Unknown (protein for MGC:9656) [Homo sapiens]
  misc_feature (1)..(229): Homolog of NCBI NO: 7022323 NR Description: unnamed protein product [Homo sapiens]
  misc_feature (1)..(233): Homolog of NCBI NO: 6324836 NR Description: Protein required for cell viability; Yor262wp
  misc_feature (1)..(232): Homolog of NCBI NO: 27735409 NR Description: Similar to expressed sequence AI838661 [Xenopus
MSEHSLGPNGGLVYCMDYLEKNIDWLEEKLKPFIEDHYLLFDFPGQVELFFLHSNARSVINKLIKKMDLRLTAVHLIDAHLCCDPGKYVSALLLSLSTMLHLELPHINVLSKIDLIENYGNLAFNLDFYTDVQDLSYLQYHLEQDPRSAKYRKLTKELCDVIDDFGLVNFSTLDIQDKESVGNLVKLIDKSNGYIFSSIDSSAVEFSKIAAAPLDWDYYRTAEVQEKYMKDDEFAQLTSRMQ

SEQ ID NO: 9732 - DNA, 1986 bp, Zea mays subsp. mays
  misc_feature (1)..(1986): Ceres Seq. ID no. 12358713
  misc_feature: MA Experiment ID: 108528 Result: Up-regulated in Transcription
  misc_feature: MA Experiment 108528 PARAMETER Experiment Name: Zm_Imbibed_Seeds_P Parameter: Age (day) Value: 5 vs. 2
  misc_feature: MA Experiment 108528 PARAMETER Experiment Name: Zm_Imbibed_Seeds_P Parameter: Organism Value: Zea mays
  misc_feature: MA Experiment 108528 PARAMETER Experiment Name: Zm_Imbibed_Seeds_P Parameter: Plant Line Value: 35A19
  misc_feature: MA Experiment 108528 PARAMETER Experiment Name: Zm_Imbibed_Seeds_P Parameter: Tissue Value: Aerial vs. Embryo
  misc_feature: MA Experiment ID: 108530 Result: Up-regulated in Transcription
  misc_feature: MA Experiment 108530 PARAMETER Experiment Name: Zm_Imbibed_Seeds_P Parameter: Age (day) Value: 6 vs. 2
  misc_feature: MA Experiment 108530 PARAMETER Experiment Name: Zm_Imbibed_Seeds_P Parameter: Organism Value: Zea mays
  misc_feature: MA Experiment 108530 PARAMETER Experiment Name: Zm_Imbibed_Seeds_P Parameter: Plant Line Value: 35A19
  misc_feature: MA Experiment 108530 PARAMETER Experiment Name: Zm_Imbibed_Seeds_P Parameter: Tissue Value: Aerial vs. Embryo
  misc_feature: MA Experiment ID: 108535 Result: Down-regulated in Transcription
  misc_feature: MA Experiment 108535 PARAMETER Experiment Name: Zm_Meristem_P Parameter: Age (day) Value: 8
  misc_feature: MA Experiment 108535 PARAMETER Experiment Name: Zm_Meristem_P Parameter: Organism Value: Zea mays
  misc_feature: MA Experiment 108535 PARAMETER Experiment Name: Zm_Meristem_P Parameter: Plant Line Value: 35A19
  misc_feature: MA Experiment 108535 PARAMETER Experiment Name: Zm_Meristem_P Parameter: Tissue Value: Root Meristem vs. Above Root Meristem
  misc_feature: MA Experiment ID: 108536 Result: Down-regulated in Transcription
  misc_feature: MA Experiment 108536 PARAMETER Experiment Name: Zm_Meristem_P Parameter: Age (day) Value: 8
  misc_feature: MA Experiment 108536 PARAMETER Experiment Name: Zm_Meristem_P Parameter: Organism Value: Zea mays
  misc_feature: MA Experiment 108536 PARAMETER Experiment Name: Zm_Meristem_P Parameter: Plant Line Value: 35A19
  misc_feature: MA Experiment 108536 PARAMETER Experiment Name: Zm_Meristem_P Parameter: Tissue Value: Shoot Meristem vs. Above Shoot Meristem
  misc_feature: MA Experiment ID: 108545 Result: Up-regulated in Transcription
  misc_feature: MA Experiment 108545 PARAMETER Experiment Name: Zm_Imbibed_Seeds_P Parameter: Age (day) Value: 3 vs. 2
  misc_feature: MA Experiment 108545 PARAMETER Experiment Name: Zm_Imbibed_Seeds_P Parameter: Organism Value: Zea mays
  misc_feature: MA Experiment 108545 PARAMETER Experiment Name: Zm_Imbibed_Seeds_P Parameter: Plant Line Value: 35A19
  misc_feature: MA Experiment 108545 PARAMETER Experiment Name: Zm_Imbibed_Seeds_P Parameter: Tissue Value: Aerial vs. Embryo
  misc_feature: MA Experiment ID: 108546 Result: Down-regulated in Transcription
  misc_feature: MA Experiment 108546 PARAMETER Experiment Name: Zm_Imbibed_Seeds_P Parameter: Age (day) Value: 3 vs. 2
  misc_feature: MA Experiment 108546 PARAMETER Experiment Name: Zm_Imbibed_Seeds_P Parameter: Organism Value: Zea mays
  misc_feature: MA Experiment 108546 PARAMETER Experiment Name: Zm_Imbibed_Seeds_P Parameter: Plant Line Value: 35A19
  misc_feature: MA Experiment 108546 PARAMETER Experiment Name: Zm_Imbibed_Seeds_P Parameter: Tissue Value: Roots vs. Embryo
  misc_feature: MA Experiment ID: 108547 Result: Up-regulated in Transcription
  misc_feature: MA Experiment 108547 PARAMETER Experiment Name: Zm_Imbibed_Seeds_P Parameter: Age (day) Value: 4 vs. 2
  misc_feature: MA Experiment 108547 PARAMETER Experiment Name: Zm_Imbibed_Seeds_P Parameter: Organism Value: Zea mays
  misc_feature: MA Experiment 108547 PARAMETER Experiment Name: Zm_Imbibed_Seeds_P Parameter: Plant Line Value: 35A19
  misc_feature: MA Experiment 108547 PARAMETER Experiment Name: Zm_Imbibed_Seeds_P Parameter: Tissue Value: Aerial vs. Embryo
  misc_feature: MA Experiment ID: 108556 Result: Down-regulated in Transcription
  misc_feature: MA Experiment 108556 PARAMETER Experiment Name: Zm_Drought_P Parameter: Age (day) Value: 9
  misc_feature: MA Experiment 108556 PARAMETER Experiment Name: Zm_Drought_P Parameter: Organism Value: Zea mays
  misc_feature: MA Experiment 108556 PARAMETER Experiment Name: Zm_Drought_P Parameter: Plant Line Value: 35A19
  misc_feature: MA Experiment 108556 PARAMETER Experiment Name: Zm_Drought_P Parameter: Timepoint (hr) Value: 24
  misc_feature: MA Experiment 108556 PARAMETER Experiment Name: Zm_Drought_P Parameter: Tissue Value: Aerial
  misc_feature: MA Experiment 108556 PARAMETER Experiment Name: Zm_Drought_P Parameter: Treatment Value: Drought vs. No Drought
  misc_feature: MA Experiment ID: 20000534 Result: Down-regulated in Transcription
  misc_feature: MA Experiment 20000534 PARAMETER Experiment Name: Zm_Hybrid_Pollen_P Parameter: Age (day) Value: 8
  misc_feature: MA Experiment 20000534 PARAMETER Experiment Name: Zm_Hybrid_Pollen_P Parameter: Organism Value: Zea mays
  misc_feature: MA Experiment 20000534 PARAMETER Experiment Name: Zm_Hybrid_Pollen_P Parameter: Plant Line Value: 35A19
  misc_feature: MA Experiment 20000534 PARAMETER Experiment Name: Zm_Hybrid_Pollen_P Parameter: Tissue Value: Pollen vs. Aerial
  misc_feature: MA Experiment ID: 20000535 Result: Down-regulated in Transcription
  misc_feature: MA Experiment 20000535 PARAMETER Experiment Name: Zm_Hybrid_Seed_Dev_P Parameter: DAP Value: 30 vs. 12
  misc_feature: MA Experiment 20000535 PARAMETER Experiment Name: Zm_Hybrid_Seed_Dev_P Parameter: Organism Value: Zea mays
  misc_feature: MA Experiment 20000535 PARAMETER Experiment Name: Zm_Hybrid_Seed_Dev_P Parameter: Plant Line Value: 35A19
  misc_feature: MA Experiment 20000535 PARAMETER Experiment Name: Zm_Hybrid_Seed_Dev_P Parameter: Tissue Value: Embryo vs. Unfert Floret
  misc_feature: MA Experiment ID: 20001608 Result: Down-regulated in Transcription
  misc_feature: MA Experiment 20001608 PARAMETER Experiment Name: Zm_50ppm_KNO3_L-to-H_P Parameter: Age (day) Value: 21
  misc_feature: MA Experiment 20001608 PARAMETER Experiment Name: Zm_50ppm_KNO3_L-to-H_P Parameter: Organism Value: Zea mays
  misc_feature: MA Experiment 20001608 PARAMETER Experiment Name: Zm_50ppm_KNO3_L-to-H_P Parameter: Plant Line Value: 35A19
  misc_feature: MA Experiment 20001608 PARAMETER Experiment Name: Zm_50ppm_KNO3_L-to-H_P Parameter: Timepoint (hr) Value: 48
  misc_feature: MA Experiment 20001608 PARAMETER Experiment Name: Zm_50ppm_KNO3_L-to-H_P Parameter: Tissue Value: Shoots
  misc_feature: MA Experiment 20001608 PARAMETER Experiment Name: Zm_50ppm_KNO3_L-to-H_P Parameter: Treatment Value: 50ppm KNO3 vs. 50ppm KCl
attgggtgcagtcgagtagttgccacctaaccgtggcggaggcgcagtgctgttgcgagatgtggctgtgatcgagcgagataactaaaagcctccccacataaatgcaagggcgacgagacggcaagcaagcggacgcgaacaaacccccttattccatagcgagcgcgagcagcggcgccgggaggactgctgcgatggggggagacgccagcaccatcgaggggggcccgctcccgcatctcggcggccggccggcctcccgcgtgcccgacaccccgctggtgcgcacggcgggggacgccgcgcgcatggtctgggacgagtccaagcgcctctggggcatcgggctgcccatcggcgtgggcatgcctgagcatgtacgccatcagctccatcacccagatattcatcggccacctcggcaacctcccgctggccgccgcctccatcggcctctccgtgttcgccaccttcgcgctcggcttcctcctcggcatgggcagcgcgctcgagacgctctgcggccaggccttcggcgccggcgaggtcgccatgctcggcgtctacctgcagcggtcttggatcatcctcgtcgccgcctgcgtcgtcatgacgcccgtcttcgtcttcgccgagtcgctgctcctgctcatcggccaggacgccgacgtcgcgcgggagtccgccaggttcgccacctacatcgtcccctccatctacgccatgggcatcaacttcgccgccagcaagttcctccaggcgcagagcaaggtcaccgtacccgcctggatcggcttcggggcgctcctcgcctgtgccctcctcaactacctgttcgtcagcgtgctcggctggggcctccccggcgccgccgccgcctacgacatcgcgcactggatcatcgcgctcggccaggtcgtctacatcatcggatggtgcaaggacggatggaaaggatggtccgtagccgccttccacgaaatctggccattcgtcaggctctccctcgagtccgccgtcatgctctgcctcgaggtatggtacatgagcctgatcaccgtgctcaccggcgacctggaggacgcccagattgccgtggactcactaggcatatgcatgaacataaacggatgggaggccatgatcttcatcggcctcaatgccgctatcagtgtccgagtctccaacgagcttggctccggccgtccgagggccgcgtggaacgccgtcatggtcgtcgtcggcgaggcgctggtgatcgggattctgtgcatggcactcatcctcatcttcagagacagcttctccatcattttcaccagcgacaccaccctgcagcgagccgtcgccaggatcgccggcctgctcggcctcaccatggtgctcaacagcgtgcagcccgtggtttcaggggtcgcggttgggggcggatggcagggcctcgtcgcctacatcaacctcggctgctactatatcttcggcctgcccctgggctacttgctcggatacaagttcagctttggagttggggggatttggtccggcatgctttgtggtatcacccttcagacgctcatcttgctaggtgtggtttggaggacagattggaaagcagaggccgcacaagcttcaggccgtgtgcaaaagtggggcggcaaaggcaccgatgaagtcaagcctctcctggaatagaattagtgtagtactatcacgcacgaagctcgtttcatttgaataaacaactgggcaatacgccttatccctttcagaagcacagctcatttgctttcccatcgaatctgatagcttccctttcccctcctccgtgtagttaaattgatgtctctgtatgaacactgtttgaggcgactagtatgaaccctgtttgcggcgactagacgtattgaacatactttttttttcttccagttgactcagcatgacttgaacagtctcaaattgtgtgtaaaggatttactcgct

SEQ ID NO: 9733 - protein, 522 aa, Zea mays subsp. mays
  peptide (1)..(522): Ceres Seq. ID no. 12358714
MQGRRDGKQADANKPPYSIASASSGAGRTAAMGGDASTIEGGPLPHLGGRPASRVPDTPLVRTAGDAARMVWDESKRLWGIGLPIGVGMPEHVRHQLHHPDIHRPPRQPPAGRRLHRPLRVRHLRARLPPRHGQRARDALRPGLRRRRGRHARRLPAAVLDHPRRRLRRHDARLRLRRVAAPAHRPGRRRRAGVRQVRHLHRPLHLRHGHQLRRQQVPPGAEQGHRTRLDRLRGAPRLCPPQLPVRQRARLGPPRRRRRLRHRALDHRARPGRLHHRMVQGRMERMVRSRLPRNLAIRQALPRVRRHALPRGMVHEPDHRAHRRPGGRPDCRGLTRHMHEHKRMGGHDLHRPQCRYQCPSLQRAWLRPSEGRVERRHGRRRRGAGDRDSVHGTHPHLQRQLLHHFHQRHHPAASRRQDRRPARPHHGAQQRAARGFRGRGWGRMAGPRRLHQPRLLLYLRPAPGLLARIQVQLWSWGDLVRHALWYHPSDAHLARCGLEDRLESRGRTSFRPCAKVGRQRHR

SEQ ID NO: 9734 - protein, 491 aa, Zea mays subsp. mays
  peptide (1)..(491): Ceres Seq. ID no. 12358715
MGGDASTIEGGPLPHLGGRPASRVPDTPLVRTAGDAARMVWDESKRLWGIGLPIGVGMPEHVRHQLHHPDIHRPPRQPPAGRRLHRPLRVRHLRARLPPRHGQRARDALRPGLRRRRGRHARRLPAAVLDHPRRRLRRHDARLRLRRVAAPAHRPGRRRRAGVRQVRHLHRPLHLRHGHQLRRQQVPPGAEQGHRTRLDRLRGAPRLCPPQLPVRQRARLGPPRRRRRLRHRALDHRARPGRLHHRMVQGRMERMVRSRLPRNLAIRQALPRVRRHALPRGMVHEPDHRAHRRPGGRPDCRGLTRHMHEHKRMGGHDLHRPQCRYQCPSLQRAWLRPSEGRVERRHGRRRRGAGDRDSVHGTHPHLQRQLLHHFHQRHHPAASRRQDRRPARPHHGAQQRAARGFRGRGWGRMAGPRRLHQPRLLLYLRPAPGLLARIQVQLWSWGDLVRHALWYHPSDAHLARCGLEDRLESRGRTSFRPCAKVGRQRHR

SEQ ID NO: 9735 - protein, 453 aa, Zea mays subsp. mays
  peptide (1)..(453): Ceres Seq. ID no. 12358716
MVWDESKRLWGIGLPIGVGMPEHVRHQLHHPDIHRPPRQPPAGRRLHRPLRVRHLRARLPPRHGQRARDALRPGLRRRRGRHARRLPAAVLDHPRRRLRRHDARLRLRRVAAPAHRPGRRRRAGVRQVRHLHRPLHLRHGHQLRRQQVPPGAEQGHRTRLDRLRGAPRLCPPQLPVRQRARLGPPRRRRRLRHRALDHRARPGRLHHRMVQGRMERMVRSRLPRNLAIRQALPRVRRHALPRGMVHEPDHRAHRRPGGRPDCRGLTRHMHEHKRMGGHDLHRPQCRYQCPSLQRAWLRPSEGRVERRHGRRRRGAGDRDSVHGTHPHLQRQLLHHFHQRHHPAASRRQDRRPARPHHGAQQRAARGFRGRGWGRMAGPRRLHQPRLLLYLRPAPGLLARIQVQLWSWGDLVRHALWYHPSDAHLARCGLEDRLESRGRTSFRPCAKVGRQRHR

SEQ ID NO: 9736 - protein, 438 aa, Zea mays subsp. mays
  peptide (1)..(438): Ceres Seq. ID no. 12358717
  misc_feature (1)..(430): Homolog of NCBI NO: 30686958 NR Description: MATE efflux protein family [Arabidopsis thaliana]
  misc_feature (1)..(434): Homolog of NCBI NO: 33867697 NR Description: putative anthocyanin permease [Lycopersicon
  misc_feature (22)..(436): Homolog of NCBI NO: 28393585 NR Description: unknown protein [Arabidopsis thaliana]
  misc_feature (1)..(246): Homolog of NCBI NO: 30678614 NR Description: MATE efflux protein family [Arabidopsis thaliana]
  misc_feature (264)..(436): Homolog of NCBI NO: 30678614 NR Description: MATE efflux protein family [Arabidopsis thaliana]
  misc_feature (1)..(384): Homolog of NCBI NO: 7486770 NR Description: hypothetical protein L73G19.20 - Arabidopsis >gi|4914456|emb|CAB43695.1| putative protein [Arabidopsis >gi|7269414|emb|CAB81374.1| putative protein [Arabidopsis
  misc_feature (1)..(246): Homolog of NCBI NO: 7485264 NR Description: hypothetical protein A_IG005I10.20 - Arabidopsis >gi|2252840|gb|AAB62839.1| contains regions of similarity to influenzae permease (SP:P38767) [Arabidopsis thaliana]
  misc_feature (264)..(414): Homolog of NCBI NO: 7485264 NR Description: hypothetical protein A_IG005I10.20 - Arabidopsis >gi|2252840|gb|AAB62839.1| contains regions of similarity to influenzae permease (SP:P38767) [Arabidopsis thaliana]
  misc_feature (1)..(427): Homolog of NCBI NO: 15220246 NR Description: unknown protein; protein id: At1g47530.1, by cDNA: gi_16604504 [Arabidopsis thaliana]
  misc_feature (1)..(427): Homolog of NCBI NO: 16604505 NR Description: At1g47530/F16N3_20 [Arabidopsis thaliana]
MYAISSITQIFIGHLGNLPLAAASIGLSVFATFALGFLLGMGSALETLCGQAFGAGEVAMLGVYLQRSWIILVAACVVMTPVFVFAESLLLLIGQDADVARESARFATYIVPSIYAMGINFAASKFLQAQSKVTVPAWIGFGALLACALLNYLFVSVLGWGLPGAAAAYDIAHWIIALGQVVYIIGWCKDGWKGWSVAAFHEIWPFVRLSLESAVMLCLEVWYMSLITVLTGDLEDAQIAVDSLGICMNINGWEAMIFIGLNAAISVRVSNELGSGRPRAAWNAVMVVVGEALVIGILCMALILIFRDSFSIIFTSDTTLQRAVARIAGLLGLTMVLNSVQPVVSGVAVGGGWQGLVAYINLGCYYIFGLPLGYLLGYKFSFGVGGIWSGMLCGITLQTLILLGVVWRTDWKAEAAQASGRVQKWGGKGTDEVKPLLE

SEQ ID NO: 9737 - DNA, 1837 bp, Zea mays subsp. mays
  misc_feature (1)..(1837): Ceres Seq. ID no. 12416371
  misc_feature: MA Experiment ID: 108556 Result: Down-regulated in Transcription
  misc_feature: MA Experiment 108556 PARAMETER Experiment Name: Zm_Drought_P Parameter: Age (day) Value: 9
  misc_feature: MA Experiment 108556 PARAMETER Experiment Name: Zm_Drought_P Parameter: Organism Value: Zea mays
  misc_feature: MA Experiment 108556 PARAMETER Experiment Name: Zm_Drought_P Parameter: Plant Line Value: 35A19
  misc_feature: MA Experiment 108556 PARAMETER Experiment Name: Zm_Drought_P Parameter: Timepoint (hr) Value: 24
  misc_feature: MA Experiment 108556 PARAMETER Experiment Name: Zm_Drought_P Parameter: Tissue Value: Aerial
  misc_feature: MA Experiment 108556 PARAMETER Experiment Name: Zm_Drought_P Parameter: Treatment Value: Drought vs. No Drought
  misc_feature: MA Experiment ID: 20000480 Result: Down-regulated in Transcription
  misc_feature: MA Experiment 20000480 PARAMETER Experiment Name: Zm_Drought_P Parameter: Age (day) Value: 11
  misc_feature: MA Experiment 20000480 PARAMETER Experiment Name: Zm_Drought_P Parameter: Organism Value: Zea mays
  misc_feature: MA Experiment 20000480 PARAMETER Experiment Name: Zm_Drought_P Parameter: Plant Line Value: 35A19
  misc_feature: MA Experiment 20000480 PARAMETER Experiment Name: Zm_Drought_P Parameter: Timepoint (hr) Value: 72
  misc_feature: MA Experiment 20000480 PARAMETER Experiment Name: Zm_Drought_P Parameter: Tissue Value: Aerial
  misc_feature: MA Experiment 20000480 PARAMETER Experiment Name: Zm_Drought_P Parameter: Treatment Value: Drought vs. No Drought
agtcccctcatctctcgtctctcctcctgcctcctcgtcctcgccttcccattcccccgccccaaacccccagctcgattcccagtcgtctcgccccgtgatgtcgccggctgctggtggccccgcgcccgcgccaggccagcgcaatcagcggccgccgttccgcaggcgatcgcggtaccgccggagtccggccgttcggcgcccgaggctcccgcangatccaccggcccancccgagggggccgatcccaccaatgcggcggcaaggaagacaacgtggagcgtgctggcgcagacccccgccgccgcggcggaggcgaccccagagggcggcggcatcatcggcggggacgcctcgtggccggcgctcgtggagtcgacgcgcgcgtgccccaagtcgggctcgtccgactccctcaatgccctctccgatgtttccggcccgcctccgcaggaggatacaattgctgcttcatcggtacttccacatccagttgtgggggctaatccgattcccactgcccaaaaccctacctccatacctcctcgcacgcctgcggcttcctctcagcagaacggtgccacaacccagacatttccagttcggcgcagtggcaaccgtggaaatggtagcaatggtggcgtcagggctgccaatagtagcggaggtgacgggagcagtggcagtggtggtgatggtaactggaatgatggaagccttggtactgacagcggttgcaacagcagcaatggcgatggtcccatcaattnggatgataatgtccctggcactcgttgtgcccgtgggaatgacaatgacagcngcagaaatccttctggcaatggccactggaaccacaacatacgaggtggtggtggtggtggtgatgggaacaatagaaatagcagtggtagcagcaaccactggaataataatccccgaaatagtagtagtagcaatggcgttggaggtcgtggtggttaccgggggtcgccgtgaccatgagagagggggctaatttctcccctaggaacttcccaagagttccggtaatgccatatcaacagcagcagcagcctggcatctaccagcctgggccctttcaccgaccaccaccaccggctgcccatttcatggtgccacagcatttttatgtcccatcatttccctaccttgctgatgtgcaaccttatcctgtctacctcccaccagtagaacagtttcagaacatgcatcttcttcggccacccatgcagcctgcttgggttcctcctcatcaggatcaaccaaatctccaagatagtattaggaatcagatagagttctattttagcacaaataatctatgccatgacacattcttgaggagacatatgaacaatcaaggatgggtacctattgacctaatcttagggttcaaccggatgagggcgtttacaggtttggtggacaccaactacatactagatgctatccgtggttctgagttattggaagtgcagggagataatgtccggaggcgcaatgattggatggaatggctgcttcattaaggccgtccactagtaaatcagatgccaagatgcagctgcatgccatattgggggaactgaatgaatagaagtcttgatcacggcgtgatggactgatgtacagcgagcgggtctattggaatcgggatgatttttgtttgacgtgatggctgcacgtgaaggcacattattcaaagggaaaataattttacttagggctagcaaatgtttttatggcagtctgtatagttgtccgaaaagaagtgaccaccctgccttctcattatggattattattatt

SEQ ID NO: 9738 - protein, 333 aa, Zea mays subsp. mays
  peptide (1)..(333): Ceres Seq. ID no. 12416372
  misc_feature (141)..(240): Pfam Name: GRASP55/65 family Pfam Description: GRASP55/65 family
  misc_feature (7)..(235): Homolog of NCBI NO: 18419738 NR Description: putative protein; protein id: At4g35890.1, by cDNA: gi_13877888 [Arabidopsis thaliana] unknown protein [Arabidopsis thaliana]
  misc_feature (7)..(235): Homolog of NCBI NO: 7486390 NR Description: hypothetical protein F4B14.160 - Arabidopsis >gi|3036793|emb|CAA18483.1| putative protein [Arabidopsis >gi|3805855|emb|CAA21475.1| putative protein [Arabidopsis
  misc_feature (73)..(73): Xaa is any aa, unknown or other
  misc_feature (78)..(78): Xaa is any aa, unknown or other
  misc_feature (258)..(258): Xaa is any aa, unknown or other
  misc_feature (276)..(276): Xaa is any aa, unknown or other
VPSSLVSPPASSSSPSHSPAPNPQLDSQSSRPVMSPAAGGPAPAPGQRNQRPPFRRRSRYRRSPAVRRPRLPXDPPAXPEGADPTNAAARKTTWSVLAQTPAAAAEATPEGGGIIGGDASWPALVESTRACPKSGSSDSLNALSDVSGPPPQEDTIAASSVLPHPVVGANPIPTAQNPTSIPPRTPAASSQQNGATTQTFPVRRSGNRGNGSNGGVRAANSSGGDGSSGSGGDGNWNDGSLGTDSGCNSSNGDGPINXDDNVPGTRCARGNDNDSXRNPSGNGHWNHNIRGGGGGGDGNNRNSSGSSNHWNNNPRNSSSSNGVGGRGGYRGSP

SEQ ID NO: 9739 - protein, 300 aa, Zea mays subsp. mays
  peptide (1)..(300): Ceres Seq. ID no. 12416373
  misc_feature (108)..(207): Pfam Name: GRASP55/65 family Pfam Description: GRASP55/65 family
  misc_feature (1)..(202): Homolog of NCBI NO: 18419738 NR Description: putative protein; protein id: At4g35890.1, by cDNA: gi_13877888 [Arabidopsis thaliana] unknown protein [Arabidopsis thaliana]
  misc_feature (1)..(202): Homolog of NCBI NO: 7486390 NR Description: hypothetical protein F4B14.160 - Arabidopsis >gi|3036793|emb|CAA18483.1| putative protein [Arabidopsis >gi|3805855|emb|CAA21475.1| putative protein [Arabidopsis
  misc_feature (40)..(40): Xaa is any aa, unknown or other
  misc_feature (45)..(45): Xaa is any aa, unknown or other
  misc_feature (225)..(225): Xaa is any aa, unknown or other
  misc_feature (243)..(243): Xaa is any aa, unknown or other
MSPAAGGPAPAPGQRNQRPPFRRRSRYRRSPAVRRPRLPXDPPAXPEGADPTNAAARKTTWSVLAQTPAAAAEATPEGGGIIGGDASWPALVESTRACPKSGSSDSLNALSDVSGPPPQEDTIAASSVLPHPVVGANPIPTAQNPTSIPPRTPAASSQQNGATTQTFPVRRSGNRGNGSNGGVRAANSSGGDGSSGSGGDGNWNDGSLGTDSGCNSSNGDGPINXDDNVPGTRCARGNDNDSXRNPSGNGHWNHNIRGGGGGGDGNNRNSSGSSNHWNNNPRNSSSSNGVGGRGGYRGSP

SEQ ID NO: 9740 - protein, 254 aa, Zea mays subsp. mays
  peptide (1)..(254): Ceres Seq. ID no. 12416374
  misc_feature (173)..(173): Xaa is any aa, unknown or other
  misc_feature (190)..(190): Xaa is any aa, unknown or other
MRRQGRQRGACWRRPPPPRRRRPQRAAASSAGTPRGRRSWSRRARAPSRARPTPSMPSPMFPARLRRRIQLLLHRYFHIQLWGLIRFPLPKTLPPYLLARLRLPLSRTVPQPRHFQFGAVATVEMVAMVASGLPIVAEVTGAVAVVVMVTGMMEALVLTAVATAAMAMVPSIXMIMSLALVVPVGMTMTXAEILLAMATGTTTYEVVVVVVMGTIEIAVVAATTGIIIPEIVVVAMALEVVVVTGGRRDHERGG

SEQ ID NO: 9741 - DNA, 1342 bp, Zea mays subsp. mays
  misc_feature (1)..(1342): Ceres Seq. ID no. 13493226
  misc_feature: MA Experiment ID: 108527 Result: Up-regulated in Transcription
  misc_feature: MA Experiment 108527 PARAMETER Experiment Name: Zm_5mM_NO_P Parameter: Age (day) Value: 8
  misc_feature: MA Experiment 108527 PARAMETER Experiment Name: Zm_5mM_NO_P Parameter: Organism Value: Zea mays
  misc_feature: MA Experiment 108527 PARAMETER Experiment Name: Zm_5mM_NO_P Parameter: Plant Line Value: 35A19
  misc_feature: MA Experiment 108527 PARAMETER Experiment Name: Zm_5mM_NO_P Parameter: Timepoint (hr) Value: 6
  misc_feature: MA Experiment 108527 PARAMETER Experiment Name: Zm_5mM_NO_P Parameter: Tissue Value: Aerial
  misc_feature: MA Experiment 108527 PARAMETER Experiment Name: Zm_5mM_NO_P Parameter: Treatment Value: 5mM NO vs. No Treatment
  misc_feature: MA Experiment ID: 108543 Result: Down-regulated in Transcription
  misc_feature: MA Experiment ID: 20000477 Result: Up-regulated in Transcription
  misc_feature: MA Experiment 20000477 PARAMETER Experiment Name: Zm_5mM_SA_P Parameter: Age (day) Value: 10
  misc_feature: MA Experiment 20000477 PARAMETER Experiment Name: Zm_5mM_SA_P Parameter: Organism Value: Zea mays
  misc_feature: MA Experiment 20000477 PARAMETER Experiment Name: Zm_5mM_SA_P Parameter: Plant Line Value: 35A19
  misc_feature: MA Experiment 20000477 PARAMETER Experiment Name: Zm_5mM_SA_P Parameter: Timepoint (hr) Value: 48
  misc_feature: MA Experiment 20000477 PARAMETER Experiment Name: Zm_5mM_SA_P Parameter: Tissue Value: Aerial
  misc_feature: MA Experiment 20000477 PARAMETER Experiment Name: Zm_5mM_SA_P Parameter: Treatment Value: 5mM SA vs. No Treatment
  misc_feature: MA Experiment ID: 20000478 Result: Up-regulated in Transcription
  misc_feature: MA Experiment 20000478 PARAMETER Experiment Name: Zm_5mM_SA_P Parameter: Age (day) Value: 11
  misc_feature: MA Experiment 20000478 PARAMETER Experiment Name: Zm_5mM_SA_P Parameter: Organism Value: Zea mays
  misc_feature: MA Experiment 20000478 PARAMETER Experiment Name: Zm_5mM_SA_P Parameter: Plant Line Value: 35A19
  misc_feature: MA Experiment 20000478 PARAMETER Experiment Name: Zm_5mM_SA_P Parameter: Timepoint (hr) Value: 72
  misc_feature: MA Experiment 20000478 PARAMETER Experiment Name: Zm_5mM_SA_P Parameter: Tissue Value: Aerial
  misc_feature: MA Experiment 20000478 PARAMETER Experiment Name: Zm_5mM_SA_P Parameter: Treatment Value: 5mM SA vs. No Treatment
  misc_feature: MA Experiment ID: 20000535 Result: Down-regulated in Transcription
  misc_feature: MA Experiment 20000535 PARAMETER Experiment Name: Zm_Hybrid_Seed_Dev_P Parameter: DAP Value: 30 vs. 12
  misc_feature: MA Experiment 20000535 PARAMETER Experiment Name: Zm_Hybrid_Seed_Dev_P Parameter: Organism Value: Zea mays
  misc_feature: MA Experiment 20000535 PARAMETER Experiment Name: Zm_Hybrid_Seed_Dev_P Parameter: Plant Line Value: 35A19
  misc_feature: MA Experiment 20000535 PARAMETER Experiment Name: Zm_Hybrid_Seed_Dev_P Parameter: Tissue Value: Embryo vs. Unfert Floret
aagctagctagcagctgtaacttccaccaccagtactcagtactcacatcaaacacacacgaaccatcaataacccctctgcaggctgagggaaacgtgaacacaccatggcgaggccgccgtgctgcgacaaggagggcgtcaagaagggcccgtggacgccggaggaggacctcgtcctcgtctcctacatccaggaccacggccccggcaactggcgcgccgtccccaccagaaccgggctgatgcggtgcagcaagagctgccggcttcggtggaccaactacctccggccgggcatcaggcgcggcaacttcacggagcaggaggagaagctcatcgtccacctccaggccctcctcggcaacaggtgggcggccatcgcgtcgtacctgccggagcggacggacaacgacgtcaagaactactggaacacgcacctcaagcgcaagctgcaggccggcagcggcgacggcgacggcgacggggcggccaagccgccggcgcacaggccgccgccgtccaactccaaggggcagtgggagaggaggctgcagacggacatcaacctggcgcgccgcgcgctccgcgaggcgctcaccccgctcggcgacctcaagccgcagccgcagccgcagccgcagccgcagcgcgacggcgctggcgtgggcatcgtcggcggtgacagcccggcggcctcgagcttgtcgtcgcagtgctccccgccgccagcgcctgccgccttggggacgtacgttctcaccgcggacaacgtctcccggatgctggacggatgggccggcttgaactggaagcgccgcggcggggctccgggcacgcccggcggcgccgagaccgcgtccaccgggtcctcctcggaggtgtcgtacggcggtggcaccgccgtcgtcgcgccggccgctggtggcccggtgttcgagtacgagacgaagccgccggccgctccgttccagctgatgatgccgctgtctgcgatcgagtcgtggctgttcgacgacgacacccacttccaccgtcctgtccagagcgccagcttgctggacgccgcccccatggattattacctgttgtagctagcgtgtccagcagctgatccagaccaagctaatccgttcaagcaaggaagtcggtggctgattagtcggctagctagctacctgtttctaaagttgttagttttcattatatttagccttttctcttctaggtgggtaaaagctgagtgcgtacttccccttgtgcaagctgcataatgttgcgtgggaaaataacatatatagctcttgagaccactaacatatatatagcagatagttttwcc

SEQ ID NO: 9742 - protein, 328 aa, Zea mays subsp. mays
  peptide (1)..(328): Ceres Seq. ID no. 15222902
  misc_feature (14)..(61): Pfam Name: Myb-like DNA-binding domain Pfam Description: Myb-like DNA-binding domain
  misc_feature (1)..(278): Homolog of NCBI NO: 30697680 NR Description: MYB96 transcription factor-related protein thaliana] >gi|5823335|gb|AAD53106.1|AF176001_1 putative
  misc_feature (1)..(304): Homolog of NCBI NO: 15228529 NR Description: myb family transcription factor [Arabidopsis
  misc_feature (1)..(199): Homolog of NCBI NO: 19072764 NR Description: typical P-type R2R3 Myb protein [Oryza sativa]
  misc_feature (1)..(325): Homolog of NCBI NO: 34913210 NR Description: contains EST C28158(C60218)~myb-like protein
  misc_feature (1)..(307): Homolog of NCBI NO: 3941528 NR Description: putative transcription factor [Arabidopsis
  misc_feature (1)..(278): Homolog of NCBI NO: 30697683 NR Description: MYB96 transcription factor-related protein
  misc_feature (1)..(307): Homolog of NCBI NO: 15228203 NR Description: transcription factor MYB94 -related [Arabidopsis
  misc_feature (1)..(304): Homolog of NCBI NO: 11273960 NR Description: myb-related transcription factor MYB30 [imported] Arabidopsis thaliana >gi|3941438|gb|AAC83595.1| putative
  misc_feature (1)..(304): Homolog of NCBI NO: 21592842 NR Description: MYB family transcription factor (hsr1), putative
  misc_feature (1)..(213): Homolog of NCBI NO: 18071376 NR Description: putative transcription factor [Oryza sativa]
MARPPCCDKEGVKKGPWTPEEDLVLVSYIQDHGPGNWRAVPTRTGLMRCSKSCRLRWTNYLRPGIRRGNFTEQEEKLIVHLQALLGNRWAAIASYLPERTDNDVKNYWNTHLKRKLQAGSGDGDGDGAAKPPAHRPPPSNSKGQWERRLQTDINLARRALREALTPLGDLKPQPQPQPQPQRDGAGVGIVGGDSPAASSLSSQCSPPPAPAALGTYVLTADNVSRMLDGWAGLNWKRRGGAPGTPGGAETASTGSSSEVSYGGGTAVVAPAAGGPVFEYETKPPAAPFQLMMPLSAIESWLFDDDTHFHRPVQSASLLDAAPMDYYLL

SEQ ID NO: 9743 - protein, 282 aa, Zea mays subsp. mays
  peptide (1)..(282): Ceres Seq. ID no. 15222903
  misc_feature (1)..(279): Homolog of NCBI NO: 34913210 NR Description: contains EST C28158(C60218)~myb-like protein
  misc_feature (1)..(261): Homolog of NCBI NO: 15228203 NR Description: transcription factor MYB94 -related [Arabidopsis
  misc_feature (1)..(261): Homolog of NCBI NO: 3941528 NR Description: putative transcription factor [Arabidopsis
  misc_feature (1)..(232): Homolog of NCBI NO: 30697683 NR Description: MYB96 transcription factor-related protein
  misc_feature (1)..(232): Homolog of NCBI NO: 30697680 NR Description: MYB96 transcription factor-related protein thaliana] >gi|5823335|gb|AAD53106.1|AF176001_1 putative
  misc_feature (1)..(258): Homolog of NCBI NO: 15228529 NR Description: myb family transcription factor [Arabidopsis
  misc_feature (1)..(153): Homolog of NCBI NO: 19072764 NR Description: typical P-type R2R3 Myb protein [Oryza sativa]
  misc_feature (1)..(258): Homolog of NCBI NO: 11273960 NR Description: myb-related transcription factor MYB30 [imported] Arabidopsis thaliana >gi|3941438|gb|AAC83595.1| putative
  misc_feature (1)..(258): Homolog of NCBI NO: 21592842 NR Description: MYB family transcription factor (hsr1), putative
  misc_feature (1)..(167): Homolog of NCBI NO: 18071376 NR Description: putative transcription factor [Oryza sativa]
MRCSKSCRLRWTNYLRPGIRRGNFTEQEEKLIVHLQALLGNRWAAIASYLPERTDNDVKNYWNTHLKRKLQAGSGDGDGDGAAKPPAHRPPPSNSKGQWERRLQTDINLARRALREALTPLGDLKPQPQPQPQPQRDGAGVGIVGGDSPAASSLSSQCSPPPAPAALGTYVLTADNVSRMLDGWAGLNWKRRGGAPGTPGGAETASTGSSSEVSYGGGTAVVAPAAGGPVFEYETKPPAAPFQLMMPLSAIESWLFDDDTHFHRPVQSASLLDAAPMDYYLL

SEQ ID NO: 9744 - DNA, 1297 bp, Zea mays subsp. mays
  misc_feature (1)..(1297): Ceres Seq. ID no. 13493135
  misc_feature: MA Experiment ID: 108522 Result: Up-regulated in Transcription
  misc_feature: MA Experiment 108522 PARAMETER Experiment Name: Zm_42deg_Heat_P Parameter: Age (day) Value: 8
  misc_feature: MA Experiment 108522 PARAMETER Experiment Name: Zm_42deg_Heat_P Parameter: Organism Value: Zea mays
  misc_feature: MA Experiment 108522 PARAMETER Experiment Name: Zm_42deg_Heat_P Parameter: Plant Line Value: 35A19
  misc_feature: MA Experiment 108522 PARAMETER Experiment Name: Zm_42deg_Heat_P Parameter: Temperature (deg C) Value: 42 vs. 22
  misc_feature: MA Experiment 108522 PARAMETER Experiment Name: Zm_42deg_Heat_P Parameter: Timepoint (hr) Value: 1
  misc_feature: MA Experiment 108522 PARAMETER Experiment Name: Zm_42deg_Heat_P Parameter: Tissue Value: Aerial
  misc_feature: MA Experiment ID: 108528 Result: Down-regulated in Transcription
  misc_feature: MA Experiment 108528 PARAMETER Experiment Name: Zm_Imbibed_Seeds_P Parameter: Age (day) Value: 5 vs. 2
  misc_feature: MA Experiment 108528 PARAMETER Experiment Name: Zm_Imbibed_Seeds_P Parameter: Organism Value: Zea mays
  misc_feature: MA Experiment 108528 PARAMETER Experiment Name: Zm_Imbibed_Seeds_P Parameter: Plant Line Value: 35A19
  misc_feature: MA Experiment 108528 PARAMETER Experiment Name: Zm_Imbibed_Seeds_P Parameter: Tissue Value: Aerial vs. Embryo
  misc_feature: MA Experiment ID: 108530 Result: Down-regulated in Transcription
  misc_feature: MA Experiment 108530 PARAMETER Experiment Name: Zm_Imbibed_Seeds_P Parameter: Age (day) Value: 6 vs. 2
  misc_feature: MA Experiment 108530 PARAMETER Experiment Name: Zm_Imbibed_Seeds_P Parameter: Organism Value: Zea mays
  misc_feature: MA Experiment 108530 PARAMETER Experiment Name: Zm_Imbibed_Seeds_P Parameter: Plant Line Value: 35A19
  misc_feature: MA Experiment 108530 PARAMETER Experiment Name: Zm_Imbibed_Seeds_P Parameter: Tissue Value: Aerial vs. Embryo
  misc_feature: MA Experiment ID: 108544 Result: Down-regulated in Transcription
  misc_feature: MA Experiment ID: 20000535 Result: Down-regulated in Transcription
  misc_feature: MA Experiment 20000535 PARAMETER Experiment Name: Zm_Hybrid_Seed_Dev_P Parameter: DAP Value: 30 vs. 12
  misc_feature: MA Experiment 20000535 PARAMETER Experiment Name: Zm_Hybrid_Seed_Dev_P Parameter: Organism Value: Zea mays
  misc_feature: MA Experiment 20000535 PARAMETER Experiment Name: Zm_Hybrid_Seed_Dev_P Parameter: Plant Line Value: 35A19
  misc_feature: MA Experiment 20000535 PARAMETER Experiment Name: Zm_Hybrid_Seed_Dev_P Parameter: Tissue Value: Embryo vs. Unfert Floret
  misc_feature: MA Experiment ID: 20000626 Result: Up-regulated in Transcription
  misc_feature: MA Experiment 20000626 PARAMETER Experiment Name: Zm_Herbicide-Treatments_P Parameter: Timepoint (hr) Value: 12
  misc_feature: MA Experiment 20000626 PARAMETER Experiment Name: Zm_Herbicide-Treatments_P Parameter: Tissue Value: Aerial
  misc_feature: MA Experiment 20000626 PARAMETER Experiment Name: Zm_Herbicide-Treatments_P Parameter: Treatment Value: Roundup vs. No Treatment
  misc_feature: MA Experiment ID: 20000630 Result: Up-regulated in Transcription
  misc_feature: MA Experiment 20000630 PARAMETER Experiment Name: Zm_Herbicide-Treatments_P Parameter: Timepoint (hr) Value: 4
  misc_feature: MA Experiment 20000630 PARAMETER Experiment Name: Zm_Herbicide-Treatments_P Parameter: Tissue Value: Aerial
  misc_feature: MA Experiment 20000630 PARAMETER Experiment Name: Zm_Herbicide-Treatments_P Parameter: Treatment Value: Roundup vs. No Treatment
acacaagcagcaacatcactgatcgccgtgcaggcctggtacgtaccacacacacacacacacatacagaagaagaacgtaccttgcgctacaaccccgtcgccgccgactacgccgatcgtgtccacgggaaccaagcaaagcaaagcaagcgacgcatcggaagaagccggagaccgaccgaccgaccgagctacctagctacagctcatcagcccatggtgaagacggcgacggcgacggcggcggcgaggcacggcggcgctcataagaggacgtacaagggcgtgcggatgcggagctggggctcctgggtgtcggaggtgcgggcgccgggccagaagacgaggatntggntnggctcccactccaccgccgaggccgcggcgcgcgcntacgacgccgcgctgctctgcctcaggggctcggcggccgcgccggacctcaacttcccgccccgccgcccgctcgccgacggcctccacccgctgccccccgccgccatgtcgcccaaggccatccagcgcgtggccgccgccgccgcggcctgctgcgctcctcagagtaacggcattggcagtgcctgctgcgccgcgccctgcgctcctccgagtaatggcattggcagcgcctgcggccacgccgagaccgccccggcgttgagcggcagcccgccctccagcgacagcgacgtctcctccccggaggcggggtccaccgccagcagcgacggcgagctggcccgctacggcgacggcgacggcgacggcggcgtcagcgtggactacggctcgctcgccgacatcgacgccttcttccagtcgcccaagtgcatggacgacgaccactactactacgcagcgctcatggacccctgcggcgccttcttcgcgccggcgccatcggttgcggcggacgacgacgcagcagccgccgccggatgctgggaggacggcgacggcattgcgctctggagcttcagcttccccgctctggactgctgagctgaagcggcgcagattccgctactactgacgattgacgactaatcgccggtcaagcgatggaaaccgctttatttgcttcatcgacggcacaggtttccgcatacatgataaatttacccaatttaattcgatgtatgtaaacattcttaataagctgattgttaagcgttgtagtggtggggagctctcatggctgaagctgcatgttttaaggtagctttttccatggagttaacctctttgctattgcttgtctatgagtaaacaaaaaaaaaaacagttttattgcc

SEQ ID NO: 9745 - protein, 333 aa, Zea mays subsp. mays
  peptide (1)..(333): Ceres Seq. ID no. 13493136
  misc_feature (91)..(151): Pfam Name: AP2 domain Pfam Description: AP2 domain
  misc_feature (75)..(246): Homolog of NCBI NO: 34902130 NR Description: hypothetical protein [Oryza sativa (japonica group)] >gi|29893600|gb|AAP06854.1| hypothetical protein [Oryza
  misc_feature (76)..(194): Homolog of NCBI NO: 15219452 NR Description: AP2 domain transcription factor TINY, putative
  misc_feature (76)..(181): Homolog of NCBI NO: 15224024 NR Description: AP2 domain transcription factor, putative
  misc_feature (48)..(193): Homolog of NCBI NO: 15219139 NR Description: transcription factor TINY family [Arabidopsis
  misc_feature (91)..(193): Homolog of NCBI NO: 21554056 NR Description: TINY-like protein [Arabidopsis thaliana]
  misc_feature (75)..(237): Homolog of NCBI NO: 21908034 NR Description: DRE binding factor 2 [Zea mays]
  misc_feature (75)..(237): Homolog of NCBI NO: 25990951 NR Description: DREB-like protein [Zea mays]
  misc_feature (89)..(218): Homolog of NCBI NO: 14140163 NR Description: putative AP2 domain containing protein [Oryza
  misc_feature (75)..(269): Homolog of NCBI NO: 37536842 NR Description: putative DNA binding protein [Oryza sativa
  misc_feature (6)..(203): Homolog of NCBI NO: 34898382 NR Description: EST AU055776(S20048) corresponds to a region of predicted gene.~Similar to Arabidopsis thaliana AP2 domain protein RAP2.10 mRNA, partial cds.(AF003103) [Oryza sativa
  misc_feature (117)..(117): Xaa is any aa, unknown or other
  misc_feature (119)..(119): Xaa is any aa, unknown or other
  misc_feature (131)..(131): Xaa is any aa, unknown or other
TSSNITDRRAGLVRTTHTHTHTEEERTLRYNPVAADYADRVHGNQAKQSKRRIGRSRRPTDRPSYLATAHQPMVKTATATAAARHGGAHKRTYKGVRMRSWGSWVSEVRAPGQKTRXWXGSHSTAEAAARXYDAALLCLRGSAAAPDLNFPPRRPLADGLHPLPPAAMSPKAIQRVAAAAAACCAPQSNGIGSACCAAPCAPPSNGIGSACGHAETAPALSGSPPSSDSDVSSPEAGSTASSDGELARYGDGDGDGGVSVDYGSLADIDAFFQSPKCMDDDHYYYAALMDPCGAFFAPAPSVAADDDAAAAAGCWEDGDGIALWSFSFPALDC

SEQ ID NO: 9746 - protein, 261 aa, Zea mays subsp. mays
  peptide (1)..(261): Ceres Seq. ID no. 13493137
  misc_feature (19)..(79): Pfam Name: AP2 domain Pfam Description: AP2 domain
  misc_feature (3)..(174): Homolog of NCBI NO: 34902130 NR Description: hypothetical protein [Oryza sativa (japonica group)] >gi|29893600|gb|AAP06854.1| hypothetical protein [Oryza
  misc_feature (4)..(122): Homolog of NCBI NO: 15219452 NR Description: AP2 domain transcription factor TINY, putative
  misc_feature (4)..(109): Homolog of NCBI NO: 15224024 NR Description: AP2 domain transcription factor, putative
  misc_feature (1)..(121): Homolog of NCBI NO: 15219139 NR Description: transcription factor TINY family [Arabidopsis
  misc_feature (19)..(121): Homolog of NCBI NO: 21554056 NR Description: TINY-like protein [Arabidopsis thaliana]
  misc_feature (3)..(165): Homolog of NCBI NO: 21908034 NR Description: DRE binding factor 2 [Zea mays]
  misc_feature (3)..(165): Homolog of NCBI NO: 25990951 NR Description: DREB-like protein [Zea mays]
  misc_feature (17)..(146): Homolog of NCBI NO: 14140163 NR Description: putative AP2 domain containing protein [Oryza
  misc_feature (3)..(197): Homolog of NCBI NO: 37536842 NR Description: putative DNA binding protein [Oryza sativa
  misc_feature (1)..(131): Homolog of NCBI NO: 34898382 NR Description: EST AU055776(S20048) corresponds to a region of predicted gene.~Similar to Arabidopsis thaliana AP2 domain protein RAP2.10 mRNA, partial cds.(AF003103) [Oryza sativa
  misc_feature (45)..(45): Xaa is any aa, unknown or other
  misc_feature (47)..(47): Xaa is any aa, unknown or other
  misc_feature (59)..(59): Xaa is any aa, unknown or other
MVKTATATAAARHGGAHKRTYKGVRMRSWGSWVSEVRAPGQKTRXWXGSHSTAEAAARXYDAALLCLRGSAAAPDLNFPPRRPLADGLHPLPPAAMSPKAIQRVAAAAAACCAPQSNGIGSACCAAPCAPPSNGIGSACGHAETAPALSGSPPSSDSDVSSPEAGSTASSDGELARYGDGDGDGGVSVDYGSLADIDAFFQSPKCMDDDHYYYAALMDPCGAFFAPAPSVAADDDAAAAAGCWEDGDGIALWSFSFPALDC

SEQ ID NO: 9747 - protein, 236 aa, Zea mays subsp. mays
  peptide (1)..(236): Ceres Seq. ID no. 13493138
  misc_feature (1)..(54): Pfam Name: AP2 domain Pfam Description: AP2 domain
  misc_feature (1)..(149): Homolog of NCBI NO: 34902130 NR Description: hypothetical protein [Oryza sativa (japonica group)] >gi|29893600|gb|AAP06854.1| hypothetical protein [Oryza
  misc_feature (1)..(97): Homolog of NCBI NO: 15219452 NR Description: AP2 domain transcription factor TINY, putative
  misc_feature (1)..(84): Homolog of NCBI NO: 15224024 NR Description: AP2 domain transcription factor, putative
  misc_feature (1)..(96): Homolog of NCBI NO: 15219139 NR Description: transcription factor TINY family [Arabidopsis
  misc_feature (1)..(96): Homolog of NCBI NO: 21554056 NR Description: TINY-like protein [Arabidopsis thaliana]
  misc_feature (1)..(140): Homolog of NCBI NO: 21908034 NR Description: DRE binding factor 2 [Zea mays]
  misc_feature (1)..(140): Homolog of NCBI NO: 25990951 NR Description: DREB-like protein [Zea mays]
  misc_feature (1)..(121): Homolog of NCBI NO: 14140163 NR Description: putative AP2 domain containing protein [Oryza
  misc_feature (1)..(172): Homolog of NCBI NO: 37536842 NR Description: putative DNA binding protein [Oryza sativa
  misc_feature (1)..(106): Homolog of NCBI NO: 34898382 NR Description: EST AU055776(S20048) corresponds to a region of predicted gene.~Similar to Arabidopsis thaliana AP2 domain protein RAP2.10 mRNA, partial cds.(AF003103) [Oryza sativa
  misc_feature (20)..(20): Xaa is any aa, unknown or other
  misc_feature (22)..(22): Xaa is any aa, unknown or other
  misc_feature (34)..(34): Xaa is any aa, unknown or other
MRSWGSWVSEVRAPGQKTRXWXGSHSTAEAAARXYDAALLCLRGSAAAPDLNFPPRRPLADGLHPLPPAAMSPKAIQRVAAAAAACCAPQSNGIGSACCAAPCAPPSNGIGSACGHAETAPALSGSPPSSDSDVSSPEAGSTASSDGELARYGDGDGDGGVSVDYGSLADIDAFFQSPKCMDDDHYYYAALMDPCGAFFAPAPSVAADDDAAAAAGCWEDGDGIALWSFSFPALDC

SEQ ID NO: 9748 - DNA, 1675 bp, Zea mays subsp. mays
  misc_feature (1)..(1675): Ceres Seq. ID no. 12354295
  misc_feature: MA Experiment ID: 108544 Result: Up-regulated in Transcription
atagaacatcctaatcgaaaaattttctggttgcagattgattctttaccatttgtatcgccattcctccctgttcgttgggcgtggggtctcaacctaaaatcagtcccattccgcgctcctagtggagagtggattcgaacggaaacacctttttgtgccccaagatgcctgtttccgcttcgtttccacgccacaccttttgaatcctttgccgtcacctcgccttttgcagcactagttgtttgtcagccttcttggagtgtggaggggcagagagcgccgtcctgttgattcaggaaaacagtccgagccgatgggcaggaagagcgacggcgcgcggttgcaatgcgctgaggccaaactggcgacggattggacctgctgcttcctggccctgccaccggcagcaccatccgctgtggatggcgatggtggattcaacctctcgtggaacctccaccagtccttccacccgccggccggcttcttcgccagcgtgggccagcaggttggggttgggttcccagggccttcgtcccagtcgccggagacgccacgggacccatacatgaagtacgtctcgccggaggttgttgtgacacctctgccgagggaaggcgtggtggggttgagggacaaggggaagaagaaagtcgtgaagctcaagattaaggttgggaatcatcacctcaagagactgatcagtggagcaatcgcaggcgcagtgtcaagaactgctgttgcacctttggagacgatcaggacgcatttgatggtgggaagtaatgggaattcgacgacggaggtgttccagtctatcatgaagcatgagggatggactgggttgttccgtggtaacgttgttaatgtcatccgggtagccccaagcaaggcaatcgagctttttgcctttgatacagctaataagttcttgacccccaaatatggggagaaaccgaagatcccagtccctccttcactagtggctggggcatttgccggtgttagctcaactctgtgtacatacccactggaattaattaagacacggctaactatacagagaggcgtgtatgacaatttccttgatgcatttgtcaaaatcatccgcgacgaagggccttctgagctctaccgaggcttaaccccaagcttgattggagtggtgccatatgctgcaacgaactacttcgcctatgacagcctgaagaaggtgtacaagaagatgttcaagacaaatgagattggcagtgttccaacactgttcatcgggtctgccgcaggagctatctcaagcacagcgacgttccctcttgaggtggcacggaagcacatgcaagttggagctgttggtggcaggaaggtttacaagaacatgcttcatgccttgttgagcattcttgaggatgaaggggttgggggcctttacagagggttggggccaagctgcatgaagttggtgcctgctgctgggatttcgttcatgtgctacgaggcttgcaagaagattctgattgaggaagaggatgagtgaagtgtatgcagatcattagaactcagttttgtgacatcctgacagcaggcagcttgaggttactgctgtagtcggcataagttcttaacccctttttgcacccagttttatctgataaactcacctcgttttttcccc

SEQ ID NO: 9749 - protein, 406 aa, Zea mays subsp. mays
  peptide (1)..(406): Ceres Seq. ID no. 12354296
  misc_feature (59)..(406): Homolog of NCBI NO: 4138581 NR Description: mitochondrial energy transfer protein [Solanum
  misc_feature (39)..(406): Homolog of NCBI NO: 15236783 NR Description: mitochondrial carrier protein family; protein id: supported by cDNA: 12232., supported by cDNA: gi_13937180, by cDNA: gi_18491120 [Arabidopsis thaliana]
  misc_feature (128)..(406): Homolog of NCBI NO: 231654 NR Description: Brittle-1 protein, chloroplast precursor
  misc_feature (100)..(400): Homolog of NCBI NO: 20864410 NR Description: RIKEN cDNA 2900084M01 [Mus musculus]
  misc_feature (126)..(400): Homolog of NCBI NO: 34877651 NR Description: similar to CG4241-PA [Rattus norvegicus]
  misc_feature (127)..(400): Homolog of NCBI NO: 16549529 NR Description: unnamed protein product [Homo sapiens]
  misc_feature (126)..(398): Homolog of NCBI NO: 6746567 NR Description: hydrogenosomal membrane protein 31 precursor
  misc_feature (104)..(400): Homolog of NCBI NO: 15241360 NR Description: calcium-binding transporter-like protein; protein
  misc_feature (100)..(400): Homolog of NCBI NO: 29742699 NR Description: similar to CG4241-PA [Homo sapiens]
  misc_feature (126)..(398): Homolog of NCBI NO: 30315255 NR Description: hydrogenosomal carrier protein [Trichomonas
MGRKSDGARLQCAEAKLATDWTCCFLALPPAAPSAVDGDGGFNLSWNLHQSFHPPAGFFASVGQQVGVGFPGPSSQSPETPRDPYMKYVSPEVVVTPLPREGVVGLRDKGKKKVVKLKIKVGNHHLKRLISGAIAGAVSRTAVAPLETIRTHLMVGSNGNSTTEVFQSIMKHEGWTGLFRGNVVNVIRVAPSKAIELFAFDTANKFLTPKYGEKPKIPVPPSLVAGAFAGVSSTLCTYPLELIKTRLTIQRGVYDNFLDAFVKIIRDEGPSELYRGLTPSLIGVVPYAATNYFAYDSLKKVYKKMFKTNEIGSVPTLFIGSAAGAISSTATFPLEVARKHMQVGAVGGRKVYKNMLHALLSILEDEGVGGLYRGLGPSCMKLVPAAGISFMCYEACKKILIEEEDE

SEQ ID NO: 9750 - protein, 321 aa, Zea mays subsp. mays
  peptide (1)..(321): Ceres Seq. ID no. 12354297
  misc_feature (1)..(321): Homolog of NCBI NO: 4138581 NR Description: mitochondrial energy transfer protein [Solanum
  misc_feature (1)..(321): Homolog of NCBI NO: 15236783 NR Description: mitochondrial carrier protein family; protein id: supported by cDNA: 12232., supported by cDNA: gi_13937180, by cDNA: gi_18491120 [Arabidopsis thaliana]
  misc_feature (43)..(321): Homolog of NCBI NO: 231654 NR Description: Brittle-1 protein, chloroplast precursor
  misc_feature (15)..(315): Homolog of NCBI NO: 20864410 NR Description: RIKEN cDNA 2900084M01 [Mus musculus]
  misc_feature (41)..(315): Homolog of NCBI NO: 34877651 NR Description: similar to CG4241-PA [Rattus norvegicus]
  misc_feature (42)..(315): Homolog of NCBI NO: 16549529 NR Description: unnamed protein product [Homo sapiens]
  misc_feature (41)..(313): Homolog of NCBI NO: 6746567 NR Description: hydrogenosomal membrane protein 31 precursor
  misc_feature (19)..(315): Homolog of NCBI NO: 15241360 NR Description: calcium-binding transporter-like protein; protein
  misc_feature (15)..(315): Homolog of NCBI NO: 29742699 NR Description: similar to CG4241-PA [Homo sapiens]
  misc_feature (41)..(313): Homolog of NCBI NO: 30315255 NR Description: hydrogenosomal carrier protein [Trichomonas
MKYVSPEVVVTPLPREGVVGLRDKGKKKVVKLKIKVGNHHLKRLISGAIAGAVSRTAVAPLETIRTHLMVGSNGNSTTEVFQSIMKHEGWTGLFRGNVVNVIRVAPSKAIELFAFDTANKFLTPKYGEKPKIPVPPSLVAGAFAGVSSTLCTYPLELIKTRLTIQRGVYDNFLDAFVKIIRDEGPSELYRGLTPSLIGVVPYAATNYFAYDSLKKVYKKMFKTNEIGSVPTLFIGSAAGAISSTATFPLEVARKHMQVGAVGGRKVYKNMLHALLSILEDEGVGGLYRGLGPSCMKLVPAAGISFMCYEACKKILIEEEDE

SEQ ID NO: 9751 - protein, 253 aa, Zea mays subsp. mays
  peptide (1)..(253): Ceres Seq. ID no. 12354298
  misc_feature (1)..(253): Homolog of NCBI NO: 4138581 NR Description: mitochondrial energy transfer protein [Solanum
  misc_feature (1)..(253): Homolog of NCBI NO: 15236783 NR Description: mitochondrial carrier protein family; protein id: supported by cDNA: 12232., supported by cDNA: gi_13937180, by cDNA: gi_18491120 [Arabidopsis thaliana]
  misc_feature (1)..(253): Homolog of NCBI NO: 231654 NR Description: Brittle-1 protein, chloroplast precursor
  misc_feature (1)..(247): Homolog of NCBI NO: 20864410 NR Description: RIKEN cDNA 2900084M01 [Mus musculus]
  misc_feature (1)..(247): Homolog of NCBI NO: 34877651 NR Description: similar to CG4241-PA [Rattus norvegicus]
  misc_feature (1)..(247): Homolog of NCBI NO: 16549529 NR Description: unnamed protein product [Homo sapiens]
  misc_feature (1)..(245): Homolog of NCBI NO: 6746567 NR Description: hydrogenosomal membrane protein 31 precursor
  misc_feature (1)..(247): Homolog of NCBI NO: 15241360 NR Description: calcium-binding transporter-like protein; protein
  misc_feature (1)..(247): Homolog of NCBI NO: 29742699 NR Description: similar to CG4241-PA [Homo sapiens]
  misc_feature (1)..(245): Homolog of NCBI NO: 30315255 NR Description: hydrogenosomal carrier protein [Trichomonas
MVGSNGNSTTEVFQSIMKHEGWTGLFRGNVVNVIRVAPSKAIELFAFDTANKFLTPKYGEKPKIPVPPSLVAGAFAGVSSTLCTYPLELIKTRLTIQRGVYDNFLDAFVKIIRDEGPSELYRGLTPSLIGVVPYAATNYFAYDSLKKVYKKMFKTNEIGSVPTLFIGSAAGAISSTATFPLEVARKHMQVGAVGGRKVYKNMLHALLSILEDEGVGGLYRGLGPSCMKLVPAAGISFMCYEACKKILIEEEDE

SEQ ID NO: 9752 - DNA, 1413 bp, Zea mays subsp. mays
  misc_feature (1)..(1413): Ceres Seq. ID no. 12381429
  misc_feature: MA Experiment ID: 108523 Result: Up-regulated in Transcription
  misc_feature: MA Experiment 108523 PARAMETER Experiment Name: Zm_42deg_Heat_P Parameter: Age (day) Value: 8
  misc_feature: MA Experiment 108523 PARAMETER Experiment Name: Zm_42deg_Heat_P Parameter: Organism Value: Zea mays
  misc_feature: MA Experiment 108523 PARAMETER Experiment Name: Zm_42deg_Heat_P Parameter: Plant Line Value: 35A19
  misc_feature: MA Experiment 108523 PARAMETER Experiment Name: Zm_42deg_Heat_P Parameter: Temperature (deg C) Value: 42 vs. 22
  misc_feature: MA Experiment 108523 PARAMETER Experiment Name: Zm_42deg_Heat_P Parameter: Timepoint (hr) Value: 6
  misc_feature: MA Experiment 108523 PARAMETER Experiment Name: Zm_42deg_Heat_P Parameter: Tissue Value: Aerial
  misc_feature: MA Experiment ID: 108528 Result: Up-regulated in Transcription
  misc_feature: MA Experiment 108528 PARAMETER Experiment Name: Zm_Imbibed_Seeds_P Parameter: Age (day) Value: 5 vs. 2
  misc_feature: MA Experiment 108528 PARAMETER Experiment Name: Zm_Imbibed_Seeds_P Parameter: Organism Value: Zea mays
  misc_feature: MA Experiment 108528 PARAMETER Experiment Name: Zm_Imbibed_Seeds_P Parameter: Plant Line Value: 35A19
  misc_feature: MA Experiment 108528 PARAMETER Experiment Name: Zm_Imbibed_Seeds_P Parameter: Tissue Value: Aerial vs. Embryo
  misc_feature: MA Experiment ID: 108534 Result: Up-regulated in Transcription
  misc_feature: MA Experiment 108534 PARAMETER Experiment Name: Zm_4deg_Cold_P Parameter: Age (hr) Value: 8
  misc_feature: MA Experiment 108534 PARAMETER Experiment Name: Zm_4deg_Cold_P Parameter: Organism Value: Zea mays
  misc_feature: MA Experiment 108534 PARAMETER Experiment Name: Zm_4deg_Cold_P Parameter: Plant Line Value: 35A19
  misc_feature: MA Experiment 108534 PARAMETER Experiment Name: Zm_4deg_Cold_P Parameter: Temperature (deg C) Value: 4 vs. 22
  misc_feature: MA Experiment 108534 PARAMETER Experiment Name: Zm_4deg_Cold_P Parameter: Timepoint (hr) Value: 6
  misc_feature: MA Experiment 108534 PARAMETER Experiment Name: Zm_4deg_Cold_P Parameter: Tissue Value: Aerial
acgactttatacatccgcttcctccagtcatcaaagaaacagagcgagcctagactgtgaggaagaaaggactaccatgggcgacgtcgctgccggcgctgccgccctgagtccacccccgatgaccaaggagaccaacctcttcatgcaaatcgtcggcaacccggacggcacggtcacgcgccccgaggtccccctcgtcccggcctcagccgaagccactggcggcgtcatctccagggacgtgcccctcgacgcctccgccggcacgtacctccgcctctacctgcccgacccatcctccgcgccagccgccaagcttcccgtcgtcctctacttccacggcggcggcttcgtgatcctctccgccgccaccgtattctaccacggccactgcgaggcgatggccgccgcggtgcccgccatcgtggcgtccctcgagtaccgcctcgcgccggagcaccgcctgcccgcggcctacgaggacgccgccgcggccgtggcgtggctccgcgacggcgcgccgggggacccctgggtcgcggcgcacggcgacctctcccgctgcttcctcatgggcagcagctcgggcggcaacatggctttcttcgcggcgctccggaccggaggcctcgacctgggccccgccacggtgcgcggcctcctgctgcaccagccctacctcggcggcgtcgaccggacgccctcggaggccaggtccgtcgacgacgccatgctgccgctggaggccaacgacaggctctggagcctcgcgctgcccgtgggcgccgaccgggaccacgagttctgcaaccccgtcaaggccatggcgccggaagcccttgccggcctgccgcgctgcctggtcaccgcaacttgggcgacccgctgatcgacaggcagcgggagttcgctcggtggctgcaggaccgcggcggcgcggaggcggaggtcgtcgtgaagttggacgtcgcggggttccacgcgtcggagctgttcgtgccggagatcgccgaggtgctgttcgccgcgatgcgcgagttcgtgtacaccggcgacgcttgacacgttgaatttcgtgccggccggtgacaagtggacatacgtgttgcatcgttgtggattgtgtgaccgtgcgcaataattctcggccgtgttgaatttgaatcttgacaaactggcaccagccaccaggcggcgactactatgtaacacgtgagcactgtagcagctaccgcaacgcacctgacgtccggacgtgtagttttcgcgacgcgtgcagctatcggccacggcaacgaaaataggagatgttttgttcggatttttttttggcccgcgaccattcacagcgctatctgaaactatcttcatcacatctcttatcaaatcatctatctcatcctctatttc

SEQ ID NO: 9753 - protein, 296 aa, Zea mays subsp. mays
  peptide (1)..(296): Ceres Seq. ID no. 12381430
  misc_feature (94)..(152): Pfam Name: Carboxylesterase Pfam Description: Carboxylesterase
  misc_feature (37)..(279): Homolog of NCBI NO: 18406834 NR Description: expressed protein; protein id: At2g45600.1, by cDNA: 36855., supported by cDNA: gi_16604486 [Arabidopsis
  misc_feature (37)..(279): Homolog of NCBI NO: 21593183 NR Description: unknown [Arabidopsis thaliana]
  misc_feature (36)..(286): Homolog of NCBI NO: 15241725 NR Description: putative protein; protein id: At5g62180.1
  misc_feature (48)..(290): Homolog of NCBI NO: 5487873 NR Description: PrMC3 [Pinus radiata]
  misc_feature (37)..(289): Homolog of NCBI NO: 15225521 NR Description: unknown protein; protein id: At2g45610.1
  misc_feature (39)..(272): Homolog of NCBI NO: 8574455 NR Description: pepper esterase [Capsicum annuum]
  misc_feature (37)..(272): Homolog of NCBI NO: 34899928 NR Description: OJ1714_H10.48 [Oryza sativa (japonica >gi|22831103|dbj|BAC15965.1| putative cell death associated
  misc_feature (56)..(292): Homolog of NCBI NO: 34895936 NR Description: P0030H07.39 [Oryza sativa (japonica
  misc_feature (34)..(291): Homolog of NCBI NO: 34899924 NR Description: OJ1714_H10.46 [Oryza sativa (japonica >gi|22831101|dbj|BAC15963.1| putative cell death associated
  misc_feature (34)..(289): Homolog of NCBI NO: 27819508 NR Description: putative esterase [Oryza sativa (japonica
RLYTSASSSHQRNRASLDCEEERTTMGDVAAGAAALSPPPMTKETNLFMQIVGNPDGTVTRPEVPLVPASAEATGGVISRDVPLDASAGTYLRLYLPDPSSAPAAKLPVVLYFHGGGFVILSAATVFYHGHCEAMAAAVPAIVASLEYRLAPEHRLPAAYEDAAAAVAWLRDGAPGDPWVAAHGDLSRCFLMGSSSGGNMAFFAALRTGGLDLGPATVRGLLLHQPYLGGVDRTPSEARSVDDAMLPLEANDRLWSLALPVGADRDHEFCNPVKAMAPEALAGLPRCLVTATWATR

SEQ ID NO: 9754 - protein, 271 aa, Zea mays subsp. mays
  peptide (1)..(271): Ceres Seq. ID no. 12381431
  misc_feature (69)..(127): Pfam Name: Carboxylesterase Pfam Description: Carboxylesterase
  misc_feature (12)..(254): Homolog of NCBI NO: 18406834 NR Description: expressed protein; protein id: At2g45600.1, by cDNA: 36855., supported by cDNA: gi_16604486 [Arabidopsis
  misc_feature (12)..(254): Homolog of NCBI NO: 21593183 NR Description: unknown [Arabidopsis thaliana]
  misc_feature (11)..(261): Homolog of NCBI NO: 15241725 NR Description: putative protein; protein id: At5g62180.1
  misc_feature (23)..(265): Homolog of NCBI NO: 5487873 NR Description: PrMC3 [Pinus radiata]
  misc_feature (12)..(264): Homolog of NCBI NO: 15225521 NR Description: unknown protein; protein id: At2g45610.1
  misc_feature (14)..(247): Homolog of NCBI NO: 8574455 NR Description: pepper esterase [Capsicum annuum]
  misc_feature (12)..(247): Homolog of NCBI NO: 34899928 NR Description: OJ1714_H10.48 [Oryza sativa (japonica >gi|22831103|dbj|BAC15965.1| putative cell death associated
  misc_feature (31)..(267): Homolog of NCBI NO: 34895936 NR Description: P0030H07.39 [Oryza sativa (japonica
  misc_feature (9)..(266): Homolog of NCBI NO: 34899924 NR Description: OJ1714_H10.46 [Oryza sativa (japonica >gi|22831101|dbj|BAC15963.1| putative cell death associated
  misc_feature (9)..(264): Homolog of NCBI NO: 27819508 NR Description: putative esterase [Oryza sativa (japonica
MGDVAAGAAALSPPPMTKETNLFMQIVGNPDGTVTRPEVPLVPASAEATGGVISRDVPLDASAGTYLRLYLPDPSSAPAAKLPVVLYFHGGGFVILSAATVFYHGHCEAMAAAVPAIVASLEYRLAPEHRLPAAYEDAAAAVAWLRDGAPGDPWVAAHGDLSRCFLMGSSSGGNMAFFAALRTGGLDLGPATVRGLLLHQPYLGGVDRTPSEARSVDDAMLPLEANDRLWSLALPVGADRDHEFCNPVKAMAPEALAGLPRCLVTATWATR

SEQ ID NO: 9755 - protein, 256 aa, Zea mays subsp. mays
  peptide (1)..(256): Ceres Seq. ID no. 12381432
  misc_feature (54)..(112): Pfam Name: Carboxylesterase Pfam Description: Carboxylesterase
  misc_feature (1)..(239): Homolog of NCBI NO: 18406834 NR Description: expressed protein; protein id: At2g45600.1, by cDNA: 36855., supported by cDNA: gi_16604486 [Arabidopsis
  misc_feature (1)..(239): Homolog of NCBI NO: 21593183 NR Description: unknown [Arabidopsis thaliana]
  misc_feature (1)..(246): Homolog of NCBI NO: 15241725 NR Description: putative protein; protein id: At5g62180.1
  misc_feature (8)..(250): Homolog of NCBI NO: 5487873 NR Description: PrMC3 [Pinus radiata]
  misc_feature (1)..(249): Homolog of NCBI NO: 15225521 NR Description: unknown protein; protein id: At2g45610.1
  misc_feature (1)..(232): Homolog of NCBI NO: 8574455 NR Description: pepper esterase [Capsicum annuum]
  misc_feature (1)..(232): Homolog of NCBI NO: 34899928 NR Description: OJ1714_H10.48 [Oryza sativa (japonica >gi|22831103|dbj|BAC15965.1| putative cell death associated
  misc_feature (16)..(252): Homolog of NCBI NO: 34895936 NR Description: P0030H07.39 [Oryza sativa (japonica
  misc_feature (1)..(251): Homolog of NCBI NO: 34899924 NR Description: OJ1714_H10.46 [Oryza sativa (japonica >gi|22831101|dbj|BAC15963.1| putative cell death associated
  misc_feature (1)..(249): Homolog of NCBI NO: 27819508 NR Description: putative esterase [Oryza sativa (japonica
MTKETNLFMQIVGNPDGTVTRPEVPLVPASAEATGGVISRDVPLDASAGTYLRLYLPDPSSAPAAKLPVVLYFHGGGFVILSAATVFYHGHCEAMAAAVPAIVASLEYRLAPEHRLPAAYEDAAAAVAWLRDGAPGDPWVAAHGDLSRCFLMGSSSGGNMAFFAALRTGGLDLGPATVRGLLLHQPYLGGVDRTPSEARSVDDAMLPLEANDRLWSLALPVGADRDHEFCNPVKAMAPEALAGLPRCLVTATWATR

SEQ ID NO: 9756 - DNA, 1736 bp, Zea mays subsp. mays
  misc_feature (1)..(1736): Ceres Seq. ID no. 12355141
  misc_feature: MA Experiment ID: 108534 Result: Down-regulated in Transcription
  misc_feature: MA Experiment 108534 PARAMETER Experiment Name: Zm_4deg_Cold_P Parameter: Age (hr) Value: 8
  misc_feature: MA Experiment 108534 PARAMETER Experiment Name: Zm_4deg_Cold_P Parameter: Organism Value: Zea mays
  misc_feature: MA Experiment 108534 PARAMETER Experiment Name: Zm_4deg_Cold_P Parameter: Plant Line Value: 35A19
  misc_feature: MA Experiment 108534 PARAMETER Experiment Name: Zm_4deg_Cold_P Parameter: Temperature (deg C) Value: 4 vs. 22
  misc_feature: MA Experiment 108534 PARAMETER Experiment Name: Zm_4deg_Cold_P Parameter: Timepoint (hr) Value: 6
  misc_feature: MA Experiment 108534 PARAMETER Experiment Name: Zm_4deg_Cold_P Parameter: Tissue Value: Aerial
  misc_feature: MA Experiment ID: 108535 Result: Up-regulated in Transcription
  misc_feature: MA Experiment 108535 PARAMETER Experiment Name: Zm_Meristem_P Parameter: Age (day) Value: 8
  misc_feature: MA Experiment 108535 PARAMETER Experiment Name: Zm_Meristem_P Parameter: Organism Value: Zea mays
  misc_feature: MA Experiment 108535 PARAMETER Experiment Name: Zm_Meristem_P Parameter: Plant Line Value: 35A19
  misc_feature: MA Experiment 108535 PARAMETER Experiment Name: Zm_Meristem_P Parameter: Tissue Value: Root Meristem vs. Above Root Meristem
  misc_feature: MA Experiment ID: 108543 Result: Down-regulated in Transcription
  misc_feature: MA Experiment ID: 108545 Result: Up-regulated in Transcription
  misc_feature: MA Experiment 108545 PARAMETER Experiment Name: Zm_Imbibed_Seeds_P Parameter: Age (day) Value: 3 vs. 2
  misc_feature: MA Experiment 108545 PARAMETER Experiment Name: Zm_Imbibed_Seeds_P Parameter: Organism Value: Zea mays
  misc_feature: MA Experiment 108545 PARAMETER Experiment Name: Zm_Imbibed_Seeds_P Parameter: Plant Line Value: 35A19
  misc_feature: MA Experiment 108545 PARAMETER Experiment Name: Zm_Imbibed_Seeds_P Parameter: Tissue Value: Aerial vs. Embryo
aaaatggatatacttgaggctgcgcaaacagatatcagtgtctgacgcggccgcgggcatgtcagctgcatgcgctgcctcatggcagagcccgaccctggcggcgtgggacgccacgtccctcgcctcctccctgaaggcggcggccgcccgccgctccgcggcccacgtcggtccattgcacgccgtgctcctcaagctgggcctctccgcctccgccatccacgccacctccctggcgcacgtggctctgcgggccgggcttgcgcggtacgcgcgggagctgttcgacgagatgccccgcccggacgtggtctcttggacgtcactcgtcaccggccacgcgcaccaggggctacaccgcgattccctcgcgctgctccggcgcatggcgggttctggcgtccagcccaacggctactccttgtccggtgggctgctggcctgcgccggtgtcgggcagagcgcgcttgttcacgggaaggagatccatgccagcgtggtcaagatgagctcgcgtggactagtggacccggtcgtggagaacggggttcttggcatgtactcgaggtgcggaagcatggagtacgcgctgagagtgttcagggcgatgcctgtcaggaacatagttgcttggaactcgatgatggcagcgcttcttgggagcgggcaggccgaggacgcgctgaggctgttcgtttccatggtttcttctggcgtcggtgtggatggtttctcactctctatagccgtggatgcgtgcggggagctggcgctgctgaagcaggggatgcaggcgcacgcacaggttgctggcaatggattcgaggcagatgtcgtcgtcaggaactccttagtggacatgtacgccaagtgtggctgtgtcgattcggccgagctcgtcttcgaagcagtatcgtcaaacgacgctgttctttggaccacaatggtctcagcttacgggaagtctggccgtgcacaggacgccgtcagcttgtttgacaggatggcgcgcatggggatataacaagatggcatagcgtatcttgcggttctgtcagcttgtagccatggcggactcgtcagagaagcctggcactacttcagttcgatttctgatggttcgagctcggttgagatgcgagccgagcactacggatgcatggcggatctcctgtgcaggagaggttacctagaagaagctcttgagtttatcaagaacatgccgtttgactcgagcgtcgctgcctggagtgcgctgctcaactcatctcgaatacacgggaatgccaggctaagtcagttcgcagcttcctgtttgctcaagcttgaccctgagaaccacagcaactgggttgctctgtcaagtgtgcatgcatcagggaatgactggcacgagacctggacaatcagggagagcatgagcagagagtgtgtgaagaaagagcctgcgtgtagctgggttgagctgtgtgatggcgttcatgtttttgtaacggccgaccagtctcgtcctgaactgtttcaaatactgcagagtcttgattatttgaaggaggatacatcggtgatgccttggcaagtttcgtagaaaattctatgttttatattacagctttgtggtaggtggtttaaatctcactgcacagtgggcgattattctaatcaaaacaatcagttatgtaaagttgttgctcaatatactcgaatatgatgagttgatgactaattgtttg

SEQ ID NO: 9757 - protein, 341 aa, Zea mays subsp. mays
  peptide (1)..(341): Ceres Seq. ID no. 12355142
  misc_feature (11)..(341): Homolog of NCBI NO: 37534806 NR Description: putative PPR-repeat containing protein [Oryza
  misc_feature (55)..(341): Homolog of NCBI NO: 15221566 NR Description: hypothetical protein; protein id: At1g68930.1
  misc_feature (40)..(341): Homolog of NCBI NO: 38345824 NR Description: OSJNBa0070M12.7 [Oryza sativa (japonica
  misc_feature (37)..(341): Homolog of NCBI NO: 15234006 NR Description: putative protein; protein id: At4g18750.1
  misc_feature (85)..(341): Homolog of NCBI NO: 21741755 NR Description: OSJNBa0060B20.9 [Oryza sativa (japonica
  misc_feature (93)..(341): Homolog of NCBI NO: 15229426 NR Description: hypothetical protein; protein id: At3g23330.1 thaliana] >gi|11994318|dbj|BAB02277.1|
  misc_feature (37)..(341): Homolog of NCBI NO: 11994419 NR Description: selenium-binding protein-like [Arabidopsis
  misc_feature (37)..(341): Homolog of NCBI NO: 15230593 NR Description: unknown protein; protein id: At3g12770.1
  misc_feature (27)..(341): Homolog of NCBI NO: 15227724 NR Description: putative selenium-binding protein; protein id:
  misc_feature (27)..(341): Homolog of NCBI NO: 28392910 NR Description: putative selenium-binding protein [Arabidopsis
KWIYLRLRKQISVSDAAAGMSAACAASWQSPTLAAWDATSLASSLKAAAARRSAAHVGPLHAVLLKLGLSASAIHATSLAHVALRAGLARYARELFDEMPRPDVVSWTSLVTGHAHQGLHRDSLALLRRMAGSGVQPNGYSLSGGLLACAGVGQSALVHGKEIHASVVKMSSRGLVDPVVENGVLGMYSRCGSMEYALRVFRAMPVRNIVAWNSMMAALLGSGQAEDALRLFVSMVSSGVGVDGFSLSIAVDACGELALLKQGMQAHAQVAGNGFEADVVVRNSLVDMYAKCGCVDSAELVFEAVSSNDAVLWTTMVSAYGKSGRAQDAVSLFDRMARMGI

SEQ ID NO: 9758 - protein, 322 aa, Zea mays subsp. mays
  peptide (1)..(322): Ceres Seq. ID no. 12355143
  misc_feature (1)..(322): Homolog of NCBI NO: 37534806 NR Description: putative PPR-repeat containing protein [Oryza
  misc_feature (36)..(322): Homolog of NCBI NO: 15221566 NR Description: hypothetical protein; protein id: At1g68930.1
  misc_feature (21)..(322): Homolog of NCBI NO: 38345824 NR Description: OSJNBa0070M12.7 [Oryza sativa (japonica
  misc_feature (18)..(322): Homolog of NCBI NO: 15234006 NR Description: putative protein; protein id: At4g18750.1
  misc_feature (66)..(322): Homolog of NCBI NO: 21741755 NR Description: OSJNBa0060B20.9 [Oryza sativa (japonica
  misc_feature (74)..(322): Homolog of NCBI NO: 15229426 NR Description: hypothetical protein; protein id: At3g23330.1 thaliana] >gi|11994318|dbj|BAB02277.1|
  misc_feature (18)..(322): Homolog of NCBI NO: 11994419 NR Description: selenium-binding protein-like [Arabidopsis
  misc_feature (18)..(322): Homolog of NCBI NO: 15230593 NR Description: unknown protein; protein id: At3g12770.1
  misc_feature (8)..(322): Homolog of NCBI NO: 15227724 NR Description: putative selenium-binding protein; protein id:
  misc_feature (8)..(322): Homolog of NCBI NO: 28392910 NR Description: putative selenium-binding protein [Arabidopsis
MSAACAASWQSPTLAAWDATSLASSLKAAAARRSAAHVGPLHAVLLKLGLSASAIHATSLAHVALRAGLARYARELFDEMPRPDVVSWTSLVTGHAHQGLHRDSLALLRRMAGSGVQPNGYSLSGGLLACAGVGQSALVHGKEIHASVVKMSSRGLVDPVVENGVLGMYSRCGSMEYALRVFRAMPVRNIVAWNSMMAALLGSGQAEDALRLFVSMVSSGVGVDGFSLSIAVDACGELALLKQGMQAHAQVAGNGFEADVVVRNSLVDMYAKCGCVDSAELVFEAVSSNDAVLWTTMVSAYGKSGRAQDAVSLFDRMARMGI

SEQ ID NO: 9759 - protein, 310 aa, Zea mays subsp. mays
  peptide (1)..(310): Ceres Seq. ID no. 12355144
MRCLMAEPDPGGVGRHVPRLLPEGGGRPPLRGPRRSIARRAPQAGPLRLRHPRHLPGARGSAGRACAVRAGAVRRDAPPGRGLLDVTRHRPRAPGATPRFPRAAPAHGGFWRPAQRLLLVRWAAGLRRCRAERACSREGDPCQRGQDELAWTSGPGRGERGSWHVLEVRKHGVRAESVQGDACQEHSCLELDDGSASWERAGRGRAEAVRFHGFFWRRCGWFLTLYSRGCVRGAGAAEAGDAGARTGCWQWIRGRCRRQELLSGHVRQVWLCRFGRARLRSSIVKRRCSLDHNGLSLREVWPCTGRRQLV

SEQ ID NO: 9760 - DNA, 1147 bp, Zea mays subsp. mays
  misc_feature (1)..(1147): Ceres Seq. ID no. 12354206
  misc_feature: MA Experiment ID: 108528 Result: Up-regulated in Transcription
  misc_feature: MA Experiment 108528 PARAMETER Experiment Name: Zm_Imbibed_Seeds_P Parameter: Age (day) Value: 5 vs. 2
  misc_feature: MA Experiment 108528 PARAMETER Experiment Name: Zm_Imbibed_Seeds_P Parameter: Organism Value: Zea mays
  misc_feature: MA Experiment 108528 PARAMETER Experiment Name: Zm_Imbibed_Seeds_P Parameter: Plant Line Value: 35A19
  misc_feature: MA Experiment 108528 PARAMETER Experiment Name: Zm_Imbibed_Seeds_P Parameter: Tissue Value: Aerial vs. Embryo
  misc_feature: MA Experiment ID: 108529 Result: Up-regulated in Transcription
  misc_feature: MA Experiment 108529 PARAMETER Experiment Name: Zm_Imbibed_Seeds_P Parameter: Age (day) Value: 5 vs. 2
  misc_feature: MA Experiment 108529 PARAMETER Experiment Name: Zm_Imbibed_Seeds_P Parameter: Organism Value: Zea mays
  misc_feature: MA Experiment 108529 PARAMETER Experiment Name: Zm_Imbibed_Seeds_P Parameter: Plant Line Value: 35A19
  misc_feature: MA Experiment 108529 PARAMETER Experiment Name: Zm_Imbibed_Seeds_P Parameter: Tissue Value: Roots vs. Embryo
  misc_feature: MA Experiment ID: 108530 Result: Up-regulated in Transcription
  misc_feature: MA Experiment 108530 PARAMETER Experiment Name: Zm_Imbibed_Seeds_P Parameter: Age (day) Value: 6 vs. 2
  misc_feature: MA Experiment 108530 PARAMETER Experiment Name: Zm_Imbibed_Seeds_P Parameter: Organism Value: Zea mays
  misc_feature: MA Experiment 108530 PARAMETER Experiment Name: Zm_Imbibed_Seeds_P Parameter: Plant Line Value: 35A19
  misc_feature: MA Experiment 108530 PARAMETER Experiment Name: Zm_Imbibed_Seeds_P Parameter: Tissue Value: Aerial vs. Embryo
  misc_feature: MA Experiment ID: 108535 Result: Down-regulated in Transcription
  misc_feature: MA Experiment 108535 PARAMETER Experiment Name: Zm_Meristem_P Parameter: Age (day) Value: 8
  misc_feature: MA Experiment 108535 PARAMETER Experiment Name: Zm_Meristem_P Parameter: Organism Value: Zea mays
  misc_feature: MA Experiment 108535 PARAMETER Experiment Name: Zm_Meristem_P Parameter: Plant Line Value: 35A19
  misc_feature: MA Experiment 108535 PARAMETER Experiment Name: Zm_Meristem_P Parameter: Tissue Value: Root Meristem vs. Above Root Meristem
  misc_feature: MA Experiment ID: 108546 Result: Up-regulated in Transcription
  misc_feature: MA Experiment 108546 PARAMETER Experiment Name: Zm_Imbibed_Seeds_P Parameter: Age (day) Value: 3 vs. 2
  misc_feature: MA Experiment 108546 PARAMETER Experiment Name: Zm_Imbibed_Seeds_P Parameter: Organism Value: Zea mays
  misc_feature: MA Experiment 108546 PARAMETER Experiment Name: Zm_Imbibed_Seeds_P Parameter: Plant Line Value: 35A19
  misc_feature: MA Experiment 108546 PARAMETER Experiment Name: Zm_Imbibed_Seeds_P Parameter: Tissue Value: Roots vs. Embryo
  misc_feature: MA Experiment ID: 108689 Result: Up-regulated in Transcription
  misc_feature: MA Experiment 108689 PARAMETER Experiment Name: Zm_Drought_Roots_P Parameter: Age (day) Value: 9
  misc_feature: MA Experiment 108689 PARAMETER Experiment Name: Zm_Drought_Roots_P Parameter: Organism Value: Zea mays
  misc_feature: MA Experiment 108689 PARAMETER Experiment Name: Zm_Drought_Roots_P Parameter: Plant Line Value: 35A19
  misc_feature: MA Experiment 108689 PARAMETER Experiment Name: Zm_Drought_Roots_P Parameter: Timepoint (hr) Value: 24
  misc_feature: MA Experiment 108689 PARAMETER Experiment Name: Zm_Drought_Roots_P Parameter: Tissue Value: Roots
  misc_feature: MA Experiment 108689 PARAMETER Experiment Name: Zm_Drought_Roots_P Parameter: Treatment Value: Drought vs. No Drought
  misc_feature: MA Experiment ID: 20000477 Result: Up-regulated in Transcription
  misc_feature: MA Experiment 20000477 PARAMETER Experiment Name: Zm_5mM_SA_P Parameter: Age (day) Value: 10
  misc_feature: MA Experiment 20000477 PARAMETER Experiment Name: Zm_5mM_SA_P Parameter: Organism Value: Zea mays
  misc_feature: MA Experiment 20000477 PARAMETER Experiment Name: Zm_5mM_SA_P Parameter: Plant Line Value: 35A19
  misc_feature: MA Experiment 20000477 PARAMETER Experiment Name: Zm_5mM_SA_P Parameter: Timepoint (hr) Value: 48
  misc_feature: MA Experiment 20000477 PARAMETER Experiment Name: Zm_5mM_SA_P Parameter: Tissue Value: Aerial
  misc_feature: MA Experiment 20000477 PARAMETER Experiment Name: Zm_5mM_SA_P Parameter: Treatment Value: 5mM SA vs. No Treatment
  misc_feature: MA Experiment ID: 20000478 Result: Up-regulated in Transcription
  misc_feature: MA Experiment 20000478 PARAMETER Experiment Name: Zm_5mM_SA_P Parameter: Age (day) Value: 11
  misc_feature: MA Experiment 20000478 PARAMETER Experiment Name: Zm_5mM_SA_P Parameter: Organism Value: Zea mays
  misc_feature: MA Experiment 20000478 PARAMETER Experiment Name: Zm_5mM_SA_P Parameter: Plant Line Value: 35A19
  misc_feature: MA Experiment 20000478 PARAMETER Experiment Name: Zm_5mM_SA_P Parameter: Timepoint (hr) Value: 72
  misc_feature: MA Experiment 20000478 PARAMETER Experiment Name: Zm_5mM_SA_P Parameter: Tissue Value: Aerial
  misc_feature: MA Experiment 20000478 PARAMETER Experiment Name: Zm_5mM_SA_P Parameter: Treatment Value: 5mM SA vs. No Treatment
  misc_feature: MA Experiment ID: 20000479 Result: Up-regulated in Transcription
  misc_feature: MA Experiment 20000479 PARAMETER Experiment Name: Zm_Drought_P Parameter: Age (day) Value: 10
  misc_feature: MA Experiment 20000479 PARAMETER Experiment Name: Zm_Drought_P Parameter: Organism Value: Zea mays
  misc_feature: MA Experiment 20000479 PARAMETER Experiment Name: Zm_Drought_P Parameter: Plant Line Value: 35A19
  misc_feature: MA Experiment 20000479 PARAMETER Experiment Name: Zm_Drought_P Parameter: Timepoint (hr) Value: 48
  misc_feature: MA Experiment 20000479 PARAMETER Experiment Name: Zm_Drought_P Parameter: Tissue Value: Aerial
  misc_feature: MA Experiment 20000479 PARAMETER Experiment Name: Zm_Drought_P Parameter: Treatment Value: Drought vs. No Drought
  misc_feature: MA Experiment ID: 20000480 Result: Up-regulated in Transcription
  misc_feature: MA Experiment 20000480 PARAMETER Experiment Name: Zm_Drought_P Parameter: Age (day) Value: 11
  misc_feature: MA Experiment 20000480 PARAMETER Experiment Name: Zm_Drought_P Parameter: Organism Value: Zea mays
  misc_feature: MA Experiment 20000480 PARAMETER Experiment Name: Zm_Drought_P Parameter: Plant Line Value: 35A19
  misc_feature: MA Experiment 20000480 PARAMETER Experiment Name: Zm_Drought_P Parameter: Timepoint (hr) Value: 72
  misc_feature: MA Experiment 20000480 PARAMETER Experiment Name: Zm_Drought_P Parameter: Tissue Value: Aerial
  misc_feature: MA Experiment 20000480 PARAMETER Experiment Name: Zm_Drought_P Parameter: Treatment Value: Drought vs. No Drought
  misc_feature: MA Experiment ID: 20000488 Result: Up-regulated in Transcription
  misc_feature: MA Experiment 20000488 PARAMETER Experiment Name: Zm_50mM_NH4NO3_L_to_H_P Parameter: Organism Value: Zea mays
  misc_feature: MA Experiment 20000488 PARAMETER Experiment Name: Zm_50mM_NH4NO3_L_to_H_P Parameter: Timepoint (hr) Value: 8
  misc_feature: MA Experiment 20000488 PARAMETER Experiment Name: Zm_50mM_NH4NO3_L_to_H_P Parameter: Tissue Value: Leaves
  misc_feature: MA Experiment 20000488 PARAMETER Experiment Name: Zm_50mM_NH4NO3_L_to_H_P Parameter: Treatment Value: 50mM NH4NO3 vs. 100mM Mannitol
  misc_feature: MA Experiment ID: 20000533 Result: Up-regulated in Transcription
  misc_feature: MA Experiment 20000533 PARAMETER Experiment Name: Zm_0.001percent_MeJA_P Parameter: Age (day) Value: 11
  misc_feature: MA Experiment 20000533 PARAMETER Experiment Name: Zm_0.001percent_MeJA_P Parameter: Organism Value: Zea mays
  misc_feature: MA Experiment 20000533 PARAMETER Experiment Name: Zm_0.001percent_MeJA_P Parameter: Plant Line Value: 35A19
  misc_feature: MA Experiment 20000533 PARAMETER Experiment Name: Zm_0.001percent_MeJA_P Parameter: Timepoint (hr) Value: 72
  misc_feature: MA Experiment 20000533 PARAMETER Experiment Name: Zm_0.001percent_MeJA_P Parameter: Tissue Value: Aerial
  misc_feature: MA Experiment 20000533 PARAMETER Experiment Name: Zm_0.001percent_MeJA_P Parameter: Treatment Value: 0.001percent MeJA vs. No Treatment
atccatccatccacacacacaaacagacagacagacaagcatacaacaccgttgccatttagttgtgttcttgctaggcagttgcgcacttacattgagccgcagctagctgtctacggcacaactatctcctgcgcgcgtgctcgatctgaagctaggccagacctgagcctgtccaattttgccttgttctacccaccggtagtcgagaaggttccataagcgcaagcagacagcaaaagagctaaggggtctgagacaaggttcgaacagatggaggatgtggtgaagttcgtctttggagtttctggaaatgtcatcgctctcttcctcttcctgtccccagtgcctacgttctggaggatcatcaggaggaagtcgacggaggatttctcaggggtgccgtacagcatgacactcctcaactgcctcttgtcagcttggtacgggctgccgttcgtgtccccgaacaacatgctggtgtcgacgatcaacggcgcgggcgcggcgatcgaggccgtgtacgtggtgatcttcctggcgtcggcggtctcggcggcgttcgccgccgtggcgctggcgtcgatgctggcgctgcacggacagggccggaagctcatgtgcggcctcgccgccaccgtctgctccatctgcatgtacgcctcgccgctctccatcatgaggctggtggtgaagaccaagagcgtggagtacatgccgttcctgctgtcgctggccgtgttcctgtgcggcacgtcctggttcgtctacggcctgctcggccgggaccccttcgtcgcgattcccaacgggtgcgggagctttctgggcgcagtgcagctggtcttgtacgccatctaccgcgacagcaacagcggcggcaagcagcaggccggcgacgacgtggagatggcctccgacgccaagagcagcaagaaggtcgccgacgacgtcggcggcaaggaggaccgcctggtctagcatggagctagccactttctctttcggtgcgcgagcgtatgtttcctccccccgtgattgtgtgtgtgtgcatgtatacgagagtgcgtgctgtactgtactacctctgcgtgtgtgcaataatgtaactgggtgtttcatctcgcaatcgggtgtttttctctcc

SEQ ID NO: 9761 - protein, 235 aa, Zea mays subsp. mays
  peptide (1)..(235): Ceres Seq. ID no. 12354207
  misc_feature (115)..(198): Pfam Name: MtN3/saliva family Pfam Description: MtN3/saliva family
  misc_feature (3)..(229): Homolog of NCBI NO: 34912462 NR Description: MtN3-like protein [Oryza sativa (japonica
  misc_feature (3)..(229): Homolog of NCBI NO: 34912454 NR Description: P0681B11.31 [Oryza sativa (japonica
  misc_feature (3)..(199): Homolog of NCBI NO: 18413388 NR Description: putative protein; protein id: At4g10850.1, by cDNA: 33161. [Arabidopsis thaliana] contains similarity to Medicago truncatula MtN3 (GB:Y08726)
  misc_feature (1)..(224): Homolog of NCBI NO: 15219732 NR Description: hypothetical protein; protein id: At1g66770.1 thaliana] >gi|12597757|gb|AAG60070.1|AC013288_4 hypothetical
  misc_feature (3)..(232): Homolog of NCBI NO: 18394992 NR Description: expressed protein; protein id: At1g21460.1, by cDNA: 6411. [Arabidopsis thaliana] >gi|21594011|gb|AAM65929.1| [Arabidopsis thaliana] >gi|28393568|gb|AAO42204.1| unknown
  misc_feature (47)..(232): Homolog of NCBI NO: 25518644 NR Description: hypothetical protein F24J8.9 - Arabidopsis >gi|9454576|gb|AAF87899.1|AC015447_9 Unknown protein [Arabidopsis
  misc_feature (1)..(232): Homolog of NCBI NO: 34907420 NR Description: P0018C10.36 [Oryza sativa (japonica
  misc_feature (4)..(228): Homolog of NCBI NO: 21592355 NR Description: contains similarity to nodulin MtN3 protein
  misc_feature (1)..(199): Homolog of NCBI NO: 18400517 NR Description: expressed protein; protein id: At3g14770.1, by cDNA: gi_15809922, supported by cDNA: gi_17978878 [Arabidopsis
  misc_feature (4)..(228): Homolog of NCBI NO: 18405611 NR Description: Expressed protein; protein id: At3g28007.1, by cDNA: 22745., supported by cDNA: gi_16226221 [Arabidopsis >gi|16226222|gb|AAL16107.1|AF428275_1 unknown protein
MEDVVKFVFGVSGNVIALFLFLSPVPTFWRIIRRKSTEDFSGVPYSMTLLNCLLSAWYGLPFVSPNNMLVSTINGAGAAIEAVYVVIFLASAVSAAFAAVALASMLALHGQGRKLMCGLAATVCSICMYASPLSIMRLVVKTKSVEYMPFLLSLAVFLCGTSWFVYGLLGRDPFVAIPNGCGSFLGAVQLVLYAIYRDSNSGGKQQAGDDVEMASDAKSSKKVADDVGGKEDRLV

SEQ ID NO: 9762 - protein, 189 aa, Zea mays subsp. mays
  peptide (1)..(189): Ceres Seq. ID no. 12354208
  misc_feature (69)..(152): Pfam Name: MtN3/saliva family Pfam Description: MtN3/saliva family
  misc_feature (1)..(186): Homolog of NCBI NO: 34907420 NR Description: P0018C10.36 [Oryza sativa (japonica
  misc_feature (1)..(186): Homolog of NCBI NO: 18394992 NR Description: expressed protein; protein id: At1g21460.1, by cDNA: 6411. [Arabidopsis thaliana] >gi|21594011|gb|AAM65929.1| [Arabidopsis thaliana] >gi|28393568|gb|AAO42204.1| unknown
  misc_feature (1)..(186): Homolog of NCBI NO: 25518644 NR Description: hypothetical protein F24J8.9 - Arabidopsis >gi|9454576|gb|AAF87899.1|AC015447_9 Unknown protein [Arabidopsis
  misc_feature (1)..(183): Homolog of NCBI NO: 34912462 NR Description: MtN3-like protein [Oryza sativa (japonica
  misc_feature (1)..(183): Homolog of NCBI NO: 34912454 NR Description: P0681B11.31 [Oryza sativa (japonica
  misc_feature (1)..(153): Homolog of NCBI NO: 18413388 NR Description: putative protein; protein id: At4g10850.1, by cDNA: 33161. [Arabidopsis thaliana] contains similarity to Medicago truncatula MtN3 (GB:Y08726)
  misc_feature (1)..(178): Homolog of NCBI NO: 15219732 NR Description: hypothetical protein; protein id: At1g66770.1 thaliana] >gi|12597757|gb|AAG60070.1|AC013288_4 hypothetical
  misc_feature (1)..(182): Homolog of NCBI NO: 21592355 NR Description: contains similarity to nodulin MtN3 protein
  misc_feature (1)..(153): Homolog of NCBI NO: 18400517 NR Description: expressed protein; protein id: At3g14770.1, by cDNA: gi_15809922, supported by cDNA: gi_17978878 [Arabidopsis
  misc_feature (1)..(182): Homolog of NCBI NO: 18405611 NR Description: Expressed protein; protein id: At3g28007.1, by cDNA: 22745., supported by cDNA: gi_16226221 [Arabidopsis >gi|16226222|gb|AAL16107.1|AF428275_1 unknown protein
MTLLNCLLSAWYGLPFVSPNNMLVSTINGAGAAIEAVYVVIFLASAVSAAFAAVALASMLALHGQGRKLMCGLAATVCSICMYASPLSIMRLVVKTKSVEYMPFLLSLAVFLCGTSWFVYGLLGRDPFVAIPNGCGSFLGAVQLVLYAIYRDSNSGGKQQAGDDVEMASDAKSSKKVADDVGGKEDRLV

SEQ ID NO: 9763 - protein, 168 aa, Zea mays subsp. mays
  peptide (1)..(168): Ceres Seq. ID no. 12354209
  misc_feature (48)..(131): Pfam Name: MtN3/saliva family Pfam Description: MtN3/saliva family
  misc_feature (1)..(165): Homolog of NCBI NO: 34907420 NR Description: P0018C10.36 [Oryza sativa (japonica
  misc_feature (1)..(165): Homolog of NCBI NO: 18394992 NR Description: expressed protein; protein id: At1g21460.1, by cDNA: 6411. [Arabidopsis thaliana] >gi|21594011|gb|AAM65929.1| [Arabidopsis thaliana] >gi|28393568|gb|AAO42204.1| unknown
  misc_feature (1)..(165): Homolog of NCBI NO: 25518644 NR Description: hypothetical protein F24J8.9 - Arabidopsis >gi|9454576|gb|AAF87899.1|AC015447_9 Unknown protein [Arabidopsis
  misc_feature (1)..(162): Homolog of NCBI NO: 34912462 NR Description: MtN3-like protein [Oryza sativa (japonica
  misc_feature (1)..(162): Homolog of NCBI NO: 34912454 NR Description: P0681B11.31 [Oryza sativa (japonica
  misc_feature (1)..(132): Homolog of NCBI NO: 18413388 NR Description: putative protein; protein id: At4g10850.1, by cDNA: 33161. [Arabidopsis thaliana] contains similarity to Medicago truncatula MtN3 (GB:Y08726)
  misc_feature (1)..(157): Homolog of NCBI NO: 15219732 NR Description: hypothetical protein; protein id: At1g66770.1 thaliana] >gi|12597757|gb|AAG60070.1|AC013288_4 hypothetical
  misc_feature (1)..(161): Homolog of NCBI NO: 21592355 NR Description: contains similarity to nodulin MtN3 protein
  misc_feature (1)..(132): Homolog of NCBI NO: 18400517 NR Description: expressed protein; protein id: At3g14770.1, by cDNA: gi_15809922, supported by cDNA: gi_17978878 [Arabidopsis
  misc_feature (1)..(161): Homolog of NCBI NO: 18405611 NR Description: Expressed protein; protein id: At3g28007.1, by cDNA: 22745., supported by cDNA: gi_16226221 [Arabidopsis >gi|16226222|gb|AAL16107.1|AF428275_1 unknown protein
MLVSTINGAGAAIEAVYVVIFLASAVSAAFAAVALASMLALHGQGRKLMCGLAATVCSICMYASPLSIMRLVVKTKSVEYMPFLLSLAVFLCGTSWFVYGLLGRDPFVAIPNGCGSFLGAVQLVLYAIYRDSNSGGKQQAGDDVEMASDAKSSKKVADDVGGKEDRLV

SEQ ID NO: 9764 - DNA, 1068 bp, Zea mays subsp. mays
  misc_feature (1)..(1068): Ceres Seq. ID no. 12578882
  misc_feature: MA Experiment ID: 108522 Result: Up-regulated in Transcription
  misc_feature: MA Experiment 108522 PARAMETER Experiment Name: Zm_42deg_Heat_P Parameter: Age (day) Value: 8
  misc_feature: MA Experiment 108522 PARAMETER Experiment Name: Zm_42deg_Heat_P Parameter: Organism Value: Zea mays
  misc_feature: MA Experiment 108522 PARAMETER Experiment Name: Zm_42deg_Heat_P Parameter: Plant Line Value: 35A19
  misc_feature: MA Experiment 108522 PARAMETER Experiment Name: Zm_42deg_Heat_P Parameter: Temperature (deg C) Value: 42 vs. 22
  misc_feature: MA Experiment 108522 PARAMETER Experiment Name: Zm_42deg_Heat_P Parameter: Timepoint (hr) Value: 1
  misc_feature: MA Experiment 108522 PARAMETER Experiment Name: Zm_42deg_Heat_P Parameter: Tissue Value: Aerial
  misc_feature: MA Experiment ID: 108545 Result: Up-regulated in Transcription
  misc_feature: MA Experiment 108545 PARAMETER Experiment Name: Zm_Imbibed_Seeds_P Parameter: Age (day) Value: 3 vs. 2
  misc_feature: MA Experiment 108545 PARAMETER Experiment Name: Zm_Imbibed_Seeds_P Parameter: Organism Value: Zea mays
  misc_feature: MA Experiment 108545 PARAMETER Experiment Name: Zm_Imbibed_Seeds_P Parameter: Plant Line Value: 35A19
  misc_feature: MA Experiment 108545 PARAMETER Experiment Name: Zm_Imbibed_Seeds_P Parameter: Tissue Value: Aerial vs. Embryo
  misc_feature: MA Experiment ID: 108547 Result: Up-regulated in Transcription
  misc_feature: MA Experiment 108547 PARAMETER Experiment Name: Zm_Imbibed_Seeds_P Parameter: Age (day) Value: 4 vs. 2
  misc_feature: MA Experiment 108547 PARAMETER Experiment Name: Zm_Imbibed_Seeds_P Parameter: Organism Value: Zea mays
  misc_feature: MA Experiment 108547 PARAMETER Experiment Name: Zm_Imbibed_Seeds_P Parameter: Plant Line Value: 35A19
  misc_feature: MA Experiment 108547 PARAMETER Experiment Name: Zm_Imbibed_Seeds_P Parameter: Tissue Value: Aerial vs. Embryo
acacggcagccggattccgaagcgcaccccctcggccccagccaaaagcatcgcagtttctaatcgtttggagagcacacaagaatgtcgttcgtgcagctctctggtgctggagtcgctgcagtggccttcacgaacaagagcctagtctctcggcacgcagcgctacgggtctgctcgtcgaggcgctcgatccgtagcctggtcgttaaggctgcaactgtcgtcaccccaaagtacacttcactgaagcctctgggagatagggtgcttgtgaagcttggtgccgcagaggagaagacagttggtggcattttgcttccatctactgcccagactaaaccacaaggaggtgaggttgttgctgttggagcaggaaggaccatcggggacaagaaaatagctgtggatatagagactggagcacaagtagtatactcaaagtatgctgggactgaggttgaattcaatgactcaaagcatcttattctcaaagaagacgatatcattggtattcttgagacagatgatgtgaaggacatgaagcctctcaatgaccgtgttctcatcaaggttgcagaagccgaagacaaaactcctgggggccttatcctcactgaaacaactaaagagaagccgtccataggaacggttgtagctgttggcccgggtcctctggacgaggaaggcaagagacagccactgtcagtgtcggcgggcagcacagtgctgtactccaagtatgcagggagtgagttcaagggcgcggatggcacggcctacattgtgttgagagcgtcggatgtgatggctgtcctgtcttgagcatttcgtttccggctcgttaatgtagtttgcagccaatagtttgtcatgtggtatgaaacgatcgctttgtggtggtcatcacaccatgctggtgatcatcacaacatatgctgatactgttccggacaatcggctagaatttgttgtgtggcaggtataaacgtcagcatctgatagtgagagcactcggttacttctacagatggtatttaaggggtgatagtcacgcctctttgctgg

SEQ ID NO: 9765 - protein, 246 aa, Zea mays subsp. mays; identical to SEQ ID NO: 6408
  peptide (1)..(246): Ceres Seq. ID no. 12578883
  misc_feature (151)..(246): Pfam Name: Chaperonin 10 Kd subunit Pfam Description: Chaperonin 10 Kd subunit
  misc_feature (4)..(246): Homolog of NCBI NO: 15242045 NR Description: chloroplast Cpn21 protein; protein id: supported by cDNA: gi_10179871, supported by cDNA: gi_14334611, by cDNA: gi_14587372, supported by cDNA: gi_16226814, supported
  misc_feature (1)..(246): Homolog of NCBI NO: 7331143 NR Description: chaperonin 21 precursor [Lycopersicon esculentum]
  misc_feature (4)..(246): Homolog of NCBI NO: 25453528 NR Description: chaperonin 10 [imported] - Arabidopsis thaliana
  misc_feature (2)..(246): Homolog of NCBI NO: 21780187 NR Description: cp10-like protein [Gossypium hirsutum]
  misc_feature (35)..(246): Homolog of NCBI NO: 399241 NR Description: 20 kDa chaperonin, chloroplast precursor (Protein
  misc_feature (150)..(245): Homolog of NCBI NO: 22297730 NR Description: 10kD chaperonin [Thermosynechococcus elongatus >gi|4033374|sp|O50322|CH10_SYNEL 10 kDa chaperonin (Protein (groES protein) >gi|2696700|dbj|BAA23816.1| GroES [Synechococcus
  misc_feature (152)..(246): Homolog of NCBI NO: 3599923 NR Description: GroES/HSP10 homolog [Lawsonia intracellularis]
  misc_feature (55)..(146): Homolog of NCBI NO: 2493659 NR Description: 10 kDa chaperonin (Protein Cpn10) (groES protein)
  misc_feature (55)..(146): Homolog of NCBI NO: 20807075 NR Description: Co-chaperonin GroES (HSP10) [Thermoanaerobacter
  misc_feature (54)..(145): Homolog of NCBI NO: 23113174 NR Description: hypothetical protein [Desulfitobacterium

SEQ ID NO: 9766 - DNA, 449 bp, Zea mays subsp. mays; identical to SEQ ID NO: 4098
  misc_feature (1)..(449): Ceres Seq. ID no. 12595631
  misc_feature: MA Experiment ID: 108530 Result: Down-regulated in Transcription
  misc_feature: MA Experiment 108530 PARAMETER Experiment Name: Zm_Imbibed_Seeds_P Parameter: Age (day) Value: 6 vs. 2
  misc_feature: MA Experiment 108530 PARAMETER Experiment Name: Zm_Imbibed_Seeds_P Parameter: Organism Value: Zea mays
  misc_feature: MA Experiment 108530 PARAMETER Experiment Name: Zm_Imbibed_Seeds_P Parameter: Plant Line Value: 35A19
  misc_feature: MA Experiment 108530 PARAMETER Experiment Name: Zm_Imbibed_Seeds_P Parameter: Tissue Value: Aerial vs. Embryo
  misc_feature: MA Experiment ID: 108535 Result: Up-regulated in Transcription
  misc_feature: MA Experiment 108535 PARAMETER Experiment Name: Zm_Meristem_P Parameter: Age (day) Value: 8
  misc_feature: MA Experiment 108535 PARAMETER Experiment Name: Zm_Meristem_P Parameter: Organism Value: Zea mays
  misc_feature: MA Experiment 108535 PARAMETER Experiment Name: Zm_Meristem_P Parameter: Plant Line Value: 35A19
  misc_feature: MA Experiment 108535 PARAMETER Experiment Name: Zm_Meristem_P Parameter: Tissue Value: Root Meristem vs. Above Root Meristem
  misc_feature: MA Experiment ID: 20000108 Result: Up-regulated in Transcription
  misc_feature: MA Experiment 20000108 PARAMETER Experiment Name: Zm_Root-Tips_P Parameter: Age (day) Value: 12
  misc_feature: MA Experiment 20000108 PARAMETER Experiment Name: Zm_Root-Tips_P Parameter: Organism Value: Zea mays
  misc_feature: MA Experiment 20000108 PARAMETER Experiment Name: Zm_Root-Tips_P Parameter: Tissue Value: Root tips vs. Root mid region    35
  misc_feature: MA Experiment 20000108 PARAMETER Experiment Name: Zm_Root-Tips_P Parameter: Tissue Value: Root tips vs. Root mid region   Sequence Listing-Misc Features (4)
  misc_feature: MA Experiment ID: 20000478 Result: Down-regulated in Transcription
  misc_feature: MA Experiment 20000478 PARAMETER Experiment Name: Zm_5mM_SA_P Parameter: Age (day) Value: 11
  misc_feature: MA Experiment 20000478 PARAMETER Experiment Name: Zm_5mM_SA_P Parameter: Organism Value: Zea mays
  misc_feature: MA Experiment 20000478 PARAMETER Experiment Name: Zm_5mM_SA_P Parameter: Plant Line Value: 35A19
  misc_feature: MA Experiment 20000478 PARAMETER Experiment Name: Zm_5mM_SA_P Parameter: Timepoint (hr) Value: 72
  misc_feature: MA Experiment 20000478 PARAMETER Experiment Name: Zm_5mM_SA_P Parameter: Tissue Value: Aerial
  misc_feature: MA Experiment 20000478 PARAMETER Experiment Name: Zm_5mM_SA_P Parameter: Treatment Value: 5mM SA vs. No Treatment
  misc_feature: MA Experiment ID: 20000479 Result: Down-regulated in Transcription
  misc_feature: MA Experiment 20000479 PARAMETER Experiment Name: Zm_Drought_P Parameter: Age (day) Value: 10
  misc_feature: MA Experiment 20000479 PARAMETER Experiment Name: Zm_Drought_P Parameter: Organism Value: Zea mays
  misc_feature: MA Experiment 20000479 PARAMETER Experiment Name: Zm_Drought_P Parameter: Plant Line Value: 35A19
  misc_feature: MA Experiment 20000479 PARAMETER Experiment Name: Zm_Drought_P Parameter: Timepoint (hr) Value: 48
  misc_feature: MA Experiment 20000479 PARAMETER Experiment Name: Zm_Drought_P Parameter: Tissue Value: Aerial
  misc_feature: MA Experiment 20000479 PARAMETER Experiment Name: Zm_Drought_P Parameter: Treatment Value: Drought vs. No Drought
  misc_feature: MA Experiment ID: 20000488 Result: Up-regulated in Transcription
  misc_feature: MA Experiment 20000488 PARAMETER Experiment Name: Zm_50mM_NH4NO3_L_to_H_P Parameter: Organism Value: Zea mays
  misc_feature: MA Experiment 20000488 PARAMETER Experiment Name: Zm_50mM_NH4NO3_L_to_H_P Parameter: Timepoint (hr) Value: 8
  misc_feature: MA Experiment 20000488 PARAMETER Experiment Name: Zm_50mM_NH4NO3_L_to_H_P Parameter: Tissue Value: Leaves
  misc_feature: MA Experiment 20000488 PARAMETER Experiment Name: Zm_50mM_NH4NO3_L_to_H_P Parameter: Treatment Value: 50mM NH4NO3 vs. 100mM Mannitol

SEQ ID NO: 9767 - protein, 124 aa, Zea mays subsp. mays; identical to SEQ ID NO: 4099
  peptide (1)..(124): Ceres Seq. ID no. 12595632
  misc_feature (100)..(100): Xaa is any aa, unknown or other
  misc_feature (105)..(105): Xaa is any aa, unknown or other
  misc_feature (117)..(117): Xaa is any aa, unknown or other

SEQ ID NO: 9768 - protein, 106 aa, Zea mays subsp. mays; identical to SEQ ID NO: 4100
  peptide (1)..(106): Ceres Seq. ID no. 12595633
  misc_feature (5)..(106): Homolog of NCBI NO: 27573361 NR Description: unknown protein [Oryza sativa (japonica
  misc_feature (34)..(106): Homolog of NCBI NO: 18410491 NR Description: expressed protein; protein id: At1g73940.1, by cDNA: 32565., supported by cDNA: gi_16323092 [Arabidopsis
  misc_feature (40)..(106): Homolog of NCBI NO: 15239880 NR Description: putative protein; protein id: At5g49410.1, by cDNA: 6602. [Arabidopsis thaliana] >gi|9759424|dbj|BAB09911.1|
  misc_feature (40)..(106): Homolog of NCBI NO: 21594042 NR Description: unknown [Arabidopsis thaliana]
  misc_feature (34)..(106): Homolog of NCBI NO: 38637563 NR Description: unknown protein [Oryza sativa (japonica
  misc_feature (99)..(99): Xaa is any aa, unknown or other
  misc_feature (105)..(105): Xaa is any aa, unknown or other

SEQ ID NO: 9769 - protein, 102 aa, Zea mays subsp. mays; identical to SEQ ID NO: 4101
  peptide (1)..(102): Ceres Seq. ID no. 12595634
  misc_feature (1)..(102): Homolog of NCBI NO: 27573361 NR Description: unknown protein [Oryza sativa (japonica
  misc_feature (30)..(102): Homolog of NCBI NO: 18410491 NR Description: expressed protein; protein id: At1g73940.1, by cDNA: 32565., supported by cDNA: gi_16323092 [Arabidopsis
  misc_feature (36)..(102): Homolog of NCBI NO: 15239880 NR Description: putative protein; protein id: At5g49410.1, by cDNA: 6602. [Arabidopsis thaliana] >gi|9759424|dbj|BAB09911.1|
  misc_feature (36)..(102): Homolog of NCBI NO: 21594042 NR Description: unknown [Arabidopsis thaliana]
  misc_feature (30)..(102): Homolog of NCBI NO: 38637563 NR Description: unknown protein [Oryza sativa (japonica
  misc_feature (95)..(95): Xaa is any aa, unknown or other
  misc_feature (101)..(101): Xaa is any aa, unknown or other

SEQ ID NO: 9770 - DNA, 1722 bp, Zea mays subsp. mays
  misc_feature (1)..(1722): Ceres Seq. ID no. 12367714
  misc_feature: MA Experiment ID: 108503 Result: Up-regulated in Transcription
  misc_feature: MA Experiment 108503 PARAMETER Experiment Name: Zm_Drought_P Parameter: Age (day) Value: 8
  misc_feature: MA Experiment 108503 PARAMETER Experiment Name: Zm_Drought_P Parameter: Organism Value: Zea mays
  misc_feature: MA Experiment 108503 PARAMETER Experiment Name: Zm_Drought_P Parameter: Plant Line Value: 35A19
  misc_feature: MA Experiment 108503 PARAMETER Experiment Name: Zm_Drought_P Parameter: Timepoint (hr) Value: 6
  misc_feature: MA Experiment 108503 PARAMETER Experiment Name: Zm_Drought_P Parameter: Tissue Value: Aerial
  misc_feature: MA Experiment 108503 PARAMETER Experiment Name: Zm_Drought_P Parameter: Treatment Value: Drought vs. No Drought
  misc_feature: MA Experiment ID: 108504 Result: Up-regulated in Transcription
  misc_feature: MA Experiment 108504 PARAMETER Experiment Name: Zm_Drought_P Parameter: Age (day) Value: 8
  misc_feature: MA Experiment 108504 PARAMETER Experiment Name: Zm_Drought_P Parameter: Organism Value: Zea mays
  misc_feature: MA Experiment 108504 PARAMETER Experiment Name: Zm_Drought_P Parameter: Plant Line Value: 35A19
  misc_feature: MA Experiment 108504 PARAMETER Experiment Name: Zm_Drought_P Parameter: Timepoint (hr) Value: 12
  misc_feature: MA Experiment 108504 PARAMETER Experiment Name: Zm_Drought_P Parameter: Tissue Value: Aerial
  misc_feature: MA Experiment 108504 PARAMETER Experiment Name: Zm_Drought_P Parameter: Treatment Value: Drought vs. No Drought
  misc_feature: MA Experiment ID: 108539 Result: Up-regulated in Transcription
  misc_feature: MA Experiment 108539 PARAMETER Experiment Name: Zm_20percent_PEG_P Parameter: Age (day) Value: 8
  misc_feature: MA Experiment 108539 PARAMETER Experiment Name: Zm_20percent_PEG_P Parameter: Organism Value: Zea mays
  misc_feature: MA Experiment 108539 PARAMETER Experiment Name: Zm_20percent_PEG_P Parameter: Plant Line Value: 35A19
  misc_feature: MA Experiment 108539 PARAMETER Experiment Name: Zm_20percent_PEG_P Parameter: Timepoint (hr) Value: 1
  misc_feature: MA Experiment 108539 PARAMETER Experiment Name: Zm_20percent_PEG_P Parameter: Tissue Value: Aerial
  misc_feature: MA Experiment 108539 PARAMETER Experiment Name: Zm_20percent_PEG_P Parameter: Treatment Value: 20percent PEG vs. No Treatment
  misc_feature: MA Experiment ID: 108540 Result: Up-regulated in Transcription
  misc_feature: MA Experiment 108540 PARAMETER Experiment Name: Zm_20percent_PEG_P Parameter: Age (day) Value: 8
  misc_feature: MA Experiment 108540 PARAMETER Experiment Name: Zm_20percent_PEG_P Parameter: Organism Value: Zea mays
  misc_feature: MA Experiment 108540 PARAMETER Experiment Name: Zm_20percent_PEG_P Parameter: Plant Line Value: 35A19
  misc_feature: MA Experiment 108540 PARAMETER Experiment Name: Zm_20percent_PEG_P Parameter: Timepoint (hr) Value: 6
  misc_feature: MA Experiment 108540 PARAMETER Experiment Name: Zm_20percent_PEG_P Parameter: Tissue Value: Aerial
  misc_feature: MA Experiment 108540 PARAMETER Experiment Name: Zm_20percent_PEG_P Parameter: Treatment Value: 20percent PEG vs. No Treatment
  misc_feature: MA Experiment ID: 108542 Result: Up-regulated in Transcription
  misc_feature: MA Experiment 108542 PARAMETER Experiment Name: Zm_150mM_NaCl_P Parameter: Age (day) Value: 8
  misc_feature: MA Experiment 108542 PARAMETER Experiment Name: Zm_150mM_NaCl_P Parameter: Organism Value: Zea mays
  misc_feature: MA Experiment 108542 PARAMETER Experiment Name: Zm_150mM_NaCl_P Parameter: Plant Line Value: 35A19
  misc_feature: MA Experiment 108542 PARAMETER Experiment Name: Zm_150mM_NaCl_P Parameter: Timepoint (hr) Value: 6
  misc_feature: MA Experiment 108542 PARAMETER Experiment Name: Zm_150mM_NaCl_P Parameter: Tissue Value: Aerial
  misc_feature: MA Experiment 108542 PARAMETER Experiment Name: Zm_150mM_NaCl_P Parameter: Treatment Value: 150mM NaCl vs. No Treatment
  misc_feature: MA Experiment ID: 108544 Result: Up-regulated in Transcription
  misc_feature: MA Experiment ID: 108556 Result: Up-regulated in Transcription
  misc_feature: MA Experiment 108556 PARAMETER Experiment Name: Zm_Drought_P Parameter: Age (day) Value: 9
  misc_feature: MA Experiment 108556 PARAMETER Experiment Name: Zm_Drought_P Parameter: Organism Value: Zea mays
  misc_feature: MA Experiment 108556 PARAMETER Experiment Name: Zm_Drought_P Parameter: Plant Line Value: 35A19
  misc_feature: MA Experiment 108556 PARAMETER Experiment Name: Zm_Drought_P Parameter: Timepoint (hr) Value: 24
  misc_feature: MA Experiment 108556 PARAMETER Experiment Name: Zm_Drought_P Parameter: Tissue Value: Aerial
  misc_feature: MA Experiment 108556 PARAMETER Experiment Name: Zm_Drought_P Parameter: Treatment Value: Drought vs. No Drought
  misc_feature: MA Experiment ID: 108597 Result: Up-regulated in Transcription
  misc_feature: MA Experiment 108597 PARAMETER Experiment Name: Zm_100uM_ABA_P Parameter: Age (day) Value: 9
  misc_feature: MA Experiment 108597 PARAMETER Experiment Name: Zm_100uM_ABA_P Parameter: Organism Value: Zea mays
  misc_feature: MA Experiment 108597 PARAMETER Experiment Name: Zm_100uM_ABA_P Parameter: Plant Line Value: 35A19
  misc_feature: MA Experiment 108597 PARAMETER Experiment Name: Zm_100uM_ABA_P Parameter: Timepoint (hr) Value: 24
  misc_feature: MA Experiment 108597 PARAMETER Experiment Name: Zm_100uM_ABA_P Parameter: Tissue Value: Aerial
  misc_feature: MA Experiment 108597 PARAMETER Experiment Name: Zm_100uM_ABA_P Parameter: Treatment Value: 100uM ABA vs. No Treatment
  misc_feature: MA Experiment ID: 20000478 Result: Up-regulated in Transcription
  misc_feature: MA Experiment 20000478 PARAMETER Experiment Name: Zm_5mM_SA_P Parameter: Age (day) Value: 11
  misc_feature: MA Experiment 20000478 PARAMETER Experiment Name: Zm_5mM_SA_P Parameter: Organism Value: Zea mays
  misc_feature: MA Experiment 20000478 PARAMETER Experiment Name: Zm_5mM_SA_P Parameter: Plant Line Value: 35A19
  misc_feature: MA Experiment 20000478 PARAMETER Experiment Name: Zm_5mM_SA_P Parameter: Timepoint (hr) Value: 72
  misc_feature: MA Experiment 20000478 PARAMETER Experiment Name: Zm_5mM_SA_P Parameter: Tissue Value: Aerial
  misc_feature: MA Experiment 20000478 PARAMETER Experiment Name: Zm_5mM_SA_P Parameter: Treatment Value: 5mM SA vs. No Treatment
  misc_feature: MA Experiment ID: 20000480 Result: Up-regulated in Transcription
  misc_feature: MA Experiment 20000480 PARAMETER Experiment Name: Zm_Drought_P Parameter: Age (day) Value: 11
  misc_feature: MA Experiment 20000480 PARAMETER Experiment Name: Zm_Drought_P Parameter: Organism Value: Zea mays
  misc_feature: MA Experiment 20000480 PARAMETER Experiment Name: Zm_Drought_P Parameter: Plant Line Value: 35A19
  misc_feature: MA Experiment 20000480 PARAMETER Experiment Name: Zm_Drought_P Parameter: Timepoint (hr) Value: 72
  misc_feature: MA Experiment 20000480 PARAMETER Experiment Name: Zm_Drought_P Parameter: Tissue Value: Aerial
  misc_feature: MA Experiment 20000480 PARAMETER Experiment Name: Zm_Drought_P Parameter: Treatment Value: Drought vs. No Drought
  misc_feature: MA Experiment ID: 20000492 Result: Down-regulated in Transcription
  misc_feature: MA Experiment 20000492 PARAMETER Experiment Name: Zm_Hybrid_Seed_Dev_P Parameter: DAP Value: 12
  misc_feature: MA Experiment 20000492 PARAMETER Experiment Name: Zm_Hybrid_Seed_Dev_P Parameter: Organism Value: Zea mays
  misc_feature: MA Experiment 20000492 PARAMETER Experiment Name: Zm_Hybrid_Seed_Dev_P Parameter: Plant Line Value: 35A19
  misc_feature: MA Experiment 20000492 PARAMETER Experiment Name: Zm_Hybrid_Seed_Dev_P Parameter: Tissue Value: Fert Kernel vs. Unfert Floret
cgttgtatgatgatgatgacgagggaaccaaaaaagaagaagaaagaattccaaaaccctccctctcctgttctgtatcttctgcggctccgccgtggattcttcgtgcgataaactaagcagggcgctgcacgaggatggggtgcggggcgtcgagccagaaggacgccggggcgccgcggaggcggccggtgagcgtcggcgacgtggtcgtcttcctcccgggcctccgcgtgccgagggccgtcgacttggcccaggcgctcggcggctgcctggccaggagcgccgtggaccggctgtcggctctgcgatcgcgggtcgtcgagatggcaatgcgagagtcggcggcggcgctcaagcccaggcggagggcggcggcacggcacgggtctagtacagccaatcttctacaggccctcgaagactacttgccggctctgctaggactggtaaaagaaggtagcgtcttgaggaacaaagtgcacttcacctggagtaaccaggaggataatgctgaggagacggccatgccagacgcctggtacgaggtgctgtccatgctgcatctgatggccatggtctgcctgctgcaggccaacgccctgcttctcccgaggtcatacggcgatggctatgccccaagggtttctgaagagagtcgacgggccactgttgatgtcttcttgaaggcagctggatacctagactgtgcagttcggcatgtactcccgaagatgccactcgagctaaggagacagcttccagtagacctggctgaaggaaatctcaaagctctaagcctccaagccctgggtcagggggttgacatgcagcttggtttggctattgatagtccaaaggccactttagcagtaaaacggcgcttagcctgtgagatggtcaaatattggcaacaagttcaagagagcattccagagcttcctatctctgatggatggggtaaaaagcaccggctgtttataaagtggaaatatgttgaagctaaggctgcagcatactatttccacggtttgattcttgacgagggaaataccgaaaaatcccatggaatggcaatagctgcactccaagcttcagaggaatttctaaaagaaagcaaaagggtttcagaagccttccatgcaactcctccaacatcgaggagtcccaatccattcggaacagcaaaatatctgtttgacaagatcccaagagatgcttccagcaaggttcgaatcaaccaggacctgtatactcaagaaaaggtcattggagcgccacccccattaccagattttgcattggcgctaacacctgaagaatatgatcttcctccactagatccactttggaacaaagaagacacaagccattaagtgtatatgcagcagaatggttgcttctggcaaaaatattggctctggagagaaaggaaggaccaagatctgccatgtcaagagctgatgtgtaatgaatgaagtgtacaaagtattttcaaacaaaaatacatgttcacaaatttacgcaaggcctgaagacaatctgaagagctttgtacaggcgattcttcttctgacaagggaaatgctatgtcaaagggttccttgatcattgtgcatcttgatgcttgcattttgtcaaaaacagattttcagcaatttatgtagaactgtaaactagcctctgatcgaaagtggcagccttcaaattttttttttc

SEQ ID NO: 9771 - protein, 413 aa, Zea mays subsp. mays
  peptide (1)..(413): Ceres Seq. ID no. 12367715
  misc_feature (1)..(411): Homolog of NCBI NO: 38344447 NR Description: OSJNBa0038O10.19 [Oryza sativa (japonica
  misc_feature (1)..(408): Homolog of NCBI NO: 15219459 NR Description: hypothetical protein; protein id: At1g73390.1, by cDNA: gi_18252172 [Arabidopsis thaliana]
  misc_feature (1)..(400): Homolog of NCBI NO: 25372891 NR Description: protein F2H15.16 [imported] - Arabidopsis >gi|9665071|gb|AAF97273.1|AC034106_16 F2H15.16 [Arabidopsis
  misc_feature (1)..(400): Homolog of NCBI NO: 15220908 NR Description: hypothetical protein; protein id: At1g17940.1
  misc_feature (1)..(403): Homolog of NCBI NO: 30684716 NR Description: expressed protein [Arabidopsis thaliana]
MGCGASSQKDAGAPRRRPVSVGDVVVFLPGLRVPRAVDLAQALGGCLARSAVDRLSALRSRVVEMAMRESAAALKPRRRAAARHGSSTANLLQALEDYLPALLGLVKEGSVLRNKVHFTWSNQEDNAEETAMPDAWYEVLSMLHLMAMVCLLQANALLLPRSYGDGYAPRVSEESRRATVDVFLKAAGYLDCAVRHVLPKMPLELRRQLPVDLAEGNLKALSLQALGQGVDMQLGLAIDSPKATLAVKRRLACEMVKYWQQVQESIPELPISDGWGKKHRLFIKWKYVEAKAAAYYFHGLILDEGNTEKSHGMAIAALQASEEFLKESKRVSEAFHATPPTSRSPNPFGTAKYLFDKIPRDASSKVRINQDLYTQEKVIGAPPPLPDFALALTPEEYDLPPLDPLWNKEDTSH

SEQ ID NO: 9772 - protein, 349 aa, Zea mays subsp. mays
  peptide (1)..(349): Ceres Seq. ID no. 12367716
  misc_feature (1)..(347): Homolog of NCBI NO: 38344447 NR Description: OSJNBa0038O10.19 [Oryza sativa (japonica
  misc_feature (1)..(344): Homolog of NCBI NO: 15219459 NR Description: hypothetical protein; protein id: At1g73390.1, by cDNA: gi_18252172 [Arabidopsis thaliana]
  misc_feature (1)..(336): Homolog of NCBI NO: 25372891 NR Description: protein F2H15.16 [imported] - Arabidopsis >gi|9665071|gb|AAF97273.1|AC034106_16 F2H15.16 [Arabidopsis
  misc_feature (1)..(336): Homolog of NCBI NO: 15220908 NR Description: hypothetical protein; protein id: At1g17940.1
  misc_feature (1)..(339): Homolog of NCBI NO: 30684716 NR Description: expressed protein [Arabidopsis thaliana]
MAMRESAAALKPRRRAAARHGSSTANLLQALEDYLPALLGLVKEGSVLRNKVHFTWSNQEDNAEETAMPDAWYEVLSMLHLMAMVCLLQANALLLPRSYGDGYAPRVSEESRRATVDVFLKAAGYLDCAVRHVLPKMPLELRRQLPVDLAEGNLKALSLQALGQGVDMQLGLAIDSPKATLAVKRRLACEMVKYWQQVQESIPELPISDGWGKKHRLFIKWKYVEAKAAAYYFHGLILDEGNTEKSHGMAIAALQASEEFLKESKRVSEAFHATPPTSRSPNPFGTAKYLFDKIPRDASSKVRINQDLYTQEKVIGAPPPLPDFALALTPEEYDLPPLDPLWNKEDTSH

SEQ ID NO: 9773 - protein, 347 aa, Zea mays subsp. mays
  peptide (1)..(347): Ceres Seq. ID no. 12367717
  misc_feature (1)..(345): Homolog of NCBI NO: 38344447 NR Description: OSJNBa0038O10.19 [Oryza sativa (japonica
  misc_feature (1)..(342): Homolog of NCBI NO: 15219459 NR Description: hypothetical protein; protein id: At1g73390.1, by cDNA: gi_18252172 [Arabidopsis thaliana]
  misc_feature (1)..(334): Homolog of NCBI NO: 25372891 NR Description: protein F2H15.16 [imported] - Arabidopsis >gi|9665071|gb|AAF97273.1|AC034106_16 F2H15.16 [Arabidopsis
  misc_feature (1)..(334): Homolog of NCBI NO: 15220908 NR Description: hypothetical protein; protein id: At1g17940.1
  misc_feature (1)..(337): Homolog of NCBI NO: 30684716 NR Description: expressed protein [Arabidopsis thaliana]
MRESAAALKPRRRAAARHGSSTANLLQALEDYLPALLGLVKEGSVLRNKVHFTWSNQEDNAEETAMPDAWYEVLSMLHLMAMVCLLQANALLLPRSYGDGYAPRVSEESRRATVDVFLKAAGYLDCAVRHVLPKMPLELRRQLPVDLAEGNLKALSLQALGQGVDMQLGLAIDSPKATLAVKRRLACEMVKYWQQVQESIPELPISDGWGKKHRLFIKWKYVEAKAAAYYFHGLILDEGNTEKSHGMAIAALQASEEFLKESKRVSEAFHATPPTSRSPNPFGTAKYLFDKIPRDASSKVRINQDLYTQEKVIGAPPPLPDFALALTPEEYDLPPLDPLWNKEDTSH

SEQ ID NO: 9774 - DNA, 1322 bp, Zea mays subsp. mays
  misc_feature (1)..(1322): Ceres Seq. ID no. 12350141
  misc_feature: MA Experiment ID: 108528 Result: Up-regulated in Transcription
  misc_feature: MA Experiment 108528 PARAMETER Experiment Name: Zm_Imbibed_Seeds_P Parameter: Age (day) Value: 5 vs. 2
  misc_feature: MA Experiment 108528 PARAMETER Experiment Name: Zm_Imbibed_Seeds_P Parameter: Organism Value: Zea mays
  misc_feature: MA Experiment 108528 PARAMETER Experiment Name: Zm_Imbibed_Seeds_P Parameter: Plant Line Value: 35A19
  misc_feature: MA Experiment 108528 PARAMETER Experiment Name: Zm_Imbibed_Seeds_P Parameter: Tissue Value: Aerial vs. Embryo
  misc_feature: MA Experiment ID: 108530 Result: Up-regulated in Transcription
  misc_feature: MA Experiment 108530 PARAMETER Experiment Name: Zm_Imbibed_Seeds_P Parameter: Age (day) Value: 6 vs. 2
  misc_feature: MA Experiment 108530 PARAMETER Experiment Name: Zm_Imbibed_Seeds_P Parameter: Organism Value: Zea mays
  misc_feature: MA Experiment 108530 PARAMETER Experiment Name: Zm_Imbibed_Seeds_P Parameter: Plant Line Value: 35A19
  misc_feature: MA Experiment 108530 PARAMETER Experiment Name: Zm_Imbibed_Seeds_P Parameter: Tissue Value: Aerial vs. Embryo
  misc_feature: MA Experiment ID: 108543 Result: Down-regulated in Transcription
aaaaaatttgcgacaattcacctgcatacaggggcagcatatctagcagctactccgcccccaaatgctcgccggcatatcccgtttcctcactcgccgccgccgcccgccctttccgcttgccgctaccgccgctgcagcagccatgtcgtcgtcgtcgtccacggcagcgaacatctccgagcgtccgatctctccggacaccacccgcgtggcctgggtggggacgggcgtcatgggccagtcaatggccggccacctcctcgccgccggctacgctctcaccgtattcaaccggacggcatccaagacccagggcctcgtctcccgcggcgccagcctcgcggacagcccgcgcgcggccgccgcggctgccgatgtcatcttcctcatggtcggcttcccctccgacgtccgctccaccgccctcgatccatccacaggcgccctctctggcctcaccccaggcggtatcctagtcgacatgaccacctccgaccccaccctcgccgccgagatagccgcggccgcggccgccgccggctgctcggccgtcgacgcccccgtctccggcggtgaccgaggggcccgcaacgccaccctctccatcttcgctggcggcgacgccgccgtcgttgctcgcctggcgccgctcttcaagctcatgggaaacgcgctgtacatgggcgggcccggcgcggggcagcgcgcgaagctgggcaaccagatcgccatcgcatccaccatggtagggctcgtggagggcatggtgtacgcgcacaaggccgggctggacgtggccaagtggctggaggccatctccaccggcgcagccgggtccaagtcgctggaactgtatgggaagcggatcctggagagggatatggcggctggcttctatgtccggcacttcgtcaaggacctcggtatctgcctgttggaatgccaggccatggggctgtcgctgccggggctcgccctcgcgcaacagctgtacgtgtcgctgatcgcgcacggcgagggcgggctcggtacacaggcgcttatactggccgtcgagcggctgaacaacaccagcctcgagaagaaggacgaatgaaaggccccaggctctagctttgatgaacttgtgggaagctttgcttggtgccttggtgcaagtatgcaagatcgaggtgactgttaagttgtctttcagagttctacagttgttcacttttgtagtagtatatatgttatgcacttgtgcaaaaaattgtgctggcttggatgattgcttagctctacctgtttacatccgccaccggttcaaataagatttt

SEQ ID NO: 9775 - protein, 344 aa, Zea mays subsp. mays
  peptide (1)..(344): Ceres Seq. ID no. 12350142
  misc_feature (47)..(210): Pfam Name: NAD binding domain of 6-phosphogluconate dehydrogenase Pfam Description: NAD binding domain of 6-phosphogluconate
  misc_feature (30)..(344): Homolog of NCBI NO: 34909392 NR Description: putative dehydrogenase [Oryza sativa (japonica group)] >gi|20521418|dbj|BAB91928.1| putative dehydrogenase
  misc_feature (13)..(343): Homolog of NCBI NO: 15233455 NR Description: putative protein; protein id: At4g29120.1, by cDNA: gi_13877868, supported by cDNA: gi_17065607 [Arabidopsis
  misc_feature (49)..(342): Homolog of NCBI NO: 32472744 NR Description: 3-hydroxyisobutyrate dehydrogenase [Pirellula sp.]
  misc_feature (43)..(338): Homolog of NCBI NO: 18409781 NR Description: putative dehydrogenase; protein id: At1g71180.1, by cDNA: gi_15293142, supported by cDNA: gi_21281067 [Arabidopsis >gi|15293143|gb|AAK93682.1| putative dehydrogenase dehydrogenase
  misc_feature (43)..(338): Homolog of NCBI NO: 25283629 NR Description: probable dehydrogenase F23N20.17 [imported] -
  misc_feature (43)..(338): Homolog of NCBI NO: 30698779 NR Description: dehydrogenase -related [Arabidopsis thaliana]
  misc_feature (48)..(328): Homolog of NCBI NO: 15674197 NR Description: 3-hydroxyisobutyrate dehydrogenase (EC 1.1.1.31) lactis subsp. lactis] >gi|25283627|pir||G86901 hypothetical
  misc_feature (49)..(328): Homolog of NCBI NO: 16800073 NR Description: similar to 3-hydroxyisobutyrate dehydrogenase (B.
  misc_feature (43)..(331): Homolog of NCBI NO: 23098036 NR Description: 3-hydroxyisobutyrate dehydrogenase
  misc_feature (49)..(328): Homolog of NCBI NO: 16803045 NR Description: similar to 3-hydroxyisobutyrate dehydrogenase (B.
MLAGISRFLTRRRRPPFPLAATAAAAAMSSSSSTAANISERPISPDTTRVAWVGTGVMGQSMAGHLLAAGYALTVFNRTASKTQGLVSRGASLADSPRAAAAAADVIFLMVGFPSDVRSTALDPSTGALSGLTPGGILVDMTTSDPTLAAEIAAAAAAAGCSAVDAPVSGGDRGARNATLSIFAGGDAAVVARLAPLFKLMGNALYMGGPGAGQRAKLGNQIAIASTMVGLVEGMVYAHKAGLDVAKWLEAISTGAAGSKSLELYGKRILERDMAAGFYVRHFVKDLGICLLECQAMGLSLPGLALAQQLYVSLIAHGEGGLGTQALILAVERLNNTSLEKKDE

SEQ ID NO: 9776 - protein, 317 aa, Zea mays subsp. mays
  peptide (1)..(317): Ceres Seq. ID no. 12350143
  misc_feature (20)..(183): Pfam Name: NAD binding domain of 6-phosphogluconate dehydrogenase Pfam Description: NAD binding domain of 6-phosphogluconate
  misc_feature (3)..(317): Homolog of NCBI NO: 34909392 NR Description: putative dehydrogenase [Oryza sativa (japonica group)] >gi|20521418|dbj|BAB91928.1| putative dehydrogenase
  misc_feature (1)..(316): Homolog of NCBI NO: 15233455 NR Description: putative protein; protein id: At4g29120.1, by cDNA: gi_13877868, supported by cDNA: gi_17065607 [Arabidopsis
  misc_feature (22)..(315): Homolog of NCBI NO: 32472744 NR Description: 3-hydroxyisobutyrate dehydrogenase [Pirellula sp.]
  misc_feature (16)..(311): Homolog of NCBI NO: 18409781 NR Description: putative dehydrogenase; protein id: At1g71180.1, by cDNA: gi_15293142, supported by cDNA: gi_21281067 [Arabidopsis >gi|15293143|gb|AAK93682.1| putative dehydrogenase dehydrogenase
  misc_feature (16)..(311): Homolog of NCBI NO: 25283629 NR Description: probable dehydrogenase F23N20.17 [imported] -
  misc_feature (16)..(311): Homolog of NCBI NO: 30698779 NR Description: dehydrogenase -related [Arabidopsis thaliana]
  misc_feature (21)..(301): Homolog of NCBI NO: 15674197 NR Description: 3-hydroxyisobutyrate dehydrogenase (EC 1.1.1.31) lactis subsp. lactis] >gi|25283627|pir||G86901 hypothetical
  misc_feature (22)..(301): Homolog of NCBI NO: 16800073 NR Description: similar to 3-hydroxyisobutyrate dehydrogenase (B.
  misc_feature (16)..(304): Homolog of NCBI NO: 23098036 NR Description: 3-hydroxyisobutyrate dehydrogenase
  misc_feature (22)..(301): Homolog of NCBI NO: 16803045 NR Description: similar to 3-hydroxyisobutyrate dehydrogenase (B.
MSSSSSTAANISERPISPDTTRVAWVGTGVMGQSMAGHLLAAGYALTVFNRTASKTQGLVSRGASLADSPRAAAAAADVIFLMVGFPSDVRSTALDPSTGALSGLTPGGILVDMTTSDPTLAAEIAAAAAAAGCSAVDAPVSGGDRGARNATLSIFAGGDAAVVARLAPLFKLMGNALYMGGPGAGQRAKLGNQIAIASTMVGLVEGMVYAHKAGLDVAKWLEAISTGAAGSKSLELYGKRILERDMAAGFYVRHFVKDLGICLLECQAMGLSLPGLALAQQLYVSLIAHGEGGLGTQALILAVERLNNTSLEKKDE

SEQ ID NO: 9777 - protein, 287 aa, Zea mays subsp. mays
  peptide (1)..(287): Ceres Seq. ID no. 12350144
  misc_feature (1)..(153): Pfam Name: NAD binding domain of 6-phosphogluconate dehydrogenase Pfam Description: NAD binding domain of 6-phosphogluconate
  misc_feature (1)..(287): Homolog of NCBI NO: 34909392 NR Description: putative dehydrogenase [Oryza sativa (japonica group)] >gi|20521418|dbj|BAB91928.1| putative dehydrogenase
  misc_feature (1)..(286): Homolog of NCBI NO: 15233455 NR Description: putative protein; protein id: At4g29120.1, by cDNA: gi_13877868, supported by cDNA: gi_17065607 [Arabidopsis
  misc_feature (1)..(285): Homolog of NCBI NO: 32472744 NR Description: 3-hydroxyisobutyrate dehydrogenase [Pirellula sp.]
  misc_feature (1)..(281): Homolog of NCBI NO: 18409781 NR Description: putative dehydrogenase; protein id: At1g71180.1, by cDNA: gi_15293142, supported by cDNA: gi_21281067 [Arabidopsis >gi|15293143|gb|AAK93682.1| putative dehydrogenase dehydrogenase
  misc_feature (1)..(281): Homolog of NCBI NO: 25283629 NR Description: probable dehydrogenase F23N20.17 [imported] -
  misc_feature (1)..(281): Homolog of NCBI NO: 30698779 NR Description: dehydrogenase -related [Arabidopsis thaliana]
  misc_feature (1)..(271): Homolog of NCBI NO: 15674197 NR Description: 3-hydroxyisobutyrate dehydrogenase (EC 1.1.1.31) lactis subsp. lactis] >gi|25283627|pir||G86901 hypothetical
  misc_feature (1)..(271): Homolog of NCBI NO: 16800073 NR Description: similar to 3-hydroxyisobutyrate dehydrogenase (B.
  misc_feature (1)..(274): Homolog of NCBI NO: 23098036 NR Description: 3-hydroxyisobutyrate dehydrogenase
  misc_feature (1)..(271): Homolog of NCBI NO: 16803045 NR Description: similar to 3-hydroxyisobutyrate dehydrogenase (B.
MGQSMAGHLLAAGYALTVFNRTASKTQGLVSRGASLADSPRAAAAAADVIFLMVGFPSDVRSTALDPSTGALSGLTPGGILVDMTTSDPTLAAEIAAAAAAAGCSAVDAPVSGGDRGARNATLSIFAGGDAAVVARLAPLFKLMGNALYMGGPGAGQRAKLGNQIAIASTMVGLVEGMVYAHKAGLDVAKWLEAISTGAAGSKSLELYGKRILERDMAAGFYVRHFVKDLGICLLECQAMGLSLPGLALAQQLYVSLIAHGEGGLGTQALILAVERLNNTSLEKKDE

SEQ ID NO: 9778 - DNA, 1217 bp, Zea mays subsp. mays
  misc_feature (1)..(1217): Ceres Seq. ID no. 13499227
  misc_feature: MA Experiment ID: 108527 Result: Down-regulated in Transcription
  misc_feature: MA Experiment 108527 PARAMETER Experiment Name: Zm_5mM_NO_P Parameter: Age (day) Value: 8
  misc_feature: MA Experiment 108527 PARAMETER Experiment Name: Zm_5mM_NO_P Parameter: Organism Value: Zea mays
  misc_feature: MA Experiment 108527 PARAMETER Experiment Name: Zm_5mM_NO_P Parameter: Plant Line Value: 35A19
  misc_feature: MA Experiment 108527 PARAMETER Experiment Name: Zm_5mM_NO_P Parameter: Timepoint (hr) Value: 6
  misc_feature: MA Experiment 108527 PARAMETER Experiment Name: Zm_5mM_NO_P Parameter: Tissue Value: Aerial
  misc_feature: MA Experiment 108527 PARAMETER Experiment Name: Zm_5mM_NO_P Parameter: Treatment Value: 5mM NO vs. No Treatment
  misc_feature: MA Experiment ID: 108528 Result: Up-regulated in Transcription
  misc_feature: MA Experiment 108528 PARAMETER Experiment Name: Zm_Imbibed_Seeds_P Parameter: Age (day) Value: 5 vs. 2
  misc_feature: MA Experiment 108528 PARAMETER Experiment Name: Zm_Imbibed_Seeds_P Parameter: Organism Value: Zea mays
  misc_feature: MA Experiment 108528 PARAMETER Experiment Name: Zm_Imbibed_Seeds_P Parameter: Plant Line Value: 35A19
  misc_feature: MA Experiment 108528 PARAMETER Experiment Name: Zm_Imbibed_Seeds_P Parameter: Tissue Value: Aerial vs. Embryo
  misc_feature: MA Experiment ID: 108530 Result: Up-regulated in Transcription
  misc_feature: MA Experiment 108530 PARAMETER Experiment Name: Zm_Imbibed_Seeds_P Parameter: Age (day) Value: 6 vs. 2
  misc_feature: MA Experiment 108530 PARAMETER Experiment Name: Zm_Imbibed_Seeds_P Parameter: Organism Value: Zea mays
  misc_feature: MA Experiment 108530 PARAMETER Experiment Name: Zm_Imbibed_Seeds_P Parameter: Plant Line Value: 35A19
  misc_feature: MA Experiment 108530 PARAMETER Experiment Name: Zm_Imbibed_Seeds_P Parameter: Tissue Value: Aerial vs. Embryo
  misc_feature: MA Experiment ID: 108544 Result: Up-regulated in Transcription
  misc_feature: MA Experiment ID: 108545 Result: Up-regulated in Transcription
  misc_feature: MA Experiment 108545 PARAMETER Experiment Name: Zm_Imbibed_Seeds_P Parameter: Age (day) Value: 3 vs. 2
  misc_feature: MA Experiment 108545 PARAMETER Experiment Name: Zm_Imbibed_Seeds_P Parameter: Organism Value: Zea mays
  misc_feature: MA Experiment 108545 PARAMETER Experiment Name: Zm_Imbibed_Seeds_P Parameter: Plant Line Value: 35A19
  misc_feature: MA Experiment 108545 PARAMETER Experiment Name: Zm_Imbibed_Seeds_P Parameter: Tissue Value: Aerial vs. Embryo
  misc_feature: MA Experiment ID: 108547 Result: Up-regulated in Transcription
  misc_feature: MA Experiment 108547 PARAMETER Experiment Name: Zm_Imbibed_Seeds_P Parameter: Age (day) Value: 4 vs. 2
  misc_feature: MA Experiment 108547 PARAMETER Experiment Name: Zm_Imbibed_Seeds_P Parameter: Organism Value: Zea mays
  misc_feature: MA Experiment 108547 PARAMETER Experiment Name: Zm_Imbibed_Seeds_P Parameter: Plant Line Value: 35A19
  misc_feature: MA Experiment 108547 PARAMETER Experiment Name: Zm_Imbibed_Seeds_P Parameter: Tissue Value: Aerial vs. Embryo
  misc_feature: MA Experiment ID: 108689 Result: Up-regulated in Transcription
  misc_feature: MA Experiment 108689 PARAMETER Experiment Name: Zm_Drought_Roots_P Parameter: Age (day) Value: 9
  misc_feature: MA Experiment 108689 PARAMETER Experiment Name: Zm_Drought_Roots_P Parameter: Organism Value: Zea mays
  misc_feature: MA Experiment 108689 PARAMETER Experiment Name: Zm_Drought_Roots_P Parameter: Plant Line Value: 35A19
  misc_feature: MA Experiment 108689 PARAMETER Experiment Name: Zm_Drought_Roots_P Parameter: Timepoint (hr) Value: 24
  misc_feature: MA Experiment 108689 PARAMETER Experiment Name: Zm_Drought_Roots_P Parameter: Tissue Value: Roots
  misc_feature: MA Experiment 108689 PARAMETER Experiment Name: Zm_Drought_Roots_P Parameter: Treatment Value: Drought vs. No Drought
  misc_feature: MA Experiment ID: 20000535 Result: Down-regulated in Transcription
  misc_feature: MA Experiment 20000535 PARAMETER Experiment Name: Zm_Hybrid_Seed_Dev_P Parameter: DAP Value: 30 vs. 12
  misc_feature: MA Experiment 20000535 PARAMETER Experiment Name: Zm_Hybrid_Seed_Dev_P Parameter: Organism Value: Zea mays
  misc_feature: MA Experiment 20000535 PARAMETER Experiment Name: Zm_Hybrid_Seed_Dev_P Parameter: Plant Line Value: 35A19
  misc_feature: MA Experiment 20000535 PARAMETER Experiment Name: Zm_Hybrid_Seed_Dev_P Parameter: Tissue Value: Embryo vs. Unfert Floret
  misc_feature: MA Experiment ID: 20001608 Result: Up-regulated in Transcription
  misc_feature: MA Experiment 20001608 PARAMETER Experiment Name: Zm_50ppm_KNO3_L-to-H_P Parameter: Age (day) Value: 21
  misc_feature: MA Experiment 20001608 PARAMETER Experiment Name: Zm_50ppm_KNO3_L-to-H_P Parameter: Organism Value: Zea mays
  misc_feature: MA Experiment 20001608 PARAMETER Experiment Name: Zm_50ppm_KNO3_L-to-H_P Parameter: Plant Line Value: 35A19
  misc_feature: MA Experiment 20001608 PARAMETER Experiment Name: Zm_50ppm_KNO3_L-to-H_P Parameter: Timepoint (hr) Value: 48
  misc_feature: MA Experiment 20001608 PARAMETER Experiment Name: Zm_50ppm_KNO3_L-to-H_P Parameter: Tissue Value: Shoots
  misc_feature: MA Experiment 20001608 PARAMETER Experiment Name: Zm_50ppm_KNO3_L-to-H_P Parameter: Treatment Value: 50ppm KNO3 vs. 50ppm KCl
gacaaacggattgacaccgacacataaaaaacacctttttagacatttctcgagaccaccactactcgtgcccgtgcggtggttcgaccagatccatctcacacccttatcctctttacgcctcaccactacagagaaaaagagaaacctgcgagcgacggggactatggccgccacccgcaccgccctggccctgctagggcacgagggcatggaatctgggcccaggccggcggcgccgcgccgcagcaggctacgcgtcgtcgccgtcgcgctgcggaccaggcccaccagcctcgcggccccgggtctcccgcccgcggcgccggagcccgtgctgccgtcgccgcccgtggccgcgggcgccncggcggtgctgctngaggcgggcgtgccgcccgccgacctccggcgcgcggcggggatgtgcccggagctgctgtccgtgtccgcggaggccgtcgaggccgcgctccggttcctcacggaggaggcgggcgtcgccgaggccgacctcccgcgcgtgctccggcggcgcccgcgcctgctcgtctctcccgtgncggcgcggctgcggcccacgctctacttcctgcgcgcgctcggcgtgcccgacctgcaccgccgcgccgacctgctatccttctccgtggagggcaagctgctgccgcggctcgagttcctcgagtcgctgggcctgccggcgcgcgccgcccgctccatggcgcgccgcttccccgcgctnttcggctacggcgtggaggggaacatgcggcccaaggcggactacctcctgggcgccatggcccgccgcgccgacgagctgtacgacttccccgagtacttctcctacgcgctggcnacgcgcatcgtgccgcgttacgaggcctgcgccgcgcgcggggtcagcaggctgccactgcccgccatgtccgccccggggacgccaagttccgcgccactctcgccagctgtgtcgggtccatgctgccccggaggcggtcggcgctgtggcacgccaagtgggtggatgacgacgcggcggcggcggcgaaggagaccacggtgtgacgtgcgcattggtagcgagcgagaggctcttgcctcttggtggtgtaacatatgtccataaggatcggcattggctgcttgtaaagtatgatagccatgatgaattatctagttggtcctcccagtgaacaatggcactgttggct

SEQ ID NO: 9779 - protein, 376 aa, Zea mays subsp. mays
  peptide (1)..(376): Ceres Seq. ID no. 13499228
  misc_feature (135)..(310): Pfam Name: mTERF Pfam Description: mTERF
  misc_feature (135)..(310): Homolog of NCBI NO: 21537209 NR Description: unknown [Arabidopsis thaliana]
  misc_feature (135)..(310): Homolog of NCBI NO: 30686631 NR Description: expressed protein [Arabidopsis thaliana]
  misc_feature (135)..(310): Homolog of NCBI NO: 30686636 NR Description: expressed protein [Arabidopsis thaliana]
  misc_feature (111)..(310): Homolog of NCBI NO: 15226787 NR Description: expressed protein [Arabidopsis thaliana]
  misc_feature (111)..(310): Homolog of NCBI NO: 28392870 NR Description: unknown protein [Arabidopsis thaliana]
  misc_feature (73)..(310): Homolog of NCBI NO: 15230219 NR Description: hypothetical protein [Arabidopsis thaliana] gb|AAC26693.1~gene_id:MCB22.4~similar to unknown protein
  misc_feature (111)..(310): Homolog of NCBI NO: 15227524 NR Description: hypothetical protein [Arabidopsis thaliana]
  misc_feature (111)..(310): Homolog of NCBI NO: 28204784 NR Description: hypothetical protein [Arabidopsis thaliana]
  misc_feature (124)..(311): Homolog of NCBI NO: 27817836 NR Description: OJ1127_E01.4 [Oryza sativa (japonica
  misc_feature (130)..(302): Homolog of NCBI NO: 33589698 NR Description: At1g78930 [Arabidopsis thaliana]
  misc_feature (123)..(123): Xaa is any aa, unknown or other
  misc_feature (127)..(127): Xaa is any aa, unknown or other
  misc_feature (188)..(188): Xaa is any aa, unknown or other
  misc_feature (248)..(248): Xaa is any aa, unknown or other
  misc_feature (287)..(287): Xaa is any aa, unknown or other
TNGLTPTHKKHLFRHFSRPPLLVPVRWFDQIHLTPLSSLRLTTTEKKRNLRATGTMAATRTALALLGHEGMESGPRPAAPRRSRLRVVAVALRTRPTSLAAPGLPPAAPEPVLPSPPVAAGAXAVLXEAGVPPADLRRAAGMCPELLSVSAEAVEAALRFLTEEAGVAEADLPRVLRRRPRLLVSPVXARLRPTLYFLRALGVPDLHRRADLLSFSVEGKLLPRLEFLESLGLPARAARSMARRFPAXFGYGVEGNMRPKADYLLGAMARRADELYDFPEYFSYALXTRIVPRYEACAARGVSRLPLPAMSAPGTPSSAPLSPAVSGPCCPGGGRRCGTPSGWMTTRRRRRRRPRCDVRIGSEREALASWWCNICP

SEQ ID NO: 9780 - protein, 321 aa, Zea mays subsp. mays
  peptide (1)..(321): Ceres Seq. ID no. 13499229
  misc_feature (80)..(255): Pfam Name: mTERF Pfam Description: mTERF
  misc_feature (80)..(255): Homolog of NCBI NO: 21537209 NR Description: unknown [Arabidopsis thaliana]
  misc_feature (80)..(255): Homolog of NCBI NO: 30686631 NR Description: expressed protein [Arabidopsis thaliana]
  misc_feature (80)..(255): Homolog of NCBI NO: 30686636 NR Description: expressed protein [Arabidopsis thaliana]
  misc_feature (56)..(255): Homolog of NCBI NO: 15226787 NR Description: expressed protein [Arabidopsis thaliana]
  misc_feature (56)..(255): Homolog of NCBI NO: 28392870 NR Description: unknown protein [Arabidopsis thaliana]
  misc_feature (18)..(255): Homolog of NCBI NO: 15230219 NR Description: hypothetical protein [Arabidopsis thaliana] gb|AAC26693.1~gene_id:MCB22.4~similar to unknown protein
  misc_feature (56)..(255): Homolog of NCBI NO: 15227524 NR Description: hypothetical protein [Arabidopsis thaliana]
  misc_feature (56)..(255): Homolog of NCBI NO: 28204784 NR Description: hypothetical protein [Arabidopsis thaliana]
  misc_feature (69)..(256): Homolog of NCBI NO: 27817836 NR Description: OJ1127_E01.4 [Oryza sativa (japonica
  misc_feature (75)..(247): Homolog of NCBI NO: 33589698 NR Description: At1g78930 [Arabidopsis thaliana]
  misc_feature (68)..(68): Xaa is any aa, unknown or other
  misc_feature (72)..(72): Xaa is any aa, unknown or other
  misc_feature (133)..(133): Xaa is any aa, unknown or other
  misc_feature (193)..(193): Xaa is any aa, unknown or other
  misc_feature (232)..(232): Xaa is any aa, unknown or other
MAATRTALALLGHEGMESGPRPAAPRRSRLRVVAVALRTRPTSLAAPGLPPAAPEPVLPSPPVAAGAXAVLXEAGVPPADLRRAAGMCPELLSVSAEAVEAALRFLTEEAGVAEADLPRVLRRRPRLLVSPVXARLRPTLYFLRALGVPDLHRRADLLSFSVEGKLLPRLEFLESLGLPARAARSMARRFPAXFGYGVEGNMRPKADYLLGAMARRADELYDFPEYFSYALXTRIVPRYEACAARGVSRLPLPAMSAPGTPSSAPLSPAVSGPCCPGGGRRCGTPSGWMTTRRRRRRRPRCDVRIGSEREALASWWCNICP

SEQ ID NO: 9781 - protein, 306 aa, Zea mays subsp. mays
  peptide (1)..(306): Ceres Seq. ID no. 13499230
  misc_feature (65)..(240): Pfam Name: mTERF Pfam Description: mTERF
  misc_feature (65)..(240): Homolog of NCBI NO: 21537209 NR Description: unknown [Arabidopsis thaliana]
  misc_feature (65)..(240): Homolog of NCBI NO: 30686631 NR Description: expressed protein [Arabidopsis thaliana]
  misc_feature (65)..(240): Homolog of NCBI NO: 30686636 NR Description: expressed protein [Arabidopsis thaliana]
  misc_feature (41)..(240): Homolog of NCBI NO: 15226787 NR Description: expressed protein [Arabidopsis thaliana]
  misc_feature (41)..(240): Homolog of NCBI NO: 28392870 NR Description: unknown protein [Arabidopsis thaliana]
  misc_feature (3)..(240): Homolog of NCBI NO: 15230219 NR Description: hypothetical protein [Arabidopsis thaliana] gb|AAC26693.1~gene_id:MCB22.4~similar to unknown protein
  misc_feature (41)..(240): Homolog of NCBI NO: 15227524 NR Description: hypothetical protein [Arabidopsis thaliana]
  misc_feature (41)..(240): Homolog of NCBI NO: 28204784 NR Description: hypothetical protein [Arabidopsis thaliana]
  misc_feature (54)..(241): Homolog of NCBI NO: 27817836 NR Description: OJ1127_E01.4 [Oryza sativa (japonica
  misc_feature (60)..(232): Homolog of NCBI NO: 33589698 NR Description: At1g78930 [Arabidopsis thaliana]
  misc_feature (53)..(53): Xaa is any aa, unknown or other
  misc_feature (57)..(57): Xaa is any aa, unknown or other
  misc_feature (118)..(118): Xaa is any aa, unknown or other
  misc_feature (178)..(178): Xaa is any aa, unknown or other
  misc_feature (217)..(217): Xaa is any aa, unknown or other
MESGPRPAAPRRSRLRVVAVALRTRPTSLAAPGLPPAAPEPVLPSPPVAAGAXAVLXEAGVPPADLRRAAGMCPELLSVSAEAVEAALRFLTEEAGVAEADLPRVLRRRPRLLVSPVXARLRPTLYFLRALGVPDLHRRADLLSFSVEGKLLPRLEFLESLGLPARAARSMARRFPAXFGYGVEGNMRPKADYLLGAMARRADELYDFPEYFSYALXTRIVPRYEACAARGVSRLPLPAMSAPGTPSSAPLSPAVSGPCCPGGGRRCGTPSGWMTTRRRRRRRPRCDVRIGSEREALASWWCNICP

SEQ ID NO: 9782 - DNA, 1648 bp, Zea mays subsp. mays
  misc_feature (1)..(1648): Ceres Seq. ID no. 12595157
  misc_feature: MA Experiment ID: 108687 Result: Down-regulated in Transcription
  misc_feature: MA Experiment 108687 PARAMETER Experiment Name: Zm_Embryos-Flowers__P Parameter: Tissue Value: Embryo vs. Aerial+
acaaagagcgagcgagagagagagagagagagagcagctctcaaggtcatggtcttatggaggagcatggtggtgctacctagcaagagctccccactataaagcgcccccacacaccataccacagctcagagcttcttttcatcatcttgtagaaaagaaagagtgagagtgagattggcaagggtatagggttcttggtcgatcaaatatctttcccctcttggattctcctcttcctgcttcgttctcgccagatcgatctcactacgtgcctgcgtagctagccactctgtatgcaccatcaccaccaggaccaggccatgggcgacgcgctgtgggacctgctcggggaggagatggcagcggcgggcggggagcacgggctgcccccggggtttcggttccaccccaccgacgaggagctggtcaccttctacctcgccgccaaggtgttcaacggcgcctgctgtggcatcgacatcgccgaggtggacctcaaccggtgcgagccgtgggagctccccgacgcggcgcgtatgggggagcgcgagtggtacttcttcagcctccgcgaccgcaagtaccccacgggcctccgtaccaaccgcgccaccggcgccgggtactggaaggccaccgggaaggaccgcgaggtgctcaacgccgccaccggcgcgctcctcggcatgaagaagacgctcgtcttctacaagggccgggcgccgcgcggcgagaagaccaagtgggtcctgcacgagtatcgcctcgacggcgacttcgccgccgctcgccgcccctgcaaggaggaatgggtcatctgcaggatactgcacaaggcaggcgaccagtatagcaagctgatgatggtgaagagcccctactacctgcccatggcgatggacccttccagcttctgcttccaggaggacccaaccgggcatcccctcccgaaccctagtggctgcacccccttccaccacggncacccccaccacagcatgcagccgcctccattgccgccgagcaaccatgctggcaaggccgtcttcacgggagcagcagcctcctgctgcatgcaacaagagccggcagacggcagcaacagcgccgtgctgcccatgccgccgttccctcccttcaccaccatcgtcgccggcaagccggcggtcccggcgccgccgccccaggttgtcaacgccggtccacaggagccaccgccacctacctggctggaggcctacctgcagcacactggtgggatcctttatgagatgggtgtgggtccaactgcagcgcccaggggcgcgtgatccggaccgtcggttccttagggttacccccctacgtacgtactgaaacactgatgatccatcgatttacctggtctgtaatgtgcggtgaagcttagtatttccaagtgacatatttcgacaagcacttgtagttattaaaaaagagttatcttgtattcggtggcatcattagtcgtcgttgttatgaaatcatgtgtgcttataacatgcatgaatgcatgcatttggatcatcgatcagagctgtcctgagcttgtacgtgctacgtactgtgctcatgcatccatccacatgcaaagtggtgcttgctaaaatgtactatccaaatgtcc

SEQ ID NO: 9783 - protein, 338 aa, Zea mays subsp. mays
  peptide (1)..(338): Ceres Seq. ID no. 12595158
  misc_feature (31)..(159): Pfam Name: No apical meristem (NAM) protein Pfam Description: No apical meristem (NAM) protein
  misc_feature (10)..(338): Homolog of NCBI NO: 28411877 NR Description: putative NAM [Oryza sativa (japonica
  misc_feature (9)..(185): Homolog of NCBI NO: 15223043 NR Description: unknown protein; protein id: At1g76420.1
  misc_feature (43)..(185): Homolog of NCBI NO: 21389170 NR Description: nam-like protein 16 [Petunia x hybrida]
  misc_feature (28)..(182): Homolog of NCBI NO: 1279640 NR Description: NAM [Petunia x hybrida]
  misc_feature (31)..(312): Homolog of NCBI NO: 15232511 NR Description: NAM-like protein; protein id: At3g15170.1, by cDNA: gi_12060421 [Arabidopsis thaliana]
  misc_feature (26)..(181): Homolog of NCBI NO: 15238882 NR Description: CUC2 (dbj|BAA19529.1); protein id: At5g53950.1 thaliana] >gi|1944132|dbj|BAA19529.1| CUC2 [Arabidopsis thaliana]
  misc_feature (31)..(291): Homolog of NCBI NO: 11994506 NR Description: contains similarity to NAM (no apical meristem)
  misc_feature (28)..(181): Homolog of NCBI NO: 40737029 NR Description: putative OsNAC1 protein [Oryza sativa (japonica
  misc_feature (28)..(215): Homolog of NCBI NO: 15241819 NR Description: NAM / CUC2 - like protein; protein id: supported by cDNA: 113779., supported by cDNA: gi_15810576, by cDNA: gi_20259574 [Arabidopsis thaliana]
  misc_feature (28)..(215): Homolog of NCBI NO: 21536866 NR Description: NAM / CUC2-like protein [Arabidopsis thaliana]
  misc_feature (230)..(230): Xaa is any aa, unknown or other
MHHHHQDQAMGDALWDLLGEEMAAAGGEHGLPPGFRFHPTDEELVTFYLAAKVFNGACCGIDIAEVDLNRCEPWELPDAARMGEREWYFFSLRDRKYPTGLRTNRATGAGYWKATGKDREVLNAATGALLGMKKTLVFYKGRAPRGEKTKWVLHEYRLDGDFAAARRPCKEEWVICRILHKAGDQYSKLMMVKSPYYLPMAMDPSSFCFQEDPTGHPLPNPSGCTPFHHXHPHHSMQPPPLPPSNHAGKAVFTGAAASCCMQQEPADGSNSAVLPMPPFPPFTTIVAGKPAVPAPPPQVVNAGPQEPPPPTWLEAYLQHTGGILYEMGVGPTAAPRGA

SEQ ID NO: 9784 - protein, 329 aa, Zea mays subsp. mays
  peptide (1)..(329): Ceres Seq. ID no. 12595159
  misc_feature (22)..(150): Pfam Name: No apical meristem (NAM) protein Pfam Description: No apical meristem (NAM) protein
  misc_feature (1)..(329): Homolog of NCBI NO: 28411877 NR Description: putative NAM [Oryza sativa (japonica
  misc_feature (1)..(176): Homolog of NCBI NO: 15223043 NR Description: unknown protein; protein id: At1g76420.1
  misc_feature (34)..(176): Homolog of NCBI NO: 21389170 NR Description: nam-like protein 16 [Petunia x hybrida]
  misc_feature (19)..(173): Homolog of NCBI NO: 1279640 NR Description: NAM [Petunia x hybrida]
  misc_feature (22)..(303): Homolog of NCBI NO: 15232511 NR Description: NAM-like protein; protein id: At3g15170.1, by cDNA: gi_12060421 [Arabidopsis thaliana]
  misc_feature (17)..(172): Homolog of NCBI NO: 15238882 NR Description: CUC2 (dbj|BAA19529.1); protein id: At5g53950.1 thaliana] >gi|1944132|dbj|BAA19529.1| CUC2 [Arabidopsis thaliana]
  misc_feature (22)..(282): Homolog of NCBI NO: 11994506 NR Description: contains similarity to NAM (no apical meristem)
  misc_feature (19)..(172): Homolog of NCBI NO: 40737029 NR Description: putative OsNAC1 protein [Oryza sativa (japonica
  misc_feature (19)..(206): Homolog of NCBI NO: 15241819 NR Description: NAM / CUC2 - like protein; protein id: supported by cDNA: 113779., supported by cDNA: gi_15810576, by cDNA: gi_20259574 [Arabidopsis thaliana]
  misc_feature (19)..(206): Homolog of NCBI NO: 21536866 NR Description: NAM / CUC2-like protein [Arabidopsis thaliana]
  misc_feature (221)..(221): Xaa is any aa, unknown or other
MGDALWDLLGEEMAAAGGEHGLPPGFRFHPTDEELVTFYLAAKVFNGACCGIDIAEVDLNRCEPWELPDAARMGEREWYFFSLRDRKYPTGLRTNRATGAGYWKATGKDREVLNAATGALLGMKKTLVFYKGRAPRGEKTKWVLHEYRLDGDFAAARRPCKEEWVICRILHKAGDQYSKLMMVKSPYYLPMAMDPSSFCFQEDPTGHPLPNPSGCTPFHHXHPHHSMQPPPLPPSNHAGKAVFTGAAASCCMQQEPADGSNSAVLPMPPFPPFTTIVAGKPAVPAPPPQVVNAGPQEPPPPTWLEAYLQHTGGILYEMGVGPTAAPRGA

SEQ ID NO: 9785 - protein, 317 aa, Zea mays subsp. mays
  peptide (1)..(317): Ceres Seq. ID no. 12595160
  misc_feature (10)..(138): Pfam Name: No apical meristem (NAM) protein Pfam Description: No apical meristem (NAM) protein
  misc_feature (1)..(317): Homolog of NCBI NO: 28411877 NR Description: putative NAM [Oryza sativa (japonica
  misc_feature (1)..(164): Homolog of NCBI NO: 15223043 NR Description: unknown protein; protein id: At1g76420.1
  misc_feature (22)..(164): Homolog of NCBI NO: 21389170 NR Description: nam-like protein 16 [Petunia x hybrida]
  misc_feature (7)..(161): Homolog of NCBI NO: 1279640 NR Description: NAM [Petunia x hybrida]
  misc_feature (10)..(291): Homolog of NCBI NO: 15232511 NR Description: NAM-like protein; protein id: At3g15170.1, by cDNA: gi_12060421 [Arabidopsis thaliana]
  misc_feature (5)..(160): Homolog of NCBI NO: 15238882 NR Description: CUC2 (dbj|BAA19529.1); protein id: At5g53950.1 thaliana] >gi|1944132|dbj|BAA19529.1| CUC2 [Arabidopsis thaliana]
  misc_feature (10)..(270): Homolog of NCBI NO: 11994506 NR Description: contains similarity to NAM (no apical meristem)
  misc_feature (7)..(160): Homolog of NCBI NO: 40737029 NR Description: putative OsNAC1 protein [Oryza sativa (japonica
  misc_feature (7)..(194): Homolog of NCBI NO: 15241819 NR Description: NAM / CUC2 - like protein; protein id: supported by cDNA: 113779., supported by cDNA: gi_15810576, by cDNA: gi_20259574 [Arabidopsis thaliana]
  misc_feature (7)..(194): Homolog of NCBI NO: 21536866 NR Description: NAM / CUC2-like protein [Arabidopsis thaliana]
  misc_feature (209)..(209): Xaa is any aa, unknown or other
MAAAGGEHGLPPGFRFHPTDEELVTFYLAAKVFNGACCGIDIAEVDLNRCEPWELPDAARMGEREWYFFSLRDRKYPTGLRTNRATGAGYWKATGKDREVLNAATGALLGMKKTLVFYKGRAPRGEKTKWVLHEYRLDGDFAAARRPCKEEWVICRILHKAGDQYSKLMMVKSPYYLPMAMDPSSFCFQEDPTGHPLPNPSGCTPFHHXHPHHSMQPPPLPPSNHAGKAVFTGAAASCCMQQEPADGSNSAVLPMPPFPPFTTIVAGKPAVPAPPPQVVNAGPQEPPPPTWLEAYLQHTGGILYEMGVGPTAAPRGA

SEQ ID NO: 9786 - DNA, 1284 bp, Zea mays subsp. mays
  misc_feature (1)..(1284): Ceres Seq. ID no. 13493673
  misc_feature: MA Experiment ID: 108528 Result: Up-regulated in Transcription
  misc_feature: MA Experiment 108528 PARAMETER Experiment Name: Zm_Imbibed_Seeds_P Parameter: Age (day) Value: 5 vs. 2
  misc_feature: MA Experiment 108528 PARAMETER Experiment Name: Zm_Imbibed_Seeds_P Parameter: Organism Value: Zea mays
  misc_feature: MA Experiment 108528 PARAMETER Experiment Name: Zm_Imbibed_Seeds_P Parameter: Plant Line Value: 35A19
  misc_feature: MA Experiment 108528 PARAMETER Experiment Name: Zm_Imbibed_Seeds_P Parameter: Tissue Value: Aerial vs. Embryo
  misc_feature: MA Experiment ID: 108530 Result: Up-regulated in Transcription
  misc_feature: MA Experiment 108530 PARAMETER Experiment Name: Zm_Imbibed_Seeds_P Parameter: Age (day) Value: 6 vs. 2
  misc_feature: MA Experiment 108530 PARAMETER Experiment Name: Zm_Imbibed_Seeds_P Parameter: Organism Value: Zea mays
  misc_feature: MA Experiment 108530 PARAMETER Experiment Name: Zm_Imbibed_Seeds_P Parameter: Plant Line Value: 35A19
  misc_feature: MA Experiment 108530 PARAMETER Experiment Name: Zm_Imbibed_Seeds_P Parameter: Tissue Value: Aerial vs. Embryo
  misc_feature: MA Experiment ID: 108536 Result: Down-regulated in Transcription
  misc_feature: MA Experiment 108536 PARAMETER Experiment Name: Zm_Meristem_P Parameter: Age (day) Value: 8
  misc_feature: MA Experiment 108536 PARAMETER Experiment Name: Zm_Meristem_P Parameter: Organism Value: Zea mays
  misc_feature: MA Experiment 108536 PARAMETER Experiment Name: Zm_Meristem_P Parameter: Plant Line Value: 35A19
  misc_feature: MA Experiment 108536 PARAMETER Experiment Name: Zm_Meristem_P Parameter: Tissue Value: Shoot Meristem vs. Above Shoot Meristem
  misc_feature: MA Experiment ID: 108543 Result: Up-regulated in Transcription
  misc_feature: MA Experiment ID: 108545 Result: Up-regulated in Transcription
  misc_feature: MA Experiment 108545 PARAMETER Experiment Name: Zm_Imbibed_Seeds_P Parameter: Age (day) Value: 3 vs. 2
  misc_feature: MA Experiment 108545 PARAMETER Experiment Name: Zm_Imbibed_Seeds_P Parameter: Organism Value: Zea mays
  misc_feature: MA Experiment 108545 PARAMETER Experiment Name: Zm_Imbibed_Seeds_P Parameter: Plant Line Value: 35A19
  misc_feature: MA Experiment 108545 PARAMETER Experiment Name: Zm_Imbibed_Seeds_P Parameter: Tissue Value: Aerial vs. Embryo
  misc_feature: MA Experiment ID: 108546 Result: Down-regulated in Transcription
  misc_feature: MA Experiment 108546 PARAMETER Experiment Name: Zm_Imbibed_Seeds_P Parameter: Age (day) Value: 3 vs. 2
  misc_feature: MA Experiment 108546 PARAMETER Experiment Name: Zm_Imbibed_Seeds_P Parameter: Organism Value: Zea mays
  misc_feature: MA Experiment 108546 PARAMETER Experiment Name: Zm_Imbibed_Seeds_P Parameter: Plant Line Value: 35A19
  misc_feature: MA Experiment 108546 PARAMETER Experiment Name: Zm_Imbibed_Seeds_P Parameter: Tissue Value: Roots vs. Embryo
  misc_feature: MA Experiment ID: 108547 Result: Up-regulated in Transcription
  misc_feature: MA Experiment 108547 PARAMETER Experiment Name: Zm_Imbibed_Seeds_P Parameter: Age (day) Value: 4 vs. 2
  misc_feature: MA Experiment 108547 PARAMETER Experiment Name: Zm_Imbibed_Seeds_P Parameter: Organism Value: Zea mays
  misc_feature: MA Experiment 108547 PARAMETER Experiment Name: Zm_Imbibed_Seeds_P Parameter: Plant Line Value: 35A19
  misc_feature: MA Experiment 108547 PARAMETER Experiment Name: Zm_Imbibed_Seeds_P Parameter: Tissue Value: Aerial vs. Embryo
  misc_feature: MA Experiment ID: 20000534 Result: Down-regulated in Transcription
  misc_feature: MA Experiment 20000534 PARAMETER Experiment Name: Zm_Hybrid_Pollen_P Parameter: Age (day) Value: 8
  misc_feature: MA Experiment 20000534 PARAMETER Experiment Name: Zm_Hybrid_Pollen_P Parameter: Organism Value: Zea mays
  misc_feature: MA Experiment 20000534 PARAMETER Experiment Name: Zm_Hybrid_Pollen_P Parameter: Plant Line Value: 35A19
  misc_feature: MA Experiment 20000534 PARAMETER Experiment Name: Zm_Hybrid_Pollen_P Parameter: Tissue Value: Pollen vs. Aerial
gtcacttcattcccttgtcactagctagatcgactgactggagaggagctatcgtctactacctctgggcgagctgcgtgtcctgtcgtccttctcgctcctgtggtcgccgcgcgcggcggtgcgatggggcggtcgccgtgctgcgagaaggaggccgggctgaagaaggggccgtggacgtccgaggaggaccagaaactgctggccttcatcgagcagcacggacacggctgctggcgctcgctgccggctaaggccggtctgcggcggtgcggcaagagctgccggctccggtggaccaactacctgcggccggacatcaagcggggcaagttcacgctgcaggaggagcagaccatcatccagctccacgctctcctcggcaacaggtggtcgtcgatcgcgacgcacctgcccaagcgcacggacaacgagatcaagaactactggaacacgcacctcaagaagcggctcgccaagatgggcatcgaccccgtcacgcacaaggcccgcgccgacgtggggggctcctctggcgcaggcaacaactctggagcgcgctacagggcagccgcgcacctcagccacacggcgcagtgggagagcgcgcgcctcgaggccgaggcgcgtctggcgcgcgaggccaggctgcgtgcccttgcctcgccgccgccgccgccagggccagggccgggacccgcgtttagcgggctcgagtcgccgacatcgactntgagcttctccgagagcgtgctgttcgccagtgcggcgcacgacacccacgccctgacgtcacgcgcttacgcagaggcgttcggggcggagcagcaacagcgcttcgctgacactgccgccgccgccgacgccgcgccaggcttccttgcaggcgtccttctcggctgctccgtcgccggcgcggagaaggggttcgcggcctcgtcgacggacgccagcgtctgtgagcagcagcaggaggaagaggacaagggctactggagcagcatactgaacatggtcaactcctccatgtcgtcgtccacgtcctcgctgacttctgatgctgtcacggaccccgccgccgcgtacttgccgccggcgacggcggcggccgagttctgagtgattgtcgtccaataataacgaacctgtgctaatgttaccttgtcatgtgtgttgcttactagtaggtgcgttttggtgctagttagtttatttacgtgctaatgggctgtcgcccacgtgtgcttgtgctttatgatgtgcaataataaacatgtacgt

SEQ ID NO: 9787 - protein, 331 aa, Zea mays subsp. mays
  peptide (1)..(331): Ceres Seq. ID no. 13493674
  misc_feature (15)..(62): Pfam Name: Myb-like DNA-binding domain Pfam Description: Myb-like DNA-binding domain
  misc_feature (1)..(278): Homolog of NCBI NO: 38344966 NR Description: OSJNBa0072F16.11 [Oryza sativa (japonica
  misc_feature (1)..(178): Homolog of NCBI NO: 28628947 NR Description: MYB1 [Dendrobium sp. XMW-2002-1]
  misc_feature (228)..(301): Homolog of NCBI NO: 28628947 NR Description: MYB1 [Dendrobium sp. XMW-2002-1]
  misc_feature (1)..(209): Homolog of NCBI NO: 27125807 NR Description: MYB27 protein [Oryza sativa (japonica
  misc_feature (1)..(211): Homolog of NCBI NO: 15232045 NR Description: myb family transcription factor [Arabidopsis
  misc_feature (1)..(193): Homolog of NCBI NO: 13346188 NR Description: GHMYB25 [Gossypium hirsutum]
  misc_feature (1)..(293): Homolog of NCBI NO: 282964 NR Description: myb-related protein 1 - garden petunia
  misc_feature (1)..(208): Homolog of NCBI NO: 15242272 NR Description: myb family transcription factor [Arabidopsis
  misc_feature (1)..(176): Homolog of NCBI NO: 4886264 NR Description: Myb-related transcription factor mixta-like 1
  misc_feature (1)..(176): Homolog of NCBI NO: 629737 NR Description: myb-related protein MIXTA - garden snapdragon
  misc_feature (204)..(204): Xaa is any aa, unknown or other
MGRSPCCEKEAGLKKGPWTSEEDQKLLAFIEQHGHGCWRSLPAKAGLRRCGKSCRLRWTNYLRPDIKRGKFTLQEEQTIIQLHALLGNRWSSIATHLPKRTDNEIKNYWNTHLKKRLAKMGIDPVTHKARADVGGSSGAGNNSGARYRAAAHLSHTAQWESARLEAEARLAREARLRALASPPPPPGPGPGPAFSGLESPTSTXSFSESVLFASAAHDTHALTSRAYAEAFGAEQQQRFADTAAAADAAPGFLAGVLLGCSVAGAEKGFAASSTDASVCEQQQEEEDKGYWSSILNMVNSSMSSSTSSLTSDAVTDPAAAYLPPATAAAEF

SEQ ID NO: 9788 - protein, 212 aa, Zea mays subsp. mays
  peptide (1)..(212): Ceres Seq. ID no. 13493675
  misc_feature (1)..(159): Homolog of NCBI NO: 38344966 NR Description: OSJNBa0072F16.11 [Oryza sativa (japonica
  misc_feature (1)..(59): Homolog of NCBI NO: 28628947 NR Description: MYB1 [Dendrobium sp. XMW-2002-1]
  misc_feature (109)..(182): Homolog of NCBI NO: 28628947 NR Description: MYB1 [Dendrobium sp. XMW-2002-1]
  misc_feature (1)..(90): Homolog of NCBI NO: 27125807 NR Description: MYB27 protein [Oryza sativa (japonica
  misc_feature (1)..(92): Homolog of NCBI NO: 15232045 NR Description: myb family transcription factor [Arabidopsis
  misc_feature (1)..(74): Homolog of NCBI NO: 13346188 NR Description: GHMYB25 [Gossypium hirsutum]
  misc_feature (1)..(174): Homolog of NCBI NO: 282964 NR Description: myb-related protein 1 - garden petunia
  misc_feature (1)..(89): Homolog of NCBI NO: 15242272 NR Description: myb family transcription factor [Arabidopsis
  misc_feature (1)..(57): Homolog of NCBI NO: 4886264 NR Description: Myb-related transcription factor mixta-like 1
  misc_feature (1)..(57): Homolog of NCBI NO: 629737 NR Description: myb-related protein MIXTA - garden snapdragon
  misc_feature (85)..(85): Xaa is any aa, unknown or other
MGIDPVTHKARADVGGSSGAGNNSGARYRAAAHLSHTAQWESARLEAEARLAREARLRALASPPPPPGPGPGPAFSGLESPTSTXSFSESVLFASAAHDTHALTSRAYAEAFGAEQQQRFADTAAAADAAPGFLAGVLLGCSVAGAEKGFAASSTDASVCEQQQEEEDKGYWSSILNMVNSSMSSSTSSLTSDAVTDPAAAYLPPATAAAEF

SEQ ID NO: 9789 - DNA, 1281 bp, Zea mays subsp. mays
  misc_feature (1)..(1281): Ceres Seq. ID no. 12416646
  misc_feature: MA Experiment ID: 108522 Result: Up-regulated in Transcription
  misc_feature: MA Experiment 108522 PARAMETER Experiment Name: Zm_42deg_Heat_P Parameter: Age (day) Value: 8
  misc_feature: MA Experiment 108522 PARAMETER Experiment Name: Zm_42deg_Heat_P Parameter: Organism Value: Zea mays
  misc_feature: MA Experiment 108522 PARAMETER Experiment Name: Zm_42deg_Heat_P Parameter: Plant Line Value: 35A19
  misc_feature: MA Experiment 108522 PARAMETER Experiment Name: Zm_42deg_Heat_P Parameter: Temperature (deg C) Value: 42 vs. 22
  misc_feature: MA Experiment 108522 PARAMETER Experiment Name: Zm_42deg_Heat_P Parameter: Timepoint (hr) Value: 1
  misc_feature: MA Experiment 108522 PARAMETER Experiment Name: Zm_42deg_Heat_P Parameter: Tissue Value: Aerial
  misc_feature: MA Experiment ID: 108545 Result: Up-regulated in Transcription
  misc_feature: MA Experiment 108545 PARAMETER Experiment Name: Zm_Imbibed_Seeds_P Parameter: Age (day) Value: 3 vs. 2
  misc_feature: MA Experiment 108545 PARAMETER Experiment Name: Zm_Imbibed_Seeds_P Parameter: Organism Value: Zea mays
  misc_feature: MA Experiment 108545 PARAMETER Experiment Name: Zm_Imbibed_Seeds_P Parameter: Plant Line Value: 35A19
  misc_feature: MA Experiment 108545 PARAMETER Experiment Name: Zm_Imbibed_Seeds_P Parameter: Tissue Value: Aerial vs. Embryo
  misc_feature: MA Experiment ID: 108547 Result: Up-regulated in Transcription
  misc_feature: MA Experiment 108547 PARAMETER Experiment Name: Zm_Imbibed_Seeds_P Parameter: Age (day) Value: 4 vs. 2
  misc_feature: MA Experiment 108547 PARAMETER Experiment Name: Zm_Imbibed_Seeds_P Parameter: Organism Value: Zea mays
  misc_feature: MA Experiment 108547 PARAMETER Experiment Name: Zm_Imbibed_Seeds_P Parameter: Plant Line Value: 35A19
  misc_feature: MA Experiment 108547 PARAMETER Experiment Name: Zm_Imbibed_Seeds_P Parameter: Tissue Value: Aerial vs. Embryo
aattggctgttggatctggcgtgtctaggagtgggatttggggagtctatttggtgtgctccttttggggttcccatcgtttctcgttctgtggatgggcgtgtagattcagtgaggcgtttggtactacaggaggcgcgcttgatttggtcgagttcttccatatgtgtggatcgagtggactctaatctgcccagctccagtgtcatgtgggtggggattggttgaccaatattttctgcggttgaatcttaacaagctgcatcgcagtttctaatcgtttggagagcacacaagaatgtcgttcgtgcagctctctggtgctggagtcgctgcagtggccttcacgaacaagagcctagtctctcggcacgcagcgctacgggtctgctcgtcgaggcgctcgatccgtagcctggtcgttaaggctgcaactgtcgtcaccccaaagtacacttcactgaagcctctgggagatagggtgcttgtgaagcttggtgccgcagaggagaagacagttggtggcattttgcttccatctactgcccagactaaaccacaaggaggtgaggttgttgctgttggagcaggaaggaccatcggggacaagaaaatagctgtggatatagagactggagcacaagtagtatactcaaagtatgctgggactgaggttgaattcaatgactcaaagcatcttattctcaaagaagacgatatcattggtattcttgagacagatgatgtgaaggacatgaagcctctcaatgaccgtgttctcatcaaggttgcagaagccgaagacaaaactcctgggggccttatcctcactgaaacaactaaagagaagccgtccataggaacggttgtagctgttggcccgggtcctctggacgaggaaggcaagagacagccactgtcagtgtcggcgggcagcacagtgctgtactccaagtatgcagggagtgagttcaagggcgcggatggcacggcctacattgtgttgagagcgtcggatgtgatggctgtcctgtcttgagcatttcgtttccggctcgttaatgtagtttgcagccaatagttgtcatgtggtatgaaacgatcgctttgtggtggtcatcacaccatgctggtgatcatcacaacatatgctgatactgttccggacaatcggctagaatttgttgtgtggcaggtataaacgtcagcatctgatagtgagagcactcggttacttctacagatggtatttaaggggtgatagtcacgcctctttgctgg

SEQ ID NO: 9790 - protein, 246 aa, Zea mays subsp. mays; identical to SEQ ID NO: 6408
  peptide (1)..(246): Ceres Seq. ID no. 12416647
  misc_feature (151)..(246): Pfam Name: Chaperonin 10 Kd subunit Pfam Description: Chaperonin 10 Kd subunit
  misc_feature (4)..(246): Homolog of NCBI NO: 15242045 NR Description: chloroplast Cpn21 protein; protein id: supported by cDNA: gi_10179871, supported by cDNA: gi_14334611, by cDNA: gi_14587372, supported by cDNA: gi_16226814, supported
  misc_feature (1)..(246): Homolog of NCBI NO: 7331143 NR Description: chaperonin 21 precursor [Lycopersicon esculentum]
  misc_feature (4)..(246): Homolog of NCBI NO: 25453528 NR Description: chaperonin 10 [imported] - Arabidopsis thaliana
  misc_feature (2)..(246): Homolog of NCBI NO: 21780187 NR Description: cp10-like protein [Gossypium hirsutum]
  misc_feature (35)..(246): Homolog of NCBI NO: 399241 NR Description: 20 kDa chaperonin, chloroplast precursor (Protein
  misc_feature (150)..(245): Homolog of NCBI NO: 22297730 NR Description: 10kD chaperonin [Thermosynechococcus elongatus >gi|4033374|sp|O50322|CH10_SYNEL 10 kDa chaperonin (Protein (groES protein) >gi|2696700|dbj|BAA23816.1| GroES [Synechococcus
  misc_feature (152)..(246): Homolog of NCBI NO: 3599923 NR Description: GroES/HSP10 homolog [Lawsonia intracellularis]
  misc_feature (55)..(146): Homolog of NCBI NO: 2493659 NR Description: 10 kDa chaperonin (Protein Cpn10) (groES protein)
  misc_feature (55)..(146): Homolog of NCBI NO: 20807075 NR Description: Co-chaperonin GroES (HSP10) [Thermoanaerobacter
  misc_feature (54)..(145): Homolog of NCBI NO: 23113174 NR Description: hypothetical protein [Desulfitobacterium

SEQ ID NO: 9791 - DNA, 1819 bp, Zea mays subsp. mays
  misc_feature (1)..(1819): Ceres Seq. ID no. 12416772
  misc_feature: MA Experiment ID: 108535 Result: Down-regulated in Transcription
  misc_feature: MA Experiment 108535 PARAMETER Experiment Name: Zm_Meristem_P Parameter: Age (day) Value: 8
  misc_feature: MA Experiment 108535 PARAMETER Experiment Name: Zm_Meristem_P Parameter: Organism Value: Zea mays
  misc_feature: MA Experiment 108535 PARAMETER Experiment Name: Zm_Meristem_P Parameter: Plant Line Value: 35A19
  misc_feature: MA Experiment 108535 PARAMETER Experiment Name: Zm_Meristem_P Parameter: Tissue Value: Root Meristem vs. Above Root Meristem
  misc_feature: MA Experiment ID: 108544 Result: Up-regulated in Transcription
  misc_feature: MA Experiment ID: 108556 Result: Up-regulated in Transcription
  misc_feature: MA Experiment 108556 PARAMETER Experiment Name: Zm_Drought_P Parameter: Age (day) Value: 9
  misc_feature: MA Experiment 108556 PARAMETER Experiment Name: Zm_Drought_P Parameter: Organism Value: Zea mays
  misc_feature: MA Experiment 108556 PARAMETER Experiment Name: Zm_Drought_P Parameter: Plant Line Value: 35A19
  misc_feature: MA Experiment 108556 PARAMETER Experiment Name: Zm_Drought_P Parameter: Timepoint (hr) Value: 24
  misc_feature: MA Experiment 108556 PARAMETER Experiment Name: Zm_Drought_P Parameter: Tissue Value: Aerial
  misc_feature: MA Experiment 108556 PARAMETER Experiment Name: Zm_Drought_P Parameter: Treatment Value: Drought vs. No Drought
  misc_feature: MA Experiment ID: 108597 Result: Up-regulated in Transcription
  misc_feature: MA Experiment 108597 PARAMETER Experiment Name: Zm_100uM_ABA_P Parameter: Age (day) Value: 9
  misc_feature: MA Experiment 108597 PARAMETER Experiment Name: Zm_100uM_ABA_P Parameter: Organism Value: Zea mays
  misc_feature: MA Experiment 108597 PARAMETER Experiment Name: Zm_100uM_ABA_P Parameter: Plant Line Value: 35A19
  misc_feature: MA Experiment 108597 PARAMETER Experiment Name: Zm_100uM_ABA_P Parameter: Timepoint (hr) Value: 24
  misc_feature: MA Experiment 108597 PARAMETER Experiment Name: Zm_100uM_ABA_P Parameter: Tissue Value: Aerial
  misc_feature: MA Experiment 108597 PARAMETER Experiment Name: Zm_100uM_ABA_P Parameter: Treatment Value: 100uM ABA vs. No Treatment
  misc_feature: MA Experiment ID: 108689 Result: Up-regulated in Transcription
  misc_feature: MA Experiment 108689 PARAMETER Experiment Name: Zm_Drought_Roots_P Parameter: Age (day) Value: 9
  misc_feature: MA Experiment 108689 PARAMETER Experiment Name: Zm_Drought_Roots_P Parameter: Organism Value: Zea mays
  misc_feature: MA Experiment 108689 PARAMETER Experiment Name: Zm_Drought_Roots_P Parameter: Plant Line Value: 35A19
  misc_feature: MA Experiment 108689 PARAMETER Experiment Name: Zm_Drought_Roots_P Parameter: Timepoint (hr) Value: 24
  misc_feature: MA Experiment 108689 PARAMETER Experiment Name: Zm_Drought_Roots_P Parameter: Tissue Value: Roots
  misc_feature: MA Experiment 108689 PARAMETER Experiment Name: Zm_Drought_Roots_P Parameter: Treatment Value: Drought vs. No Drought
  misc_feature: MA Experiment ID: 20000479 Result: Up-regulated in Transcription
  misc_feature: MA Experiment 20000479 PARAMETER Experiment Name: Zm_Drought_P Parameter: Age (day) Value: 10
  misc_feature: MA Experiment 20000479 PARAMETER Experiment Name: Zm_Drought_P Parameter: Organism Value: Zea mays
  misc_feature: MA Experiment 20000479 PARAMETER Experiment Name: Zm_Drought_P Parameter: Plant Line Value: 35A19
  misc_feature: MA Experiment 20000479 PARAMETER Experiment Name: Zm_Drought_P Parameter: Timepoint (hr) Value: 48
  misc_feature: MA Experiment 20000479 PARAMETER Experiment Name: Zm_Drought_P Parameter: Tissue Value: Aerial
  misc_feature: MA Experiment 20000479 PARAMETER Experiment Name: Zm_Drought_P Parameter: Treatment Value: Drought vs. No Drought
  misc_feature: MA Experiment ID: 20000480 Result: Up-regulated in Transcription
  misc_feature: MA Experiment 20000480 PARAMETER Experiment Name: Zm_Drought_P Parameter: Age (day) Value: 11
  misc_feature: MA Experiment 20000480 PARAMETER Experiment Name: Zm_Drought_P Parameter: Organism Value: Zea mays
  misc_feature: MA Experiment 20000480 PARAMETER Experiment Name: Zm_Drought_P Parameter: Plant Line Value: 35A19
  misc_feature: MA Experiment 20000480 PARAMETER Experiment Name: Zm_Drought_P Parameter: Timepoint (hr) Value: 72
  misc_feature: MA Experiment 20000480 PARAMETER Experiment Name: Zm_Drought_P Parameter: Tissue Value: Aerial
  misc_feature: MA Experiment 20000480 PARAMETER Experiment Name: Zm_Drought_P Parameter: Treatment Value: Drought vs. No Drought
  misc_feature: MA Experiment ID: 20000487 Result: Up-regulated in Transcription
  misc_feature: MA Experiment 20000487 PARAMETER Experiment Name: Zm_50mM_NH4NO3_L_to_H_P Parameter: Organism Value: Zea mays
  misc_feature: MA Experiment 20000487 PARAMETER Experiment Name: Zm_50mM_NH4NO3_L_to_H_P Parameter: Timepoint (hr) Value: 4
  misc_feature: MA Experiment 20000487 PARAMETER Experiment Name: Zm_50mM_NH4NO3_L_to_H_P Parameter: Tissue Value: Leaves
  misc_feature: MA Experiment 20000487 PARAMETER Experiment Name: Zm_50mM_NH4NO3_L_to_H_P Parameter: Treatment Value: 50mM NH4NO3 vs. 100mM Mannitol
  misc_feature: MA Experiment ID: 20000535 Result: Up-regulated in Transcription
  misc_feature: MA Experiment 20000535 PARAMETER Experiment Name: Zm_Hybrid_Seed_Dev_P Parameter: DAP Value: 30 vs. 12
  misc_feature: MA Experiment 20000535 PARAMETER Experiment Name: Zm_Hybrid_Seed_Dev_P Parameter: Organism Value: Zea mays
  misc_feature: MA Experiment 20000535 PARAMETER Experiment Name: Zm_Hybrid_Seed_Dev_P Parameter: Plant Line Value: 35A19
  misc_feature: MA Experiment 20000535 PARAMETER Experiment Name: Zm_Hybrid_Seed_Dev_P Parameter: Tissue Value: Embryo vs. Unfert Floret
actctgttcaaccaccagccgagttcgcagcggcactccagggtccaggcccagcagcctcttcggctcttcgttgggggtgcgtggacaccggaaattgcctcggggattgcgttcctgatctaagcccggcatgaagggctgctcagagcgtttgctgctcctgctgctgctggcatcgtcgttgttactgtccgtcgtggttgccgcgcagcagacttgccctgccgacctcgacagcaaatgcgacggtggcgcgcctgatgactgggagggggaattcttccccggcgtcccgaaaatcaagtatgagggtccaacaagcaagaaccctcttgcttataagtggtataacaaggaggaagtcattctcggaaagaagatgaaggactggatgcgcttcagtgttgcgttctggcacacgttccgtggtactggtgctgatccttttggtgcgcctacaaaggtttggccttgggaggacggcacaaattcgttggccatggctaagagaagaatgagagctcactttgagttcatggagaagctgggggttgacaaatggtgcttccatgatagggatattgcccctgatgggaaaactctcgaagaaacaaatgctaacttggatgagatagttgagctggcaaagcagctccagggtgagaccaatataaagccattgtggggtactgcacagctctttatgcatcctcgttacatgcacggagctgctactagcccagaggttaaagtatatgcatatgcggctgcacaagttaagaaagctttggaggtcactcactacctaggtggtgaaaactatgtgttttggggtggaagagagggttaccaaactcttctgaacactgatcttaagagagaacttgaccatttggctaactttcttcaagctgctgttgactacaagaagaagattggattcaacggaacactgttgatagagcctaaaccacaggaacctacaaaacaccagtatgactgggatgttgcaactacgtttgcttttctacagaagtatggtcttaccggagagttcaagattaatgttgagtgcaaccatgctactctatctggacatagctgccatcatgaactggagactgcacgcattaatgggctgcttgggaacattgatgcaaacactggtgatcctcaagttggctgggacacggatcagttcatgacagacattgcagaggctactttggttatgtcaactgtggttaagaatggtggacttgcacctggtggcttcaactttgacgccaaattgcggagggaaagcactgatgttgaggacttgtttcttgctcatatctccggaatggacaccctggcccgtggcctccgcaacgccgccaagctgatcgaggatggttccctagatgctctcgtccgcaagcggtaccagagctttgatagtgagattggtgccttgatcgaggctgggaaaggagactttgaggcgctagagaagaaggtccttgagtggggtgagcccactgttccgtccggcaaacaggaactggcggagattctgttccactctgctctatagatggcgccatgtccgtagcggtagctcctggaataagcaagcactgagcctgcgccctcccaacgcgcgcggtcgtcctcaccagtcaccaccaagggaatgtttctggttgcgcgcgatgaaccatgtacaatacaccgtggaactgaaataaattgaaatagctagtcagaatttttagaactgttgcctctttgtttggaacggaatgaaactgaacttggttagtttgagctc

SEQ ID NO: 9792 - protein, 482 aa, Zea mays subsp. mays
  peptide (1)..(482): Ceres Seq. ID no. 12416773
  misc_feature (76)..(482): Pfam Name: Xylose isomerase Pfam Description: Xylose isomerase
  misc_feature (9)..(482): Homolog of NCBI NO: 34899308 NR Description: putative xylose isomerase [Oryza sativa (japonica
  misc_feature (1)..(482): Homolog of NCBI NO: 6175480 NR Description: Xylose isomerase >gi|1296809|emb|CAA64545.1|
  misc_feature (1)..(482): Homolog of NCBI NO: 2130051 NR Description: xylose isomerase (EC 5.3.1.5) - barley xylose isomerase [Hordeum vulgare subsp. vulgare]
  misc_feature (1)..(482): Homolog of NCBI NO: 30696904 NR Description: expressed protein [Arabidopsis thaliana] expressed protein; supported by full length cDNA: Ceres: 122798 thaliana] >gi|30387571|gb|AAP31951.1| At5g57655 [Arabidopsis
  misc_feature (1)..(482): Homolog of NCBI NO: 21537178 NR Description: xylose isomerase [Arabidopsis thaliana]
  misc_feature (1)..(471): Homolog of NCBI NO: 17433690 NR Description: Xylose isomerase >gi|9758328|dbj|BAB08802.1|
  misc_feature (49)..(480): Homolog of NCBI NO: 1175034 NR Description: Xylose isomerase >gi|625180|gb|AAB06798.1| xylose
  misc_feature (49)..(480): Homolog of NCBI NO: 3319057 NR Description: Chain A, Xylose Isomerase From Thermotoga >gi|3319058|pdb|1A0E|D Chain D, Xylose Isomerase From Thermotoga
  misc_feature (49)..(480): Homolog of NCBI NO: 15644415 NR Description: xylose isomerase [Thermotoga maritima]
  misc_feature (49)..(482): Homolog of NCBI NO: 17433692 NR Description: Xylose isomerase >gi|9392667|gb|AAF87247.1|
MKGCSERLLLLLLLASSLLLSVVVAAQQTCPADLDSKCDGGAPDDWEGEFFPGVPKIKYEGPTSKNPLAYKWYNKEEVILGKKMKDWMRFSVAFWHTFRGTGADPFGAPTKVWPWEDGTNSLAMAKRRMRAHFEFMEKLGVDKWCFHDRDIAPDGKTLEETNANLDEIVELAKQLQGETNIKPLWGTAQLFMHPRYMHGAATSPEVKVYAYAAAQVKKALEVTHYLGGENYVFWGGREGYQTLLNTDLKRELDHLANFLQAAVDYKKKIGFNGTLLIEPKPQEPTKHQYDWDVATTFAFLQKYGLTGEFKINVECNHATLSGHSCHHELETARINGLLGNIDANTGDPQVGWDTDQFMTDIAEATLVMSTVVKNGGLAPGGFNFDAKLRRESTDVEDLFLAHISGMDTLARGLRNAAKLIEDGSLDALVRKRYQSFDSEIGALIEAGKGDFEALEKKVLEWGEPTVPSGKQELAEILFHSAL

SEQ ID NO: 9793 - protein, 399 aa, Zea mays subsp. mays
  peptide (1)..(399): Ceres Seq. ID no. 12416774
  misc_feature (1)..(399): Pfam Name: Xylose isomerase Pfam Description: Xylose isomerase
  misc_feature (1)..(399): Homolog of NCBI NO: 34899308 NR Description: putative xylose isomerase [Oryza sativa (japonica
  misc_feature (1)..(399): Homolog of NCBI NO: 6175480 NR Description: Xylose isomerase >gi|1296809|emb|CAA64545.1|
  misc_feature (1)..(399): Homolog of NCBI NO: 2130051 NR Description: xylose isomerase (EC 5.3.1.5) - barley xylose isomerase [Hordeum vulgare subsp. vulgare]
  misc_feature (1)..(399): Homolog of NCBI NO: 30696904 NR Description: expressed protein [Arabidopsis thaliana] expressed protein; supported by full length cDNA: Ceres: 122798 thaliana] >gi|30387571|gb|AAP31951.1| At5g57655 [Arabidopsis
  misc_feature (1)..(399): Homolog of NCBI NO: 21537178 NR Description: xylose isomerase [Arabidopsis thaliana]
  misc_feature (1)..(388): Homolog of NCBI NO: 17433690 NR Description: Xylose isomerase >gi|9758328|dbj|BAB08802.1|
  misc_feature (1)..(397): Homolog of NCBI NO: 1175034 NR Description: Xylose isomerase >gi|625180|gb|AAB06798.1| xylose
  misc_feature (1)..(397): Homolog of NCBI NO: 3319057 NR Description: Chain A, Xylose Isomerase From Thermotoga >gi|3319058|pdb|1A0E|D Chain D, Xylose Isomerase From Thermotoga
  misc_feature (1)..(397): Homolog of NCBI NO: 15644415 NR Description: xylose isomerase [Thermotoga maritima]
  misc_feature (1)..(399): Homolog of NCBI NO: 17433692 NR Description: Xylose isomerase >gi|9392667|gb|AAF87247.1|
MKDWMRFSVAFWHTFRGTGADPFGAPTKVWPWEDGTNSLAMAKRRMRAHFEFMEKLGVDKWCFHDRDIAPDGKTLEETNANLDEIVELAKQLQGETNIKPLWGTAQLFMHPRYMHGAATSPEVKVYAYAAAQVKKALEVTHYLGGENYVFWGGREGYQTLLNTDLKRELDHLANFLQAAVDYKKKIGFNGTLLIEPKPQEPTKHQYDWDVATTFAFLQKYGLTGEFKINVECNHATLSGHSCHHELETARINGLLGNIDANTGDPQVGWDTDQFMTDIAEATLVMSTVVKNGGLAPGGFNFDAKLRRESTDVEDLFLAHISGMDTLARGLRNAAKLIEDGSLDALVRKRYQSFDSEIGALIEAGKGDFEALEKKVLEWGEPTVPSGKQELAEILFHSAL

SEQ ID NO: 9794 - protein, 395 aa, Zea mays subsp. mays
  peptide (1)..(395): Ceres Seq. ID no. 12416775
  misc_feature (1)..(395): Pfam Name: Xylose isomerase Pfam Description: Xylose isomerase
  misc_feature (1)..(395): Homolog of NCBI NO: 34899308 NR Description: putative xylose isomerase [Oryza sativa (japonica
  misc_feature (1)..(395): Homolog of NCBI NO: 6175480 NR Description: Xylose isomerase >gi|1296809|emb|CAA64545.1|
  misc_feature (1)..(395): Homolog of NCBI NO: 2130051 NR Description: xylose isomerase (EC 5.3.1.5) - barley xylose isomerase [Hordeum vulgare subsp. vulgare]
  misc_feature (1)..(395): Homolog of NCBI NO: 30696904 NR Description: expressed protein [Arabidopsis thaliana] expressed protein; supported by full length cDNA: Ceres: 122798 thaliana] >gi|30387571|gb|AAP31951.1| At5g57655 [Arabidopsis
  misc_feature (1)..(395): Homolog of NCBI NO: 21537178 NR Description: xylose isomerase [Arabidopsis thaliana]
  misc_feature (1)..(384): Homolog of NCBI NO: 17433690 NR Description: Xylose isomerase >gi|9758328|dbj|BAB08802.1|
  misc_feature (1)..(393): Homolog of NCBI NO: 1175034 NR Description: Xylose isomerase >gi|625180|gb|AAB06798.1| xylose
  misc_feature (1)..(393): Homolog of NCBI NO: 3319057 NR Description: Chain A, Xylose Isomerase From Thermotoga >gi|3319058|pdb|1A0E|D Chain D, Xylose Isomerase From Thermotoga
  misc_feature (1)..(393): Homolog of NCBI NO: 15644415 NR Description: xylose isomerase [Thermotoga maritima]
  misc_feature (1)..(395): Homolog of NCBI NO: 17433692 NR Description: Xylose isomerase >gi|9392667|gb|AAF87247.1|
MRFSVAFWHTFRGTGADPFGAPTKVWPWEDGTNSLAMAKRRMRAHFEFMEKLGVDKWCFHDRDIAPDGKTLEETNANLDEIVELAKQLQGETNIKPLWGTAQLFMHPRYMHGAATSPEVKVYAYAAAQVKKALEVTHYLGGENYVFWGGREGYQTLLNTDLKRELDHLANFLQAAVDYKKKIGFNGTLLIEPKPQEPTKHQYDWDVATTFAFLQKYGLTGEFKINVECNHATLSGHSCHHELETARINGLLGNIDANTGDPQVGWDTDQFMTDIAEATLVMSTVVKNGGLAPGGFNFDAKLRRESTDVEDLFLAHISGMDTLARGLRNAAKLIEDGSLDALVRKRYQSFDSEIGALIEAGKGDFEALEKKVLEWGEPTVPSGKQELAEILFHSAL

SEQ ID NO: 9795 - DNA, 1792 bp, Zea mays subsp. mays
  misc_feature (1)..(1792): Ceres Seq. ID no. 12358858
  misc_feature: MA Experiment ID: 108522 Result: Up-regulated in Transcription
  misc_feature: MA Experiment 108522 PARAMETER Experiment Name: Zm_42deg_Heat_P Parameter: Age (day) Value: 8
  misc_feature: MA Experiment 108522 PARAMETER Experiment Name: Zm_42deg_Heat_P Parameter: Organism Value: Zea mays
  misc_feature: MA Experiment 108522 PARAMETER Experiment Name: Zm_42deg_Heat_P Parameter: Plant Line Value: 35A19
  misc_feature: MA Experiment 108522 PARAMETER Experiment Name: Zm_42deg_Heat_P Parameter: Temperature (deg C) Value: 42 vs. 22
  misc_feature: MA Experiment 108522 PARAMETER Experiment Name: Zm_42deg_Heat_P Parameter: Timepoint (hr) Value: 1
  misc_feature: MA Experiment 108522 PARAMETER Experiment Name: Zm_42deg_Heat_P Parameter: Tissue Value: Aerial
  misc_feature: MA Experiment ID: 108528 Result: Up-regulated in Transcription
  misc_feature: MA Experiment 108528 PARAMETER Experiment Name: Zm_Imbibed_Seeds_P Parameter: Age (day) Value: 5 vs. 2
  misc_feature: MA Experiment 108528 PARAMETER Experiment Name: Zm_Imbibed_Seeds_P Parameter: Organism Value: Zea mays
  misc_feature: MA Experiment 108528 PARAMETER Experiment Name: Zm_Imbibed_Seeds_P Parameter: Plant Line Value: 35A19
  misc_feature: MA Experiment 108528 PARAMETER Experiment Name: Zm_Imbibed_Seeds_P Parameter: Tissue Value: Aerial vs. Embryo
  misc_feature: MA Experiment ID: 108529 Result: Down-regulated in Transcription
  misc_feature: MA Experiment 108529 PARAMETER Experiment Name: Zm_Imbibed_Seeds_P Parameter: Age (day) Value: 5 vs. 2
  misc_feature: MA Experiment 108529 PARAMETER Experiment Name: Zm_Imbibed_Seeds_P Parameter: Organism Value: Zea mays
  misc_feature: MA Experiment 108529 PARAMETER Experiment Name: Zm_Imbibed_Seeds_P Parameter: Plant Line Value: 35A19
  misc_feature: MA Experiment 108529 PARAMETER Experiment Name: Zm_Imbibed_Seeds_P Parameter: Tissue Value: Roots vs. Embryo
  misc_feature: MA Experiment ID: 108530 Result: Up-regulated in Transcription
  misc_feature: MA Experiment 108530 PARAMETER Experiment Name: Zm_Imbibed_Seeds_P Parameter: Age (day) Value: 6 vs. 2
  misc_feature: MA Experiment 108530 PARAMETER Experiment Name: Zm_Imbibed_Seeds_P Parameter: Organism Value: Zea mays
  misc_feature: MA Experiment 108530 PARAMETER Experiment Name: Zm_Imbibed_Seeds_P Parameter: Plant Line Value: 35A19
  misc_feature: MA Experiment 108530 PARAMETER Experiment Name: Zm_Imbibed_Seeds_P Parameter: Tissue Value: Aerial vs. Embryo
  misc_feature: MA Experiment ID: 108545 Result: Up-regulated in Transcription
  misc_feature: MA Experiment 108545 PARAMETER Experiment Name: Zm_Imbibed_Seeds_P Parameter: Age (day) Value: 3 vs. 2
  misc_feature: MA Experiment 108545 PARAMETER Experiment Name: Zm_Imbibed_Seeds_P Parameter: Organism Value: Zea mays
  misc_feature: MA Experiment 108545 PARAMETER Experiment Name: Zm_Imbibed_Seeds_P Parameter: Plant Line Value: 35A19
  misc_feature: MA Experiment 108545 PARAMETER Experiment Name: Zm_Imbibed_Seeds_P Parameter: Tissue Value: Aerial vs. Embryo
  misc_feature: MA Experiment ID: 108547 Result: Up-regulated in Transcription
  misc_feature: MA Experiment 108547 PARAMETER Experiment Name: Zm_Imbibed_Seeds_P Parameter: Age (day) Value: 4 vs. 2
  misc_feature: MA Experiment 108547 PARAMETER Experiment Name: Zm_Imbibed_Seeds_P Parameter: Organism Value: Zea mays
  misc_feature: MA Experiment 108547 PARAMETER Experiment Name: Zm_Imbibed_Seeds_P Parameter: Plant Line Value: 35A19
  misc_feature: MA Experiment 108547 PARAMETER Experiment Name: Zm_Imbibed_Seeds_P Parameter: Tissue Value: Aerial vs. Embryo
  misc_feature: MA Experiment ID: 108689 Result: Up-regulated in Transcription
  misc_feature: MA Experiment 108689 PARAMETER Experiment Name: Zm_Drought_Roots_P Parameter: Age (day) Value: 9
  misc_feature: MA Experiment 108689 PARAMETER Experiment Name: Zm_Drought_Roots_P Parameter: Organism Value: Zea mays
  misc_feature: MA Experiment 108689 PARAMETER Experiment Name: Zm_Drought_Roots_P Parameter: Plant Line Value: 35A19
  misc_feature: MA Experiment 108689 PARAMETER Experiment Name: Zm_Drought_Roots_P Parameter: Timepoint (hr) Value: 24
  misc_feature: MA Experiment 108689 PARAMETER Experiment Name: Zm_Drought_Roots_P Parameter: Tissue Value: Roots
  misc_feature: MA Experiment 108689 PARAMETER Experiment Name: Zm_Drought_Roots_P Parameter: Treatment Value: Drought vs. No Drought
atctagttagttctcgatagcctctctctccctgcctccccgctgttgtggttgcggtgcttctgctgatctgctccgtcttctcctcccggcaatggcctgcttggaggcgcccccgcgcgtcgagctctgcccggtctcgtgccagccccgcggcctgcagcttccgccatggcggctcagcctgtcgaggtcctcctcttcatgcagatcttgcacccttgtgtctcgccagcttccaatttgcaatgcacagtcatatgctgatgatttatgggtggctgcgcctcatagccctgcatctgttcgctcaaggttgcttgcagcggaaagagaggaagcaaaggctgtcctgtccctgtttctgaggcagaaaggtctgcgaagcacgctggccgcacggatcgtcaacaaatcggatggcttcatcgagcacctggtctcgaagctccagattgcttacagatctcgatatgctgaaggaagggagctgagcacgcctgaaatcagagacgctctccttccctatctcgaagctctctccaaagaacatggcgacagtttggtcgaggtggtggagaatttccccgacccttttgctatggaaagggaagccttatcttcatcaatggcgtttacacccacgagctcaaacaagcagaaggcgattgctcgaataagcacgcagcctcaggcgccgccctccctgagctggtcccctacctactagaccttggcatggaccacgaggagataaaggacatcgtgcgcaagttcccagcgttcgcgtactacagcgtggatcgcaagatcaagcccctggtggagctcctgcttgagcttggggtgaaaaattccagcataccaggaatcatcaagaagcggccccagctgtgcgggatcagcatgtcagacaatctcaagccgatgatggcttatctggagagcatcggcgtcgacaaggctcagtggagcaaggtgatcacccgcttcccggcgctcctcacgtacagccggaacaaggtgcagacgaccgtgagcttcctcgccgagctaggtgtctccgagaagagcatcggcaagatcctgacgcggtgcccccacatcatgagctacagcgtggacgacaacctcaggccgaccgccgcctacttccggtcgatcggcgcggacgccgcgtcccttatccagaagagcccgcaggccttcggtctgaacgtcgaggccaagctgaggccgaccacggagttcttcctggcgagggggttcagcgtcgaggaggtcggcgtcatggcgaacaggttcgggatcgttcacacgctgagcctggaggagaacctgctccccaagtacgagttcttcctggcgatggagtacccgaggtgcgagctcgtcaagttcccgcagtactttgggtacagcttggaccggcggataaagccacggtacgcgaggatgactgggtgtggggtgaggttgattttgaaccagatgctttcggtctccgatgccaggtttgagaagattctagagaagaagacggctaggctttgataagacagcagtttcagattaggcacagtgttggagttcatttgagaagaactgtcaatgataaaaccatcagttttcagagcacgtagcttattatcgtggccttcatggacgtgcaacgtccagaggcgaactgtttgatgtgctaatctgtagttagcttctgcgaggtattgaaatgcatgcaactttggcaatcagaaatgccagttgcagtgggcgagattgcttggtgctc

SEQ ID NO: 9796 - protein, 271 aa, Zea mays subsp. mays
  peptide (1)..(271): Ceres Seq. ID no. 12358859
  misc_feature (1)..(202): Pfam Name: mTERF Pfam Description: mTERF
  misc_feature (1)..(231): Homolog of NCBI NO: 7485117 NR Description: hypothetical protein - Arabidopsis thaliana hypothetical protein [Arabidopsis thaliana]
  misc_feature (159)..(271): Homolog of NCBI NO: 18414260 NR Description: hypothetical protein; protein id: At4g14605.1
  misc_feature (1)..(260): Homolog of NCBI NO: 34905080 NR Description: P0686C03.23 [Oryza sativa (japonica
  misc_feature (1)..(262): Homolog of NCBI NO: 15233700 NR Description: putative protein; protein id: At4g38160.1, by cDNA: gi_20147356 [Arabidopsis thaliana]
  misc_feature (1)..(265): Homolog of NCBI NO: 18406426 NR Description: expressed protein; protein id: At2g44020.1, by cDNA: gi_14532591, supported by cDNA: gi_19310760 [Arabidopsis
  misc_feature (1)..(231): Homolog of NCBI NO: 18414260 NR Description: hypothetical protein; protein id: At4g14605.1
  misc_feature (46)..(265): Homolog of NCBI NO: 15227524 NR Description: predicted by genefinder and genscan; protein id: [Arabidopsis thaliana] >gi|25410996|pir||G84443 hypothetical
  misc_feature (46)..(265): Homolog of NCBI NO: 28204784 NR Description: hypothetical protein [Arabidopsis thaliana]
  misc_feature (9)..(260): Homolog of NCBI NO: 33589698 NR Description: At1g78930 [Arabidopsis thaliana]
  misc_feature (9)..(260): Homolog of NCBI NO: 30699372 NR Description: expressed protein [Arabidopsis thaliana]
MDHEEIKDIVRKFPAFAYYSVDRKIKPLVELLLELGVKNSSIPGIIKKRPQLCGISMSDNLKPMMAYLESIGVDKAQWSKVITRFPALLTYSRNKVQTTVSFLAELGVSEKSIGKILTRCPHIMSYSVDDNLRPTAAYFRSIGADAASLIQKSPQAFGLNVEAKLRPTTEFFLARGFSVEEVGVMANRFGIVHTLSLEENLLPKYEFFLAMEYPRCELVKFPQYFGYSLDRRIKPRYARMTGCGVRLILNQMLSVSDARFEKILEKKTARL

SEQ ID NO: 9797 - protein, 215 aa, Zea mays subsp. mays
  peptide (1)..(215): Ceres Seq. ID no. 12358860
  misc_feature (1)..(146): Pfam Name: mTERF Pfam Description: mTERF
  misc_feature (1)..(175): Homolog of NCBI NO: 18414260 NR Description: hypothetical protein; protein id: At4g14605.1
  misc_feature (1)..(175): Homolog of NCBI NO: 7485117 NR Description: hypothetical protein - Arabidopsis thaliana hypothetical protein [Arabidopsis thaliana]
  misc_feature (103)..(215): Homolog of NCBI NO: 18414260 NR Description: hypothetical protein; protein id: At4g14605.1
  misc_feature (1)..(204): Homolog of NCBI NO: 34905080 NR Description: P0686C03.23 [Oryza sativa (japonica
  misc_feature (1)..(206): Homolog of NCBI NO: 15233700 NR Description: putative protein; protein id: At4g38160.1, by cDNA: gi_20147356 [Arabidopsis thaliana]
  misc_feature (1)..(209): Homolog of NCBI NO: 18406426 NR Description: expressed protein; protein id: At2g44020.1, by cDNA: gi_14532591, supported by cDNA: gi_19310760 [Arabidopsis
  misc_feature (1)..(209): Homolog of NCBI NO: 15227524 NR Description: predicted by genefinder and genscan; protein id: [Arabidopsis thaliana] >gi|25410996|pir||G84443 hypothetical
  misc_feature (1)..(209): Homolog of NCBI NO: 28204784 NR Description: hypothetical protein [Arabidopsis thaliana]
  misc_feature (1)..(204): Homolog of NCBI NO: 33589698 NR Description: At1g78930 [Arabidopsis thaliana]
  misc_feature (1)..(204): Homolog of NCBI NO: 30699372 NR Description: expressed protein [Arabidopsis thaliana]
MSDNLKPMMAYLESIGVDKAQWSKVITRFPALLTYSRNKVQTTVSFLAELGVSEKSIGKILTRCPHIMSYSVDDNLRPTAAYFRSIGADAASLIQKSPQAFGLNVEAKLRPTTEFFLARGFSVEEVGVMANRFGIVHTLSLEENLLPKYEFFLAMEYPRCELVKFPQYFGYSLDRRIKPRYARMTGCGVRLILNQMLSVSDARFEKILEKKTARL

SEQ ID NO: 9798 - protein, 211 aa, Zea mays subsp. mays
  peptide (1)..(211): Ceres Seq. ID no. 12358861
  misc_feature (67)..(196): Pfam Name: mTERF Pfam Description: mTERF
  misc_feature (67)..(196): Homolog of NCBI NO: 18414260 NR Description: hypothetical protein; protein id: At4g14605.1
  misc_feature (67)..(196): Homolog of NCBI NO: 7485117 NR Description: hypothetical protein - Arabidopsis thaliana hypothetical protein [Arabidopsis thaliana]
MACLEAPPRVELCPVSCQPRGLQLPPWRLSLSRSSSSCRSCTLVSRQLPICNAQSYADDLWVAAPHSPASVRSRLLAAEREEAKAVLSLFLRQKGLRSTLAARIVNKSDGFIEHLVSKLQIAYRSRYAEGRELSTPEIRDALLPYLEALSKEHGDSLVEVVENFPDPFAMEREALSSSMAFTPTSSNKQKAIARISTQPQAPPSLSWSPTY

SEQ ID NO: 9799 - DNA, 1143 bp, Zea mays subsp. mays
  misc_feature (1)..(1143): Ceres Seq. ID no. 12354214
  misc_feature: MA Experiment ID: 108527 Result: Down-regulated in Transcription
  misc_feature: MA Experiment 108527 PARAMETER Experiment Name: Zm_5mM_NO_P Parameter: Age (day) Value: 8
  misc_feature: MA Experiment 108527 PARAMETER Experiment Name: Zm_5mM_NO_P Parameter: Organism Value: Zea mays
  misc_feature: MA Experiment 108527 PARAMETER Experiment Name: Zm_5mM_NO_P Parameter: Plant Line Value: 35A19
  misc_feature: MA Experiment 108527 PARAMETER Experiment Name: Zm_5mM_NO_P Parameter: Timepoint (hr) Value: 6
  misc_feature: MA Experiment 108527 PARAMETER Experiment Name: Zm_5mM_NO_P Parameter: Tissue Value: Aerial
  misc_feature: MA Experiment 108527 PARAMETER Experiment Name: Zm_5mM_NO_P Parameter: Treatment Value: 5mM NO vs. No Treatment
  misc_feature: MA Experiment ID: 108528 Result: Up-regulated in Transcription
  misc_feature: MA Experiment 108528 PARAMETER Experiment Name: Zm_Imbibed_Seeds_P Parameter: Age (day) Value: 5 vs. 2
  misc_feature: MA Experiment 108528 PARAMETER Experiment Name: Zm_Imbibed_Seeds_P Parameter: Organism Value: Zea mays
  misc_feature: MA Experiment 108528 PARAMETER Experiment Name: Zm_Imbibed_Seeds_P Parameter: Plant Line Value: 35A19
  misc_feature: MA Experiment 108528 PARAMETER Experiment Name: Zm_Imbibed_Seeds_P Parameter: Tissue Value: Aerial vs. Embryo
  misc_feature: MA Experiment ID: 108529 Result: Down-regulated in Transcription
  misc_feature: MA Experiment 108529 PARAMETER Experiment Name: Zm_Imbibed_Seeds_P Parameter: Age (day) Value: 5 vs. 2
  misc_feature: MA Experiment 108529 PARAMETER Experiment Name: Zm_Imbibed_Seeds_P Parameter: Organism Value: Zea mays
  misc_feature: MA Experiment 108529 PARAMETER Experiment Name: Zm_Imbibed_Seeds_P Parameter: Plant Line Value: 35A19
  misc_feature: MA Experiment 108529 PARAMETER Experiment Name: Zm_Imbibed_Seeds_P Parameter: Tissue Value: Roots vs. Embryo
  misc_feature: MA Experiment ID: 108530 Result: Up-regulated in Transcription
  misc_feature: MA Experiment 108530 PARAMETER Experiment Name: Zm_Imbibed_Seeds_P Parameter: Age (day) Value: 6 vs. 2
  misc_feature: MA Experiment 108530 PARAMETER Experiment Name: Zm_Imbibed_Seeds_P Parameter: Organism Value: Zea mays
  misc_feature: MA Experiment 108530 PARAMETER Experiment Name: Zm_Imbibed_Seeds_P Parameter: Plant Line Value: 35A19
  misc_feature: MA Experiment 108530 PARAMETER Experiment Name: Zm_Imbibed_Seeds_P Parameter: Tissue Value: Aerial vs. Embryo
  misc_feature: MA Experiment ID: 108536 Result: Down-regulated in Transcription
  misc_feature: MA Experiment 108536 PARAMETER Experiment Name: Zm_Meristem_P Parameter: Age (day) Value: 8
  misc_feature: MA Experiment 108536 PARAMETER Experiment Name: Zm_Meristem_P Parameter: Organism Value: Zea mays
  misc_feature: MA Experiment 108536 PARAMETER Experiment Name: Zm_Meristem_P Parameter: Plant Line Value: 35A19
  misc_feature: MA Experiment 108536 PARAMETER Experiment Name: Zm_Meristem_P Parameter: Tissue Value: Shoot Meristem vs. Above Shoot Meristem
  misc_feature: MA Experiment ID: 108543 Result: Up-regulated in Transcription
  misc_feature: MA Experiment ID: 108544 Result: Down-regulated in Transcription
  misc_feature: MA Experiment ID: 108545 Result: Up-regulated in Transcription
  misc_feature: MA Experiment 108545 PARAMETER Experiment Name: Zm_Imbibed_Seeds_P Parameter: Age (day) Value: 3 vs. 2
  misc_feature: MA Experiment 108545 PARAMETER Experiment Name: Zm_Imbibed_Seeds_P Parameter: Organism Value: Zea mays
  misc_feature: MA Experiment 108545 PARAMETER Experiment Name: Zm_Imbibed_Seeds_P Parameter: Plant Line Value: 35A19
  misc_feature: MA Experiment 108545 PARAMETER Experiment Name: Zm_Imbibed_Seeds_P Parameter: Tissue Value: Aerial vs. Embryo
  misc_feature: MA Experiment ID: 108546 Result: Down-regulated in Transcription
  misc_feature: MA Experiment 108546 PARAMETER Experiment Name: Zm_Imbibed_Seeds_P Parameter: Age (day) Value: 3 vs. 2
  misc_feature: MA Experiment 108546 PARAMETER Experiment Name: Zm_Imbibed_Seeds_P Parameter: Organism Value: Zea mays
  misc_feature: MA Experiment 108546 PARAMETER Experiment Name: Zm_Imbibed_Seeds_P Parameter: Plant Line Value: 35A19
  misc_feature: MA Experiment 108546 PARAMETER Experiment Name: Zm_Imbibed_Seeds_P Parameter: Tissue Value: Roots vs. Embryo
  misc_feature: MA Experiment ID: 108547 Result: Up-regulated in Transcription
  misc_feature: MA Experiment 108547 PARAMETER Experiment Name: Zm_Imbibed_Seeds_P Parameter: Age (day) Value: 4 vs. 2
  misc_feature: MA Experiment 108547 PARAMETER Experiment Name: Zm_Imbibed_Seeds_P Parameter: Organism Value: Zea mays
  misc_feature: MA Experiment 108547 PARAMETER Experiment Name: Zm_Imbibed_Seeds_P Parameter: Plant Line Value: 35A19
  misc_feature: MA Experiment 108547 PARAMETER Experiment Name: Zm_Imbibed_Seeds_P Parameter: Tissue Value: Aerial vs. Embryo
  misc_feature: MA Experiment ID: 108559 Result: Down-regulated in Transcription
  misc_feature: MA Experiment 108559 PARAMETER Experiment Name: Zm_5mM_NO_P Parameter: Age (day) Value: 8
  misc_feature: MA Experiment 108559 PARAMETER Experiment Name: Zm_5mM_NO_P Parameter: Organism Value: Zea mays
  misc_feature: MA Experiment 108559 PARAMETER Experiment Name: Zm_5mM_NO_P Parameter: Plant Line Value: 35A19
  misc_feature: MA Experiment 108559 PARAMETER Experiment Name: Zm_5mM_NO_P Parameter: Timepoint (hr) Value: 12
  misc_feature: MA Experiment 108559 PARAMETER Experiment Name: Zm_5mM_NO_P Parameter: Tissue Value: Aerial
  misc_feature: MA Experiment 108559 PARAMETER Experiment Name: Zm_5mM_NO_P Parameter: Treatment Value: 5mM NO vs. No Treatment
  misc_feature: MA Experiment ID: 108687 Result: Down-regulated in Transcription
  misc_feature: MA Experiment 108687 PARAMETER Experiment Name: Zm_Embryos-Flowers__P Parameter: Tissue Value: Embryo vs. Aerial+
  misc_feature: MA Experiment ID: 108689 Result: Down-regulated in Transcription
  misc_feature: MA Experiment 108689 PARAMETER Experiment Name: Zm_Drought_Roots_P Parameter: Age (day) Value: 9
  misc_feature: MA Experiment 108689 PARAMETER Experiment Name: Zm_Drought_Roots_P Parameter: Organism Value: Zea mays
  misc_feature: MA Experiment 108689 PARAMETER Experiment Name: Zm_Drought_Roots_P Parameter: Plant Line Value: 35A19
  misc_feature: MA Experiment 108689 PARAMETER Experiment Name: Zm_Drought_Roots_P Parameter: Timepoint (hr) Value: 24
  misc_feature: MA Experiment 108689 PARAMETER Experiment Name: Zm_Drought_Roots_P Parameter: Tissue Value: Roots
  misc_feature: MA Experiment 108689 PARAMETER Experiment Name: Zm_Drought_Roots_P Parameter: Treatment Value: Drought vs. No Drought
  misc_feature: MA Experiment ID: 20000477 Result: Down-regulated in Transcription
  misc_feature: MA Experiment 20000477 PARAMETER Experiment Name: Zm_5mM_SA_P Parameter: Age (day) Value: 10
  misc_feature: MA Experiment 20000477 PARAMETER Experiment Name: Zm_5mM_SA_P Parameter: Organism Value: Zea mays
  misc_feature: MA Experiment 20000477 PARAMETER Experiment Name: Zm_5mM_SA_P Parameter: Plant Line Value: 35A19
  misc_feature: MA Experiment 20000477 PARAMETER Experiment Name: Zm_5mM_SA_P Parameter: Timepoint (hr) Value: 48
  misc_feature: MA Experiment 20000477 PARAMETER Experiment Name: Zm_5mM_SA_P Parameter: Tissue Value: Aerial
  misc_feature: MA Experiment 20000477 PARAMETER Experiment Name: Zm_5mM_SA_P Parameter: Treatment Value: 5mM SA vs. No Treatment
  misc_feature: MA Experiment ID: 20000478 Result: Down-regulated in Transcription
  misc_feature: MA Experiment 20000478 PARAMETER Experiment Name: Zm_5mM_SA_P Parameter: Age (day) Value: 11
  misc_feature: MA Experiment 20000478 PARAMETER Experiment Name: Zm_5mM_SA_P Parameter: Organism Value: Zea mays
  misc_feature: MA Experiment 20000478 PARAMETER Experiment Name: Zm_5mM_SA_P Parameter: Plant Line Value: 35A19
  misc_feature: MA Experiment 20000478 PARAMETER Experiment Name: Zm_5mM_SA_P Parameter: Timepoint (hr) Value: 72
  misc_feature: MA Experiment 20000478 PARAMETER Experiment Name: Zm_5mM_SA_P Parameter: Tissue Value: Aerial
  misc_feature: MA Experiment 20000478 PARAMETER Experiment Name: Zm_5mM_SA_P Parameter: Treatment Value: 5mM SA vs. No Treatment
  misc_feature: MA Experiment ID: 20000488 Result: Up-regulated in Transcription
  misc_feature: MA Experiment 20000488 PARAMETER Experiment Name: Zm_50mM_NH4NO3_L_to_H_P Parameter: Organism Value: Zea mays
  misc_feature: MA Experiment 20000488 PARAMETER Experiment Name: Zm_50mM_NH4NO3_L_to_H_P Parameter: Timepoint (hr) Value: 8
  misc_feature: MA Experiment 20000488 PARAMETER Experiment Name: Zm_50mM_NH4NO3_L_to_H_P Parameter: Tissue Value: Leaves
  misc_feature: MA Experiment 20000488 PARAMETER Experiment Name: Zm_50mM_NH4NO3_L_to_H_P Parameter: Treatment Value: 50mM NH4NO3 vs. 100mM Mannitol
  misc_feature: MA Experiment ID: 20000492 Result: Down-regulated in Transcription
  misc_feature: MA Experiment 20000492 PARAMETER Experiment Name: Zm_Hybrid_Seed_Dev_P Parameter: DAP Value: 12
  misc_feature: MA Experiment 20000492 PARAMETER Experiment Name: Zm_Hybrid_Seed_Dev_P Parameter: Organism Value: Zea mays
  misc_feature: MA Experiment 20000492 PARAMETER Experiment Name: Zm_Hybrid_Seed_Dev_P Parameter: Plant Line Value: 35A19
  misc_feature: MA Experiment 20000492 PARAMETER Experiment Name: Zm_Hybrid_Seed_Dev_P Parameter: Tissue Value: Fert Kernel vs. Unfert Floret
  misc_feature: MA Experiment ID: 20000535 Result: Down-regulated in Transcription
  misc_feature: MA Experiment 20000535 PARAMETER Experiment Name: Zm_Hybrid_Seed_Dev_P Parameter: DAP Value: 30 vs. 12
  misc_feature: MA Experiment 20000535 PARAMETER Experiment Name: Zm_Hybrid_Seed_Dev_P Parameter: Organism Value: Zea mays
  misc_feature: MA Experiment 20000535 PARAMETER Experiment Name: Zm_Hybrid_Seed_Dev_P Parameter: Plant Line Value: 35A19
  misc_feature: MA Experiment 20000535 PARAMETER Experiment Name: Zm_Hybrid_Seed_Dev_P Parameter: Tissue Value: Embryo vs. Unfert Floret
  misc_feature: MA Experiment ID: 20000626 Result: Down-regulated in Transcription
  misc_feature: MA Experiment 20000626 PARAMETER Experiment Name: Zm_Herbicide-Treatments_P Parameter: Timepoint (hr) Value: 12
  misc_feature: MA Experiment 20000626 PARAMETER Experiment Name: Zm_Herbicide-Treatments_P Parameter: Tissue Value: Aerial
  misc_feature: MA Experiment 20000626 PARAMETER Experiment Name: Zm_Herbicide-Treatments_P Parameter: Treatment Value: Roundup vs. No Treatment
tctcctgctccctggctgcaacggacttgaccactgaaagctaagcacacccctcggccatggcgctcgcgtccacctccgccaccgcgcccgctgccgtgctcaagaccccgttcctcggcgccaggcgcgcgctcgccaatgccgccgcgcccaagcccacgtcgcgccgcgcgctcctcgccgtcgccgcggccgccgccaagaagtcgtggatccccgccttcaagagcgacgccgagttcatcaacccgccctagctcgacggatcgctccctggcgacttcggattcgatccgctggggctgggcaaggacccggcgttcctcaagtggtaccgggaggcggagctgatccacgggcggtgggcgatggccgccgtgctgggcatcttcgtgggacaggcctggagcggcatcccgtggttcgaggccggcgccgacccgggcgccatcgcgcccttctccttcggctcgctgctgggcacgcagctgctgctcatggggtgggtggagtcgaagcggtgggtggacttcttcaacccggactcgcagtccgtcgagtgggccacgccctggtcccgcactgccgagaacttcgccaacttcaccggcgaccagggctacccgggcggcaagttcttcgacccgctcggcctcgccggcaccgtcaaggacggcgtctacgtccccgacgtcgagaagctcgagcggcttaagctggccgagatcaaacacgcccgcatcgccatgcttgccatgctcgttttctacttcgaggccggacagggcaagacgccgctcggcgcgcttggcctatgatctgcatgctgccggccacgacgggtgtcgtgtcatcagtcatccctgtgtgcttgtgctcatcggtcgatcgaatccaccgagctggttctcgattgcgagcgtcgtggtacggctgcatcggatcagacgcatgcaacaaaatgggggattttttttcttcttcttccgtgtatgtaccatgtagtgtatagtagtctggtcatggaaccaattaaggcagaatgagtgagcgagggacatttcgttacattaatctctcattccgccttgctgaattgctatcgtctttcagaaacatagcgatattcctccgaagacc

SEQ ID NO: 9800 - protein, 149 aa, Zea mays subsp. mays
  peptide (1)..(149): Ceres Seq. ID no. 12354215
  misc_feature (1)..(138): Pfam Name: Chlorophyll A-B binding protein Pfam Description: Chlorophyll A-B binding protein
  misc_feature (1)..(149): Homolog of NCBI NO: 7443235 NR Description: chlorophyll a/b-binding apoprotein CP24 precursor
  misc_feature (1)..(149): Homolog of NCBI NO: 115834 NR Description: Chlorophyll A-B binding protein CP24 10B,
  misc_feature (1)..(149): Homolog of NCBI NO: 8954298 NR Description: chlorophyll a/b-binding protein CP24 precursor
  misc_feature (1)..(149): Homolog of NCBI NO: 543939 NR Description: Chlorophyll A-B binding protein CP24, chloroplast
  misc_feature (1)..(149): Homolog of NCBI NO: 115833 NR Description: Chlorophyll A-B binding protein CP24 10A,
  misc_feature (1)..(149): Homolog of NCBI NO: 15218330 NR Description: chlorophyll binding protein, putative; protein At1g15820.1, supported by cDNA: gi_12083257, supported by cDNA: supported by cDNA: gi_20148630, supported by cDNA: gi_4741959
  misc_feature (1)..(149): Homolog of NCBI NO: 25299024 NR Description: chlorophyll a/b-binding protein Lhcb6 [imported] Arabidopsis thaliana >gi|4741960|gb|AAD28777.1|AF134130_1 Lhcb6
  misc_feature (1)..(147): Homolog of NCBI NO: 1076724 NR Description: LHCI-680, photosystem I antenna protein - barley
  misc_feature (1)..(147): Homolog of NCBI NO: 5902596 NR Description: light harvesting complex a protein [Volvox
  misc_feature (1)..(147): Homolog of NCBI NO: 7443233 NR Description: chlorophyll a/b-binding protein type II, I - Lolium temulentum >gi|551047|emb|CAA55864.1| type II LHCI
MAAVLGIFVGQAWSGIPWFEAGADPGAIAPFSFGSLLGTQLLLMGWVESKRWVDFFNPDSQSVEWATPWSRTAENFANFTGDQGYPGGKFFDPLGLAGTVKDGVYVPDVEKLERLKLAEIKHARIAMLAMLVFYFEAGQGKTPLGALGL

SEQ ID NO: 9801 - protein, 106 aa, Zea mays subsp. mays
  peptide (1)..(106): Ceres Seq. ID no. 12354216
  misc_feature (1)..(95): Pfam Name: Chlorophyll A-B binding protein Pfam Description: Chlorophyll A-B binding protein
  misc_feature (1)..(106): Homolog of NCBI NO: 7443235 NR Description: chlorophyll a/b-binding apoprotein CP24 precursor
  misc_feature (1)..(106): Homolog of NCBI NO: 115834 NR Description: Chlorophyll A-B binding protein CP24 10B,
  misc_feature (1)..(106): Homolog of NCBI NO: 8954298 NR Description: chlorophyll a/b-binding protein CP24 precursor
  misc_feature (1)..(106): Homolog of NCBI NO: 543939 NR Description: Chlorophyll A-B binding protein CP24, chloroplast
  misc_feature (1)..(106): Homolog of NCBI NO: 115833 NR Description: Chlorophyll A-B binding protein CP24 10A,
  misc_feature (1)..(106): Homolog of NCBI NO: 15218330 NR Description: chlorophyll binding protein, putative; protein At1g15820.1, supported by cDNA: gi_12083257, supported by cDNA: supported by cDNA: gi_20148630, supported by cDNA: gi_4741959
  misc_feature (1)..(106): Homolog of NCBI NO: 25299024 NR Description: chlorophyll a/b-binding protein Lhcb6 [imported] Arabidopsis thaliana >gi|4741960|gb|AAD28777.1|AF134130_1 Lhcb6
  misc_feature (1)..(104): Homolog of NCBI NO: 1076724 NR Description: LHCI-680, photosystem I antenna protein - barley
  misc_feature (1)..(104): Homolog of NCBI NO: 5902596 NR Description: light harvesting complex a protein [Volvox
  misc_feature (1)..(104): Homolog of NCBI NO: 7443233 NR Description: chlorophyll a/b-binding protein type II, I - Lolium temulentum >gi|551047|emb|CAA55864.1| type II LHCI
MGWVESKRWVDFFNPDSQSVEWATPWSRTAENFANFTGDQGYPGGKFFDPLGLAGTVKDGVYVPDVEKLERLKLAEIKHARIAMLAMLVFYFEAGQGKTPLGALGL

SEQ ID NO: 9802 - DNA, 763 bp, Zea mays subsp. mays
  misc_feature (1)..(763): Ceres Seq. ID no. 12367941
  misc_feature: MA Experiment ID: 108504 Result: Down-regulated in Transcription
  misc_feature: MA Experiment 108504 PARAMETER Experiment Name: Zm_Drought_P Parameter: Age (day) Value: 8
  misc_feature: MA Experiment 108504 PARAMETER Experiment Name: Zm_Drought_P Parameter: Organism Value: Zea mays
  misc_feature: MA Experiment 108504 PARAMETER Experiment Name: Zm_Drought_P Parameter: Plant Line Value: 35A19
  misc_feature: MA Experiment 108504 PARAMETER Experiment Name: Zm_Drought_P Parameter: Timepoint (hr) Value: 12
  misc_feature: MA Experiment 108504 PARAMETER Experiment Name: Zm_Drought_P Parameter: Tissue Value: Aerial
  misc_feature: MA Experiment 108504 PARAMETER Experiment Name: Zm_Drought_P Parameter: Treatment Value: Drought vs. No Drought
  misc_feature: MA Experiment ID: 108522 Result: Down-regulated in Transcription
  misc_feature: MA Experiment 108522 PARAMETER Experiment Name: Zm_42deg_Heat_P Parameter: Age (day) Value: 8
  misc_feature: MA Experiment 108522 PARAMETER Experiment Name: Zm_42deg_Heat_P Parameter: Organism Value: Zea mays
  misc_feature: MA Experiment 108522 PARAMETER Experiment Name: Zm_42deg_Heat_P Parameter: Plant Line Value: 35A19
  misc_feature: MA Experiment 108522 PARAMETER Experiment Name: Zm_42deg_Heat_P Parameter: Temperature (deg C) Value: 42 vs. 22
  misc_feature: MA Experiment 108522 PARAMETER Experiment Name: Zm_42deg_Heat_P Parameter: Timepoint (hr) Value: 1
  misc_feature: MA Experiment 108522 PARAMETER Experiment Name: Zm_42deg_Heat_P Parameter: Tissue Value: Aerial
  misc_feature: MA Experiment ID: 108528 Result: Down-regulated in Transcription
  misc_feature: MA Experiment 108528 PARAMETER Experiment Name: Zm_Imbibed_Seeds_P Parameter: Age (day) Value: 5 vs. 2
  misc_feature: MA Experiment 108528 PARAMETER Experiment Name: Zm_Imbibed_Seeds_P Parameter: Organism Value: Zea mays
  misc_feature: MA Experiment 108528 PARAMETER Experiment Name: Zm_Imbibed_Seeds_P Parameter: Plant Line Value: 35A19
  misc_feature: MA Experiment 108528 PARAMETER Experiment Name: Zm_Imbibed_Seeds_P Parameter: Tissue Value: Aerial vs. Embryo
  misc_feature: MA Experiment ID: 108529 Result: Down-regulated in Transcription
  misc_feature: MA Experiment 108529 PARAMETER Experiment Name: Zm_Imbibed_Seeds_P Parameter: Age (day) Value: 5 vs. 2
  misc_feature: MA Experiment 108529 PARAMETER Experiment Name: Zm_Imbibed_Seeds_P Parameter: Organism Value: Zea mays
  misc_feature: MA Experiment 108529 PARAMETER Experiment Name: Zm_Imbibed_Seeds_P Parameter: Plant Line Value: 35A19
  misc_feature: MA Experiment 108529 PARAMETER Experiment Name: Zm_Imbibed_Seeds_P Parameter: Tissue Value: Roots vs. Embryo
  misc_feature: MA Experiment ID: 108530 Result: Down-regulated in Transcription
  misc_feature: MA Experiment 108530 PARAMETER Experiment Name: Zm_Imbibed_Seeds_P Parameter: Age (day) Value: 6 vs. 2
  misc_feature: MA Experiment 108530 PARAMETER Experiment Name: Zm_Imbibed_Seeds_P Parameter: Organism Value: Zea mays
  misc_feature: MA Experiment 108530 PARAMETER Experiment Name: Zm_Imbibed_Seeds_P Parameter: Plant Line Value: 35A19
  misc_feature: MA Experiment 108530 PARAMETER Experiment Name: Zm_Imbibed_Seeds_P Parameter: Tissue Value: Aerial vs. Embryo
  misc_feature: MA Experiment ID: 108535 Result: Up-regulated in Transcription
  misc_feature: MA Experiment 108535 PARAMETER Experiment Name: Zm_Meristem_P Parameter: Age (day) Value: 8
  misc_feature: MA Experiment 108535 PARAMETER Experiment Name: Zm_Meristem_P Parameter: Organism Value: Zea mays
  misc_feature: MA Experiment 108535 PARAMETER Experiment Name: Zm_Meristem_P Parameter: Plant Line Value: 35A19
  misc_feature: MA Experiment 108535 PARAMETER Experiment Name: Zm_Meristem_P Parameter: Tissue Value: Root Meristem vs. Above Root Meristem
  misc_feature: MA Experiment ID: 108544 Result: Down-regulated in Transcription
  misc_feature: MA Experiment ID: 108547 Result: Down-regulated in Transcription
  misc_feature: MA Experiment 108547 PARAMETER Experiment Name: Zm_Imbibed_Seeds_P Parameter: Age (day) Value: 4 vs. 2
  misc_feature: MA Experiment 108547 PARAMETER Experiment Name: Zm_Imbibed_Seeds_P Parameter: Organism Value: Zea mays
  misc_feature: MA Experiment 108547 PARAMETER Experiment Name: Zm_Imbibed_Seeds_P Parameter: Plant Line Value: 35A19
  misc_feature: MA Experiment 108547 PARAMETER Experiment Name: Zm_Imbibed_Seeds_P Parameter: Tissue Value: Aerial vs. Embryo
  misc_feature: MA Experiment ID: 108556 Result: Down-regulated in Transcription
  misc_feature: MA Experiment 108556 PARAMETER Experiment Name: Zm_Drought_P Parameter: Age (day) Value: 9
  misc_feature: MA Experiment 108556 PARAMETER Experiment Name: Zm_Drought_P Parameter: Organism Value: Zea mays
  misc_feature: MA Experiment 108556 PARAMETER Experiment Name: Zm_Drought_P Parameter: Plant Line Value: 35A19
  misc_feature: MA Experiment 108556 PARAMETER Experiment Name: Zm_Drought_P Parameter: Timepoint (hr) Value: 24
  misc_feature: MA Experiment 108556 PARAMETER Experiment Name: Zm_Drought_P Parameter: Tissue Value: Aerial
  misc_feature: MA Experiment 108556 PARAMETER Experiment Name: Zm_Drought_P Parameter: Treatment Value: Drought vs. No Drought
  misc_feature: MA Experiment ID: 20000487 Result: Up-regulated in Transcription
  misc_feature: MA Experiment 20000487 PARAMETER Experiment Name: Zm_50mM_NH4NO3_L_to_H_P Parameter: Organism Value: Zea mays
  misc_feature: MA Experiment 20000487 PARAMETER Experiment Name: Zm_50mM_NH4NO3_L_to_H_P Parameter: Timepoint (hr) Value: 4
  misc_feature: MA Experiment 20000487 PARAMETER Experiment Name: Zm_50mM_NH4NO3_L_to_H_P Parameter: Tissue Value: Leaves
  misc_feature: MA Experiment 20000487 PARAMETER Experiment Name: Zm_50mM_NH4NO3_L_to_H_P Parameter: Treatment Value: 50mM NH4NO3 vs. 100mM Mannitol
  misc_feature: MA Experiment ID: 20000488 Result: Up-regulated in Transcription
  misc_feature: MA Experiment 20000488 PARAMETER Experiment Name: Zm_50mM_NH4NO3_L_to_H_P Parameter: Organism Value: Zea mays
  misc_feature: MA Experiment 20000488 PARAMETER Experiment Name: Zm_50mM_NH4NO3_L_to_H_P Parameter: Timepoint (hr) Value: 8
  misc_feature: MA Experiment 20000488 PARAMETER Experiment Name: Zm_50mM_NH4NO3_L_to_H_P Parameter: Tissue Value: Leaves
  misc_feature: MA Experiment 20000488 PARAMETER Experiment Name: Zm_50mM_NH4NO3_L_to_H_P Parameter: Treatment Value: 50mM NH4NO3 vs. 100mM Mannitol
  misc_feature: MA Experiment ID: 20000535 Result: Up-regulated in Transcription
  misc_feature: MA Experiment 20000535 PARAMETER Experiment Name: Zm_Hybrid_Seed_Dev_P Parameter: DAP Value: 30 vs. 12
  misc_feature: MA Experiment 20000535 PARAMETER Experiment Name: Zm_Hybrid_Seed_Dev_P Parameter: Organism Value: Zea mays
  misc_feature: MA Experiment 20000535 PARAMETER Experiment Name: Zm_Hybrid_Seed_Dev_P Parameter: Plant Line Value: 35A19
  misc_feature: MA Experiment 20000535 PARAMETER Experiment Name: Zm_Hybrid_Seed_Dev_P Parameter: Tissue Value: Embryo vs. Unfert Floret
  misc_feature: MA Experiment ID: 20000626 Result: Up-regulated in Transcription
  misc_feature: MA Experiment 20000626 PARAMETER Experiment Name: Zm_Herbicide-Treatments_P Parameter: Timepoint (hr) Value: 12
  misc_feature: MA Experiment 20000626 PARAMETER Experiment Name: Zm_Herbicide-Treatments_P Parameter: Tissue Value: Aerial
  misc_feature: MA Experiment 20000626 PARAMETER Experiment Name: Zm_Herbicide-Treatments_P Parameter: Treatment Value: Roundup vs. No Treatment
aggccaccgcagccctagcgcgccgccaccatcaccttcgcagccctagccgccgcctccattgctgctatacccgcaaccatgggtcccgtgctgaagcgcccgaccccgggcacggtgcagtgtttcgggcgcaagaagacggccgtggccgtggcctacacgaagccaggccgggggatgatcaaggtgaacggcgtcccgatcgagctgctccgtcccgagatgctgcggctcaaggccatggagcccgtgctgctggcggggcggtccaggttcaaggacatcgacatgcggatccgcgtgcgcggcggcgggaagacgtcgcagatctacgccatccgccaggccgtcgccaagggtctcgtggcatactaccagaagtacgtcgacgaggcggcgaaaaaggagatcaaggacatcttcatgcgctacgagcgcaccctcctcgtcgccgacccccgccgctgcgagcccaagaagttcggcggccgcggcgcccgcgccaggttccagaagtcctaccgctgagcgccagcgcctgccggaccgctgtcgtggctccgtttagctacgactttacttatttctgataataacatggttggcgattcgtaggcttctcaggctttattttattttattttagtttatcctatttaagtgcaagactagttcctcaaatttagtttatagtatacaccgattggtgatttatatttatgcacttcgtatagcgtttttaatttccatgattatcctt

SEQ ID NO: 9803 - protein, 196 aa, Zea mays subsp. mays
  peptide (1)..(196): Ceres Seq. ID no. 12367942
ATAALARRHHHLRSPSRRLHCCYTRNHGSRAEAPDPGHGAVFRAQEDGRGRGLHEARPGDDQGERRPDRAAPSRDAAAQGHGARAAGGAVQVQGHRHADPRARRREDVADLRHPPGRRQGSRGILPEVRRRGGEKGDQGHLHALRAHPPRRRPPPLRAQEVRRPRRPRQVPEVLPLSASACRTAVVAPFSYDFTYF

SEQ ID NO: 9804 - protein, 149 aa, Zea mays subsp. mays
  peptide (1)..(149): Ceres Seq. ID no. 12367943
  misc_feature (17)..(149): Pfam Name: Ribosomal protein S9/S16 Pfam Description: Ribosomal protein S9/S16
  misc_feature (1)..(149): Homolog of NCBI NO: 1172818 NR Description: 40S RIBOSOMAL PROTEIN S16 >gi|7440266|pir||T04083
  misc_feature (9)..(149): Homolog of NCBI NO: 3122800 NR Description: 40S RIBOSOMAL PROTEIN S16
  misc_feature (8)..(149): Homolog of NCBI NO: 6984222 NR Description: 40S ribosomal protein S16 [Euphorbia esula]
  misc_feature (12)..(149): Homolog of NCBI NO: 1173209 NR Description: 40S RIBOSOMAL PROTEIN S16 >gi|541835|pir||S41193
  misc_feature (12)..(149): Homolog of NCBI NO: 17369864 NR Description: 40S ribosomal protein S16
  misc_feature (7)..(149): Homolog of NCBI NO: 15238809 NR Description: 40S RIBOSOMAL PROTEIN S16; protein id: supported by cDNA: gi_13877830, supported by cDNA: gi_16323499
  misc_feature (7)..(149): Homolog of NCBI NO: 15226676 NR Description: 40S ribosomal protein S16; protein id: supported by cDNA: 29241., supported by cDNA: gi_13926207 thaliana] >gi|25294609|pir||E84489 40S ribosomal protein S16
  misc_feature (7)..(149): Homolog of NCBI NO: 15229252 NR Description: putative 40S ribosomal protein S16; protein id: [Arabidopsis thaliana] >gi|6721162|gb|AAF26790.1|AC016829_14
  misc_feature (12)..(149): Homolog of NCBI NO: 4506691 NR Description: ribosomal protein S16; 40S ribosomal protein S16 sapiens] >gi|27676542|ref|XP_214829.1| similar to ribosomal
  misc_feature (12)..(149): Homolog of NCBI NO: 39850096 NR Description: Unknown (protein for IMAGE:6887619) [Rattus
MGPVLKRPTPGTVQCFGRKKTAVAVAYTKPGRGMIKVNGVPIELLRPEMLRLKAMEPVLLAGRSRFKDIDMRIRVRGGGKTSQIYAIRQAVAKGLVAYYQKYVDEAAKKEIKDIFMRYERTLLVADPRRCEPKKFGGRGARARFQKSYR

SEQ ID NO: 9805 - protein, 116 aa, Zea mays subsp. mays
  peptide (1)..(116): Ceres Seq. ID no. 12367944
  misc_feature (1)..(116): Pfam Name: Ribosomal protein S9/S16 Pfam Description: Ribosomal protein S9/S16
  misc_feature (1)..(116): Homolog of NCBI NO: 1172818 NR Description: 40S RIBOSOMAL PROTEIN S16 >gi|7440266|pir||T04083
  misc_feature (1)..(116): Homolog of NCBI NO: 3122800 NR Description: 40S RIBOSOMAL PROTEIN S16
  misc_feature (1)..(116): Homolog of NCBI NO: 6984222 NR Description: 40S ribosomal protein S16 [Euphorbia esula]
  misc_feature (1)..(116): Homolog of NCBI NO: 1173209 NR Description: 40S RIBOSOMAL PROTEIN S16 >gi|541835|pir||S41193
  misc_feature (1)..(116): Homolog of NCBI NO: 17369864 NR Description: 40S ribosomal protein S16
  misc_feature (1)..(116): Homolog of NCBI NO: 15238809 NR Description: 40S RIBOSOMAL PROTEIN S16; protein id: supported by cDNA: gi_13877830, supported by cDNA: gi_16323499
  misc_feature (1)..(116): Homolog of NCBI NO: 15226676 NR Description: 40S ribosomal protein S16; protein id: supported by cDNA: 29241., supported by cDNA: gi_13926207 thaliana] >gi|25294609|pir||E84489 40S ribosomal protein S16
  misc_feature (1)..(116): Homolog of NCBI NO: 15229252 NR Description: putative 40S ribosomal protein S16; protein id: [Arabidopsis thaliana] >gi|6721162|gb|AAF26790.1|AC016829_14
  misc_feature (1)..(116): Homolog of NCBI NO: 4506691 NR Description: ribosomal protein S16; 40S ribosomal protein S16 sapiens] >gi|27676542|ref|XP_214829.1| similar to ribosomal
  misc_feature (1)..(116): Homolog of NCBI NO: 39850096 NR Description: Unknown (protein for IMAGE:6887619) [Rattus
MIKVNGVPIELLRPEMLRLKAMEPVLLAGRSRFKDIDMRIRVRGGGKTSQIYAIRQAVAKGLVAYYQKYVDEAAKKEIKDIFMRYERTLLVADPRRCEPKKFGGRGARARFQKSYR
